United States Patent Application Publication US 2023/0026259 A1 - sequence listing, part 87

SEQ ID NO: 194378 - DNA, 3109 bp, Homo sapiens
  Payload ID: 18414
  Gene Name: transmembrane protein 87A
  Uniprot ID: Q8NBN3
  ENST ID: ENST00000389834
  CDS Start-End: 266-1933
agaaaagactcaggccaggctggcatgtagcgatctctctaacccagctgaccaggttccaacaggatgacgcctgcgcagtaggtccaaagtctcacggcgcacagacgactgtctgagagaggggccgctacgccgcacagcaaacaagctccgcgacgtttccaggacccggataatcccgcccttagagcagagccggaagaaggcgggacgaaccggaagagggtgaaatgctttcggtaggcactccacggctgtgaagatggcggcggctgcgtggcttcaggtgttgcctgtcattcttctgcttctgggagctcacccgtcaccactgtcgtttttcagtgcgggaccggcaaccgtagctgctgccgaccggtccaaatggcacattccgataccgtcggggaaaaattattttagttttggaaagatcctcttcagaaataccactatcttcctgaagtttgatggagaaccttgtgacctgtctttgaatataacctggtatctgaaaagcgctgattgttacaatgaaatctataacttcaaggcagaagaagtagagttgtatttggaaaaacttaaggaaaaaagaggcttgtctgggaaatatcaaacatcatcaaaattgttccagaactgcagtgaactctttaaaacacagaccttttctggagattttatgcatcgactgcctcttttaggagaaaaacaggaggctaaggagaatggaacaaaccttacctttattggagacaaaaccgcaatgcatgaaccattgcaaacttggcaagatgcaccatacatttttattgtacatattggcatttcatcctcaaaggaatcatcaaaagaaaattcactgagtaatctttttaccatgactgttgaagtgaagggtccctatgaatacctcacacttgaagactatcccttgatgatttttttcatggtgatgtgtattgtatatgtcctgtttggtgttctgtggctggcatggtctgcctgctactggagagatctcctgagaattcagttttggattggtgctgtcatcttcctgggaatgcttgagaaagctgtcttctatgcggaatttcagaatatccgatacaaaggagaatctgtccagggtgctttgatccttgcagagctgctttcagcagtgaaacgctcactggctcgaaccctggtcatcatagtcagtctgggatatggcatcgtcaagccacgccttggagtcactcttcataaggttgtagtagcaggagccctctatcttttgttctctggcatggaaggggtcctcagagttactggggcccagactgatcttgcttccttggcctttatccccttggctttcctagacactgccttgtgctggtggatatttattagcctgactcaaacaatgaagctattaaaacttcggaggaacattgtaaaactctctttgtatcggcatttcaccaacacgcttattttggcagtggcagcatccattgtgtttatcatctggacaaccatgaagttcagaatagtgacatgtcagtcggactggcgggagctgtgggtagacgatgccatctggcgcttgctgttctccatgatcctctttgtcatcatggttctctggcgaccatctgcaaacaaccagaggtttgccttttcaccattgtctgaggaagaggaggaggatgaacaaaaggagcctatgctgaaagaaagctttgaaggaatgaaaatgagaagtaccaaacaagaacccaatggaaatagtaaagttaacaaagcacaggaagatgatttgaagtgggtagaagagaatgttccttcttctgtgacagatgtagcacttccagcccttctggattcagatgaggaacgaatgatcacacactttgaaaggtccaaaatggagtaaggaatgggaagatttgcagttaaagatggctaccatcagggaagagatcagcatctgtgtcagtcttctgtacggctccatgggattaaaggaagcaatgacatcctgatctgttccttgatctttgggcattggagttggcgagaggtgtcagaacaaagagaacatcttactgaaaacaagttcataagatgagaaaaatctacgagcttcttatttacaacactgctgccccctttcctcccagactctgacatggatgttcatgcaacttaagtgtgttgttcctgaactttctgtaatgtttcattttttaaatctgacaaactaaaaagtttaacgtcttctaaaagattgtcatcaacaccataatatgtaatctccaggagcaactgcctgtaatttttatttatttagggagttacataggtgatgggggaaattgttaactacctttcattttcctgggaagtcaaggttacatcttgcagaggttgttttgagaaaaaagggcccttctgagttaaggagccatagttctatcaatgatcaaaagaaaaaaaaaaaaagagaaactgttacagtatgattcagatcatttaaaaaagcaaaatcaagtgcaattttgtttacaaatggtgtatattaaagatttttctatttcagatgtactttaaagagaaatattagcttaactcttttgacatctgctattgtgacacatcccattgctggcaatgtggtgcacactccgaaacttttaactactgttttgtaagcctccaagggtggcattgcagggtccttaggcaatgttttgtttgcctttatgcagagaggtgctccaagtgctgtgattgagcaccgtgctagaggaactgtaatgcttcagaagttgtagcttatacaaaggaaacaggtcctgctggcttaatttaaacagttattgcatgaagtagcgtggaggccctggactgctgctcgttctttaggatggactgttctggtatctggtattggtttagagactgttaataagggacatcacaaggtgatgggattcatttgaagcactctatttctgttttaatggttttatccaattttgccttcccaagatttttgttctacataaaaagttcatgccactttttaatataaaaaaatttaacaaaa

SEQ ID NO: 194379 - DNA, 3049 bp, Homo sapiens
  Payload ID: 18414
  Gene Name: transmembrane protein 87A
  Uniprot ID: Q8NBN3
  ENST ID: ENST00000448392
  CDS Start-End: 309-1793
agtaggtccaaagtctcacggcgcacagacgactgtctgagagaggggccgctacgccgcacagcaaacaagctccgcgacgtttccaggacccggataatcccgcccttagagcagagccggaagaaggcgggacgaaccggaagagggtgaaatgctttcggtaggcactccacggctgtgaagatggcggcggctgcgtggcttcaggtgttgcctgtcattcttctgcttctgggagctcacccgtcaccactgtcgtttttcagtgcgggaccggcaaccgtagctgctgccgaccggtccaaatggcacattccgataccgtcgttgatggagaaccttgtgacctgtctttgaatataacctggtatctgaaaagcgctgattgttacaatgaaatctataacttcaaggcagaagaagtagagttgtatttggaaaaacttaaggaaaaaagaggcttgtctgggaaatatcaaacatcatcaaaattgttccagaactgcagtgaactctttaaaacacagaccttttctggagattttatgcatcgactgcctcttttaggagaaaaacaggaggctaaggagaatggaacaaaccttacctttattggagacaaaaccgcaatgcatgaaccattgcaaacttggcaagatgcaccatacatttttattgtacatattggcatttcatcctcaaaggaatcatcaaaagaaaattcactgagtaatctttttaccatgactgttgaagtgaagggtccctatgaatacctcacacttgaagactatcccttgatgatttttttcatggtgatgtgtattgtatatgtcctgtttggtgttctgtggctggcatggtctgcctgctactggagagatctcctgagaattcagttttggattggtgctgtcatcttcctgggaatgcttgagaaagctgtcttctatgcggaatttcagaatatccgatacaaaggagaatctgtccagggtgctttgatccttgcagagctgctttcagcagtgaaacgctcactggctcgaaccctggtcatcatagtcagtctgggatatggcatcgtcaagccacgccttggagtcactcttcataaggttgtagtagcaggagccctctatcttttgttctctggcatggaaggggtcctcagagttactggggcccagactgatcttgcttccttggcctttatccccttggctttcctagacactgccttgtgctggtggatatttattagcctgactcaaacaatgaagctattaaaacttcggaggaacattgtaaaactctctttgtatcggcatttcaccaacacgcttattttggcagtggcagcatccattgtgtttatcatctggacaaccatgaagttcagaatagtgacatgtcagtcggactggcgggagctgtgggtagacgatgccatctggcgcttgctgttctccatgatcctctttgtcatcatggttctctggcgaccatctgcaaacaaccagaggtttgccttttcaccattgtctgaggaagaggaggaggatgaacaaaaggagcctatgctgaaagaaagctttgaaggaatgaaaatgagaagtaccaaacaagaacccaatggaaatagtaaagttaacaaagcacaggaagatgatttgaagtgggtagaagagaatgttccttcttctgtgacagatgtagcacttccagcccttctggattcagatgaggaacgaatgatcacacactttgaaaggtccaaaatggagtaaggaatgggaagatttgcagttaaagatggctaccatcagggaagagatcagcatctgtgtcagtcttctgtacggctccatgggattaaaggaagcaatgacatcctgatctgttccttgatctttgggcattggagttggcgagaggtgtcagaacaaagagaacatcttactgaaaacaagttcataagatgagaaaaatctacgagcttcttatttacaacactgctgccccctttcctcccagactctgacatggatgttcatgcaacttaagtgtgttgttcctgaactttctgtaatgtttcattttttaaatctgacaaactaaaaagtttaacgtcttctaaaagattgtcatcaacaccataatatgtaatctccaggagcaactgcctgtaatttttatttatttagggagttacataggtgatgggggaaattgttaactacctttcattttcctgggaagtcaaggttacatcttgcagaggttgttttgagaaaaaagggcccttctgagttaaggagccatagttctatcaatgatcaaaagaaaaaaaaaaaaagagaaactgttacagtatgattcagatcatttaaaaaagcaaaatcaagtgcaattttgtttacaaatggtgtatattaaagatttttctatttcagatgtactttaaagagaaatattagcttaactcttttgacatctgctattgtgacacatcccattgctggcaatgtggtgcacactccgaaacttttaactactgttttgtaagcctccaagggtggcattgcagggtccttaggcaatgttttgtttgcctttatgcagagaggtgctccaagtgctgtgattgagcaccgtgctagaggaactgtaatgcttcagaagttgtagcttatacaaaggaaacaggtcctgctggcttaatttaaacagttattgcatgaagtagcgtggaggccctggactgctgctcgttctttaggatggactgttctggtatctggtattggtttagagactgttaataagggacatcacaaggtgatgggattcatttgaagcactctatttctgttttaatggttttatccaattttgccttcccaagatttttgttctacataaaaagttcatgccactttttaatataaaaaaatttaacaaaattaatgtatttttctcatttttttcaaactttttctaaagactctttctgtcaaactcatgaaaaatttctttctatggc

SEQ ID NO: 194380 - DNA, 581 bp, Homo sapiens
  Payload ID: 18414
  Gene Name: transmembrane protein 87A
  ENST ID: ENST00000566474
  CDS Start-End: 465-581
ctttttcttcctctgcacttcttggtccctgggtaattctgcttacgagatggttcgacttcgcttcaactttggaatggctattctaagctttactgtgtgactagaaagcatagagatttaagaaatgtgttttaacatgggaatggttaaaattgaagaaatagtacttaaaatttaatgtggggaaaaattattttagttttggaaagatcctcttcagaaataccactatcttcctgaagtttgatggagaaccttgtgacctgtctttgaatataacctggtatctgaaaagcgctgattgttacaatgaaatctataacttcaaggcagaagaagtagagttgtatttggaaaaacttaaggaaaaaagaggcttgtctgggaaatatcaaacatcatcaaaattgttccagaactgcagtgaactctttaaaacacagaccttttctggagattttatgcatcgactgcctcttttaggagaaaaacaggaggctaaggagaatggaacaaaccttacctttattggagacaaaaccgcaatgcatgaaccattgcaaacttggcaagatgca

SEQ ID NO: 194381 - DNA, 905 bp, Homo sapiens
  Payload ID: 18414
  Gene Name: transmembrane protein 87A
  ENST ID: ENST00000568400
  CDS Start-End: 396-905
ctgtgattaggctagcgggaatgtaagggccacttcagcaacagaaaggagtggtggagcggcttctcatcagaaaaacagaactttcagtgcctgacttgagatgtaaacttgatgggaaaaattattttagttttggaaagatcctcttcagaaataccactatcttcctgaagtttgatggagaaccttgtgacctgtctttgaatataacctggtatctgaaaagcgctgattgttacaatgaaatctataacttcaaggcagaagaagtagagttgtatttggaaaaacttaaggaaaaaagaggcttgtctgggaaatatcaaacatcatcaaaattgttccagaactgcagtgaactctttaaaacacagaccttttctggagattttatgcatcgactgcctcttttaggagaaaaacaggaggctaaggagaatggaacaaaccttacctttattggagacaaaaccgcaatgcatgaaccattgcaaacttggcaagatgcaccatacatttttattgtacatattggcatttcatcctcaaaggaatcatcaaaagaaaattcactgagtaatctttttaccatgactgttgaagtgaagggtccctatgaatacctcacacttgaagactatcccttgatgatttttttcatggtgatgtgtattgtatatgtcctgtttggtgttctgtggctggcatggtctgcctgctactggagagatctcctgagaattcagttttggattggtgctgtcatcttcctgggaatgcttgagaaagctgtcttctatgcggaatttcagaatatccgatacaaaggagaatctgtccagggtgctttgatccttgcagagctgctttcagcagtgaaacgctcactggctcgaaccctg

SEQ ID NO: 194382 - DNA, 867 bp, Homo sapiens
  Payload ID: 18414
  Gene Name: transmembrane protein 87A
  ENST ID: ENST00000563371
  CDS Start-End: 536-867
ggagcggcttctcatcagaaaaacagaactttcagtgcctgacttgagatgtaaacttgatgtacaaacggagagttgtttatctttcagatgtttcacagaatccagtgtccccgggttggataagaaagatatgggaaaaattattttagttttggaaagatcctcttcagaaataccactatcttcctgaagtttgatggagaaccttgtgacctgtctttgaatataacctggtatctgaaaagcgctgattgttacaatgaaatctataacttcaaggcagaagaagtagagttgtatttggaaaaacttaaggaaaaaagaggcttgtctgggaaatatcaaacatcatcaaaattgttccagaactgcagtgaactctttaaaacacagactaggaggattggttggtcttttcttggatttgattatggaaagctacctgatgcatctggttgctggaggctgactacttttagatgtgctgtaatctttccagggtcttggcttattgaccttttctggagattttatgcatcgactgcctcttttaggagaaaaacaggaggctaaggagaatggaacaaaccttacctttattggagacaaaaccgcaatgcatgaaccattgcaaacttggcaagatgcaccatacatttttattgtacatattggcatttcatcctcaaaggaatcatcaaaagaaaattcactgagtaatctttttaccatgactgttgaagtgaagggtccctatgaatacctcacacttgaagactatcccttgatgatttttttcatggtgatgtgtattgtatatgtcctgtttggtgttctgtggctggcatggtctgcctgctactg

SEQ ID NO: 194383 - DNA, 1369 bp, Homo sapiens
  Payload ID: 18414
  Gene Name: transmembrane protein 87A
  ENST ID: ENST00000569075
  CDS Start-End: 35-208
aaatgctttcggtaggcactccacggctgtgaagatggcggcggctgcgtggcttcaggtgttgcctgtcattcttctgcttctgggagctcacccgtcaccactgtcgtttttcagtgcgggaccggcaaccgtagctgctgccgaccggtccaaatggcacattccgataccgtcgttgatggagaaccttgtgacctgtctttgaatataacctggtatctgaaaagcgctgattgttacaatgaaatctataacttcaaggcagaagaagtagagttgtatttggaaaaacttaaggaaaaaagaggcttgtctgggaaatatcaaacatcatcaaaattgttccagaactgcagtgaactctttaaaacacagaccttttctggagattttatgcatcgactgcctcttttaggagaaaaacaggaggctaaggagaatggaacaaaccttacctttattggagacaaaaccgcaatgcatgaaccattgcaaacttggcaagatgcaccatacatttttattgtacatattggcatttcatcctcaaaggaatcatcaaaagaaaattcactgagtaatctttttaccatgactgttgaagtgaagggtccctatgaatacctcacacttgaagactatcccttgatgatttttttcatggtgatgtgtattgtatatgtcctgtttggtgttctgtggctggcatggtctgcctgctactggagagatctcctgagaattcagttttggattggtgctgtcatcttcctgggaatgcttgagaaagctgtcttctatgcggaatttcagaatatccgatacaaaggagaatctgtccagggtgctttgatccttgcagagctgctttcagcagtgaaacgctcactggctcgaaccctggtcatcatagtcagtctgggatatggcatcgtcaagccacgccttggagtcactcttcataaggttgtagtagcaggagccctctatcttttgttctctggcatggaaggggtcctcagagttactggggttagtactgcttaatctcattttctgtggtcagttcaattatattgtttacatcttgacagtgtggattggaaatgtctgtgggcttctttctgtttgctttaagtcacttttgggctctgattttcaaaatatatgtatagttcatgttctcttttaaatctattagagctttgtaaatttagtgtgtgcccgaatgaatgcttttccacctgtctccaaattgctaattgttttagttcctcctcccaagcagtagacttgcatttttttttctttttctaatcaatggaatccagactgaaatccagactgaaattcttgtgtaaatggc

SEQ ID NO: 194384 - DNA, 750 bp, Homo sapiens
  Payload ID: 18414
  Gene Name: transmembrane protein 87A
  ENST ID: ENST00000568432
  CDS Start-End: 470-592
ctgtgattaggctagcgggaatgtaagggccacttcagcaacagaaaggagtggtggagcggcttctcatcagaaaaacagaactttcagtgcctgacttgagatgtaaacttgatgtacaaacggagagttgtttatctttcagatgtttcacagaatccagtgtccccgggttggataagaaagatatgggaaaaattattttagttttggaaagatcctcttcagaaataccactatcttcctgaagtttgatggagaaccttgtgacctgtctttgaatataacctggtatctgaaaagcgctgattgttacaatgaaatctataacttcaaggcagaagaagtagagttgtatttggaaaaacttaaggaaaaaagaggcttgtctgggaaatatcaaacatcatcaaaattgttccagaactgcagtgaactctttaaaacacagaccttttctggagattttatgcatcgactgcctcttttaggagaaaaacaggaggctaaggagaatggaacaaaccttacctttattggagacaaaaccattcagatgcctttcttgaagaaacatttcttggattgttgaaagactttaataatttccaaagttccaaaagttgattttgatagtttttgccagtgttttcgttgcttttatggatgagtagattttcagagtttcttattctgccattctgaaagtgttctcactacctaaaccccagttttatttgtacagaattt

SEQ ID NO: 194385 - DNA, 583 bp, Homo sapiens
  Payload ID: 18414
  Gene Name: transmembrane protein 87A
  ENST ID: ENST00000566014
  CDS Start-End: 1-583
cttctatgcggaatttcagaatatccgatacaaaggagaatctgtccagggtgctttgatccttgcagagctgctttcagcagtgaaacgctcactggctcgaaccctggtcatcatagtcagtctgggatatggcatcgtcaagccacgccttggagtcactcttcataaggttgtagtagcaggagccctctatcttttgttctctggcatggaaggggtcctcagagttactgggtatttttcttatcccttgactctgatagtaaacctggccctctcagcaattgacgcctgtgttattttatggatatttattagcctgactcaaacaatgaagctattaaaacttcggaggaacattgtaaaactctctttgtatcggcatttcaccaacacgcttattttggcagtggcagcatccattgtgtttatcatctggacaaccatgaagttcagaatagtgacatgtcagtcggactggcgggagctgtgggtagacgatgccatctggcgcttgctgttctccatgatcctctttgtcatcatggttctctggcgaccatctgcaaacaaccagagg

SEQ ID NO: 194386 - DNA, 528 bp, Homo sapiens
  Payload ID: 18414
  Gene Name: transmembrane protein 87A
  ENST ID: ENST00000561578
  CDS Start-End: 266-528
tataacatgttactgtactgaatgctataggtggttgtaacacaatgttgatggagaaccttgtgacctgtctttgaatataacctggtatctgaaaagcgctgattgttacaatgaaatctataacttcaaggcagaagaagtagagttgtatttggaaaaacttaaggaaaaaagaggcttgtctgggaaatatcaaacatcatcaaaattgttccagaactgcagtgaactctttaaaacacagaccttttctggagattttatgcatcgactgcctcttttaggagaaaaacaggaggctaaggagaatggaacaaaccttacctttattggagacaaaaccgcaatgcatgaaccattgcaaacttggcaagatgcaccatacatttttattgtacatattggcatttcatcctcaaaggaatcatcaaaagaaaattcactgagtaatctttttaccatgactgttgaagtgaagggtccctatgaatacctcacacttgaagactatcccttgatgattgt

SEQ ID NO: 194387 - DNA, 5212 bp, Homo sapiens
  Payload ID: 18415
  Gene Name: transmembrane protein 87B
  Uniprot ID: Q96K49
  ENST ID: ENST00000283206
  CDS Start-End: 370-2037
gcgctcgggctgccagccctcccttgcacgttccggctcctcttctatcttcacgcccacgctaggccctgagcccagcctccacgtctcgccgccaactccacatcctggctcctatctctgccttccaggcatctcccagctgcacgctcgggcccggctcagagccctaagccctgcctcccggtcctggccgggtttcccagaactgcacggcgcctctccgcccaggcccaagcgcgagcccctcctccacacccgagtccgagccccgcgtcccggattcggacccgcctgcctggggcggtgctgcaccaggtgcgggtgtggcaggcgtctcggagcgccaggtgcagcttcctggtcaagatggtcgccgcctgccgctcggtagccgggctcctgccacgccgccgccgctgctttcccgcccgggccccgctgctgcgcgtcgccctctgcctcctgtgctggaccccggcggctgtgcgcgcggtccctgagctcgggctctggttagagacagtcaacgacaaatcaggacctttgatatttaggaaaactatgtttaactctacagatatcaagttatctgttaagtcattccattgttctgggcctgtgaagtttaccatagtgtggcatttgaagtatcatacctgtcacaatgagcattctaatctggaagagctgttccaaaaacataaacttagtgttgatgaagacttttgtcattatttgaagaatgacaactgttggacaacaaaaaatgaaaacttagattgcaacagtgattcacaggtgtttccctctttgaataataaagaactaataaatatcagaaatgtttcaaaccaggaaagatcaatggatgttgtagccagaacacaaaaagatgggtttcatatctttattgtttctattaaaacggagaatacagatgcaagctggaatttgaatgtttctctttctatgattgggcctcatggatatatctctgcatcagattggcccctaatgattttttacatggtgatgtgtattgtttatatattatatggcatactctggctgacgtggtctgcctgttattggaaagatatattaagaatccagttctggattgcagctgttatttttttgggaatgcttgaaaaagcagttttttatagtgaataccaaaacatcagcaacactggactgtcaacccaaggcttattgatatttgcggagttgatttctgcgattaagaggacgttggctcgccttctcgtgatcattgtgagcctgggctatggcattgtgaagcctcgtttaggaacagtcatgcaccgggtgatcggactggggcttctatacttaatctttgcagctgttgaaggcgtgatgagagtcattgggggttctaaccatttagctgttgttcttgatgacattattttagcagttattgactccatttttgtgtggttcatttttattagtttggcacaaactatgaagaccctaaggctaagaaagaacactgtgaaattttcattatatagacattttaaaaatactctgatctttgctgtgctggcttctatagtgtttatggggtggacaactaagacatttagaattgcaaaatgccaatcagattggatggaacgctgggttgacgatgcattttggagcttccttttttcgcttatccttattgtaatcatgtttttgtggagaccatcagcaaacaatcagagatatgccttcatgcccttaatagatgattctgatgatgaaattgaggaattcatggtaacttctgaaaatttaaccgaaggaataaaattaagagcctcaaaatcagtttccaatggaacagctaagcctgccacttctgagaactttgatgaagatttgaagtgggtagaagaaaatattccctcttcattcacagatgtagctcttccagtgttagtggattcagatgaggaaatcatgaccagatctgaaatggctgaaaaaatgttctcttcagaaaagataatgtgattggaacccgtataagaaatgtagttaagcctgaaggactatccttcatcaagactgaaagtgagctttgatttgatattgcctaaaaatttttattgtgttatcttggaagtctgtgtatcaaaatgaagaattcagatggtaggaggttctatagtccttttaaagctgactcttgagtgtcagttgaatatccattaaattggatttggaaataacctgaggaaagtattatgataaagatctgcacagatgcctcttagctgataggtggcaggcctgtgggtttgggttctccctcttttctctggaacatatgacaattccagattaaagaaaaatgttttttaataaatacccttggtctttcttctagtcacctttgaggtagatattgtgattttctggagtatagtatatccgtgtctctgtgtcttaggtttactagatgcaataatacttctctttgacatttgtactgaagtgatttgatattaagtaaaacagttaatgtttgaatataggcatatttataggttttttccgctcccccccaacccaccctttttaaaaaatctatacaaagcccttgtttgagtctcatcatgcacatcaaatcatggagttaggtcttctctgagctcaggggaacacaagtgcacagagagagatgtcttgagggtcactaccaaagaattaccctcattgtccctcactcaggccatgtgtacatgcgatgctgctgagtgtgctggggtgggtggtggccacgtggctcccccagagcacttcctaactggcaagctgggagacccattactggtgaactttgtggaaattagaactgtatcttttacataatcttggcatattacatttcataataaaaacatacatttagttgcatgctacatcactattgattttataattaatttcttaagcttcaaccatgttttataccttatttcgttacatcatatatttgtaatgtgtaatatgaaatcttttgctttaatgtctttttttaaaatgtagaatgttctaaacttgaaaggcaattgaatgtagtatgatgaaaatgtgaatgttttgctgctttcatgaccaaagatacagggctagtggacatttagaataataattaaagctagagtcttgtatgtcttttctttgaaggagttctaaccttgtaaattgagaatgacttcagagaattttgattaagaaaacattaaaatcttaaccggcacaaacactccaatttttttcactgtgaagccgcaagcaattttttttctttttctttcaaaagcctaccttctgaatttatttcttgtttactcatttcagagagggtagtaaagaagatctatttctggtagtcatatcgcttgaaaggtattggtaaatgtgttttcagtcgtgaccatgtggaaagtgaacagtgttggcaaacattaccgagaaaatcatgcttttcaagatgcccttgctttgggatatccttcctagggagaaaaaaaaaaagtagtttaacaattgtgaattccatttcttatttcagtttctgctgcagtaatgggttcccacccactataattcccagcatttatgttctgttgtattctccccttagcccagtaacatttttatctaataccccattccccaagttttgagacagattgaccccctactcattatgtggctctagttgaattttaaaatgtggaatattgggcttgcaggcagtaggagctgcaaatctggtagagtgggagtgtggagttaatggtgagtatgttaataaagggaaactgtctctgacagaatctcagtaatgtttaccaaaacatgtctttctacagctggtaggataaatgatgctaccctgtagctcagctacaggctgcagtgcaaacttttcttccatccagagaaagcagaattccctcctagtaacctcattacaaatactgttactagaagggcatgtgctgtctgtcaccttcagtaatatttgtgccatctcttgatgactgatgacctggatcgagtatttctatgaagggtcttcttaggccccttacatacgcaagaggggtgctctagtgccatagctgtagttcacaggaaggacaccaggagaagttatacctagggctactgagcagctcatcatccctgtttctgcacagtttcctgaaactggccatcagggcctctgaggcactcaaatcagtttacttttagcatgcccccatcagggtgggtctcactgttagtgaggatacgggtctggtttgatgtttttctaggcaaaatgcttaagtgttctggttatgccattcattcatacgatgtgtgaaatttgcttaaaagggaattttcatgatttgatttagattagtatttaaatatctgctttagatagcaattaattttattgtaaaaataaggaaaaatatgtgaatatgtgaattttttaagcctgagagatgatagaatgttcccatatttttcttgtaaagaaaataatattttaacttacacatcctgtagaaaataccaccttttccccttgtattacagtacaatgtttacattactatactgtcaagctgaaagtataaaaaatgtacatatacattttgagttatgtatcctttttttaaaaaaaagttcgagtctgttgcactaggctgtacatgactaaagttgacagatgctatgctagatttataatcactagttctggtacttgtgtctttgtatgatcaaagcatgcaataagcaatacaaaataccaagccttatacttaaaagaagtttaacatattggttaatatactggttaatatactggttaaacatattgaatgtatataagtggcaaaactagatttttaaggaagtgtacattataatattggagctcagtactgcatgaagagacttcattaaaactaagaaaacatttatttggggagaaattttaggcatttaagaacttgtatttttctattttaaaaagttaaattattccgtaatttggaagaagtttcgttgaatgtaggacataaccgtttgaagggttttcatttgaaaaattgatgtattttgtgccttaatattttgttcttttaataaaaatgctctgaatttgaatgat

SEQ ID NO: 194388 - DNA, 552 bp, Homo sapiens
  Payload ID: 18415
  Gene Name: transmembrane protein 87B
  ENST ID: ENST00000452614
  CDS Start-End: 1-552
ccctgagctcgggctctggttagagacagtcaacgacaaatcaggacctttgatatttaggaaaactatgtttaactctacagatatcaagttatctgttaagtcattccattgttctgggcctgtgaagtttaccatagtgtggcatttgaagtatcatacctgtcacaatgagcattctaatctggaagagctgttccaaaaacataaacttagtgttgatgaagacttttgtcattatttgaagaatgacaactgttggacaacaaaaaatgaaaacttagattgcaacagtgattcacaggtgtttccctctttgaatgatgttgtagccagaacacaaaaagatgggtttcatatctttattgtttctattaaaacggagaatacagatgcaagctggaatttgaatgtttctctttctatgattgggcctcatggatatatctctgcatcagattggcccctaatgattttttacatggtgatgtgtattgtttatatattatatggcatactctggctgacgtggtctgcctgttattggaaaga

SEQ ID NO: 194389 - DNA, 461 bp, Homo sapiens
  Payload ID: 18415
  Gene Name: transmembrane protein 87B
  ENST ID: ENST00000452029
  CDS Start-End: 1-337
ccctgagctcgggctctggttagagacagtcaacgacaaatcaggacctttgatatttaggaaaactatgtttaactctacagatatcaagttatctgttaagtcattccattgttctgggcctgtgaagtttaccatagtgtggcatttgaagtatcatacctgtcacaatgagcattctaatctggaagagctgttccaaaaacataaacttagtgttgatgaagacttttgtcattatttgaagaatgacaactgttggacaacaaaaaatgaaaacttagattgcaacagtgattcacaggtgtttccctctttgaattttctctttctatgattgggcctcatggatatatctctgcatcagattggcccctaatgattttttacatggtgatgtgtattgtttatatattatatggcatactctggctgacgtggtctgcctgttattggaaaga

SEQ ID NO: 194390 - DNA, 875 bp, Homo sapiens
  Payload ID: 18416
  Gene Name: transmembrane protein 88
  Uniprot ID: Q6PEY1
  ENST ID: ENST00000301599
  CDS Start-End: 11-490
caggcgggccatggcggatgtccccggggcacagcgagcggttcctggtgacggcccagagccccgggaccccctggactgttgggcctgcgctgttcttgtaacagcccagaatctgctggtggctgccttcaatcttctcctgctggtgctggtgctagggaccatcttgctacccgctgtcaccatgctgggcttcggcttcctctgccactctcagttcctgcgctcccaggcacccccttgcaccgcgcacctgcgggaccccggtttcacggccctactggtcaccggattcctgctcctcgtgccgctgctcgtgcttgctctggccagctaccgccgcctctgcctgcgcctccgcctagccgattgcctcgtgccctacagccgagccctttatcggcgtcggcgcgccccgcagccgcggcaaatccgggcctcaccagggtcccaggccgttcccacatcaggaaaggtctgggtctaatgaccctcgagtcaagaacaaccctgacggctgccctccctcttattcggcccaaggacttgaagcccggcatcttccgacctgccctgcccccacccctgcctgagcggagtcctagcatccccttgggagcagcagcgtcagtggacccagtgctgagaaaagcccccacatcccggaaaacccactttcctttcacgacccacatctcaatcctgaacatctaggctggaacctgcacacctccccctcagctccgtcgtgaatgggacaacaatctcgtgccctcgttttatggtgcagcttctctagtatttctggggctggggggcggggctggaggggaaggagtgtccacgcatcaataaagatttaacgaactgaa

SEQ ID NO: 194391 - DNA, 510 bp, Homo sapiens
  Payload ID: 18416
  Gene Name: transmembrane protein 88
  ENST ID: ENST00000574668
  CDS Start-End: 10-390
aggcgggccatggcggatgtccccggggcacagcgagcggttcctggtgacggcccagagccccgggaccccctggactgttgggcctgcgctgttcttgtaacagcccagaatctgctggtggctgccttcaatcttctcctgctggtgctggtgctagggaccatcttgctacccgctgtcaccatgctgggcttcggcttcctctgccactctcaggacttgaagcccggcatcttccgacctgccctgcccccacccctgcctgagcggagtcctagcatccccttgggagcagcagcgtcagtggacccagtgctgagaaaagcccccacatcccggaaaacccactttcctttcacgacccacatctcaatcctgaacatctaggctggaacctgcacacctccccctcagctccgtcgtgaatgggacaacaatctcgtgccctcgttttatggtgcagcttctctagtatttctggggctggggggcggggctggaggggaa

SEQ ID NO: 194392 - DNA, 492 bp, Homo sapiens
  Payload ID: 18417
  Gene Name: transmembrane protein 88B
  Uniprot ID: A6NKF7
  ENST ID: ENST00000378821
  CDS Start-End: 1-492
atgagtgagcaggggagggagacggaggaggaggaggggggaggtggtgcttccgacacagcgcccatgctgccccggggacctcccgaccaccaggcctcagccctgacgtgcccagggtggtcggggcccccgctgctgcccggccggctgctggccgggctcctgctgcacctcctgctgcccgccgcagccttcctgctggtgctcctgcccgcggccgccgtcgtctacctgggattcctgtgccactcgagggtccaccccgctccgggtccccggtgccgcgcgctgttctcagaccgcggctccgcggcgctcatcgtgttcgggcttctctcgctgccgccgctgctggtgctcgcctcggccgtccgcgcccgcctagcccggcgcctccgcccgctgctgcctccgcccgctgggacccccggaccccgccgccccccggggcgccccgacgaggacgagcaactctgcgcctgggtgtga

SEQ ID NO: 194393 - DNA, 662 bp, Homo sapiens
  Payload ID: 18418
  Gene Name: transmembrane protein 89
  Uniprot ID: A2RUT3
  ENST ID: ENST00000330862
  CDS Start-End: 100-579
ggctggaacctgctgccttagagccaggcctcttcccgggggaggggcgtttgcccgttgccaggtgcccgggttccggccctggcactagcgacggccatgctgcatgtgctggcctcgctgcctttgctgctcctgctggtgacgtctgcctccacccacgcctggtcgagacccctctggtaccaggtggggctggacttgcagccctgggggtgtcagccaaagagtgtggagggctgtaggggtggcctgagctgtcctggctactggctgggccctggagcaagccgcatctaccccgtggctgcggtcatgatcaccaccacgatgctgatgatctgccgcaagatactgcaggggcggcggcgctcacaggccaccaagggtgagcatccgcaggtgaccactgagccctgcggaccctggaaacggcgggccccaatctcagaccacaccctgctccgtggggtcctgcacatgctggatgccctcctggtccacatcgaaggccacctacgtcatctagccacccagcggcaaatccaaataaaggggacttccacccagagtgggtgaccgaacatgtgcctctctttgcctgacagcctgaggtcctgggccaggtctgctctttccaggcctgtctggaccgtgtgtcc

SEQ ID NO: 194394 - DNA, 2346 bp, Homo sapiens
  Payload ID: 18419
  Gene Name: transmembrane protein 8A
  ENST ID: ENST00000250930
  CDS Start-End: 487-2223
agtgcccggggcgacggcggcggggaccggccgggccatgggcgccgggggcagaggcggaggcggcagaggctgtccttctacagctggtacggcagtgccaggctcttccgcttccgcgtgcccccagatgctgtgcttctacgctggctcctgcaggtctcccgggagagcggcgctgcctgcaccgacgcggagatcaccgtgcacttccgttccggcgcccctccggtcatcaacccgctgggcaccagcttcccggacgacaccgcggtacagccctccttccaggtcggggtgccgctgagcaccacaccgagaagcaatgcctccgtcaacgtttcccacccggcccccggggactggttcgtggccgcccacctgcccccctcatcccagaagatcgagttgaagggcttggctcccacctgtgcctacgtcttccagcctgaactgctggtcacgcgggtggtcgagatttccatcatggagccggacgtgccccttcctcagaccctcctctcccatcccagctacctcaaggtctttgtccccgattacacgcgggagcttctgctggagctgcgggactgcgtgtccaatgggagcctgggctgccccgtgcgtctcaccgtgggcccggtcaccctgcctagcaacttccagaaggtgctcacctgcaccggtgccccctggccctgccgcctgctgctgccctcaccgccctgggaccggtggctgcaagtgacagctgagagcctggtggggcccctcgggacagtggctttcagtgctgtagctgccctcacagcttgcaggccacggagcgtgaccatccagccccttctgcagagcagccaaaaccagagcttcaatgcctcctctggtctgctgtccccgagccccgaccaccaggacctgggcaggagtggcagggtggaccgcagccccttctgcctcacaaactacccagtcacgcgggaggacatggacgtggtgtcggtgcacttccagcccctggacagggtctcggtgagggtgtgttcggacacgccctccgtgatgcggctgcgcctgaacaccggcatggacagcgggggttccctcaccatctccctgcgggccaacaagacagagatgcggaacgagaccgtcgtagtggcctgcgtgaatgctgcctcgcccttccttggcttcaatacttcgctcaactgcaccacagccttcttccagggctaccctttgtctctgagcgcctggtctcgcagggccaacctcatcatcccctacccagagacagacaactggtacctctccctgcagctcatgtgccctgagaatgctgaggactgtgagcaggctgtggtccacgtggagaccaccttgtacctggtgccctgtttgaacgattgtggaccctatggccagtgcctcctgctccgcagacacagctacctgtatgccagctgcagctgcaaggcaggctggcgtgggtggagctgcacggacaacagcacagcccagacggtggcccagcagagggcggccacactgctgctcacgctcagcaacctcatgttcctggcccccatcgccgtctcagtgcggcgattcttcctggtggaggcctccgtctacgcctacaccatgttcttctccacgttctaccacgcctgcgaccagcccggggaggcggtgctgtgcatcctcagctacgacacgctgcagtactgcgacttcttgggctccggggcggccatctgggtcaccatcctgtgcatggcacggctcaagacagtcctgaaatacgtgctgtttcttctgggtacactggtcatcgccatgtccttgcagctggaccgcaggggcatgtggaacatgctggggccctgcctctttgccttcgtgatcatggcctccatgtgggcttaccgctgcgggcaccggcgccagtgctaccccacctcgtggcagcgctgggccttctacctcctgcccggcgtctctatggcctctgtgggcatcgccatctacacctccatgatgactagcgacaactactactacacccacagcatctggcacatcctgctggccgggagcgcagccttgctgctgccgccacctgaccagcccgccgagccctgggcctgctcgcagaaattcccctgccactatcagatctgcaagaacgatcgggaggaactgtacgcagtgacgtgacactggcctggggacagctgctgctctgatgacctcttcagccaggagctgtatcgagggggaggcgcctggtccagccctggacagattgatttccagctgaataaattggcctagataccc

SEQ ID NO: 194395 - DNA, 844 bp, Homo sapiens
  Payload ID: 18419
  Gene Name: transmembrane protein 8A
  ENST ID: ENST00000424078
  CDS Start-End: 1-719
acctggtgccctgtttgaacgattgtggaccctatggccagtgcctcctgctccgcagacacagctacctgtatgccagctgcagctgcaaggcaggctggcgtgggtggagctgcacggacaacagcacagcccagacggtggcccagcagagggcggccacactgctgctcacgctcagcaacctcatgttcctggcccccatcgccgtctcagtgcggcgattcttcctggtggaggcctccgtctacgcctacaccatgttcttctccacgttctaccacgcctgcgaccagcccggggaggcggtgctgtgcatcctcagctacgacacgctgcagtactgcgacttcttgggctccggggcggccatctgggtcaccatcctgtgcatggcacggctcaagacagtcctgaaatacgcttaccgctgcgggcaccggcgccagtgctaccccacctcgtggcagcgctgggccttctacctcctgcccggcgtctctatggcctctgtgggcatcgccatctacacctccatgatgactagcgacaactactactacacccacagcatctggcacatcctgctggccgggagcgcagccttgctgctgccgccacctgaccagcccgccgagccctgggcctgctcgcagaaattcccctgccactatcagatctgcaagaacgatcgggaggaactgtacgcagtgacgtgacactggcctggggacagctgctgctctgatgacctcttcagccaggagctgtatcgagggggaggcgcctggtccagccctggacagattgatttccagctgaataaattggcctagataccctc

SEQ ID NO: 194396 - DNA, 3691 bp, Homo sapiens
  Payload ID: 18419
  Gene Name: transmembrane protein 8A
  Uniprot ID: Q9HCN3
  ENST ID: ENST00000431232
  CDS Start-End: 162-2477
cggaagtgcccggggcgacggcggcggggaccggccgggccatgggcgccgggggcagaggcggaggcggcagaggcggaggcggcagaggctgcccgggcggcggcgggggccggcggcgcgggacgcgggccgggtagcgccgggccgagcgcggagccatgggccgggctggcaccgggaccgggggcgaggcggtggccgcggtggtggcggggccgctgctgctgctgctgcttgcccggcccccgcctgcctccgccggctacagcgggaagagcgaggtggggctggtgtccgagcacttctcgcaggccccgcagaggctgtccttctacagctggtacggcagtgccaggctcttccgcttccgcgtgcccccagatgctgtgcttctacgctggctcctgcaggtctcccgggagagcggcgctgcctgcaccgacgcggagatcaccgtgcacttccgttccggcgcccctccggtcatcaacccgctgggcaccagcttcccggacgacaccgcggtacagccctccttccaggtcggggtgccgctgagcaccacaccgagaagcaatgcctccgtcaacgtttcccacccggcccccggggactggttcgtggccgcccacctgcccccctcatcccagaagatcgagttgaagggcttggctcccacctgtgcctacgtcttccagcctgaactgctggtcacgcgggtggtcgagatttccatcatggagccggacgtgccccttcctcagaccctcctctcccatcccagctacctcaaggtctttgtccccgattacacgcgggagcttctgctggagctgcgggactgcgtgtccaatgggagcctgggctgccccgtgcgtctcaccgtgggcccggtcaccctgcctagcaacttccagaaggtgctcacctgcaccggtgccccctggccctgccgcctgctgctgccctcaccgccctgggaccggtggctgcaagtgacagctgagagcctggtggggcccctcgggacagtggctttcagtgctgtagctgccctcacagcttgcaggccacggagcgtgaccatccagccccttctgcagagcagccaaaaccagagcttcaatgcctcctctggtctgctgtccccgagccccgaccaccaggacctgggcaggagtggcagggtggaccgcagccccttctgcctcacaaactacccagtcacgcgggaggacatggacgtggtgtcggtgcacttccagcccctggacagggtctcggtgagggtgtgttcggacacgccctccgtgatgcggctgcgcctgaacaccggcatggacagcgggggttccctcaccatctccctgcgggccaacaagacagagatgcggaacgagaccgtcgtagtggcctgcgtgaatgctgcctcgcccttccttggcttcaatacttcgctcaactgcaccacagccttcttccagggctaccctttgtctctgagcgcctggtctcgcagggccaacctcatcatcccctacccagagacagacaactggtacctctccctgcagctcatgtgccctgagaatgctgaggactgtgagcaggctgtggtccacgtggagaccaccttgtacctggtgccctgtttgaacgattgtggaccctatggccagtgcctcctgctccgcagacacagctacctgtatgccagctgcagctgcaaggcaggctggcgtgggtggagctgcacggacaacagcacagcccagacggtggcccagcagagggcggccacactgctgctcacgctcagcaacctcatgttcctggcccccatcgccgtctcagtgcggcgattcttcctggtggaggcctccgtctacgcctacaccatgttcttctccacgttctaccacgcctgcgaccagcccggggaggcggtgctgtgcatcctcagctacgacacgctgcagtactgcgacttcttgggctccggggcggccatctgggtcaccatcctgtgcatggcacggctcaagacagtcctgaaatacgtgctgtttcttctgggtacactggtcatcgccatgtccttgcagctggaccgcaggggcatgtggaacatgctggggccctgcctctttgccttcgtgatcatggcctccatgtgggcttaccgctgcgggcaccggcgccagtgctaccccacctcgtggcagcgctgggccttctacctcctgcccggcgtctctatggcctctgtgggcatcgccatctacacctccatgatgactagcgacaactactactacacccacagcatctggcacatcctgctggccgggagcgcagccttgctgctgccgccacctgaccagcccgccgagccctgggcctgctcgcagaaattcccctgccactatcagatctgcaagaacgatcgggaggaactgtacgcagtgacgtgacactggcctggggacagctgctgctctgatgacctcttcagccaggagctgtatcgagggggaggcgcctggtccagccctggacagattgatttccagctgaataaattggcctagataccctcttacttcctcctactgaggagagggccacccctccctcacacgcacctctcctcgccagctgcctgctcgctgctgagatccctctgcagatcccagctgctgtctgcagtggcccctggggcctgggcttggttacttggagaccacaggtgcctgtgcgagggtggggctgtgtgctctgctggcctgtgggtggctagagatggggagaaggactccctatggtcctgttccctggcgaggctgtggtgagacccatggcgcccaggagccctgagcccaccactggggccgggagctgtggactccgagacccctgctcctggcccctgtgtggccctgatgccagcctgcctggggcatggaggatccccctctgctgctgtggtcaccatagggacgggagacggaggtttcccccagagctgatgggcactggggatgcaggctcccgccccgcccctccctttttcctggctctggagccttgggtccctgagaagagcttccttggactggggtgctctgctgctctgggggtttggcccagaaggaacccctacccagccctgtccacccaccccagcgttcctgggcccccctctgggagcttcctcttggtcccaggagctgcggtggtgtctgccccctgcactgggctctgtgccctgtgggtgttcaggagactggactgtctctgctcctcatgcaaaccttgtgggggaagcaatgaccaggagcagcacctggcccctccctgaggcctgtgagtgtctcggatccgccctggagaagtgagtggctgagacccgggtggggccctcctacccttggctctgggggcttcccttctgggtcttgtccgggatatggccttcctgaaggtcttacctcccccagccgccctgcacttgaccaccaaagcaatctctaagcttataaaggagaaacatatatatatggggttttttggagtaaaggaaaattctaagatattaagacatatttttatgtagatctgatctatctgtgtttggtgaatttaatattctacattgatttttcaaactaaacgagtttttacattt

SEQ ID NO: 194397 - DNA, 858 bp, Homo sapiens
  Payload ID: 18419
  Gene Name: transmembrane protein 8A
  ENST ID: ENST00000448854
  CDS Start-End: 1-732
cgcagggccaacctcatcatcccctacccagagacagacaactggtacctctccctgcagctcatgtgccctgagaatgctgaggactgtgagcaggctgtggtccacgtggagaccaccttgtacctggtgccctgtttgaacgattgtggaccctatggccagtgcctcctgctccgcagacacagctacctgtatgccagctgcagctgcaaggcaggctggcgtgggtggagctgcacggacaacagcacagcccagacggtggcccagcagagggcggccacactgctgctcacgctcagcaacctcatgttcctggcccccatcgccgtctcagtgcggcgattcttcctggtggaggcctccgtctacgcctacaccatgttcttctccacgttctaccacgcctgcgaccagcccggggaggcggtgctgtgcatcctcagctacgacacgctgcagtactgcgacttcttgggctccggggcggccatctgggtcaccatcctgtgcatggcacggctcaagacagtcctgaaatacgtgctgtttcttctgggtacactggtcatcgccatgtccttgcagctggaccgcaggggcatgtggaacatgctggggccctgcctctttgccttcgtgatcatggcctccatgtgggtaaggagccgggctggctggcactgctgcccaggtgctcggagaagagagcctggccccttgctctagccacgttcctggtcctgctccaaccagtgaatgcccatatctgctgggggttgccatggcacccacagaggcccagcatggctgtgtccctgaggcctgggcctgaggaccagtggccttgagccc

SEQ ID NO: 194398 - DNA, 587 bp, Homo sapiens
  Payload ID: 18419
  Gene Name: transmembrane protein 8A
  ENST ID: ENST00000427313
  CDS Start-End: 525-587
aaacttgatgacagcatagtggccaagcttgtttctcctgggggtgctcttccaaggatattcaggccgcctccggcgtcgcagtgtcttgggccgctggaagaagagtctctccattgccaacactctgtgacttagcagacgtctctggacttccgtctggggattcttacccaccttcaagttcaccagccctcagctggagcactggaagtgggggctctgccgcttctctccctctccggcacttccgttccggcgcccctccggtcatcaacccgctgggcaccagcttcccggacgacaccgcggtacagccctccttccaggtcggggtgccgctgagcaccacaccgagaagcaatgcctccgtcaacgtttcccacccggcccccggggactggttcgtggccgcccacctgcccccctcatcccagaagatcgagttgaagggcttggctcccacctgtgcctacgtcttccagcctgaactgctggtcacgcgggtggtcgagatttccatcatggagccggacgtgccccttcctcagaccctcctctcccatcccagctacctcaaggtcttt

SEQ ID NO: 194399 - DNA, 3731 bp, Homo sapiens
  Payload ID: 18420
  Gene Name: transmembrane protein 8B
  Uniprot ID: A6NDV4
  ENST ID: ENST00000377988
  CDS Start-End: 1307-2725
gcccccagccccgccctcgccccgcttcccacatcggccccagcccctgcctgggtccccatccaggacccccttccagtctctgcccctggcctggcccccatcccggcctcggccctcgttccaccccctgtcacaaatcccagcccaggccctgtcccagccccattcccagtgtttgcttaaggccctggctcaaccccgtcccttgctgcagtccccatcacagcccttccttccatcccactccctgcccttgttcaagccccagtgtccagcccagcccaacccattatctcagcctttgccctcatctctgtgtttacccaagtctctccctctagtcccccctatctctcatactctgcccctctcccagcctagactcaagtctgggtttcagctgccgccagccctattgctgctgttgctgttctctgtccttggcccaggggctggaggccttttcctgactgattactccacctgctcaccccgcaagctgagtcctttccgctcctttgccagcaccgagctcttccacttccatgttcctgaggacacattcctggctgtttggaacctcatcatcttcaaggagcaagggggaacttttggggaccactgcccagaccaaagtgtgactgtgtatttccggtccggggcaccccctgtcatcaatcccctgcatacacacttcccaggggacacagctgtgcctggggttttctcactgaccctcagctggacactgcccaaccgcacctcaggcatctttaacgtcagcagccccttacctggggactggttcttggctgcccaccttccccaggcccacggccacatctctgtcaagggtctccaggatgagtgtcagtacctccttcagccgcagctgattgtccggcgtttgctggacgtcgctgtgctggttcctggccggccctcagagcaaaccctctccccacacaatcgctcagccctgtacaaggtctttgtgcccagcttcacttacagggtttcagcacagctggtgtgtgtggggggccgtggggtatctgcctgccccctgtcactgcgtctgcgtcccaaagccccacccctgcacaactcaagctctgtggcctgtggaggtgcctcaggatgccagctggagctggcactgcccccctgggggcactgggtctacgtgcgtgtggaaacatcatcccggggccctggtaggaccatccgcttccagctgtgtgtgcggttgcaagagtgcccacagcccggcctgctccgagccctggtccctggagctgccatgaacatgccccagtccctgggcaaccagccactgcccccagaaccgccatcccttggaacccctgcggaggggcctgggaccacgtccccacccgagcactgctggccagtgcgcccgactctgcgcaacgagctggacaccttctctgtccacttctacatcttctttggcccaagtgtggcccttccccctgagcgcccagccgtgttcgccatgaggctgttgccagtgctggacagtggaggcgtcctcagcctggagctccagctcaatgcgagctccgtgcgccaggaaaacgtgacggtgtttggatgcttgactcacgaggtgcccttgagcctgggggatgcagcagtgacctgttccaaagagtccctggccggcttcctcctctctgtcagtgccaccaccagggttgccaggctgcgaatcccattcccgcagacggggacctggttcctggccctccgctccctgtgcggggtggggcctcggttcgtgcggtgccgcaacgcgacggccgaggtgcggatgcgcaccttcctgtccccatgcgtggacgactgcgggccctacggccagtgcaagctgctgcgcacacacaattatctgtacgcagcctgcgagtgcaaggccgggtggagaggctggggctgcaccgacagtgcagatgcgctcacctatggattccagctgctgtccacactcctgctctgcctgagcaacctcatgtttctgccacctgtggtcctggccattcggagtcgatatgtgctggaagctgcagtctacaccttcaccatgttcttctccacgttctatcatgcctgtgaccagccaggcatcgtggttttctgcatcatggactacgatgtgctgcagttctgtgatttcctgggctccttaatgtccgtgtgggtcactgtcattgccatggctcgtttacagcccgtggtcaagcaggtgctgtatttgctgggagctatgctgctgtccatggctctgcagcttgaccgacatggactctggaacctgcttggacccagtctcttcgccctggggatcttggccacagcctggacagtacgcagcgtccgccgccggcactgctacccacccacgtggcgccgctggcttttctacttgtgccctggcagccttattgcaggcagtgccgtcctgctttatgcttttgtggagacccgggacaactacttctacattcacagcatttggcatatgctcattgcgggcagtgtgggcttcctgctgccccctcgtgccaagactgaccacggggtcccatctggagcccgggcccggggctgtggttaccagctatgcatcaacgagcaggaggagctgggcctcgtgggcccaggaggggccactgtcagcagcatctgtgccagctgagaggggctttgggcctggccctgaggggatatgaatgcttcctagagttctttctgggggtgtggagccctcttagaaggagacaggctgtatttcttgaggacatggagtctttctcaaggacacaaaactcttccagggacctggagcccttcccaggacatggagaacttcctgagggcctggagtccccctgcatcatggagtccttcttaaggactggagcctatgcaggcacagagtccctcaggaccaaggagtccctcctgcaggtgtggagcctttcctgggatgcagagccttcccaagacatggattccttcccagggagacaaagccctgtcaggagcacagcatctttccagaggaggtggagtctatcttggggaaaccaaatttccagattttcccagaggctcagcaactctggcctcaggcttccttcccagaggcagcgtctgggctgtgctgtgctgtggaggagggattgcaggatggatggagctgggactggggctgtctgggtggctggtatcctcgtttgatacaggtggagtctgtgtgtctccagtgattgattggttcagaatggttctgtgatgccttttttccccctggggtcaggggtgtggggaagtggggaaagagggcccctcagggaatcagcagggctgatgggagctactgccggaggcttttgtcacaccctgtacacagtctgatcccgctcatctgggccctgcattcatttctaaacagtttctaatgcctattccccaattcctattgagcccgatttgcagtatctgaggggtgtgtgtgtgtgtgtgtgtgtttatgtatgtatacgtatgctgagatgatttaaatcagtgagacagactttccttatgatgcccacacccaacacagaaggaagccgaggtcccaggaaattggaatagcaggtacacgtctcaggtgtgcaagaaatatcacaagaatgtaacttctgttttgagccccc

SEQ ID NO: 194400 - DNA, 3441 bp, Homo sapiens
  Payload ID: 18420
  Gene Name: transmembrane protein 8B
  Uniprot ID: A6NDV4
  ENST ID: ENST00000377991
  CDS Start-End: 1016-2434
cgacgtcaagtcgaggccgccgccgcggggcctggttatcgccggttcagcgcagcccggagtcgcccaggcctgaactcctacccagcctagactcaagtctgggtttcagctgccgccagccctattgctgctgttgctgttctctgtccttggcccaggggctggaggccttttcctgactgattactccacctgctcaccccgcaagctgagtcctttccgctcctttgccagcaccgagctcttccacttccatgttcctgaggacacattcctggctgtttggaacctcatcatcttcaaggagcaagggggaacttttggggaccactgcccagaccaaagtgtgactgtgtatttccggtccggggcaccccctgtcatcaatcccctgcatacacacttcccaggggacacagctgtgcctggggttttctcactgaccctcagctggacactgcccaaccgcacctcaggcatctttaacgtcagcagccccttacctggggactggttcttggctgcccaccttccccaggcccacggccacatctctgtcaagggtctccaggatgagtgtcagtacctccttcagccgcagctgattgtccggcgtttgctggacgtcgctgtgctggttcctggccggccctcagagcaaaccctctccccacacaatcgctcagccctgtacaaggtctttgtgcccagcttcacttacagggtttcagcacagctggtgtgtgtggggggccgtggggtatctgcctgccccctgtcactgcgtctgcgtcccaaagccccacccctgcacaactcaagctctgtggcctgtggaggtgcctcaggatgccagctggagctggcactgcccccctgggggcactgggtctacgtgcgtgtggaaacatcatcccggggccctggtaggaccatccgcttccagctgtgtgtgcggttgcaagagtgcccacagcccggcctgctccgagccctggtccctggagctgccatgaacatgccccagtccctgggcaaccagccactgcccccagaaccgccatcccttggaacccctgcggaggggcctgggaccacgtccccacccgagcactgctggccagtgcgcccgactctgcgcaacgagctggacaccttctctgtccacttctacatcttctttggcccaagtgtggcccttccccctgagcgcccagccgtgttcgccatgaggctgttgccagtgctggacagtggaggcgtcctcagcctggagctccagctcaatgcgagctccgtgcgccaggaaaacgtgacggtgtttggatgcttgactcacgaggtgcccttgagcctgggggatgcagcagtgacctgttccaaagagtccctggccggcttcctcctctctgtcagtgccaccaccagggttgccaggctgcgaatcccattcccgcagacggggacctggttcctggccctccgctccctgtgcggggtggggcctcggttcgtgcggtgccgcaacgcgacggccgaggtgcggatgcgcaccttcctgtccccatgcgtggacgactgcgggccctacggccagtgcaagctgctgcgcacacacaattatctgtacgcagcctgcgagtgcaaggccgggtggagaggctggggctgcaccgacagtgcagatgcgctcacctatggattccagctgctgtccacactcctgctctgcctgagcaacctcatgtttctgccacctgtggtcctggccattcggagtcgatatgtgctggaagctgcagtctacaccttcaccatgttcttctccacgttctatcatgcctgtgaccagccaggcatcgtggttttctgcatcatggactacgatgtgctgcagttctgtgatttcctgggctccttaatgtccgtgtgggtcactgtcattgccatggctcgtttacagcccgtggtcaagcaggtgctgtatttgctgggagctatgctgctgtccatggctctgcagcttgaccgacatggactctggaacctgcttggacccagtctcttcgccctggggatcttggccacagcctggacagtacgcagcgtccgccgccggcactgctacccacccacgtggcgccgctggcttttctacttgtgccctggcagccttattgcaggcagtgccgtcctgctttatgcttttgtggagacccgggacaactacttctacattcacagcatttggcatatgctcattgcgggcagtgtgggcttcctgctgccccctcgtgccaagactgaccacggggtcccatctggagcccgggcccggggctgtggttaccagctatgcatcaacgagcaggaggagctgggcctcgtgggcccaggaggggccactgtcagcagcatctgtgccagctgagaggggctttgggcctggccctgaggggatatgaatgcttcctagagttctttctgggggtgtggagccctcttagaaggagacaggctgtatttcttgaggacatggagtctttctcaaggacacaaaactcttccagggacctggagcccttcccaggacatggagaacttcctgagggcctggagtccccctgcatcatggagtccttcttaaggactggagcctatgcaggcacagagtccctcaggaccaaggagtccctcctgcaggtgtggagcctttcctgggatgcagagccttcccaagacatggattccttcccagggagacaaagccctgtcaggagcacagcatctttccagaggaggtggagtctatcttggggaaaccaaatttccagattttcccagaggctcagcaactctggcctcaggcttccttcccagaggcagcgtctgggctgtgctgtgctgtggaggagggattgcaggatggatggagctgggactggggctgtctgggtggctggtatcctcgtttgatacaggtggagtctgtgtgtctccagtgattgattggttcagaatggttctgtgatgccttttttccccctggggtcaggggtgtggggaagtggggaaagagggcccctcagggaatcagcagggctgatgggagctactgccggaggcttttgtcacaccctgtacacagtctgatcccgctcatctgggccctgcattcatttctaaacagtttctaatgcctattccccaattcctattgagcccgatttgcagtatctgaggggtgtgtgtgtgtgtgtgtgtgtttatgtatgtatacgtatgctgagatgatttaaatcagtgagacagactttccttatgatgcccacacccaacacagaaggaagccgaggtcccaggaaattggaatagcaggtacacgtctcaggtgtgcaagaaatatcacaagaatgtaacttctgttttgagccccca

SEQ ID NO: 194401 - DNA, 2473 bp, Homo sapiens
  Payload ID: 18420
  Gene Name: transmembrane protein 8B
  Uniprot ID: A6NDV4
  ENST ID: ENST00000377996
  CDS Start-End: 1416-2432
ttgcatcacgttgggggagaacgggacggaatgaattctctgacctccgagccgcttctggcaagtgcagaagagaggttaacactagtgctcattaggaggccagaagcctgaggagggcagagcactggctccaagaagagaaagctcatttcctgcagggggcatcgggccagctgggctgcaggcagtggaaagaaggcggcagccgctgcactgaccctgtcccgacctcggcgccccggcctgcgcagggcgggaatcagcaccagctcgttctccggagccaccagttcgacctcaccacacagccccggagcttgtgcctcggaggggcagaggccacaggcaggagctctgcgcggctctgcgcgccttcgggaccccctggccccggatggcttcggagcccgcaggaccccctactcgctcccgcgccacttctcacctgccccccgcgcacccccgtggccgccacggctctgcgcgccgcgcgcaacccagcagccagcaccacggctgccgccatcttccctgagccgcgggaacctctcacccgggtcagcactcggctccgcggccggccgtgggtggggactccgggcgcggggaagcggggtagtggcggccgggcgagccctgctaccccattggagcgcgcctctgagcacgattcaccccattgcctctgcagccactttggaggcgggctcttttcatctcattggctgcttctaccaacgcgaggacaattttccattccattggtttcgtcttctagtccgtgtgaacgttcttttcccattggatccccttactagtttctctgtgagagaaacttccactccattggaaggattaatggagcctggagagacggggtttcaccgtgttagccaggatggtctcgatctcctgacctcgtgatcctcctgcctcggcctcccaaggtgctgggattacagggtctccaggatgagtgtcagtacctccttcagccgcagctgattgtccggcgtttgctggacgtcgctgtgctggttcctggccggccctcagagcaaaccctctccccacacaatcgctcagccctgtacaaggtctttgtgcccagcttcacttacagggtttcagcacagctggtgtgtgtggggggccgtggggtatctgcctgccccctgtcactgcgtctgcgtcccaaagccccacccctgcacaactcaagctctgtggcctgtggaggtgcctcaggatgccagctggagctggcactgcccccctgggggcactgggtctacgtgcgtgtggaaacatcatcccggggccctggtaggaccatccgcttccagctgtgtgtgcggttgcaagagtgcccacagcccggcctgctccgagccctggtccctggagctgccatgaacatgccccagtccctgggcaaccagccactgcccccagaaccgccatcccttggaacccctgcggaggggcctgggaccacgtccccacccgagcactgctggccagtgcgcccgactctgcgcaacgagctggacaccttctctgtccacttctacatcttctttggcccaagtgtggcccttccccctgagcgcccagccgtgttcgccatgaggctgttgccagtgctggacagtggaggcgtcctcagcctggagctccagctcaatgcgagctccgtgcgccaggaaaacgtgacggtgtttggatgcttgactcacgaggtgcccttgagcctgggggatgcagcagtgacctgttccaaagagtccctggccggcttcctcctctctgtcagtgccaccaccagggttgccaggctgcgaatcccattcccgcagacggggacctggttcctggccctccgctccctgtgcggggtggggcctcggttcgtgcggtgccgcaacgcgacggccgaggtgcggatgcgcaccttcctgtccccatgcgtggacgactgcgggccctacggccagtgcaagctgctgcgcacacacaattatctgtacgcagcctgcgagtgcaaggccgggtggagaggctggggctgcaccgacagtgcagatgcgctcacctatggattccagctgctgtccacactcctgctctgcctgagcaacctcatgtttctgccacctgtggtcctggccattcggagtcgatatgtgctggaagctgcagtctacaccttcaccatgttcttctccacggtatgcggtggtgtctgcatcttatcactgggtgcttgtgcatggtggtgggtcacagtctgtatttccaccacgttctccgagggtttgggaatgtctgtgccttcactgtgtcttctacagacagagacagcagtgcttcccaaactgtcatgcatagataatggtcatttttgtaagacacattggagtaaatgaacaaaactgtttgcaacttaataaagtaagtttgggcctcc

SEQ ID NO: 194402 - DNA, 2150 bp, Homo sapiens
  Payload ID: 18420
  Gene Name: transmembrane protein 8B
  Uniprot ID: A6NDV4
  ENST ID: ENST00000439587
  CDS Start-End: 1092-2108
acgccgacgtcaagtcgaggccgccgccgcggggcctggttatcgccggttcagcgcagcccggagtcgcccaggcctgaactcctacccaggtccccggcccccgccccgggcccgcgaggacaccggaggccaccccccgggggtggggagcggagccgcggcctagactcaagtctgggtttcagctgccgccagccctattgctgctgttgctgttctctgtccttggcccaggggctggaggccttttcctgactgattactccacctgctcaccccgcaagctgagtcctttccgctcctttgccagcaccgagctcttccacttccatgttcctgaggacacattcctggctgtttggaacctcatcatcttcaaggagcaagggggaacttttggggaccactgcccagaccaaagtgtgactgtgtatttccggtccggggcaccccctgtcatcaatcccctgcatacacacttcccaggggacacagctgtgcctggggttttctcactgaccctcagctggacactgcccaaccgcacctcaggcatctttaacgtcagcagccccttacctggggactggttcttggctgcccaccttccccaggcccacggccacatctctgtcaagggtctccaggatgagtgtcagtacctccttcagccgcagctgattgtccggcgtttgctggacgtcgctgtgctggttcctggccggccctcagagcaaaccctctccccacacaatcgctcagccctgtacaaggtctttgtgcccagcttcacttacagggtttcagcacagctggtgtgtgtggggggccgtggggtatctgcctgccccctgtcactgcgtctgcgtcccaaagccccacccctgcacaactcaagctctgtggcctgtggaggtgcctcaggatgccagctggagctggcactgcccccctgggggcactgggtctacgtgcgtgtggaaacatcatcccggggccctggtaggaccatccgcttccagctgtgtgtgcggttgcaagagtgcccacagcccggcctgctccgagccctggtccctggagctgccatgaacatgccccagtccctgggcaaccagccactgcccccagaaccgccatcccttggaacccctgcggaggggcctgggaccacgtccccacccgagcactgctggccagtgcgcccgactctgcgcaacgagctggacaccttctctgtccacttctacatcttctttggcccaagtgtggcccttccccctgagcgcccagccgtgttcgccatgaggctgttgccagtgctggacagtggaggcgtcctcagcctggagctccagctcaatgcgagctccgtgcgccaggaaaacgtgacggtgtttggatgcttgactcacgaggtgcccttgagcctgggggatgcagcagtgacctgttccaaagagtccctggccggcttcctcctctctgtcagtgccaccaccagggttgccaggctgcgaatcccattcccgcagacggggacctggttcctggccctccgctccctgtgcggggtggggcctcggttcgtgcggtgccgcaacgcgacggccgaggtgcggatgcgcaccttcctgtccccatgcgtggacgactgcgggccctacggccagtgcaagctgctgcgcacacacaattatctgtacgcagcctgcgagtgcaaggccgggtggagaggctggggctgcaccgacagtgcagatgcgctcacctatggattccagctgctgtccacactcctgctctgcctgagcaacctcatgtttctgccacctgtggtcctggccattcggagtcgatatgtgctggaagctgcagtctacaccttcaccatgttcttctccacggtatgcggtggtgtctgcatcttatcactgggtgcttgtgcatggtggtgggtcacagtctgtatttccaccacgttctccgagggtttgggaatgtctgtgccttcactgtgtcttctacagacagagacagcagtgcttcccaaactgtcatgcatagataatggtcatttttgtaagacacattggagtaaatgaacaaaactgtttgcaacttaataaagtaagtttgggcctcca

SEQ ID NO: 194403 - DNA, 818 bp, Homo sapiens
  Payload ID: 18421
  Gene Name: transmembrane protein 8C
  Uniprot ID: A6NI61
  ENST ID: ENST00000339996
  CDS Start-End: 103-768
gccctgcccaaagggagctggccttcccacttcgtgctcctgtgctggggacctgggacaccagcaccctccccaccccagccagtgctttcctcctggcccatggggacgctggtggccaagctgctcctgcccaccctcagcagcctggccttcctccccactgtcagcatcgcggccaagaggcggttccacatggaggccatggtctacctcttcaccctgttcttcgtggcgctccaccatgcctgcaatggacccggcttgtctgtgctgtgcttcatgcgtcacgacatcctggagtatttcagtgtctacgggacagccctgagcatgtgggtctcgctgatggcactggccgacttcgacgaacccaagaggtcaacatttgtgatgttcggcgtcctgaccattgctgtgcggatctaccatgaccgatggggctacggggtgtactcgggccccatcggcacagccatcctcatcatcgcggcaaagtggctacagaagatgaaggagaagaagggcctgtacccagacaagagcgtctacacccagcagataggccccggcctctgcttcggggcgctggccctgatgctacgcttcttctttgaggactgggactacacttatgtccacagcttctaccactgtgccctggctatgtcctttgttctgctgctgcccaaggtcaacaagaaggctggatccccggggaccccggccaagctggactgctccaccctgtgctgtgcttgtgtctgatgctgcgcccagcccggctctgagcccctgccctccccagctcacacttg

SEQ ID NO: 194404 - DNA, 1959 bp, Homo sapiens
  Payload ID: 18422
  Gene Name: transmembrane protein 9
  Uniprot ID: Q9P0T7
  ENST ID: ENST00000367330
  CDS Start-End: 518-1069
gtggacgcggcattgggggaggggacgggggtcgcggggctattgggggtcccagtccggcttaagacctctgggcgtggtgggcaccggccttcgccgtcggagcaggggtcccagactcgcacccaaaagttcccgtcgggcccgagcggggaggagctgcggggcgggcagaggcggagatggcggagggcggtgggacgtgatgcgcgggtcagagccgggccttgagaaggaactggaggcccctggcagcggtgtcccctcgaggacccctctgccgggctcaccaggtggctggcggagagccggagagttgggcgggagggaagcagggtttggcgaccaggtttagcaggccttggaatcctggagcccagcccccaaccccattcccacttggccggatggttaagggcctagcgtgctggctgcggtgtggccaccttccccttctccgactccgtatctctttttccaggtgtccggctttgctggcccagcaagcctgataagcatgaagctcttatctttggtggctgtggtcgggtgtttgctggtgcccccagctgaagccaacaagagttctgaagatatccggtgcaaatgcatctgtccaccttatagaaacatcagtgggcacatttacaaccagaatgtatcccagaaggactgcaactgcctgcacgtggtggagcccatgccagtgcctggccatgacgtggaggcctactgcctgctgtgcgagtgcaggtacgaggagcgcagcaccaccaccatcaaggtcatcattgtcatctacctgtccgtggtgggtgccctgttgctctacatggccttcctgatgctggtggaccctctgatccgaaagccggatgcatatactgagcaactgcacaatgaggaggagaatgaggatgctcgctctatggcagcagctgctgcatccctcgggggaccccgagcaaacacagtcctggagcgtgtggaaggtgcccagcagcggtggaagctgcaggtgcaggagcagcggaagacagtcttcgatcggcacaagatgctcagctagatgggctggtgtggttgggtcaaggccccaacaccatggctgccagcttccaggctggacaaagcagggggctacttctcccttccctcggttccagtcttccctttaaaagcctgtggcatttttcctccttctccctaactttagaaatgttgtacttggctattttgattagggaagagggatgtggtctctgatctctgttgtcttcttgggtctttggggttgaagggagggggaaggcaggccagaagggaatggagacattcgaggcggcctcaggagtggatgcgatctgtctctcctggctccactcttgccgccttccagctctgagtcttgggaatgttgttacccttggaagataaagctgggtcttcaggaactcagtgtctgggaggaaagcatggcccagcattcagcatgtgttcctttctgcagtggttcttatcaccacctccctcccagccccagcgcctcagccccagccccagctccagccctgaggacagctctgatgggagagctgggccccctgagcccactgggtcttcagggtgcactggaagctggtgttcgctgtcccctgtgcacttctcgcactggggcatggagtgcccatgcatactctgctgccggtcccctcacctgcacttgaggggtctgggcagtccctcctctccccagtgtccacagtcactgagccagacggtcggttggaacatgagactcgaggctgagcgtggatctgaacaccacagcccctgtacttgggttgcctcttgtccctgaacttcgttgtaccagtgcatggagagaaaattttgtcctcttgtcttagagttgtgtgtaaatcaaggaagccatcattaaattgttttatttctctc

SEQ ID NO: 194405 - DNA, 1544 bp, Homo sapiens
  Payload ID: 18422
  Gene Name: transmembrane protein 9
  ENST ID: ENST00000367332
  CDS Start-End: 94-654
agaagctaggagagggcggggacaactgggtcttttgcggctgcagcgggcttgtaggtgtccggctttgctggcccagcaagcctgataagcatgaagctcttatctttggtggctgtggtcgggtgtttgctggtgcccccagctgaagccaacaaggtgagggagagttctgaagatatccggtgcaaatgcatctgtccaccttatagaaacatcagtgggcacatttacaaccagaatgtatcccagaaggactgcaactgcctgcacgtggtggagcccatgccagtgcctggccatgacgtggaggcctactgcctgctgtgcgagtgcaggtacgaggagcgcagcaccaccaccatcaaggtcatcattgtcatctacctgtccgtggtgggtgccctgttgctctacatggccttcctgatgctggtggaccctctgatccgaaagccggatgcatatactgagcaactgcacaatgaggaggagaatgaggatgctcgctctatggcagcagctgctgcatccctcgggggaccccgagcaaacacagtcctggagcgtgtggaaggtgcccagcagcggtggaagctgcaggtgcaggagcagcggaagacagtcttcgatcggcacaagatgctcagctagatgggctggtgtggttgggtcaaggccccaacaccatggctgccagcttccaggctggacaaagcagggggctacttctcccttccctcggttccagtcttccctttaaaagcctgtggcatttttcctccttctccctaactttagaaatgttgtacttggctattttgattagggaagagggatgtggtctctgatctctgttgtcttcttgggtctttggggttgaagggagggggaaggcaggccagaagggaatggagacattcgaggcggcctcaggagtggatgcgatctgtctctcctggctccactcttgccgccttccagctctgagtcttgggaatgttgttacccttggaagataaagctgggtcttcaggaactcagtgtctgggaggaaagcatggcccagcattcagcatgtgttcctttctgcagtggttcttatcaccacctccctcccagccccagcgcctcagccccagccccagctccagccctgaggacagctctgatgggagagctgggccccctgagcccactgggtcttcagggtgcactggaagctggtgttcgctgtcccctgtgcacttctcgcactggggcatggagtgcccatgcatactctgctgccggtcccctcacctgcacttgaggggtctgggcagtccctcctctccccagtgtccacagtcactgagccagacggtcggttggaacatgagactcgaggctgagcgtggatctgaacaccacagcccctgtacttgggttgcctcttgtccctgaacttcgttgtaccagtgcatggagagaaaattttgtcctcttgtcttagagttgtgtgtaaatcaaggaagccatcattaaattgttttatttctctc

SEQ ID NO: 194406 - DNA, 1564 bp, Homo sapiens
  Payload ID: 18422
  Gene Name: transmembrane protein 9
  Uniprot ID: Q9P0T7
  ENST ID: ENST00000367333
  CDS Start-End: 122-673
tgctaggctctgtcccacaatgcacccgagagcaggagctgaaagcctctaacacccacagatccctctatgactgcaatgtgaggtgtccggctttgctggcccagcaagcctgataagcatgaagctcttatctttggtggctgtggtcgggtgtttgctggtgcccccagctgaagccaacaagagttctgaagatatccggtgcaaatgcatctgtccaccttatagaaacatcagtgggcacatttacaaccagaatgtatcccagaaggactgcaactgcctgcacgtggtggagcccatgccagtgcctggccatgacgtggaggcctactgcctgctgtgcgagtgcaggtacgaggagcgcagcaccaccaccatcaaggtcatcattgtcatctacctgtccgtggtgggtgccctgttgctctacatggccttcctgatgctggtggaccctctgatccgaaagccggatgcatatactgagcaactgcacaatgaggaggagaatgaggatgctcgctctatggcagcagctgctgcatccctcgggggaccccgagcaaacacagtcctggagcgtgtggaaggtgcccagcagcggtggaagctgcaggtgcaggagcagcggaagacagtcttcgatcggcacaagatgctcagctagatgggctggtgtggttgggtcaaggccccaacaccatggctgccagcttccaggctggacaaagcagggggctacttctcccttccctcggttccagtcttccctttaaaagcctgtggcatttttcctccttctccctaactttagaaatgttgtacttggctattttgattagggaagagggatgtggtctctgatctctgttgtcttcttgggtctttggggttgaagggagggggaaggcaggccagaagggaatggagacattcgaggcggcctcaggagtggatgcgatctgtctctcctggctccactcttgccgccttccagctctgagtcttgggaatgttgttacccttggaagataaagctgggtcttcaggaactcagtgtctgggaggaaagcatggcccagcattcagcatgtgttcctttctgcagtggttcttatcaccacctccctcccagccccagcgcctcagccccagccccagctccagccctgaggacagctctgatgggagagctgggccccctgagcccactgggtcttcagggtgcactggaagctggtgttcgctgtcccctgtgcacttctcgcactggggcatggagtgcccatgcatactctgctgccggtcccctcacctgcacttgaggggtctgggcagtccctcctctccccagtgtccacagtcactgagccagacggtcggttggaacatgagactcgaggctgagcgtggatctgaacaccacagcccctgtacttgggttgcctcttgtccctgaacttcgttgtaccagtgcatggagagaaaattttgtcctcttgtcttagagttgtgtgtaaatcaaggaagccatcattaaattgttttatttctctca

SEQ ID NO: 194407 - DNA, 1529 bp, Homo sapiens
  Payload ID: 18422
  Gene Name: transmembrane protein 9
  Uniprot ID: Q9P0T7
  ENST ID: ENST00000367334
  CDS Start-End: 87-638
aggagagggcggggacaactgggtcttttgcggctgcagcgggcttgtaggtgtccggctttgctggcccagcaagcctgataagcatgaagctcttatctttggtggctgtggtcgggtgtttgctggtgcccccagctgaagccaacaagagttctgaagatatccggtgcaaatgcatctgtccaccttatagaaacatcagtgggcacatttacaaccagaatgtatcccagaaggactgcaactgcctgcacgtggtggagcccatgccagtgcctggccatgacgtggaggcctactgcctgctgtgcgagtgcaggtacgaggagcgcagcaccaccaccatcaaggtcatcattgtcatctacctgtccgtggtgggtgccctgttgctctacatggccttcctgatgctggtggaccctctgatccgaaagccggatgcatatactgagcaactgcacaatgaggaggagaatgaggatgctcgctctatggcagcagctgctgcatccctcgggggaccccgagcaaacacagtcctggagcgtgtggaaggtgcccagcagcggtggaagctgcaggtgcaggagcagcggaagacagtcttcgatcggcacaagatgctcagctagatgggctggtgtggttgggtcaaggccccaacaccatggctgccagcttccaggctggacaaagcagggggctacttctcccttccctcggttccagtcttccctttaaaagcctgtggcatttttcctccttctccctaactttagaaatgttgtacttggctattttgattagggaagagggatgtggtctctgatctctgttgtcttcttgggtctttggggttgaagggagggggaaggcaggccagaagggaatggagacattcgaggcggcctcaggagtggatgcgatctgtctctcctggctccactcttgccgccttccagctctgagtcttgggaatgttgttacccttggaagataaagctgggtcttcaggaactcagtgtctgggaggaaagcatggcccagcattcagcatgtgttcctttctgcagtggttcttatcaccacctccctcccagccccagcgcctcagccccagccccagctccagccctgaggacagctctgatgggagagctgggccccctgagcccactgggtcttcagggtgcactggaagctggtgttcgctgtcccctgtgcacttctcgcactggggcatggagtgcccatgcatactctgctgccggtcccctcacctgcacttgaggggtctgggcagtccctcctctccccagtgtccacagtcactgagccagacggtcggttggaacatgagactcgaggctgagcgtggatctgaacaccacagcccctgtacttgggttgcctcttgtccctgaacttcgttgtaccagtgcatggagagaaaattttgtcctcttgtcttagagttgtgtgtaaatcaaggaagccatcattaaattgttttatttctctca

SEQ ID NO: 194408 - DNA, 507 bp, Homo sapiens
  Payload ID: 18422
  Gene Name: transmembrane protein 9
  ENST ID: ENST00000435310
  CDS Start-End: 94-507
ggacgggggtcgcggggctattgggggtcccagtccggcttaagacctctgggcgtggtgtccggctttgctggcccagcaagcctgataagcatgaagctcttatctttggtggctgtggtcgggtgtttgctggtgcccccagctgaagccaacaagagttctgaagatatccggtgcaaatgcatctgtccaccttatagaaacatcagtgggcacatttacaaccagaatgtatcccagaaggactgcaactgcctgcacgtggtggagcccatgccagtgcctggccatgacgtggaggcctactgcctgctgtgcgagtgcaggtacgaggagcgcagcaccaccaccatcaaggtcatcattgtcatctacctgtccgtggtgggtgccctgttgctctacatggccttcctgatgctggtggaccctctgatccgaaagccggatgcatatactgagcaactgcacaatgaggaggagaatgaggatgctcgctctatg

SEQ ID NO: 194409 - DNA, 545 bp, Homo sapiens
  Payload ID: 18422
  Gene Name: transmembrane protein 9
  ENST ID: ENST00000414605
  CDS Start-End: 57-545
cggctgcagcgggcttgtaggtgtccggctttgctggcccagcaagcctgataagcatgaagctcttatctttggtggctgtggtcgggtgtttgctggtgcccccagctgaagccaacaaggtgagggaggtgagcctgcagcacctggtcacgaccacagtgcacggccaccctgtctacagggctgactcagagagttctgaagatatccggtgcaaatgcatctgtccaccttatagaaacatcagtgggcacatttacaaccagaatgtatcccagaaggactgcaactgcctgcacgtggtggagcccatgccagtgcctggccatgacgtggaggcctactgcctgctgtgcgagtgcaggtacgaggagcgcagcaccaccaccatcaaggtcatcattgtcatctacctgtccgtggtgggtgccctgttgctctacatggccttcctgatgctggtggaccctctgatccgaaagccggatgcatatactgagcaactgcacaatgaggaggagaatgaggatgctcgctctatg

SEQ ID NO: 194410 - DNA, 487 bp, Homo sapiens
  Payload ID: 18422
  Gene Name: transmembrane protein 9
  ENST ID: ENST00000455367
  CDS Start-End: 35-487
gtccggctttgctggcccagcaagcctgataagcatgaagctcttatctttggtggctgtggtcgggtgtttgctggtgcccccagctgaagccaacaagagttctgaagatatccggtgcaaatgcatctgtccaccttatagaaacatcagtgggcacatttacaaccagaatgtatcccagaaggactgccctgtctctctctgttgtagcaactgcctgcacgtggtggagcccatgccagtgcctggccatgacgtggaggcctactgcctgctgtgcgagtgcaggtacgaggagcgcagcaccaccaccatcaaggtcatcattgtcatctacctgtccgtggtgggtgccctgttgctctacatggccttcctgatgctggtggaccctctgatccgaaagccggatgcatatactgagcaactgcacaatgaggaggagaatgaggatgctcgctctatggcagcagctgctgcatcc

SEQ ID NO: 194411 - DNA, 1075 bp, Homo sapiens
  Payload ID: 18422
  Gene Name: transmembrane protein 9
  ENST ID: ENST00000497582
  CDS Start-End: 516-812
ggacgcggcattgggggaggggacgggggtcgcggggctattgggggtcccagtccggcttaagacctctgggcgtggtgggcaccggccttcgccgtcggagcaggggtcccagactcgcacccaaaagttcccgtcgggcccgagcggggaggagctgcggggcgggcagaggcggagatggcggagggcggtgggacgtgatgcgcgggtcagagccgggccttgagaaggaactggaggcccctggcagcggtgtcccctcgaggacccctctgccgggctcaccaggtggctggcggagagccggagagttgggcgggagggaagcagggtttggcgaccaggtttagcaggccttggaatcctggagcccagcccccaaccccattcccacttggccggatggttaagggcctagcgtgctggctgcggtgtggccaccttccccttctccgactccgtatctctttttccaggtgtccggctttgctggcccagcaagcctgataagcatgaagctcttatctttggtggctgtggtcgggtgtttgctggtgcccccagctgaagccaacaagagttctgaagatatccggtgcaaatgcatctgtccaccttatagaaacatcagtgggcacatttacaaccagaatgtatcccagaaggactgcaactgcctgcacgtggtggagcccatgccagtgcctggccatgacgtggaggcctactgcctgctgtgcgagtgcaggtcatcattgtcatctacctgtccgtggtgggtgccctgttgctctacatggccttcctgatgctggtggaccctctgatccgaaagccggatgcatatactgagcaactgcacaatgaggaggagaatgaggatgctcgctctatggcagcagctgctgcatccctcgggggaccccgagcaaacacagtcctggagcgtgtggaaggtgcccagcagcggtggaagctgcaggtgcaggagcagcggaagacagtcttcgatcggcacaagatgctcagctagatgggctggtgtggttgggtcaaggccccaacaccatgg

SEQ ID NO: 194412 - DNA, 938 bp, Homo sapiens
  Payload ID: 18422
  Gene Name: transmembrane protein 9
  Uniprot ID: Q9P0T7
  ENST ID: ENST00000485839
  CDS Start-End: 323-874
cggcattgggggaggggacgggggtcgcggggctattgggggtcccagtccggcttaagacctctgggcgtggtgggcaccggccttcgccgtcggagcaggggtcccagactcgcacccaaaagttcccgtcgggcccgagcggggaggagctgcggggcgggcagaggcggagatggcggagggcggtgggacgtgatgcgcgggtcagagccgggccttgagaaggaactggaggcccctggcagcggtgtcccctcgaggacccctctgccgggctcaccaggtgtccggctttgctggcccagcaagcctgataagcatgaagctcttatctttggtggctgtggtcgggtgtttgctggtgcccccagctgaagccaacaagagttctgaagatatccggtgcaaatgcatctgtccaccttatagaaacatcagtgggcacatttacaaccagaatgtatcccagaaggactgcaactgcctgcacgtggtggagcccatgccagtgcctggccatgacgtggaggcctactgcctgctgtgcgagtgcaggtacgaggagcgcagcaccaccaccatcaaggtcatcattgtcatctacctgtccgtggtgggtgccctgttgctctacatggccttcctgatgctggtggaccctctgatccgaaagccggatgcatatactgagcaactgcacaatgaggaggagaatgaggatgctcgctctatggcagcagctgctgcatccctcgggggaccccgagcaaacacagtcctggagcgtgtggaaggtgcccagcagcggtggaagctgcaggtgcaggagcagcggaagacagtcttcgatcggcacaagatgctcagctagatgggctggtgtggttgggtcaaggccccaacaccatggctgccagcttccaggctggacaaag

SEQ ID NO: 194413 - DNA, 454 bp, Homo sapiens
  Payload ID: 18423
  Gene Name: transmembrane protein 91
  ENST ID: ENST00000342187
  CDS Start-End: 87-454
gtggtttgtgatgcagtggggagtagggttgtgcacggagtcaattgggataaatgtgaaacccctcctggagtttccccaaagccatggacagccctagtcttcgtgagcttcaacagcctctgctggagggcacagaatgtgagacccctgcccagaagcctggcaggcatgagctggggtcccccttaagagagatagcctttgccgagtccctgaggggtttgcagttcctgtcaccgcctcttccctccgtgagcgctggcctgggggaaccaaggccccctgatgttgaggacatgtcatccagtgacagtgactcggactgggatggaggcagccgtctttcaccatttctaccccacgaccacctcggcttggctgtcttctccatgctgtgttgtttctggcccgttggcatcgctgccttctgtctagcccagaagaccaacaa

SEQ ID NO: 194414 - DNA, 944 bp, Homo sapiens
  Payload ID: 18423
  Gene Name: transmembrane protein 91
  Uniprot ID: Q6ZNR0
  ENST ID: ENST00000356385
  CDS Start-End: 62-481
gggttgtgcacggagtcaattgggataaatgtgaaacccctcctggagtttccccaaagccatggacagccctagtcttcgtgagcttcaacagcctctgctggagggcacagaatgtgagacccctgcccagaagcctggcaggcatgagctggggtcccccttaagagagatagcctttgccgagtccctgaggggtttgcagttcctgtcaccgcctcttccctccgtgagcgctggcctgggggaaccaaggccccctgatgttgaggacatgtcatccagtgacagtgactcggactgggatggaggcagccgtctttcaccatttctaccccacgaccacctcggcttggctgtcttctccatgctgtgttgtttctggcccgttggcatcgctgccttctgtctagcccagaagcatccccagtgcctgacctatagtaggtgctacgtatctgcttttggaatacatgcatgaatgaatgaatgggtatgttgggtgggggagggaccaggggaagggtctgggactgaggggatgcctgggtcactgctgcccactgcctctacagaccaacaaggcttgggccaagggggacatccagggggcaggggccgcctcccgccgtgccttcctgctgggggtcctcgccgtcgggctgggcgtgtgcacgtatgcggctgccctggtgaccctggctgcctaccttgcctcccgagacccgccctagttgcccctacagccctcactgtgaaccctgaggccggcagcccagcaaatctgtgggcagagagtggagaatcttggtggatgaggctgcggcggcggcaggagcatctagaaacgggagcgagctggactggaacccttccccttcctggccaccgctcttcgggcggcagcaacctgagattaaacaccagacacccttgcagccaaa

SEQ ID NO: 194415 - DNA, 1389 bp, Homo sapiens
  Payload ID: 18423
  Gene Name: transmembrane protein 91
  Uniprot ID: Q6ZNR0
  ENST ID: ENST00000392002
  CDS Start-End: 661-1179
gaatgtaaagcgtttaacacagggcttgggtacagtctgccctcaatgaaccaatgatgtacccctaggcaatttacctaacctcggcttgccagtttcctcccgcgtgaaacaggacaataaacgattatgcctcttagggttgtgctgaggaatacatgtgtatgtaagtttatttgcaaagcacttagaacagggcgcacggtccttgttgctgttattattattggctattattgcgcaaaggggaagggaggcggggccaagccaggaaggccctggagaatccggggtgccccctcctccggcagagcttgggcctgggctcacgaggaaggggctgcagttctccaaggattcccgcctgctcccagacccccgggagtcgtaggaacccgttcctggacgctgacgtcggctttcagggatccctcgccggacgccgcggagggacagagcctgggaagccgtcgccccgccccgtccccgcccccgcgcgcagcgggcccggggcgctgagacccgcgtagagcaaagcgcaaggtcccagcgccccttggatcctcggtggcagggtccgggcaagtgtcattgcgagggttcaggaagccccggcctgtgatcgtgagcggaaacccctcctggagtttccccaaagccatggacagccctagtcttcgtgagcttcaacagcctctgctggagggcacagaatgtgagacccctgcccagaagcctggcaggcatgagctggggtcccccttaagagagatagcctttgccgagtccctgaggggtttgcagttcctgtcaccgcctcttccctccgtgagcgctggcctgggggaaccaaggccccctgatgttgaggacatgtcatccagtgacagtgactcggactgggatggaggcagccgtctttcaccatttctaccccacgaccacctcggcttggctgtcttctccatgctgtgttgtttctggcccgttggcatcgctgccttctgtctagcccagaagaccaacaaggcttgggccaagggggacatccagggggcaggggccgcctcccgccgtgccttcctgctgggggtcctcgccgtcgggctgggcgtgtgcacgtatgcggctgccctggtgaccctggctgcctaccttgcctcccgagacccgccctagttgcccctacagccctcactgtgaaccctgaggccggcagcccagcaaatctgtgggcagagagtggagaatcttggtggatgaggctgcggcggcggcaggagcatctagaaacgggagcgagctggactggaacccttccccttcctggccaccgctcttcgggcggcagcaacctgagattaaacaccagacacccttgcagccaaa

SEQ ID NO: 194416 - DNA, 721 bp, Homo sapiens
  Payload ID: 18423
  Gene Name: transmembrane protein 91
  Uniprot ID: Q6ZNR0
  ENST ID: ENST00000447302
  CDS Start-End: 152-535
ggggcgctgagacccgcgtagagcaaagcgcaaggtcccagcgccccttggatcctcggtggcagggtccgggcaagtgtcattgcgagggttcaggaagccccggcctgtgatcgtgagcggaaacccctcctggagtttccccaaagccatggacagccctagtcttcgtgagcttcaacagcctctgctggagggcacagaatgtgagacccctgcccagaagcctggcaggcatgagctggggtcccccttaagagagatagcctttgccgagtccctgaggggtttgcagttcctgtcaccgcctcttccctccgtgagcgctggcctgggggaaccaaggccccctgatgttgaggacatgtcatccagtgacagtgactcggactgggatggaggcagccgtctttcaccatttctaccccacgaccacctcggcttggctgtcttctccatgctgtgttgtttctggcccgttggcatcgctgccttctgtctagcccagaagttgcccctacagccctcactgtgaaccctgaggccggcagcccagcaaatctgtgggcagagagtggagaatcttggtggatgaggctgcggcggcggcaggagcatctagaaacgggagcgagctggactggaacccttccccttcctggccaccgctcttcgggcggcagcaacctgagattaaacaccagacacccttgcagccaaa

SEQ ID NO: 194417 - DNA, 864 bp, Homo sapiens
  Payload ID: 18423
  Gene Name: transmembrane protein 91
  Uniprot ID: Q6ZNR0
  ENST ID: ENST00000436170
  CDS Start-End: 307-678
ggattcccgcctgctcccagacccccgggagtcgtaggaacccgttcctggacgctgacgtcggctttcagggatccctcgccggacgccgcggagggacagagcctgggaagccgtcgccccgccccgtccccgcccccgcgcgcagcgggcccggggcgctgagacccgcgtagagcaaagcgcaaggtcccagcgccccttggatcctcggtggcagggtccgggcaagtgtcattgcgagggttcaggaagccccggcctgtgatcgtgagcggaaacccctcctggagtttccccaaagccatggacagccctagtcttcgtgagcttcaacagcctctgctggagggcacagaatgtgagacccctgcccagaagcctggcaggcatgagctggggtcccccttaagagagatagcctttgccgagtccctgaggggtttgcagttcctgtcaccgcctcttccctccgtgagcgctggcctgggggaaccaaggccccctgatgttgaggacatgtcatccagtgacagtgactcggactgggatggaggcagccgtctttcaccatttctaccccacgaccacctcggcttggctgtcttctccatgctgtgttgtttctggcccgttggcatcgctgccttctgtctagcccagaagccctcactgtgaaccctgaggccggcagcccagcaaatctgtgggcagagagtggagaatcttggtggatgaggctgcggcggcggcaggagcatctagaaacgggagcgagctggactggaacccttccccttcctggccaccgctcttcgggcggcagcaacctgagattaaacaccagacacccttgcagccaaa

SEQ ID NO: 194418 - DNA, 650 bp, Homo sapiens
  Payload ID: 18423
  Gene Name: transmembrane protein 91
  Uniprot ID: Q6ZNR0
  ENST ID: ENST00000413014
  CDS Start-End: 70-471
ggctcgcgcctctcccaggacccgcctggctgcgagatatgaaacccctcctggagtttccccaaagccatggacagccctagtcttcgtgagcttcaacagcctctgctggagggcacagaatgtgagacccctgcccagaagcctggcaggcatgagctggggtcccccttaagagagatagcctttgccgagtccctgaggggtttgcagttcctgtcaccgcctcttccctccgtgagcgctggcctgggggaaccaaggccccctgatgttgaggacatgtcatccagtgacagtgactcggactgggatggaggcagccgtctttcaccatttctaccccacgaccacctcggcttggctgtcttctccatgctgtgttgtttctggcccgttggcatcgctgccttctgtctagcccagaagacccgccctagttgcccctacagccctcactgtgaaccctgaggccggcagcccagcaaatctgtgggcagagagtggagaatcttggtggatgaggctgcggcggcggcaggagcatctagaaacgggagcgagctggactggaacccttccccttcctggccaccgctcttcgggcggcagcaacctgagattaaacaccagacacccttgcagccaaa

SEQ ID NO: 194419 - DNA, 725 bp, Homo sapiens
  Payload ID: 18423
  Gene Name: transmembrane protein 91
  Uniprot ID: Q6ZNR0
  ENST ID: ENST00000544232
  CDS Start-End: 145-546
tgagacccgcgtagagcaaagcgcaaggtcccagcgccccttggatcctcggtggcagggtccgggcaagtgtcattgcgagggttcaggaagccccggcctgtgatcgtgagcggaaacccctcctggagtttccccaaagccatggacagccctagtcttcgtgagcttcaacagcctctgctggagggcacagaatgtgagacccctgcccagaagcctggcaggcatgagctggggtcccccttaagagagatagcctttgccgagtccctgaggggtttgcagttcctgtcaccgcctcttccctccgtgagcgctggcctgggggaaccaaggccccctgatgttgaggacatgtcatccagtgacagtgactcggactgggatggaggcagccgtctttcaccatttctaccccacgaccacctcggcttggctgtcttctccatgctgtgttgtttctggcccgttggcatcgctgccttctgtctagcccagaagacccgccctagttgcccctacagccctcactgtgaaccctgaggccggcagcccagcaaatctgtgggcagagagtggagaatcttggtggatgaggctgcggcggcggcaggagcatctagaaacgggagcgagctggactggaacccttccccttcctggccaccgctcttcgggcggcagcaacctgagattaaacaccagacacccttgcagccaaa

SEQ ID NO: 194420 - DNA, 450 bp, Homo sapiens
  Payload ID: 18423
  Gene Name: transmembrane protein 91
  ENST ID: ENST00000537354
  CDS Start-End: 108-450
gcaggcaggaggcttggggaccttccagggggatcgtaggacgagaagaagaatattctttctggttgtgttgcgtgtgaaacccctcctggagtttccccaaagccatggacagccctagtcttcgtgagcttcaacagcctctgctggagggcacagaatgtgagacccctgcccagaagcctggcaggcatgagctggggtcccccttaagagagatagcctttgccgagtccctgaggggtttgcagttcctgtcaccgcctcttccctccgtgagcgctggcctgggggaaccaaggccccctgatgttgaggacatgtcatccagtgacagtgactcggactgggatggaggcagccgtctttcaccatttctaccccacgaccacctcggcttggctgtcttctccatgctgtgttgtttctggcccgttggcatcgctgcct

SEQ ID NO: 194421 - DNA, 1610 bp, Homo sapiens
  Payload ID: 18423
  Gene Name: transmembrane protein 91
  ENST ID: ENST00000542945
  CDS Start-End: 112-510
gcgccccttggatcctcggtggcagggtccgggcaagtgtcattgcgagggttcaggaagccccggcctgtgatcgtgagcggaaacccctcctggagtttccccaaagccatggacagccctagtcttcgtgagcttcaacagcctctgctggagggcacagaatgtgagacccctgcccagaagcctggcaggcatgagctggggtcccccttaagagagatagcctttgccgagtccctgaggggtttgcagttcctgtcaccgcctcttccctccgtgagcgctggcctgggggaaccaaggccccctgatgttgaggacatgtcatccagtgacagtgactcggactgggatggaggcagccgtctttcaccatttctaccccacgaccacctcggcttggctgtcttctccatgctgtgttgtttctggcccgttggcatcgctgccttctgtctagcccagaaggtcagtctgtgtgtgggacttggaggggactgggcataaaagagaaaaatgcaccacaaaaacaaagagccatatacctgaggcgggaaggtggaaggtagcccagagaacctgaactcaaatcctgagtctgccactctctgcaagattttttttgagtctcactttgtcgcccaggctggagtgcagtggtacaatctcggctcactgcaatctctgcctcttgggttcaagtgattctcctgccccagcctcctgagtagctgggattagaggcgcgcgctaccatgcctggctaatttttgaatttttaataaagacggggtttcaccacgttggccacgctggtctcgaactcctgacctcaagtgatcctcccatcttggcctcccaaagtgctgggattacaggcgtgagccacggtgcccagctctctgcaagattttgggcaagtcacttaacttccctgtgcctcactttcctcatctgtaaagtgggaataattgctacctctgggtcaatgtgagaatcaaatgagttagaatagtggcatataccattttaatgtttttatttattttttaaaatttattattattattattttttaccattttaatgtttttattaaccactcagcatccccagtgcctgacctatagtaggtgctacgtatctgcttttggaatacatgcatgaatgaatgaatgggtatgttgggtgggggagggaccaggggaagggtctgggactgaggggatgcctgggtcactgctgcccactgcctctacagaccaacaaggcttgggccaagggggacatccagggggcaggggccgcctcccgccgtgccttcctgctgggggtcctcgccgtcgggctgggcgtgtgcacgtatgcggctgccctggtgaccctggctgcctaccttgcctcccgagacccgccctagttgcccctacagccctcactgtgaaccctgaggccggcagcccagcaaatctgtgggcagagagtggagaatcttggtggatgaggctgcggcggcggcaggagcatctagaaacgggagcgagctggactggaacccttccccttcctggccaccgctcttcgggcggcagcaacctgagattaaa

SEQ ID NO: 194422 - DNA, 378 bp, Homo sapiens
  Payload ID: 18423
  Gene Name: transmembrane protein 91
  ENST ID: ENST00000546050
  CDS Start-End: 1-192
gagggcacagaatgtgagacccctgcccagaagcctggcaggcatgagctggggtcccccttaagagagatagcctttgccgagtccctgaggggtttgcagttcctgtcaccgcctcttccctccgtgagcgctggcctgggggaaccaaggccccctgatgttgagttgcccctacagccctcactgtgaaccctgaggccggcagcccagcaaatctgtgggcagagagtggagaatcttggtggatgaggctgcggcggcggcaggagcatctagaaacgggagcgagctggactggaacccttccccttcctggccaccgctcttcgggcggcagcaacctgagattaaacaccagacacccttgcagccaaa

SEQ ID NO: 194423 - DNA, 489 bp, Homo sapiens
  Payload ID: 18423
  Gene Name: transmembrane protein 91
  ENST ID: ENST00000546362
  CDS Start-End: 1-262
tcttccctccgtgagcgctggcctgggggaaccaaggccccctgatgttgaggacatgtcatccagtgacagtgactcggactgggatggaggcagccgtctttcaccatttctaccccacgaccacctcggcttggctgtcttctccatgctgtgttgtttctggcccgttggcatcgctgccttctgtctagcccagaagcatccccagtgcctgacctatagtaggtgctacgtatctgcttttggaatacatgcatgaatgaatgaatggacccgccctagttgcccctacagccctcactgtgaaccctgaggccggcagcccagcaaatctgtgggcagagagtggagaatcttggtggatgaggctgcggcggcggcaggagcatctagaaacgggagcgagctggactggaacccttccccttcctggccaccgctcttcgggcggcagcaacctgagattaaacaccagacacccttgca

SEQ ID NO: 194424 - DNA, 1843 bp, Homo sapiens
  Payload ID: 18423
  Gene Name: transmembrane protein 91
  ENST ID: ENST00000539627
  CDS Start-End: 322-720
gagaggaagggttggagggtgatgcagagagggagaggcggggagatgtcagagacggagacgaggcaacaggaccgtggaggagaaaaatagaaagggagagaaaatagtcggagagacaaaaaccaggagacccatgcgtggacagaaagactaacggagacgaaaagaaagaggcagatggggagacacgtgcgagacgagacacatgtgcatttgttggggagaagaggattggaggtgtcagtgttaaaggaacctctacaacgaaggtgaagccacggaagataaggaaacccctcctggagtttccccaaagccatggacagccctagtcttcgtgagcttcaacagcctctgctggagggcacagaatgtgagacccctgcccagaagcctggcaggcatgagctggggtcccccttaagagagatagcctttgccgagtccctgaggggtttgcagttcctgtcaccgcctcttccctccgtgagcgctggcctgggggaaccaaggccccctgatgttgaggacatgtcatccagtgacagtgactcggactgggatggaggcagccgtctttcaccatttctaccccacgaccacctcggcttggctgtcttctccatgctgtgttgtttctggcccgttggcatcgctgccttctgtctagcccagaaggtcagtctgtgtgtgggacttggaggggactgggcataaaagagaaaaatgcaccacaaaaacaaagagccatatacctgaggcgggaaggtggaaggtagcccagagaacctgaactcaaatcctgagtctgccactctctgcaagattttttttgagtctcactttgtcgcccaggctggagtgcagtggtacaatctcggctcactgcaatctctgcctcttgggttcaagtgattctcctgccccagcctcctgagtagctgggattagaggcgcgcgctaccatgcctggctaatttttgaatttttaataaagacggggtttcaccacgttggccacgctggtctcgaactcctgacctcaagtgatcctcccatcttggcctcccaaagtgctgggattacaggcgtgagccacggtgcccagctctctgcaagattttgggcaagtcacttaacttccctgtgcctcactttcctcatctgtaaagtgggaataattgctacctctgggtcaatgtgagaatcaaatgagttagaatagtggcatataccattttaatgtttttatttattttttaaaatttattattattattattttttaccattttaatgtttttattaaccactcagcatccccagtgcctgacctatagtaggtgctacgtatctgcttttggaatacatgcatgaatgaatgaatgggtatgttgggtgggggagggaccaggggaagggtctgggactgaggggatgcctgggtcactgctgcccactgcctctacagaccaacaaggcttgggccaagggggacatccagggggcaggggccgcctcccgccgtgccttcctgctgggggtcctcgccgtcgggctgggcgtgtgcacgtatgcggctgccctggtgaccctggctgcctaccttgcctcccgagacccgccctagttgcccctacagccctcactgtgaaccctgaggccggcagcccagcaaatctgtgggcagagagtggagaatcttggtggatgaggctgcggcggcggcaggagcatctagaaacgggagcgagctggactggaacccttccccttcctggccaccgctcttcgggcggcagcaacctgagattaaacaccagacacccttgcagccaaa

SEQ ID NO: 194425 - DNA, 400 bp, Homo sapiens
  Payload ID: 18423
  Gene Name: transmembrane protein 91
  ENST ID: ENST00000535712
  CDS Start-End: 1-181
ctgggatggaggcagccgtctttcaccatttctaccccacgaccacctcggcttggctgtcttctccatgctgtgttgtttctggcccgttggcatcgctgccttctgtctagcccagaagcatccccagtgcctgacctatagtaggtgctacgtatctgcttttggaatacatgcatgaatgaatgaatggttgcccctacagccctcactgtgaaccctgaggccggcagcccagcaaatctgtgggcagagagtggagaatcttggtggatgaggctgcggcggcggcaggagcatctagaaacgggagcgagctggactggaacccttccccttcctggccaccgctcttcgggcggcagcaacctgagattaaacaccagacacccttgcagcc

SEQ ID NO: 194426 - DNA, 757 bp, Homo sapiens
  Payload ID: 18423
  Gene Name: transmembrane protein 91
  ENST ID: ENST00000604123
  CDS Start-End: 6-578
tccagatgcgctgtggctttgcgggcggtgtgggtcaccagagaaagaggaccaggcggagaaggcttaatccgggggatgagacacaggggagccgaccagaggagggggacccagaacggaaggagagtcaggctgggaaacaaggaaacccctcctggagtttccccaaagccatggacagccctagtcttcgtgagcttcaacagcctctgctggagggcacagaatgtgagacccctgcccagaagcctggcaggcatgagctggggtcccccttaagagagatagcctttgccgagtccctgaggggtttgcagttcctgtcaccgcctcttccctccgtgagcgctggcctgggggaaccaaggccccctgatgttgaggacatgtcatccagtgacagtgactcggactgggatggaggcagccgtctttcaccatttctaccccacgaccacctcggcttggctgtcttctccatgctgtgttgtttctggcccgttggcatcgctgccttctgtctagcccagaagacccgccctagttgcccctacagccctcactgtgaaccctgaggccggcagcccagcaaatctgtgggcagagagtggagaatcttggtggatgaggctgcggcggcggcaggagcatctagaaacgggagcgagctggactggaacccttccccttcctggccaccgctcttcgggcggcagcaacctgagattaaacaccagacacccttgcagccaaa

SEQ ID NO: 194427 - DNA, 2767 bp, Homo sapiens
  Payload ID: 18424
  Gene Name: transmembrane protein 92
  Uniprot ID: Q6UXU6
  ENST ID: ENST00000300433
  CDS Start-End: 111-590
gtgtgatctcagctcactgcagccttgaactcctaggctcaagtgatcctcctacctcaacctccagagtaactgggactacaggaaagctcagtggcccccaagccaggatgtcccaagcttgggtccccggcctcgcgcccaccttgctgttcagcctgctggctggcccccaaaagattgcagccaaatgtggtctcatccttgcctgccccaaaggattcaaatgctgtggtgacagctgctgccaggagaacgagctcttccctggccccgtgaggatcttcgtcatcatcttcctggtcatcctgtccgtcttttgcatctgtggcctggctaagtgcttctgtcgcaactgcagagagccggagccagacagcccagtggattgccgggggcccctggaactgccctccatcatccccccagagagggtcagagtatccctttctgcgcccccacccccctacagtgaggtgattctgaagcccagcctgggcccaactcccacagagccaccccctccctacagcttcaggcctgaagaatataccggggatcagaggggcattgacaacccggccttctgagtcacctcctgcctggaatcttgccatcagcaacctcctccccagtgcctcctggatcaagctagagactgctggcaccccaggaatgtccctgcccatcctgccgtgtctctgttcattcttggatttaacttattactttttctgcttctgtttccaccccagctgcctctcttgtcctgagggttaggctggagtgacagtttccgcccaccccccagcccaagaaagaggctgccggaaagaaaatgctgaccattggaggtgcccaacagtagaatgggctactgtgaggggtagtaagagccccatttctggaggtatgcaaatcttgactggacagccagctctgagattttatcagggcacttctatacctgtgggacattggactggatgagccctgagccagcttccactcctacctgaatagagaactcactgcacccacccacaacacatgataaacacatgtcctcactgaatgttactgattgcggctgagggcctgcctctggctgtgtggggaggtgggtggagaggtgagcccaggcactgctgaggggtgcggtgatggggtcgctgcgccgcaatcccaccactgatgagccacctgggaggtctgggaggacagtccatccatgggccgccctcggagagaggcttgttctagatgtattggctgtctgttttttgatgtctctgtgtgccaaacagcctggaaatggggtacgcgtgtcccttgtgtgggtttcccaatcccttccgcccaaggctttcctgggacacatggagcccagctctctggctgtcttaccatgagaagttggtaagttggctgtgagggggttggatccaggaagcagccctgggacagcccattctgctgttgatagcaggaaaccacctgctgggagacaatgggggtggggaaaagcccaggagagcagtgggtggggctgggcatccgtggagtggggctttaggagaccttgaacggccccaccctggaatctcctacaggaaggtgaggaggtggcaggttccacccttctctaccagccccgctcgctcgtgggagttaaccccctaggggagaagagtcttcactggggttcgacccatgggggcctggcatagtcatgcagaatggggcgggacaatgccaatgccttgggactcagacagggctgagtgcctccaccctgatttttgcctctgcactgcgcccccacagcccactcaatgccagcctccttctccaggcagagagccccatgtcaatgctggccaaagctctcaggaggattggaggtagaactggccctggtatgccaacaggggtgcctcttttagtgctctcccaataatgctcatcctgggggcatcaggacgcaggcaggtggcagagctgggggcagcttgatggcacaggcagccccaaagatgccaggaacagggactgtccgggtgtgggttcccagtgagatagggccctggaaggagtgcagcagttactgacaatatagtgccagggttggccataggagaatgagcccaagcgtaagtggaagtttccctttactttcagggattggtcaggggtggcagaaaacatgtgggttctttgtgtagatgtggctagttccaattagagaagtcctgcagctgatgttgccctcaccgtgatagcaggaggatgttgagaaatgggcttgggagacctggaggagaagttaccctcggcccagacgttgccttcctttcatcacagggcctttaactcctcctagggagtagcagagtggccctagggaaagtggccatcctgaaacctagtgttgctgtgacctggtgacagaaatggaaacctctgtggctcttctggtcatccttggtgggagtgggaatggtgtcacctttctagagggccatctggcaccatgtaatcacgccacagatctttacgaagctcctgctatgtaggaaacactatgcctggcactgggtatccattaaaatgtaaaatgcacgtgacctggcaattccacttctagaaatgagccttcagaagtgctcatacaaaagagctcaataagtatcatgcactaattcattgtgccaccagagctccctatgcagccttttaaaagaataaataggatctgtagcaccaa

SEQ ID NO: 194428 - DNA, 573 bp, Homo sapiens
  Payload ID: 18424
  Gene Name: transmembrane protein 92
  Uniprot ID: Q6UXU6
  ENST ID: ENST00000507382
  CDS Start-End: 76-555
ataggtggagagaagtgggagaggtcgcagccccgccttctctacacaggaaagctcagtggcccccaagccaggatgtcccaagcttgggtccccggcctcgcgcccaccttgctgttcagcctgctggctggcccccaaaagattgcagccaaatgtggtctcatccttgcctgccccaaaggattcaaatgctgtggtgacagctgctgccaggagaacgagctcttccctggccccgtgaggatcttcgtcatcatcttcctggtcatcctgtccgtcttttgcatctgtggcctggctaagtgcttctgtcgcaactgcagagagccggagccagacagcccagtggattgccgggggcccctggaactgccctccatcatccccccagagagggtcagagtatccctttctgcgcccccacccccctacagtgaggtgattctgaagcccagcctgggcccaactcccacagagccaccccctccctacagcttcaggcctgaagaatataccggggatcagaggggcattgacaacccggccttctgagtcacctcctgcctggaa

SEQ ID NO: 194429 - DNA, 5213 bp, Homo sapiens
  Payload ID: 18425
  Gene Name: transmembrane protein 94
  Uniprot ID: Q12767
  ENST ID: ENST00000314256
  CDS Start-End: 395-4465
actcggcacctaattccgccaggctcccagaggggcggttgcagctacagcctagcacgccgcgtagccaataagaagccagaattccccctattctcaaatcctgaccaatcggtggcctgaactttagctctctggccggcgcctctgttgcccggaagggaggcaagcccccttagagttgccagtaacggacatggctgcggcccccggaggaggggacgtgaagtgaggagggggttgggaggggagaggacgcgggcgaggaagaccagccccggggccccgatgttgtgactgtgacagactcactggggtttgtacatgctggggaggagccttcctttcaggggtgaccacattcatctgggcatgcctgcagtactcttggcccatggacctgaaggagaagcacctgggcgagcctccctcagccctgggcctgtccacgcggaaggccctcagcgtcctgaaggagcagctggaggcagtgctggaaggacatctcagggagcggaagaagtgtctgacgtggaaggaggtgtggagaagcagcttcctccaccacagtaaccgctgctcctgcttccactggccgggggcctcactcatgctactggccgtgctgctgctgctgggctgctgcgggggacagccagccgggagccgtggggtggggctggtgaatgcctcggccttgttcctgttactgcttctcaaccttgtgctcatcgggcggcaagaccggctgaagcgtcgggaggtagagcggaggctgcgagggatcattgaccaaatccaagatgccctcagggatggcagggagatccagtggcccagtgccatgtatccagacctccacatgccttttgcgccatcctggtccttgcactgggcctacagagacggacacctggtcaacctgccagtcagcctgctggttgaaggagacatcatagctttgaggcctggccaggaatcgtttgcttctctgagggggatcaaggatgacgagcacatcgtcctggagccgggagacctcttcccccccttctcccctccaccctcaccccggggagaagtggagagagggccacagagcccccagcagcaccggcttttccgtgtccttgagacccctgtgattgacaacatcagatggtgcctggacatggccctgtcccgaccagtcactgccctggacaatgagcggttcacagtgcagtcggtgatgctacactatgctgtgcccgtggtcctggccggcttcctcatcaccaatgccctgcgcttcatcttcagtgccccgggggtcacttcctggcagtacaccctcctccagctccaggtgaatggcgtcctgcccatcctccccctgctctttccagtcctctgggttctggcaactgcctgtggagaggcccgtgtcctggcccagatgagcaaggcctcacccagctccctgctggctaagttctcagaggatactctcagcagctatacggaggctgtctcctctcaggaaatgctgcgctgcatttggggccacttcctgagggtgctcggggggacatcgccaacgctgagccacagttccagcctgctgcacagcctgggctctgtcacggtcctgtgctgtgtggacaaacaggggatcctgtcatggccaaatcccagcccagagactgtactgttcttcagcgggaaggtggagccccctcacagcagccatgaggacctcaccgatggcctatccacccgctccttctgccatcccgagccccatgaacgagacgccctcctggctggctccctgaacaacaccctgcacctttccaatgagcaggagcgtggcgactggcctggcgaggctcccaagccccccgagccctattcacaccacaaagcgcatggccgcagcaaacacccatctggctccaacgtgagcttcagcagggacaccgagggtggtgaagaagagcccagcaagacccagcctgggatggagagcgacccctacgaagcagaggactttgtgtgtgactaccacctggagatgctgagcctgtcccaggaccagcagaacccctcctgcatccagtttgatgactccaactggcagctgcacctcacctccctcaaacccctgggcctcaatgtgctgctgaacctgtgtgatgccagcgtcaccgagcgcctgtgccgattctccgaccacctgtgcaacatcgccctgcaagagagccacagcgccgtgctgcccgtccatgtgccctggggcctctgcgagcttgcccgcctcattggcttcactcctggggccaaggagcttttcaagcaggagaaccatctggcgctgtaccgcctccccagtgccgagacaatgaaggagacatcgctggggcggctctcctgtgtcaccaagcggcggcctcccctcagccacatgatcagcctcttcattaaagacaccaccaccagcacagagcagatgctgtcccatggcaccgctgatgtggtcttagaggcctgcacagacttctgggacggagctgacatctaccctctctcgggatctgacagaaagaaagtgctggacttctaccagcgagcctgcctgtctgggtattgctctgccttcgcctacaagcccatgaactgcgccctgtcctctcagctcaatggcaagtgcatcgagctggtacaggtgcccggccaaagcagcatcttcaccatgtgcgagctgcccagcaccatccccatcaagcagaacgcccgccgcagcagctggagctctgacgaagggatcggggaggtgctggagaaggaagactgcatgcaggccctgagcggccagatcttcatgggcatggtgtcctcccagtaccaggcccggctggacatcgtgcgcctcattgatgggcttgtcaacgcctgcatccgctttgtctacttctctttggaggatgagctcaaaagcaaggtgtttgcagaaaaaatgggcctggagacaggctggaactgccacatctccctcacacccaatggtgacatgcctggctccgagatccccccctccagccccagccacgcaggctccctgcatgatgacctgaatcaggtgtcccgagatgatgcagaagggctcctcctcatggaggaggagggccactcggacctcatcagcttccagcctacggacagcgacatccccagcttcctggaggactccaaccgggccaagctgccccggggtatccaccaagtgcggccccacctgcagaacattgacaacgtgcccctgctagtgccccttttcaccgactgcaccccagagaccatgtgtgagatgataaagatcatgcaagagtacggggaggtgacctgctgcctgggcagctctgccaacctgcggaacagctgcctcttcctccagagcgacatcagcattgccctggatcccctgtacccatcccgttgctcctgggagacctttggctacgccaccagcatcagcatggcccaggcctcggatggcctttctcccctgcagctgtcagggcagctcaacagcctgccctgttccctgacctttcgccaggaggagaccatcagcatcatccggcttatcgaacaggctcggcatgccacctatggcatccgtaagtgcttcctcttcctgctgcagtgccagctgactcttgtggtcatccagttcctttcttgcctggtccagctgccgccactcctgagtaccaccgacatcctgtggctgtcctgcttttgctaccctctgctcagcatctctctgctggggaagcccccccatagctccatcatgtctatggcaacggggaaaaacctccagtccattcccaagaagacccagcactacttcctgctctgcttcctgctcaagttcagcctcaccatcagctcctgcctcatctgctttggcttcacactgcagagcttctgtgacagctcccgggaccgcaacctcaccaactgctcctccgtcatgctgcccagcaacgacgacagggctccagcctggtttgaggactttgccaatggactgctgtcggctcagaagctcacggccgccctgattgtcctgcacactgtcttcatttccatcacccatgtgcatcgcaccaagcccctgtggagaaagagccccttgaccaacctctggtgggccgtgacagtgcctgtggtgctgctgggtcaggtggtccagacggctgtggacctgcagctgtggacacacagggacagccacgtccactttggcctggaggacgtgcccctgctgacatggctcctgggctgcctgtccctggtccttgtggtggtgaccaatgagatcgtgaagctacatgagattcgggtccgagtccgctaccagaagcgacagaagctgcagtttgaaactaagctgggcatgaactctcccttctgagccactggctgtggtggctgtagttgcccccgtccctggggctaaagccagacccatttctgaacaggggagtttgtatcatgaatgtttccaggtttgctcctgcacccgtggcactggaaacccagctccccgtgtcagaccccgctgtcttcctgagccctggggctcactgtggaggagctgacggcctgggcccttggccagtcctggctcttccctgggcctcaccagggacactcttgaatgtatggcctcaggcgctccctagaggggccctaaaccccctcacctgtgagctaccccctttagggatcccttgcccccttggagatcccttgccccccagtgcctctgctcgtgggtccctggacacggccttgaagccaaccttctttggaggagcaacagcagcagccttggccgacgcgtccaactcccaaggctgccgtggagggcaggggggtggtgcttgcctggatgtggccccgagtgcctcccctccctccctctgtgggggagtctcccgcctgaacctgaagatggagcagggcccccgcttcgccctggagcctcttcctgtgcctggctcaagctggctgcctgtcagtcttggggaatctggcccaggtctcctcagcctctgccccagttctgggagaagtttctactggtgtatattttttactggaaatgagccttttaggaatgaatgtagactggtttgtattaaaatgtgtcaattgct

SEQ ID NO: 194430 - DNA, 4703 bp, Homo sapiens
  Payload ID: 18425
  Gene Name: transmembrane protein 94
  ENST ID: ENST00000375248
  CDS Start-End: 193-4293
gaattaatcagcagattgaagctctgctctgctgcgcctgattctgtgcagcacccggcttcttgctcacacactctcagctgtctccgtctcttctctcctcttctctctctctctcttttcaccctccccgctttgagggaggtgttggaagttcttgcagctgactgcttgtggctcagactctggcccatgctctttaagcaggcagagctatggatgccccatcagggcaaaggcaacaaaggcgagcctccctcagccctgggcctgtccacgcggaaggccctcagcgtcctgaaggagcagctggaggcagtgctggaaggacatctcagggagcggaagaagtgtctgacgtggaaggaggtgtggagaagcagcttcctccaccacagtaaccgctgctcctgcttccactggccgggggcctcactcatgctactggccgtgctgctgctgctgggctgctgcgggggacagccagccgggagccgtggggtggggctggtgaatgcctcggccttgttcctgttactgcttctcaaccttgtgctcatcgggcggcaagaccggctgaagcgtcgggaggtagagcggaggctgcgagggatcattgaccaaatccaagatgccctcagggatggcagggagatccagtggcccagtgccatgtatccagacctccacatgccttttgcgccatcctggtccttgcactgggcctacagagacggacacctggtcaacctgccagtcagcctgctggttgaaggagacatcatagctttgaggcctggccaggaatcgtttgcttctctgagggggatcaaggatgacgagcacatcgtcctggagccgggagacctcttcccccccttctcccctccaccctcaccccggggagaagtggagagagggccacagagcccccagcagcaccggcttttccgtgtccttgagacccctgtgattgacaacatcagatggtgcctggacatggccctgtcccgaccagtcactgccctggacaatgagcggttcacagtgcagtcggtgatgctacactatgctgtgcccgtggtcctggccggcttcctcatcaccaatgccctgcgcttcatcttcagtgccccgggggtcacttcctggcagtacaccctcctccagctccaggtgaatggcgtcctgcccatcctccccctgctctttccagtcctctgggttctggcaactgcctgtggagaggcccgtgtcctggcccagatgagcaaggcctcacccagctccctgctggctaagttctcagaggatactctcagcagctatacggaggctgtctcctctcaggaaatgctgcgctgcatttggggccacttcctgagggtgctcggggggacatcgccaacgctgagccacagttccagcctgctgcacagcctgggctctgtcacggtcctgtgctgtgtggacaaacaggggatcctgtcatggccaaatcccagcccagagactgtactgttcttcagcgggaaggtggagccccctcacagcagccatgaggacctcaccgatggcctatccacccgctccttctgccatcccgagccccatgaacgagacgccctcctggctggctccctgaacaacaccctgcacctttccaatgagcaggagcgtggcgactggcctggcgaggctcccaagccccccgagccctattcacaccacaaagcgcatggccgcagcaaacacccatctggctccaacgtgagcttcagcagggacaccgagggtggtgaagaagagcccagcaagacccagcctgggatggagagcgacccctacgaagcagaggactttgtgtgtgactaccacctggagatgctgagcctgtcccaggaccagcagaacccctcctgcatccagtttgatgactccaactggcagctgcacctcacctccctcaaacccctgggcctcaatgtgctgctgaacctgtgtgatgccagcgtcaccgagcgcctgtgccgattctccgaccacctgtgcaacatcgccctgcaagagagccacagcgccgtgctgcccgtccatgtgccctggggcctctgcgagcttgcccgcctcattggcttcactcctggggccaaggagcttttcaagcaggagaaccatctggcgctgtaccgcctccccagtgccgagacaatgaaggagacatcgctggggcggctctcctgtgtcaccaagcggcggcctcccctcagccacatgatcagcctcttcattaaagacaccaccaccagcacagagcagatgctgtcccatggcaccgctgatgtggtcttagaggcctgcacagacttctgggacggagctgacatctaccctctctcgggatctgacagaaagaaagtgctggacttctaccagcgagcctgcctgtctgggtattgctctgccttcgcctacaagcccatgaactgcgccctgtcctctcagctcaatggcaagtgcatcgagctggtacaggtgcccggccaaagcagcatcttcaccatgtgcgagctgcccagcaccatccccatcaagcagaacgcccgccgcagcagctggagctctgacgaagggatcggggaggtgctggagaaggaagactgcatgcaggccctgagcggccagatcttcatgggcatggtgtcctcccagtaccaggcccggctggacatcgtgcgcctcattgatgggcttgtcaacgcctgcatccgctttgtctacttctctttggaggatgagctcaaaagcaaggtgtttgcagaaaaaatgggcctggagacaggctggaactgccacatctccctcacacccaatggtgacatgcctggctccgagatccccccctccagccccagccacgcaggctccctgcatgatgacctgaatcaggtgtcccgagatgatgcagaagggctcctcctcatggaggaggagggccactcggacctcatcagcttccagcctacggacagcgacatccccagcttcctggaggactccaaccgggccaagctgccccggggtatccaccaagtgcggccccacctgcagaacattgacaacgtgcccctgctagtgccccttttcaccgactgcaccccagagaccatgtgtgagatgataaagatcatgcaagagtacggggaggtgacctgctgcctgggcagctctgccaacctgcggaacagctgcctcttcctccagagcgacatcagcattgccctggatcccctgtacccatcccgttgctcctgggagacctttggctacgccaccagcatcagcatggcccaggcctcggatggcctttctcccctgcagctgtcagggcagctcaacagcctgccctgttccctgacctttcgccaggaggagaccatcagcatcatccggcttatcgaacaggctcggcatgccacctatggcatccgtaagtgcttcctcttcctgctgcagtgccagctgactcttgtggtcatccagttcctttcttgcctggtccagctgccgccactcctgagtaccaccgacatcctgtggctgtcctgcttttgctaccctctgctcagcatctctctgctggggaagcccccccatagctccatcatgtctatggcaacggggaaaaacctccagtccattcccaagaagacccagcactacttcctgctctgcttcctgctcaagttcagcctcaccatcagctcctgcctcatctgctttggcttcacactgcagagcttctgtgacagctcccgggaccgcaacctcaccaactgctcctccgtcatgctgcccagcaacgacgacagggctccagcctggtttgaggactttgccaatggactgctgtcggctcagaagctcacggccgccctgattgtcctgcacactgtcttcatttccatcacccatgtgcatcgcaccaagcccctgtggagaaagagccccttgaccaacctctggtgggccgtgacagtgcctgtggtgctgctgggtcaggtggtccagacggctgtggacctgcagctgtggacacacagggacagccacgtccactttggcctggaggacgtgcccctgctgacatggctcctgggctgcctgtccctggtccttgtggtggtgaccaatgagatcgtgaagctacatgagattcgggtccgagtccgctaccagaagcgacagaagctgcagtttgaaactaagctgggcatgaactctcccttctgagccactggctgtggtggctgtagttgcccccgtccctggggctaaagccagacccatttctgaacaggggagtttgtatcatgaatgtttccaggtttgctcctgcacccgtggcactggaaacccagctccccgtgtcagaccccgctgtcttcctgagccctggggctcactgtggaggagctgacggcctgggcccttggccagtcctggctcttccctgggcctcaccagggacactcttgaatgtatggcctcaggcgctccctagaggggccctaaaccccctcacctgtgagctaccccctttagggatcccttgcccccttggagatcccttgccccccagtgcctctgctcgtgggtccctggacacggccttgaagccaaccttctttggaggagcaaca

SEQ ID NO: 194431 - DNA, 384 bp, Homo sapiens
  Payload ID: 18425
  Gene Name: transmembrane protein 94
  ENST ID: ENST00000577245
  CDS Start-End: 1-384
ccccatagctccatcatgtctatggcaacggggaaaaacctccagtccattcccaagaagacccagcactacttcctgctctgcttcctgctcaagttcagcctcaccatcagctcctgcctcatctgctttggcttcacactgcagagcttctgtgacagctcccgggaccgcaacctcaccaactgctcctccgtcatgctgcccagggctccagcctggtttgaggactttgccaatggactgctgtcggctcagaagctcacggccgccctgattgtcctgcacactgtcttcatttccatcacccatgtgcatcgcaccaagcccctgtggagaaagagccccttgaccaacctctggtgggccgtgacagtgcctgtg

SEQ ID NO: 194432 - DNA, 564 bp, Homo sapiens
  Payload ID: 18425
  Gene Name: transmembrane protein 94
  ENST ID: ENST00000582455
  CDS Start-End: 393-564
agtaacggacatggctgcggcccccggaggaggggacgtgaagtgaggagggggttgggaggggagaggacgcgggcgaggaagaccagccccggggccccgaagcgttttcaggctcctcggaagctcaccatccatgccatcggataaagtgactcctgtggaatgccctcgttcctgtaccgcacacccctggagcccaggtctcctggttcctagcatgccacgatgcggcccctgcccgctgcccagcgccagatgcaagcaaagccccgctctttcattgatgttgtgactgtgacagactcactggggtttgtacatgctggggaggagccttcctttcaggggtgaccacattcatctgggcatgcctgcagtactcttggcccatggacctgaaggagaagcacctgggcgagcctccctcagccctgggcctgtccacgcggaaggccctcagcgtcctgaaggagcagctggaggcagtgctggaaggacatctcagggagcggaagaagtgtctgacgtggaaggaggtgtggagaagcagcttcctccacc

SEQ ID NO: 194433 - DNA, 566 bp, Homo sapiens
  Payload ID: 18425
  Gene Name: transmembrane protein 94
  ENST ID: ENST00000579707
  CDS Start-End: 1-489
atgctctttaagcaggcagagctatggatgccccatcagggcaaaggcaacaaaggcgagcctccctcagccctgggcctgtccacgcggaaggccctcagcgtcctgaaggagcagctggaggcagtgctggaaggacatctcagggagcggaagaagtgtctgacgtggaaggaggtgtggagaagcagcttcctccaccacagtaaccgctgctcctgcttccactggccgggggcctcactcatgctactggccgtgctgctgctgctgggctgctgcgggggacagccagccgggagccgtggggtggggctggtgaatgcctcggccttgttcctgttactgcttctcaaccttgtgctcatcgggcggcaagaccggctgaagcgtcgggaggtagagcggaggctgcgagggatcattgaccaaatccaagcctcttctcttcctcctcattctgatgctgaaactactcaccagtcctaggcccactgtgtatcagcctctgcctctgtgcctctctccactgttctctgctgatgccctcagggatggcagggaga

SEQ ID NO: 194434 - DNA, 565 bp, Homo sapiens
  Payload ID: 18425
  Gene Name: transmembrane protein 94
  ENST ID: ENST00000582186
  CDS Start-End: 460-565
agagttgccagtaacggacatggctgcggcccccggaggaggggacgtgaagtgaggagggggttgggaggggagaggacgcgggcgaggaagaccagccccggggccccgatgttgtgactgtgacagactcactggggtttgtacatgctggggaggagccttcctttcaggggtgaccacattcatctgggcatgcctgcagtactcttggcccatggacctgaaggagaagcacctggtaggccatatcctattaccttatagggcgagcctccctcagccctgggcctgtccacgcggaaggccctcagcgtcctgaaggagcagctggaggcagtgctggaaggacatctcagggagcggaagaagtgtctgacgtggaaggaggtgtggagaagcagcttcctccaccacagtaaccgctgctcctgcttccactggccgggggcctcactcatgctactggccgtgctgctgctgctgggctgctgcgggggacagccagccgggagccgtggggtggggctggtgaatgcctcggccttgttcctgttactgcttc

SEQ ID NO: 194435 - DNA, 528 bp, Homo sapiens
  Payload ID: 18425
  Gene Name: transmembrane protein 94
  ENST ID: ENST00000584694
  CDS Start-End: 1-528
gtggctgtcctgcttttgctaccctctgctcagcatctctctgctggggaagcccccccatagctccatcatgtctatggcaacggggaaaaacctccagtccattcccaagaagagcttctgtgacagctcccgggaccgcaacctcaccaactgctcctccgtcatgctgcccagcaacgacgacagggctccagcctggtttgaggactttgccaatggactgctgtcggctcagaagctcacggccgccctgattgtcctgcacactgtcttcatttccatcacccatgtgcatcgcaccaagcccctgtggagaaagagccccttgaccaacctctggtgggccgtgacagtgcctgtggtgctgctgggtcaggtggtccagacggctgtggacctgcagctgtggacacacagggacagccacgtccactttggcctggaggacgtgcccctgctgacatggctcctgggctgcctgtccctggtccttgtggtggtgaccaatgagatcgtgaagctaca

SEQ ID NO: 194436 - DNA, 905 bp, Homo sapiens
  Payload ID: 18425
  Gene Name: transmembrane protein 94
  ENST ID: ENST00000578853
  CDS Start-End: 1-905
cgggaaggtggagccccctcacagcagccatgaggacctcaccgatggcctatccacccgctccttctgccatcccgagccccatgaacgagacgccctcctggctggctccctgaacaacaccctgcacctttccaatgagcaggagcgtggcgactggcctggcgaggctcccaagccccccgagccctattcacaccacaaagcgcatggccgcagcaaacacccatctggctccaacacccagcctgggatggagagcgacccctacgaagcagaggactttgtgtgtgactaccacctggagatgctgagcctgtcccaggaccagcagaacccctcctgcatccagtttgatgactccaactggcagctgcacctcacctccctcaaacccctgggcctcaatgtgctgctgaacctgtgtgatgccagcgtcaccgagcgcctgtgccgattctccgaccacctgtgcaacatcgccctgcaagagagccacagcgccgtgctgcccgtccatgtgccctggggcctctgcgagcttgcccgcctcattggcttcactcctggggccaaggagcttttcaagcaggagaaccatctggcgctgtaccgcctccccagtgccgagacaatgaaggagacatcgctggggcggctctcctgtgtcaccaagcggcggcctcccctcagccacatgatcagcctcttcattaaagacaccaccaccagcacagagcagatgctgtcccatggcaccgctgatgtggtcttagaggcctgcacagacttctgggacggagctgacatctaccctctctcgggatctgacagaaagaaagtgctggacttctaccagcgagcctgcctgtctgggtattgctctgccttcgcctacaagccca

SEQ ID NO: 194437 - DNA, 545 bp, Homo sapiens
  Payload ID: 18425
  Gene Name: transmembrane protein 94
  ENST ID: ENST00000581519
  CDS Start-End: 171-545
cataaagcctttaagtccattcctggtgttcaagtgagaaggttctgggtcaggcgtggcactgatgttgtgactgtgacagactcactggggtttgtacatgctggggaggagccttcctttcaggggtgaccacattcatctgggcatgcctgcagtactcttggcccatggacctgaaggagaagcacctgggcgagcctccctcagccctgggcctgtccacgcggaaggccctcagcgtcctgaaggagcagctggaggcagtgctggaaggacatctcagggagcggaagaagtgtctgacgtggaaggaggtgtggagaagcagcttcctccaccacagtaaccgctgctcctgcttccactggccgggggcctcactcatgctactggccgtgctgctgctgctgggctgctgcgggggacagccagccgggagccgtggggtggggctggtgaatgcctcggccttgttcctgttactgcttctcaaccttgtgctcatcgggcggcaagaccggctgaagcgtcgggaggtagag

SEQ ID NO: 194438 - DNA, 3543 bp, Homo sapiens
  Payload ID: 18425
  Gene Name: transmembrane protein 94
  ENST ID: ENST00000579208
  CDS Start-End: 209-3232
agtaacggacatggctgcggcccccggaggaggggacgtgaagtgaggagggggttgggaggggagaggacgcgggcgaggaagaccagccccggggccccgatgttgtgactgtgacagactcactggggtttgtacatgctggggaggagccttcctttcaggggtgaccacattcatctgggcatgcctgcagtactcttggcccatggacctgaaggagaagcacctgctggctaagttctcagaggatactctcagcagctatacggaggctgtctcctctcaggaaatgctgcgctgcatttggggccacttcctgagggtgctcggggggacatcgccaacgctgagccacagttccagcctgctgcacagcctgggctctgtcacggtcctgtgctgtgtggacaaacaggggatcctgtcatggccaaatcccagcccagagactgtactgttcttcagcgggaaggtggagccccctcacagcagccatgaggacctcaccgatggcctatccacccgctccttctgccatcccgagccccatgaacgagacgccctcctggctggctccctgaacaacaccctgcacctttccaatgagcaggagcgtggcgactggcctggcgaggctcccaagccccccgagccctattcacaccacaaagcgcatggccgcagcaaacacccatctggctccaacgtgagcttcagcagggacaccgagggtggtgaagaagagcccagcaagacccagcctgggatggagagcgacccctacgaagcagaggactttgtgtgtgactaccacctggagatgctgagcctgtcccaggaccagcagaacccctcctgcatccagtttgatgactccaactggcagctgcacctcacctccctcaaacccctgggcctcaatgtgctgctgaacctgtgtgatgccagcgtcaccgagcgcctgtgccgattctccgaccacctgtgcaacatcgccctgcaagagagccacagcgccgtgctgcccgtccatgtgccctggggcctctgcgagcttgcccgcctcattggcttcactcctggggccaaggagcttttcaagcaggagaaccatctggcgctgtaccgcctccccagtgccgagacaatgaaggagacatcgctggggcggctctcctgtgtcaccaagcggcggcctcccctcagccacatgatcagcctcttcattaaagacaccaccaccagcacagagcagatgctgtcccatggcaccgctgatgtggtcttagaggcctgcacagacttctgggacggagctgacatctaccctctctcgggatctgacagaaagaaagtgctggacttctaccagcgagcctgcctgtctgggtattgctctgccttcgcctacaagcccatgaactgcgccctgtcctctcagctcaatggcaagtgcatcgagctggtacaggtgcccggccaaagcagcatcttcaccatgtgcgagctgcccagcaccatccccatcaagcagaacgcccgccgcagcagctggagctctgacgaagggatcggggaggtgctggagaaggaagactgcatgcaggccctgagcggccagatcttcatgggcatggtgtcctcccagtaccaggcccggctggacatcgtgcgcctcattgatgggcttgtcaacgcctgcatccgctttgtctacttctctttggaggatgagctcaaaagcaaggtgtttgcagaaaaaatgggcctggagacaggctggaactgccacatctccctcacacccaatggtgacatgcctggctccgagatccccccctccagccccagccacgcaggctccctgcatgatgacctgaatcaggtgtcccgagatgatgcagaagggctcctcctcatggaggaggagggccactcggacctcatcagcttccagcctacggacagcgacatccccagcttcctggaggactccaaccgggccaagctgccccggggtatccaccaagtgcggccccacctgcagaacattgacaacgtgcccctgctagtgccccttttcaccgactgcaccccagagaccatgtgtgagatgataaagatcatgcaagagtacggggaggtgacctgctgcctgggcagctctgccaacctgcggaacagctgcctcttcctccagagcgacatcagcattgccctggatcccctgtacccatcccgttgctcctgggagacctttggctacgccaccagcatcagcatggcccaggcctcggatggcctttctcccctgcagctgtcagggcagctcaacagcctgccctgttccctgacctttcgccaggaggagaccatcagcatcatccggcttatcgaacaggctcggcatgccacctatggcatccgtaagtgcttcctcttcctgctgcagtgccagctgactcttgtggtcatccagttcctttcttgcctggtccagctgccgccactcctgagtaccaccgacatcctgtggctgtcctgcttttgctaccctctgctcagcatctctctgctggggaagcccccccatagctccatcatgtctatggcaacggggaaaaacctccagtccattcccaagaagacccagcactacttcctgctctgcttcctgctcaagttcagcctcaccatcagctcctgcctcatctgctttggcttcacactgcagagcttctgtgacagctcccgggaccgcaacctcaccaactgctcctccgtcatgctgcccagcaacgacgacagggctccagcctggtttgaggactttgccaatggactgctgtcggctcagaagctcacggccgccctgattgtcctgcacactgtcttcatttccatcacccatgtgcatcgcaccaagcccctgtggagaaagagccccttgaccaacctctggtgggccgtgacagtgcctgtggtgctgctgggtcaggtggtccagacggctgtggacctgcagctgtggacacacagggacagccacgtccactttggcctggaggacgtgcccctgctgacatggctcctgggctgcctgtccctggtccttgtggtggtgaccaatgagatcgtgaagctacatgagattcgggtccgagtccgctaccagaagcgacagaagctgcagtttgaaactaagctgggcatgaactctcccttctgagccactggctgtggtggctgtagttgcccccgtccctggggctaaagccagacccatttctgaacaggggagtttgtatcatgaatgtttccaggtttgctcctgcacccgtggcactggaaacccagctccccgtgtcagaccccgctgtcttcctgagccctggggctcactgtggaggagctgacggcctgggcccttggccagtcctggctcttccctgggcctcaccagggacactcttgaatgtatggcctcaggcgctccctagaggggccctaaaccccctcacctgtgagctacccccttta

SEQ ID NO: 194439 - DNA, 522 bp, Homo sapiens
  Payload ID: 18425
  Gene Name: transmembrane protein 94
  ENST ID: ENST00000581252
  CDS Start-End: 257-522
agtaacggacatggctgcggcccccggaggaggggacgtgaagtgaggagggggttgggaggggagaggacgcgggcgaggaagaccagccccggggccccgatgttgtgactgtgacagactcactggggtttgtacatgctggggaggagccttcctttcaggggtgaatggcgtcctgcccatcctccccctgctctttccagtcctctgggttctggcaactgcctgtggagaggcccgtgtcctggcccagatgagcaaggcctcacccagctccctgctggctaagttctcagaggatactctcagcagctatacggaggctgtctcctctcaggaaatgctgcgctgcatttggggccacttcctgagggtgctcggggggacatcgccaacgctgagccacagttccagcctgctgcacagcctgggctctgtcacggtcctgtgctgtgtggacaaacaggggatcctgtcatggccaaatcccagcccagagactgtactgttcttcagcgg

SEQ ID NO: 194440 - DNA, 570 bp, Homo sapiens
  Payload ID: 18425
  Gene Name: transmembrane protein 94
  ENST ID: ENST00000582843
  CDS Start-End: 1-220
acgagacgccctcctggctggctccctgaacaacaccctgcacctttccaatgagcaggagcgtggcgactggcctggcgaggctcccaagccccccgagccctattcacaccacaaagcgcatggccgcagcaaacacccatctggctccaacgtgagcttcagcagggacaccgagggtggtgaagaagagcccagcaagctcctgccagtgtcatgagatatattaatagtccatagaagcagacaggagcccaagaaggacaggaagcggatttcaggagggagcgggtggaagaggacccagcctgggatggagagcgacccctacgaagcagaggactttgtgtgtgactaccacctggagatgctgagcctgtcccaggaccagcagaacccctcctgcatccagtttgatgactccaactggcagctgcacctcacctccctcaaacccctgggcctcaatgtgctgctgaacctgtgtgatgccagcgtcaccgagcgcctgtgccgattctccgaccacctgtgcaacatcgccctgcaagagagccacagcgccgtgct

SEQ ID NO: 194441 - DNA, 922 bp, Homo sapiens
  Payload ID: 18425
  Gene Name: transmembrane protein 94
  ENST ID: ENST00000577247
  CDS Start-End: 1-888
tacgccaccagcatcagcatggcccaggcctcggatggcctttctcccctgcagctgtcagggcagctcaacagcctgccctgttccctgacctttcgccaggaggagaccatcagcatcatccggcttatcgaacagttcctttcttgcctggtccagctgccgccactcctgagtaccaccgacatcctgtggctgtcctgcttttgctaccctctgctcagcatctctctgctggggaagcccccccatagctccatcatgtctatggcaacggggaaaaacctccagtccattcccaagaagacccagcactacttcctgctctgcttcctgctcaagttcagcctcaccatcagctcctgcctcatctgctttggcttcacactgcagagcttctgtgacagctcccgggaccgcaacctcaccaactgctcctccgtcatgctgcccagcaacgacgacagggctccagcctggtttgaggactttgccaatggactgctgtcggctcagaagctcacggccgccctgattgtcctgcacactgtcttcatttccatcacccatgtgcatcgcaccaagcccctgtggagaaagagccccttgaccaacctctggtgggccgtgacagtgcctgtggtgctgctgggtcaggtggtccagacggctgtggacctgcagctgtggacacacagggacagccacgtccactttggcctggaggacgtgcccctgctgacatggctcctgggctgcctgtccctggtccttgtggtggtgaccaatgagatcgtgaagctacatgagattcgggtccgagtccgctaccagaagcgacagaagctgcagtttgaaactaagctgggcatgaactctcccttctgagccactggctgtggtggctgtagttgcccccgtc

SEQ ID NO: 194442 - DNA, 554 bp, Homo sapiens
  Payload ID: 18425
  Gene Name: transmembrane protein 94
  ENST ID: ENST00000577380
  CDS Start-End: 192-554
attctgatcctgaaaatgtcctggagaagggcattctggctgtgggaatagctgctgcaaaggtcctgaagaaggaatgcaccagatgttgtgactgtgacagactcactggggtttgtacatgctggggaggagccttcctttcaggggtgaccacattcatctgggcatgcctgcagtactcttggcccatggacctgaaggagaagcacctgggcgagcctccctcagccctgggcctgtccacgcggaaggccctcagcgtcctgaaggagcagctggaggcagtgctggaaggacatctcagggagcggaagaagtgtctgacgtggaaggaggtgtggagaagcagcttcctccaccacagtaaccgctgctcctgcttccactggccgggggcctcactcatgctactggccgtgctgctgctgctgggctgctgcgggggacagccagccgggagccgtggggtggggctggtgaatgcctcggccttgttcctgttactgcttctcaaccttgtgctcatcgggcggcaagaccggctgaagcgt

SEQ ID NO: 194443 - DNA, 513 bp, Homo sapiens
  Payload ID: 18425
  Gene Name: transmembrane protein 94
  ENST ID: ENST00000580441
  CDS Start-End: 1-169
actgcttctcaaccttgtgctcatcgggcggcaagaccggctgaagcgtcgggaggtagagcggaggctgcgagggatcattgaccaaatccaagatggtgcctggacatggccctgtcccgaccagtcactgccctggacaatgagcggttcacagtgcagtcggtgatgctacactatgctgtgcccgtggtcctggccggcttcctcatcaccaatgccctgcgcttcatcttcagtgccccgggggtcacttcctggcagtacaccctcctccagctccaggtgaatggcgtcctgcccatcctccccctgctctttccagtcctctgggttctggcaactgcctgtggagaggcccgtgtcctggcccagatgagcaaggcctcacccagctccctgctggctaagttctcagaggatactctcagcagctatacggaggctgtctcctctcaggaaatgctgcgctgcatttggggccacttcctgagggtgctcggggggacatcg

SEQ ID NO: 194444 - DNA, 769 bp, Homo sapiens
  Payload ID: 18425
  Gene Name: transmembrane protein 94
  ENST ID: ENST00000580918
  CDS Start-End: 1-769
gaaatgctgcgctgcatttggggccacttcctgagggtgctcggggggacatcgccaacgctgagccacagttccagcctgctgcacagcctgggctctgtcacggtcctgtgctgtgtggacaaacaggggatcctgtcatggccaaatcccagcccagagactgtactgttcttcagcgggaaggtggagccccctcacagcagccatgaggacctcaccgatggcctatccacccgctccttctgccatcccgaggtagaggaggagccccatgaacgagacgccctcctggctggctccctgaacaacaccctgcacctttccaatgagcaggagcgtggcgactggcctggcgaggctcccaagccccccgagccctattcacaccacaaagcgcatggccgcagcaaacacccatctggctccaacgtgagcttcagcagggacaccgagggtggtgaagaagagcccagcaagacccagcctgggatggagagcgacccctacgaagcagaggactttgtgtgtgactaccacctggagatgctgagcctgtcccaggaccagcagaacccctcctgcatccagtttgatgactccaactggcagctgcacctcacctccctcaaacccctgggcctcaatgtgctgctgaacctgtgtgatgccagcgtcaccgagcgcctgtgccgattctccgaccacctgtgcaacatcgccctgcaagagagccacagcgccgtgctgcccgtccatgtgccctggg

SEQ ID NO: 194445 - DNA, 1169 bp, Homo sapiens
  Payload ID: 18426
  Gene Name: transmembrane protein 95
  Uniprot ID: Q3KNT9
  ENST ID: ENST00000330767
  CDS Start-End: 28-582
gcgccgccccatcccccagtggtcctcatgtggaggctggcactaggcggggttttcctggcagccgcccaggcttgtgtcttctgtcgcctcccagcccacgacttgtcaggccgcctggctcggctctgcagccagatggaggccaggcagaaggaatgtggggcctccccagacttctcggcctttgccttagatgaggtgtccatgaacaaagtcacagagaagactcacagagtcctgagggtcatggaaatcaaagaggctgtctcctcactcccttcatattggagttggcttcgaaagaccaagctccctgagtacaccagggaagctctctgtccccccgcctgcccgttgcctctgctgtctcctgcagggggcagcaccacgctgtacaactgctccacctgcaaggggacggaggtgtcctgctggccccgaaagcgctgcttcccaggaagtcaggatctttgggaagccaagattctgctcctctccatcttcggagctttcctgcttctgggtgttctgagcctcctggtggagtcccaccacctccaagcaaaaagtggcttgtgaagacgctgaaaacctcccagcctccagctctaaggggtatgcactcacaacttccacatcccttggaggggaaccagtcagccccttagtcccagctccaaagacagtctccagaccctaaaacccagacatccctgcttctggttggtgagataatgaaaaacaagaaaatccccaaaaacccagatcccccacaatcccagtgtcagatggcctcccgggaacccaggcacccacagctggaaagttcctcccctccagccctcaaccaatcacatggctgtcaacaatgccaggaaaatatctacagaaggaaagaatcccctacgccactcccaccacacccacacccccttctgcctgttccgggaaagcgggggcatctgccccagaagctattccaggccctcctatgactgatggggaatccgggaatgcatgttctggaaaactcaccccactagagtgagatcacatcagtgggttcgcgggcatgccctccctccatcgtgttaacagtttgaaatcctggcctccctcagaggcctccatcctgccaggcctaagtaaaacttgctgttcatggc

SEQ ID NO: 194446 - DNA, 1191 bp, Homo sapiens
  Payload ID: 18426
  Gene Name: transmembrane protein 95
  Uniprot ID: Q3KNT9
  ENST ID: ENST00000389982
  CDS Start-End: 83-694
tccaggcaagggctggagccagggctgcagagcattcctcggctcagctggggcagcgccgccccatcccccagtggtcctcatgtggaggctggcactaggcggggttttcctggcagccgcccaggcttgtgtcttctgtcgcctcccagcccacgacttgtcaggccgcctggctcggctctgcagccagatggaggccaggcagaaggaatgtggggcctccccagacttctcggcctttgccttagatgaggtgtccatgaacaaagtcacagagaagactcacagagtcctgagggtcatggaaatcaaagaggctgtctcctcactcccttcatattggagttggcttcgaaagaccaagctccctgagtacaccagggaagctctctgtccccccgcctgccggggcagcaccacgctgtacaactgctccacctgcaaggggacggaggtgtcctgctggccccgaaagcgctgcttcccaggatctttgggaagccaagattctgctcctctccatcttcggagctttcctgcttctgggtgttctgagcctcctggtggagtcccaccacctccaagcaaaaagtggcttgtgaagacgctgaaaacctcccagcctccagctctaaggggtatgcactcacaacttccacatcccttggaggggaaccagtcagccccttagtcccagctccaaagacagtctccagaccctaaaacccagacatccctgcttctggttggtgagataatgaaaaacaagaaaatccccaaaaacccagatcccccacaatcccagtgtcagatggcctcccgggaacccaggcacccacagctggaaagttcctcccctccagccctcaaccaatcacatggctgtcaacaatgccaggaaaatatctacagaaggaaagaatcccctacgccactcccaccacacccacacccccttctgcctgttccgggaaagcgggggcatctgccccagaagctattccaggccctcctatgactgatggggaatccgggaatgcatgttctggaaaactcaccccactagagtgagatcacatcagtgggttcgcgggcatgccctccctccatcgtgttaacagtttgaaatcctggcctccctcagaggcctccatcctgccaggcctaagtaaaacttgctgttcatgg

SEQ ID NO: 194447 - DNA, 622 bp, Homo sapiens
  Payload ID: 18426
  Gene Name: transmembrane protein 95
  Uniprot ID: Q3KNT9
  ENST ID: ENST00000576060
  CDS Start-End: 28-558
gcgccgccccatcccccagtggtcctcatgtggaggctggcactaggcggggttttcctggcagccgcccaggcttgtgtcttctgtcgcctcccagcccacgacttgtcaggccgcctggctcggctctgcagccagatggaggccaggcagaaggaatgtggggcctccccagacttctcggcctttgccttagatgaggtgtccatgaacaaagtcacagagaagactcacagagtcctgagggtcatggaaatcaaagaggctgtctcctcactcccttcatattggagttggcttcgaaagaccaagctccctgagtacaccagggaagctctctgtccccccgcctgccggggcagcaccacgctgtacaactgctccacctgcaaggggacggaggtgtcctgctggccccgaaagcgctgcttcccaggaagtcaggatctttgggaagccaagattctgctcctctccatcttcggagctttcctgcttctgggtgttctgagcctcctggtggagtcccaccacctccaagcaaaaagtggcttgtgaagacgctgaaaacctcccagcctccagctctaaggggtatgcactcacaacttccacatccctt

SEQ ID NO: 194448 - DNA, 2568 bp, Homo sapiens
  Payload ID: 18427
  Gene Name: transmembrane protein 97
  Uniprot ID: Q5BJF2
  ENST ID: ENST00000226230
  CDS Start-End: 146-676
gagcctcctcttctcgccagccaatggaagcggtctgcctagccctcgcgggggcaaggcggcgaccgaggcgcgtgggtctgggaaggcgcgcggatttggcccctcttctcacatcagcgggtccaggcccaaccgacagactatgggggctccggcaaccaggcgctgcgtggagtggctgctgggcctctacttcctcagccacatccccatcaccctgttcatggacctgcaggcggtgctgccgcgcgagctctacccagtcgagtttagaaacctgctgaagtggtatgctaaggagttcaaagacccactgctacaggagcccccagcctggtttaagtcctttctgttttgcgagcttgtgtttcagctgcctttctttcccattgcaacgtatgccttcctcaaaggaagctgcaagtggattcgaactcctgcaatcatctactctgttcacaccatgacaaccttaattccgatactctccacatttctgtttgaggatttctccaaagccagtggtttcaagggacaaagacctgagactttgcatgaacggttaacccttgtgtctgtctatgccccctacttactcatcccattcatacttttaattttcatgttgcggagcccctactacaagtatgaagagaaaagaaaaaaaaaatgaaggaaacaaccactggcccagggtagagatgcctacagggtggttgcttgttggatacaatacaaggaacactgctcagaacccacgtcttcagcagcatttgaaacactggcagcaatgcacaagagcaagatggtgtcaggaaccatgtcaaaccctcaccttcttccattttttttttttttttaagacagtctcactctgttgcccaggctggagtaaagggcagtggcatgatctcggctcactgcaacctccgcctcctgggctcaagccatcttccttagcctcccaagtagctagaactacaggtgtgtaccaacacgtatggctaatttgttttgttttttttgtgtgtgtggagacagggttttgccatgttgcccaggttggtctcgaacgcctaggctcaagtgatctgcccacctcagtctccctaagtgctgggattacagacgtgaaccactgggcccagcccaaaccttcaccttctaagggcactgggatgaacagaccgatcggcttgagggtgggcaaaggggtgtgggctaggttataaggaagtggtaccaaataactgtgtgcctgagttccaccgcaagattactaaaagcaggaccagaccagaaactgctaaagaacatggcctgtttgacatgttcatgagtcacctgacccacagcatatatgcttatgactaaaccctccactcctgattctcaagagtgtatcacctgtcagcaaaatgaatagtgggatattttgggccattttaaatgtgaaattttgcctctttaatgttaattcaaaactatatcaatgttttcttgttcccacctctaacccaaggaaaaaagagaaaacatactatgcaaaggaagtttaaacttaagttttccttaagggtcagcccaacaatgactttcagtcaaatggattaaactggaaaatgtttttgtttctgttgtaaacagatcatcctaggcgaaagttttttttgtttgtttgcttttaaattagtttatttctaaatcttagtcttccacatttctagaggccacctgacacaagtccctgtatctgaagtctagcatctcaaggctgatctggaagtgtgctagtatgctccctagtggataacttaatcttttaatacagttccgtcattcccatcttgttttcagaagagaaggtggctacagccaggcataacatatccactgtgtgcatagagggtctcttcacgttgatgcttggcattccatcagctttctctaagtctttgctcaagttcaaccttaaaatgatgttagacaacaggtcccagtcagttccctctattttcacccattttgctcacaagccatattggcccgattagtggtactgtctgactcacgtgtgtgatccaaataaaggtagctgctgaccactgcctggtttgttttgtggactaggggatagagaatccagggttctctcatgaggagttaaacatatttcaagagcaacaggaaaaaaggtacatcaagccatttgaaaacaaaaatttattgcttctccttccaaagctttgtgaatttacaaaaaaaaggatgaaagtttacaaactgcttagttccaactaagcataagaggtgagaacgtacactgcagggccaccagcagcagctgtgcactgatgttaaaactggctcccccagacttgtagtgctgtcttcagggggctgcattccttacacgccacctcttgtgacataggtcattggtcaagccgctggaatgctacagaggtttttttggttttgagaggcttttttttgttttgccttcctactataaaagcgaaattttcagttcatttctgaaaaataaattggtcaataaattca

SEQ ID NO: 194449 - DNA, 493 bp, Homo sapiens
  Payload ID: 18427
  Gene Name: transmembrane protein 97
  ENST ID: ENST00000582113
  CDS Start-End: 35-313
tcacatcagcgggtccaggcccaaccgacagactatgggggctccggcaaccaggcgctgcgtggagtggctgctgggcctctacttcctcagccacatccccatcaccctgttcatggacctgcaggcggtgctgccgcgcgagctctacccagtcgagtttagaaacctgctgaagtggtatgctaaggagttcaaagacccactgctacaggagcccccagcctggtttaagtcctttctgttttgcgagcttgtgtttcagctgcctttctttcccattgcaacgtatgccttcctcaaaggttggtaaatggtgggaaaatcccatttttactcagaaatcaggtcccagaaatcttttgggaaagtatctccaaagggaaggggatggtccccatagtttgtgggagaatgctacaggatctggggtaaatagccagggtagatcttgtaaagggacattagtgtggctcaggctcatgtctgtggt

SEQ ID NO: 194450 - DNA, 1075 bp, Homo sapiens
  Payload ID: 18427
  Gene Name: transmembrane protein 97
  ENST ID: ENST00000582384
  CDS Start-End: 1-357
ggagtggctgctgggcctctacttcctcagccacatccccatcaccctgttcatggacctgcaggcggtgctgccgcgcgagctctacccagtcgaggaagctgcaagtggattcgaactcctgcaatcatctactctgttcacaccatgacaaccttaattccgatactctccacatttctgtttgaggatttctccaaagccagtggtttcaagggacaaagacctgagactttgcatgaacggttaacccttgtgtctgtctatgccccctacttactcatcccattcatacttttaattttcatgttgcggagcccctactacaagtatgaagagaaaagaaaaaaaaaatgaaggaaacaaccactggcccagggtagagatgcctacagggtggttgcttgttggatacaatacaaggaacactgctcagaacccacgtcttcagcagcatttgaaacactggcagcaatgcacaagagcaagatggtgtcaggaaccatgtcaaaccctcaccttcttccattttttttttttttttaagacagtctcactctgttgcccaggctggagtaaagggcagtggcatgatctcggctcactgcaacctccgcctcctgggctcaagccatcttccttagcctcccaagtagctagaactacaggtgtgtaccaacacgtatggctaatttgttttgttttttttgtgtgtgtggagacagggttttgccatgttgcccaggttggtctcgaacgcctaggctcaagtgatctgcccacctcagtctccctaagtgctgggattacagacgtgaaccactgggcccagcccaaaccttcaccttctaagggcactgggatgaacagaccgatcggcttgagggtgggcaaaggggtgtgggctaggttataaggaagtggtaccaaataactgtgtgcctgagttccaccgcaagattactaaaagcaggaccagaccagaaactgctaaagaacatggcctgtttgacatgttcatgagtcacctgacccacagcatatatgcttatgactaaaccctccactcctgatt

SEQ ID NO: 194451 - DNA, 578 bp, Homo sapiens
  Payload ID: 18427
  Gene Name: transmembrane protein 97
  ENST ID: ENST00000583381
  CDS Start-End: 287-496
cttctcacatcagcgggtccaggcccaaccgacagactatgggggctccggcaaccaggcggtgctgccgcgcgagctctacccagtcgagtttagaaacctgctgaagtggtatgctaaggagttcaaagacccactgctacaggagcccccagcctggtttaagtcctttctgttttgcgagcttgtgtttcagctgcctttctttcccattgcaacgtatgccttcctcaaaggaagctgcaagtggattcgaactcctgcaatcatctactctgttcacaccatgacaaccttaattccgatactctccacatttctgtttgaggatttctccaaagccagtggtttcaagggacaaagacctgagactttgcatgaacggttaacccttgtgtctgtctatgccccctacttactcatcccattcatacttttaattttcatgttgcggagcccctactacaagtatgaagagaaaagaaaaaaaaaatgaaggaaacaaccactggcccagggtagagatgcctacagggtggttgcttgttggatacaatacaaggaacactgctcagaac

SEQ ID NO: 194452 - DNA, 2115 bp, Homo sapiens
  Payload ID: 18427
  Gene Name: transmembrane protein 97
  ENST ID: ENST00000336687
  CDS Start-End: 474-683
gggttccagttgcctctctcgggtcctgcccatgcctcccccgctcctaacccaactttagttcggtgttttcctcgggctttgtctctatcccagccccttctcccaagcggcgggggcgaacgctttgtttcctttaaagtcacttcttccctgggtttaaggtttcccgcgattccacctctggccggttgtcagtgtctgagggaagtagtctggatgaagtggtgtccaaagtcacatgtcagcatggatccgcatcctttttatttgacaagtttagaaacctgctgaagtggtatgctaaggagttcaaagacccactgctacaggagcccccagcctggtttaagtcctttctgttttgcgagcttgtgtttcagctgcctttctttcccattgcaacgtatgccttcctcaaaggaagctgcaagtggattcgaactcctgcaatcatctactctgttcacaccatgacaaccttaattccgatactctccacatttctgtttgaggatttctccaaagccagtggtttcaagggacaaagacctgagactttgcatgaacggttaacccttgtgtctgtctatgccccctacttactcatcccattcatacttttaattttcatgttgcggagcccctactacaagtatgaagagaaaagaaaaaaaaaatgaaggaaacaaccactggcccagggtagagatgcctacagggtggttgcttgttggatacaatacaaggaacactgctcagaacccacgtcttcagcagcatttgaaacactggcagcaatgcacaagagcaagatggtgtcaggaaccatgtcaaaccctcaccttcttccattttttttttttttttaagacagtctcactctgttgcccaggctggagtaaagggcagtggcatgatctcggctcactgcaacctccgcctcctgggctcaagccatcttccttagcctcccaagtagctagaactacaggtgtgtaccaacacgtatggctaatttgttttgttttttttgtgtgtgtggagacagggttttgccatgttgcccaggttggtctcgaacgcctaggctcaagtgatctgcccacctcagtctccctaagtgctgggattacagacgtgaaccactgggcccagcccaaaccttcaccttctaagggcactgggatgaacagaccgatcggcttgagggtgggcaaaggggtgtgggctaggttataaggaagtggtaccaaataactgtgtgcctgagttccaccgcaagattactaaaagcaggaccagaccagaaactgctaaagaacatggcctgtttgacatgttcatgagtcacctgacccacagcatatatgcttatgactaaaccctccactcctgattctcaagagtgtatcacctgtcagcaaaatgaatagtgggatattttgggccattttaaatgtgaaattttgcctctttaatgttaattcaaaactatatcaatgttttcttgttcccacctctaacccaaggaaaaaagagaaaacatactatgcaaaggaagtttaaacttaagttttccttaagggtcagcccaacaatgactttcagtcaaatggattaaactggaaaatgtttttgtttctgttgtaaacagatcatcctaggcgaaagttttttttgtttgtttgcttttaaattagtttatttctaaatcttagtcttccacatttctagaggccacctgacacaagtccctgtatctgaagtctagcatctcaaggctgatctggaagtgtgctagtatgctccctagtggataacttaatcttttaatacagttccgtcattcccatcttgttttcagaagagaaggtggctacagccaggcataacatatccactgtgtgcatagagggtctcttcacgttgatgcttggcattccatcagctttctctaagtctttgctcaagttcaaccttaaaatgatgttagacaacaggtcccagtcagttccctctattttcacccattttgctcacaagccatattggcccgattagtggtactgtctgactcacgtgtgtgatccaaataaaggtagctgctgacca

SEQ ID NO: 194453 - DNA, 826 bp, Homo sapiens
  Payload ID: 18428
  Gene Name: transmembrane protein 98
  ENST ID: ENST00000261713
  CDS Start-End: 222-826
ggggatttggcgcgggccgggggccgggggccggggcgcgggggcgcgaggctggattcctagggccgcggcgcttcccggcatgctccgctgcaggcccgcgcccgcgcccggactttgccatcggcggggcagtcgcgggatgcgcccgggagccacagcctgagctttagcccatgaggaggatgtgaccgggactgagtcaggagccctctggaagcatggagactgtggtgattgttgccataggtgtgctggccaccatctttctggcttcgtttgcagccttggtgctggtttgcaggcagcgctactgccggccgcgagacctgctgcagcgctatgattctaagcccattgtggacctcattggtgccatggagacccagtctgagccctctgagttagaactggacgatgtcgttatcaccaacccccacattgaggccattctggagaatgaagactggatcgaagatgcctcgggtctcatgtcccactgcattgccatcttgaagatttgtcacactctgacagagaagcttgttgccatgacaatgggctctggggccaagatgaagacttcagccagtgtcagcgacatcattgtggtggccaagcggatcagccccaggacgactgccctgctcctgtctgtcagtcacctggtgctggtgacaaggaatgcctgccatctgacgggaggcctggactggattgaccagtctctgtcggctgctgaggagcatttggaagtccttcgagaagcagccctagcttctgagccagataaaggcctcccaggccctgaaggcttcctgcagga

SEQ ID NO: 194454 - DNA, 1683 bp, Homo sapiens
  Payload ID: 18428
  Gene Name: transmembrane protein 98
  Uniprot ID: Q9Y2Y6
  ENST ID: ENST00000394642
  CDS Start-End: 383-1063
cccggggcggggcgcaggcagggaccctccgctcccctctccgtctgccgcccggacgggccaccgcgggggcgcgaggaaggggtgttgggtcgccagggcccgcctcccagctgccccggccgccggggggcctggcggtgacggcggcgcctggcggcggggatttggcgcgggccgggggccgggggccggggcgcgggggcgcgaggctggattcctagggccgcggcgcttcccggcatgctccgctgcaggcccgcgcccgcgcccggactttgccatcggcggggcagtcgcgggatgcgcccgggagccacagcctgagctttagcccatgaggaggatgtgaccgggactgagtcaggagccctctggaagcatggagactgtggtgattgttgccataggtgtgctggccaccatctttctggcttcgtttgcagccttggtgctggtttgcaggcagcgctactgccggccgcgagacctgctgcagcgctatgattctaagcccattgtggacctcattggtgccatggagacccagtctgagccctctgagttagaactggacgatgtcgttatcaccaacccccacattgaggccattctggagaatgaagactggatcgaagatgcctcgggtctcatgtcccactgcattgccatcttgaagatttgtcacactctgacagagaagcttgttgccatgacaatgggctctggggccaagatgaagacttcagccagtgtcagcgacatcattgtggtggccaagcggatcagccccagggtggatgatgttgtgaagtcgatgtaccctccgttggaccccaaactcctggacgcacggacgactgccctgctcctgtctgtcagtcacctggtgctggtgacaaggaatgcctgccatctgacgggaggcctggactggattgaccagtctctgtcggctgctgaggagcatttggaagtccttcgagaagcagccctagcttctgagccagataaaggcctcccaggccctgaaggcttcctgcaggagcagtctgcaatttagtgcctacaggccagcagctagccatgaaggcccctgccgccatccctggatggctcagcttagccttctactttttcctatagagttagttgttctccacggctggagagttcagctgtgtgtgcatagtaaagcaggagatccccgtcagtttatgcctcttttgcagttgcaaactgtggctggtgagtggcagtctaatactacagttaggggagatgccattcactctctgcaagaggagtattgaaaactggtggactgtcagctttatttagctcacctagtgttttcaagaaaattgagccaccgtctaagaaatcaagaggtttcacattaaaattagaatttctggcctctctcgatcggtcagaatgtgtggcaattctgatctgcattttcagaagaggacaatcaattgaaactaagtaggggtttcttcttttggcaagacttgtactctctcacctggcctgtttcatttatttgtattatctgcctggtccctgaggcgtctgggtctctcctctcccttgcaggtttgggtttgaagctgaggaactacaaagttgatgatttcttttttatctttatgcctgcaattttacctagctaccact

SEQ ID NO: 194455 - DNA, 808 bp, Homo sapiens
  Payload ID: 18428
  Gene Name: transmembrane protein 98
  ENST ID: ENST00000395149
  CDS Start-End: 396-808
tggcggtgacggcggcgcctggcggcggggatttggcgcgggccgggggccgggggccggggcgcgggggcgcgaggctggattcctagggccgcggcgcttcccggcatgctccgctgcaggcccgcgcccgcgcccggactttgccatcggcggggcagtcgcgggatgcgcccgggagccacagcctgaggccctcaggtctctgcaggtgtcgtggaggaacctagcacctgccatcctcttccccaatttgccacttccagcaggtaagacccacctgtcccactctctttcgtggcttcttgaccagatctgctctgacttcatgttctctcaagctttagcccatgaggaggatgtgaccgggactgagtcaggagccctctggaagcatggagactgtggtgattgttgccataggtgtgctggccaccatctttctggcttcgtttgcagccttggtgctggtttgcaggcagcgctactgccggccgcgagacctgctgcagcgctatgattctaagcccattgtggacctcattggtgccatggagacccagtctgagccctctgagttagaactggacgatgtcgttatcaccaacccccacattgaggccattctggagaatgaagactggatcgaagatgcctcgggtctcatgtcccactgcattgccatcttgaagatttgtcacactctgacagagaagcttgttgccatgacaatgggctctggggccaagatgaagacttcagccagtgtcagcgacatcattgtggtggccaagcggatcagccccag

SEQ ID NO: 194456 - DNA, 896 bp, Homo sapiens
  Payload ID: 18428
  Gene Name: transmembrane protein 98
  ENST ID: ENST00000439138
  CDS Start-End: 231-896
gggatgcgcccgggagccacagcctgagggtttaaaaagctattttaaggccgggctcggtgtctcacgcgtgtaatcccagcactttgggaggcccgaggccctcaggtctctgcaggtgtcgtggaggaacctagcacctgccatcctcttccccaatttgccacttccagcagctttagcccatgaggaggatgtgaccgggactgagtcaggagccctctggaagcatggagactgtggtgattgttgccataggtgtgctggccaccatctttctggcttcgtttgcagccttggtgctggtttgcaggcagcgctactgccggccgcgagacctgctgcagcgctatgattctaagcccattgtggacctcattggtgccatggagacccagtctgagccctctgagttagaactggacgatgtcgttatcaccaacccccacattgaggccattctggagaatgaagactggatcgaagatgcctcgggtctcatgtcccactgcattgccatcttgaagatttgtcacactctgacagagaagcttgttgccatgacaatgggctctggggccaagatgaagacttcagccagtgtcagcgacatcattgtggtggccaagcggatcagccccagggtggatgatgttgtgaagtcgatgtaccctccgttggaccccaaactcctggacgcacggacgactgccctgctcctgtctgtcagtcacctggtgctggtgacaaggaatgcctgccatctgacgggaggcctggactggattgaccagtctctgtcggctgctgaggagcatttggaagtccttcgagaagcagccctagcttctgagccagataaaggcctcccaggccctgaaggcttcctgcaggag

SEQ ID NO: 194457 - DNA, 4434 bp, Homo sapiens
  Payload ID: 18428
  Gene Name: transmembrane protein 98
  Uniprot ID: Q9Y2Y6
  ENST ID: ENST00000579849
  CDS Start-End: 432-1112
tccgctcccctctccgtctgccgcccggacgggccaccgcgggggcgcgaggaaggggtgttgggtcgccagggcccgcctcccagctgccccggccgccggggggcctggcggtgacggcggcgcctggcggcggggatttggcgcgggccgggggccgggggccggggcgcgggggcgcgaggctggattcctagggccgcggcgcttcccggcatgctccgctgcaggcccgcgcccgcgcccggactttgccatcggcggggcagtcgcgggatgcgcccgggagccacagcctgaggccctcaggtctctgcaggtgtcgtggaggaacctagcacctgccatcctcttccccaatttgccacttccagcagctttagcccatgaggaggatgtgaccgggactgagtcaggagccctctggaagcatggagactgtggtgattgttgccataggtgtgctggccaccatctttctggcttcgtttgcagccttggtgctggtttgcaggcagcgctactgccggccgcgagacctgctgcagcgctatgattctaagcccattgtggacctcattggtgccatggagacccagtctgagccctctgagttagaactggacgatgtcgttatcaccaacccccacattgaggccattctggagaatgaagactggatcgaagatgcctcgggtctcatgtcccactgcattgccatcttgaagatttgtcacactctgacagagaagcttgttgccatgacaatgggctctggggccaagatgaagacttcagccagtgtcagcgacatcattgtggtggccaagcggatcagccccagggtggatgatgttgtgaagtcgatgtaccctccgttggaccccaaactcctggacgcacggacgactgccctgctcctgtctgtcagtcacctggtgctggtgacaaggaatgcctgccatctgacgggaggcctggactggattgaccagtctctgtcggctgctgaggagcatttggaagtccttcgagaagcagccctagcttctgagccagataaaggcctcccaggccctgaaggcttcctgcaggagcagtctgcaatttagtgcctacaggccagcagctagccatgaaggcccctgccgccatccctggatggctcagcttagccttctactttttcctatagagttagttgttctccacggctggagagttcagctgtgtgtgcatagtaaagcaggagatccccgtcagtttatgcctcttttgcagttgcaaactgtggctggtgagtggcagtctaatactacagttaggggagatgccattcactctctgcaagaggagtattgaaaactggtggactgtcagctttatttagctcacctagtgttttcaagaaaattgagccaccgtctaagaaatcaagaggtttcacattaaaattagaatttctggcctctctcgatcggtcagaatgtgtggcaattctgatctgcattttcagaagaggacaatcaattgaaactaagtaggggtttcttcttttggcaagacttgtactctctcacctggcctgtttcatttatttgtattatctgcctggtccctgaggcgtctgggtctctcctctcccttgcaggtttgggtttgaagctgaggaactacaaagttgatgatttcttttttatctttatgcctgcaattttacctagctaccactaggtggatagtaaatttatacttatgtttccctcaagtgtgtagttattgagtcaaattcatatgcatggtgtattgtgggacatacttagatggaaggagagagcctaagaatcctgaggatgatttctgtgtatgcctcaaaatgagatatttaggctgggcgcggtggctcacacctgtaatcctcgcactttgggaggctaaggtgggtggattgcttgagcccaggagtttgagaccagcctgggcaacatggtgaaacctcatctctacacaaactacaaaaattagctgggcatggtgacacgtgcggctgcttggtaggctgaggtgggaggatcgcttgagcccaggaggtgaaggttgcagtgagccctgattgtgccactgcattccagcctgggcgacagagtgagaccatgtctccaaaacatacatatatataaaatatatttaaagacctcttggagttcaggcagaagtgaagatagcactatgaagtagtttccacattaacaatagcaatgacttgaacgatgtgttccccctttcttctgatattaatatctgttcattttgcaaacattgaaagattatgaaagctatgacccagaatcacaattatataatttggatacatacccaaatggcataatttctgtcataagcctgtaggaaaagcttgaattcttcacttctcagattctcagagccagcttgctcttgggagaggggcctggtataggggctgcccaggttcgtagcctatgctgtcaagcatgtttggagttgcacatctgttcccatgtcattttctctgtctaactgaagtcagaaaattcctcagctggattctggggaaccaggaacccatattcccaaatccaagattgggacctggtttgtctttccatttgggcacatttcattctttccaggaaaacaggccacttccaacctgcacaatgtacaccaaaccacagaaccacagctgggatatggagtcaggagagggaagctggagctcaactctcatggactaaaggatggattctggatgggctccaggggacaccttattggattggtggcttccatcaactcttaaaaacgttaagtggtgaactttcccgtcctgtcaagctgtgaatggggaatgtatacaaagtcactttgacttttctatttgaggcctccacagtaaacatccagagtcatcctatttttgtctttttacctccctttcagaacctgttttcgtaattagactggaaagcaattcatgctaagtttgcaatggctgccacagttgtaagtgtcccctgcattttaacctgcactagagccctaagccacagagaagcagttctgaattggtatctcaaataccatccacctggtgtgggtctgcagggtggagagctttcccagcacccctgaagcaatgcccaatgtcgattaccttctctgagtcctggcaagtcctggcacattggctttctggatcccttagatgctgccctttctgttgtgaggagaggttgccgaagatattggaggtgtctgctggactgtaggatttctgatcccactgctgtgtagtttttttttctagtgctggacaagtaagaagcctctggataaatttggtgttggtggctgatggttgaagtggaagcagtctttggggtaggaggcaatgccactcctctaggcccttcgggagttggctgaagttacttcctcccttggaaggggctggttagtgagtgccagggatctcaggactgtctctgtgccaggtgtggtttcccaggcaacagacacattcctaagtgcctagttctctagcgtctgtatacatggtagtagagccttccttccatgtctctcttccctctggcctggaataggagcattagactcaaattctgatgaaaaagaaattacttggagatagagattcaatgtgaagagaacaagatatttgaagtcagaattaggtttgaatttgggctcagtgacttacagtgtgagcttggtcaagttcttaacattctggtccttagcattctcatctgtatggtcaaggctattgtcattgggttggtatgtcaacaagcaaaacggtatgtgtgagctgcccaattgtgggcctggttctgattagccaatgttaacacccttctctccacagcttcccattctctgatgccgctgacccagatggcgtcacctcagttaccatggcttggtccaagcagtgacttctgttcatgggctctggaattgagtggccaaaaatctggaatccctacagtagggagagtagccttgtccctgccccactacaagtctgttcatatgaagacatacaaagccgtcgcctctaatcagtgttcaaagggtcgattgtgcaactcacattcctccagagaaattcccccagcttgtgagatctccaagagggaacacgtattcctggcatccaacttcccctggtgctccccctgacctgcctcattccaggagttccctctccagagaccctgtgtgcccacacgagcagacttttagaaaatggcctacagttcaaaggccctgcattgctttatggccttggaaatgtggggaaagtgtcagatgaagaatttctatcctcctcacctcctccctgtctccaataaatgcataccaaga

SEQ ID NO: 194458 - DNA, 776 bp, Homo sapiens
  Payload ID: 18428
  Gene Name: transmembrane protein 98
  ENST ID: ENST00000583437
  CDS Start-End: 496-776
ctctactaaaaatacaaaaaattagccgggtgtggtgtcaggcacctgtaatcctagctacttgggaggctgaggcaggagaatcgcttgaacccaggaggcagaggttgcagtgagctgagatcgtgccattgcactccagcctgggtgacagagctagactccatcttaaaaaaacaaacaaacacaaacaaacaaacaaaaaattttagtccaactggggagcaaattcttctgagaaaggaaaaggcaaatttggggcatggcataaattttaccttggttctcttcaggccctcaggtctctgcaggtgtcgtggaggaacctagcacctgccatcctcttccccaatttgccacttccagcaggtaagacccacctgtcccactctctttcgtggcttcttgaccagatctgctctgacttcatgttctctcaagctttagcccatgaggaggatgtgaccgggactgagtcaggagccctctggaagcatggagactgtggtgattgttgccataggtgtgctggccaccatctttctggcttcgtttgcagccttggtgctggtttgcaggcagcgctactgccggccgcgagacctgctgcagcgctatgattctaagcccattgtggacctcattggtgccatggagacccagtctgagccctctgagttagaactggacgatgtcgttatcaccaacccccacattgaggccattctggagaatgaagactggatcgaagatgcctcgggtctcatgtcccactg

SEQ ID NO: 194459 - DNA, 806 bp, Homo sapiens
  Payload ID: 18428
  Gene Name: transmembrane protein 98
  ENST ID: ENST00000578289
  CDS Start-End: 165-581
agtcgcgggatgcgcccgggagccacagcctgaggccctcaggtctctgcaggtgtcgtggaggaacctagcacctgccatcctcttccccaatttgccacttccagcagctttagcccatgaggaggatgtgaccgggactgagtcaggagccctctggaagcatggagactgtggtgattgttgccataggtgtgctggccaccatctttctggcttcgtttgcagccttggtgctggtttgcaggcagcgctactgccggccgcgagacctgctgcagcgctatgattctaagcccattgtggacctcattggtgccatggagacccagtctgagccctctgagttagaactggacgatgtcgttatcaccaacccccacattgaggccattctggagaatgaagactggatcgaagatgcctcgggtctcatgtcccactgcattgccatcttgaagatttgtcacactctgacagagaagcttgttgccatgacaatgggctctggggccaagatgaagacttcagccagtgtcagcgacatcattgtggtggccaagcggatcagccccaggtaaggagaccaaagcagaaagatcagtaaccctcctggagtctcacaattaatatgaatcagagcaggatcttcaactcctcaacttgtgtttttaactggcacatcttcctgcctgggtgcagcaggtgggaaatccatcatggaaaggaaagaacagacatgagagtcattccattctcttccagttcaaatctttttttgtgaaaaaaatggtagttgtgaccca

SEQ ID NO: 194460 - DNA, 2058 bp, Homo sapiens
  Payload ID: 18429
  Gene Name: transmembrane protein 99
  Uniprot ID: Q8N816
  ENST ID: ENST00000301665
  CDS Start-End: 305-1081
gccgaaacttccgccgccgcgtccgccgcctccggaactaaacggggtgaggtcacattcggttatctctaacgttggaaaacgatggagctaacacccattatggagattaaccacttttcatcaggtttttaacttaagtcgtgaggaatacaacggtgaacacaagattcattttattttcatcaccatgggacgtatcctgttgttgagttctctgggtcagacctctgaagacttctcagatggatcctagtctctgggcttgccctgaaattactcgctgctcagggagagagttgaaatggttggcatcctcccactctgttgctccggctgtgtcccctcgctctgttgttccagctatgtgccctctgttgctccaactgcagctcattctgttagagttcctcattcagctggtcactgtggccagagggtgttggcctgctcccttcctcaagtattcttaaagccatggatttttgtggagcatttttcttcctggctctcccttgagttattttcctttcttcgctatcttgggactcttctttgtgcttgcggtcatcggttgagagaaggacttcttcttccttgtctccttggtgttggctcgtggttgctcttcaacaactggactggaggctcttggttttctcttcatcttcaacaagtcagtctctctcaagggtctcacgttgcagcattcttaccagaggccattgggcctggagttccagttccagtgtctggagagtccacctcagctcagcaatctcatgccggttggcaattgtcagcagaagccgatgcctgcccatcagttctttactctgaggtgttagagtggaataaaaatataaatacttatactagttttcatgacttctgcttaatattgggtatttttttgttttgttttgttttggcggtgataggcttaccttacattaaaccaggccttagcctttctgtggctttgttatggcaaagcctcatattactctctagtctggttcagcaggacagtcaggtccacacctggggctgtttgttttctacgtttacctcaacataaggtaccttatcattgtcagccttcatctcctgatccaaaataaaataaaatgccacaggttacttgattttgcatctggaatatgattatttaaagaaattaaaaatttaaaactgaaaatgtagagtttagaaatcttttttaaggtttcaaaaaaatttctaggagacaacaaaatagtgttactagatttagcaaataaaatacagaatgccaattaaatttgaatttcaaatgaacattgaatactttttttggtataactatattccatgcaatatttgggacatatctgttatattattcattgtttacctgaaattataatttaaactgagagttctgtattttatctggcaaccttattatgaaaatatttaggatcaatataaaggaataatatttttaatttttacaaactattttaatataagtaatttatttgattttcattgtcatcctgagagttaagttttgccttacagtctatgttactttacctgtgttttatgaaaagactgtctcttataatgatagccaccaccaccatatcttgacaagtattgacatactgaaactttaaattcattttgtgtagttcccgcctcttcatgattgtttctgaggtaattcagcttctccgtctggctttccattttcaactctaggttagtcttgttcaaagtcaactcatctaagacacttcgcaggcccttgctatcagcctcaacacagtgataaaggacaactttactctggcatctgaacagagcccaattggaagaatcaatacagcttagatggaggtctcctcatccagtggtaataaaacatcccacatagtggagcttagagagcacagcactgggatgtgaagacatgggttcaaattgcacctctgccatgttcagctgtcaccttgggcaaattacttctctgaaccttagttttctcatcattaaaatgggaatattggt

SEQ ID NO: 194461 - DNA, 854 bp, Homo sapiens
  Payload ID: 18429
  Gene Name: transmembrane protein 99
  Uniprot ID: Q8N816
  ENST ID: ENST00000436612
  CDS Start-End: 286-854
ttccgccgccgtagccgccgccgaaacttccgccgccgcgtccgccgcctccggaactaaacgggatggagctaacacccattatggagattaaccacttttcatcaggtttttaacttaagtcgtgaggaatacaacggtgaacacaagattcattttattttcatcaccatgggacgtatcctgttgttgagttctctgggtcagacctctgaagacttctcagatggatcctagtctctgggcttgccctgaaattactcgctgctcagggagagagttgaaatggttggcatcctcccactctgttgctccggctgtgtcccctcgctctgttgttccagctatgtgccctctgttgctccaactgcagctcattctgttagagttcctcattcagctggtcactgtggccagagggtgttggcctgctcccttcctcaagtattcttaaagccatggatttttgtggagcatttttcttcctggctctcccttgagttattttcctttcttcgctatcttgggactcttctttgtgcttgcggtcatcggttgagagaaggacttcttcttccttgtctccttggtgttggctcgtggttgctcttcaacaactggactggaggctcttggttttctcttcatcttcaacaagtcagtctctctcaagggtctcacgttgcagcattcttaccagaggccattgggcctggagttccagttccagtgtctggagagtccacctcagctcagcaatctcatgccggttggcaattgtcagcagaagccgatgcctgcccatcagttctttactctgaggtgttagagtggaataaaaatataaatactta

SEQ ID NO: 194462 - DNA, 2073 bp, Homo sapiens
  Payload ID: 18429
  Gene Name: transmembrane protein 99
  Uniprot ID: Q8N816
  ENST ID: ENST00000622451
  CDS Start-End: 316-1092
ggttatctctaacgttggaaaacggtgggtagctttccagttgccgttaatttagaaaataagcaaaacgtgttgaaaaaataaaaccctgccagatggagctaacacccattatggagattaaccacttttcatcaggtttttaacttaagtcgtgaggaatacaacggtgaacacaagattcattttattttcatcaccatgggacgtatcctgttgttgagttctctgggtcagacctctgaagacttctcagatggatcctagtctctgggcttgccctgaaattactcgctgctcagggagagagttgaaatggttggcatcctcccactctgttgctccggctgtgtcccctcgctctgttgttccagctatgtgccctctgttgctccaactgcagctcattctgttagagttcctcattcagctggtcactgtggccagagggtgttggcctgctcccttcctcaagtattcttaaagccatggatttttgtggagcatttttcttcctggctctcccttgagttattttcctttcttcgctatcttgggactcttctttgtgcttgcggtcatcggttgagagaaggacttcttcttccttgtctccttggtgttggctcgtggttgctcttcaacaactggactggaggctcttggttttctcttcatcttcaacaagtcagtctctctcaagggtctcacgttgcagcattcttaccagaggccattgggcctggagttccagttccagtgtctggagagtccacctcagctcagcaatctcatgccggttggcaattgtcagcagaagccgatgcctgcccatcagttctttactctgaggtgttagagtggaataaaaatataaatacttatactagttttcatgacttctgcttaatattgggtatttttttgttttgttttgttttggcggtgataggcttaccttacattaaaccaggccttagcctttctgtggctttgttatggcaaagcctcatattactctctagtctggttcagcaggacagtcaggtccacacctggggctgtttgttttctacgtttacctcaacataaggtaccttatcattgtcagccttcatctcctgatccaaaataaaataaaatgccacaggttacttgattttgcatctggaatatgattatttaaagaaattaaaaatttaaaactgaaaatgtagagtttagaaatcttttttaaggtttcaaaaaaatttctaggagacaacaaaatagtgttactagatttagcaaataaaatacagaatgccaattaaatttgaatttcaaatgaacattgaatactttttttggtataactatattccatgcaatatttgggacatatctgttatattattcattgtttacctgaaattataatttaaactgagagttctgtattttatctggcaaccttattatgaaaatatttaggatcaatataaaggaataatatttttaatttttacaaactattttaatataagtaatttatttgattttcattgtcatcctgagagttaagttttgccttacagtctatgttactttacctgtgttttatgaaaagactgtctcttataatgatagccaccaccaccatatcttgacaagtattgacatactgaaactttaaattcattttgtgtagttcccgcctcttcatgattgtttctgaggtaattcagcttctccgtctggctttccattttcaactctaggttagtcttgttcaaagtcaactcatctaagacacttcgcaggcccttgctatcagcctcaacacagtgataaaggacaactttactctggcatctgaacagagcccaattggaagaatcaatacagcttagatggaggtctcctcatccagtggtaataaaacatcccacatagtggagcttagagagcacagcactgggatgtgaagacatgggttcaaattgcacctctgccatgttcagctgtcaccttgggcaaattacttctctgaaccttagttttctcatcattaaaatgggaatattggttttt

SEQ ID NO: 194463 - DNA, 2611 bp, Homo sapiens
  Payload ID: 18430
  Gene Name: transmembrane protein with EGF-like and two follistatin-like domains 1
  Uniprot ID: Q8IYR6
  ENST ID: ENST00000374879
  CDS Start-End: 433-1575
cggctccgtcacgcgcccctcaccgggcgggccggggtctttgtgacgcggtggcaacggccacggacacaaagggaaggcgaggaggcgagcaagaggctgggcctgcctccggcccgcgacccccgcccgccgcgcgcgcgcccgcccgctcccctcgccgcggtgtcccccacgccggctcgcaccctcgcgcgcacccttgcgcgcccgcgaccctcgcacgcgcccggacccgccgactccgtcccgagcgccgcgggcccgggcctggcggacgctgcgggtggggcggggatgctgacgggctgctccccggctcagcggcgcggctgctaggaggcaccgaggcagcggcggggctctgggcgcgcggctggatgcccccggcctgcggctccctgcgcttcccgccgtccaggggcaccagtcatgggcgccgcagccgctgaggcgccgctccggctgcctgccgcgcctccgctcgccttctgctgctacacgtcggtgcttctgctcttcgccttctctctgcccgggagccgcgcgtccaaccagcccccgggtggtggcggcggcagcggcggggactgtcccggcggcaaaggcaagagcatcaactgctcagaattaaatgtgagggagtctgacgtaagagtttgtgatgagtcatcatgtaaatatggaggagtctgtaaagaagatggagatggtttgaaatgtgcatgccaatttcagtgccatacaaattatattcctgtctgtggatcaaatggggacacttatcaaaatgaatgctttctcagaagggctgcttgtaagcaccagaaagagataacagtaatagcaagaggaccatgctactctgataatggatctggatctggagaaggagaagaggaagggtcaggggcagaagttcacagaaaacactccaagtgtggaccctgcaaatataaagctgagtgtgatgaagatgcagaaaatgttgggtgtgtatgtaatatagattgcagtggatacagttttaatcctgtgtgtgcttctgatgggagttcctataacaatccctgttttgttcgagaagcatcttgtataaagcaagaacaaattgatataaggcatcttggtcattgcacagatacagatgacactagtttgttgggaaagaaagatgatggactacaatatcgaccagatgtgaaagatgctagtgatcaaagagaagatgtttatattggaaaccacatgccttgccctgaaaacctcaatggttactgcatccatggaaaatgtgaattcatctattctactcagaaggcttcttgtagatgtgaatctggctacactggacagcactgtgaaaagacagactttagtattctctatgtagtgccaagtaggcaaaagctcactcatgttcttattgcagcaattattggagctgtacagattgccatcatagtagcaattgtaatgtgcataacaagaaaatgccccaaaaacaatagaggacgtcgacagaagcaaaacctaggtcattttacttcagatacgtcatccagaatggtttaaactgatgacttttatatgtacactgaccatgtgatgtacatttattatgtctttttttaaagaatggaaatatttatttcagaggccttatttttggacatttttagtgtagtactgttggctcgtatttagaatattcagctacgacagttttggactgtttagtagtctttgttttatgtttttaaatacagaaattgctttcacaaatttgtaccacatggtaattctaagacttgttctttacccatggaatgtaatatttttgcaaagatggactacttcacaaatggttataaagtcatatccacttcttccacaatgaccacagcaaatgaccaagcatgaactaaaggtaaagatgtttacagattacttttcttacaaaaaaaatctagaagacactgtgtttaaatagatatttaaatgtttttgagatttagtaactgattttttagacactgcctatcgcatgaactgtaaagctgtgtgtattaggtgtaaaatatttataagatatatggactggggaatttgattattcctccctttgaaaaaatagtcctaataatttgaacaaatatgttagtaatgatggaacagatcaatgaaaagtagatatagatattgtgaaaataggctgtttaacaaacagattggaataaagcctattctaccagttaaactactttaatacacattcatttttaaagaaaatgtttgttttaacataaataaacaaatcgtatcagtgtttgtgaataaaatacaaaaatgattgttaatgattggtgctcttaaagtgagcttaaaatttatccaagacgtatatccaaatttgtcctgtagtaatagattaatattcatagattgttggtgtttaaagatctgaagtgtgagtagaatgtattcagctgtttaacatgtagtttagatattcaaaagtatgcatgtagaatttaaagaatatgttaaaaattattaattttaatattttgtttggaaaagcatgttataatataatgttttcactata

SEQ ID NO: 194464 - DNA, 2604 bp, Homo sapiens
  Payload ID: 18431
  Gene Name: transmembrane protein with EGF-like and two follistatin-like domains 2
  Uniprot ID: Q9UIK5
  ENST ID: ENST00000272771
  CDS Start-End: 1186-2310
aaacctgcgaacgcttgggctgggtcggagctgcggggggcctgggaggagagaggggagaagagagaaggaaggagagcgcctgccgggatggctgagctgcctcggcgagcagccttggggttgcacgctcttgtgggagatgctgctgttgcttccaggtcggcaagagcggttctaacaccatcgcctctcaccctctttcctgtaaatccctagagaaacgtccctggcctctccgccgcgacattcccagcctgcatccccctacagcctaggcggcgcgctcccgcacgctggagcgccggtcgccagcaggacgccctctcccgcgccgactcgcccctctctgccctgctgctgctgctcctctgacacctccgcccccaccatctccagctcggagagacgccacccagccgcggcccgcactcgcggcccggggtcacgcgcggaagaggggcgctagtccggaccccgccttcggtagggggcgtcctggagcggagagtgaggcgaatggtatatgagtgtgcgggtagcccaccctgaagcccgagcttctcatttgagccatccccgcctagccccactcgggccagcgcctggcgagcgagcccatctgtggcttccgcggccgcctcctccttgcatccttgcacctcctcgtcgacccctccctcccgggacctgcatcctgctccaccaatcagagcccgactgcctcttcccacgtgaccccgggcgggctgaggacctgctgcttcccaaacgccagagggatgcgggcggcagagctcgagaggcggctgccgggctgcggggcgccttgactctccctccaccctgcctcctcgggctccactcgtctgcccctggactcccgtctcctcctgtcctccggcttcccagagctccctccttatggcagcagcttcccgcgtctccggcgcagcttctcagcggacgaccctctcgctccggggctgagcccagtccctggatgttgctgaaactctcgagatcatgcgcgggtttggctgctgcttccccgccgggtgccactgccaccgccgccgcctctgctgccgccgtccgcgggatgctcagtagcccgctgcccggcccccgcgatcctgtgttcctcggaagccgtttgctgctgcagagttgcacgaactagtcatggtgctgtgggagtccccgcggcagtgcagcagctggacactttgcgagggcttttgctggctgctgctgctgcccgtcatgctactcatcgtagcccgcccggtgaagctcgctgctttccctacctccttaagtgactgccaaacgcccaccggctggaattgctctggttatgatgacagagaaaatgatctcttcctctgtgacaccaacacctgtaaatttgatggggaatgtttaagaattggagacactgtgacttgcgtctgtcagttcaagtgcaacaatgactatgtgcctgtgtgtggctccaatggggagagctaccagaatgagtgttacctgcgacaggctgcatgcaaacagcagagtgagatacttgtggtgtcagaaggatcatgtgccacagatgcaggatcaggatctggagatggagtccatgaaggctctggagaaactagtcaaaaggagacatccacctgtgatatttgccagtttggtgcagaatgtgacgaagatgccgaggatgtctggtgtgtgtgtaatattgactgttctcaaaccaacttcaatcccctctgcgcttctgatgggaaatcttatgataatgcatgccaaatcaaagaagcatcgtgtcagaaacaggagaaaattgaagtcatgtctttgggtcgatgtcaagataacacaactacaactactaagtctgaagatgggcattatgcaagaacagattatgcagagaatgctaacaaattagaagaaagtgccagagaacaccacataccttgtccggaacattacaatggcttctgcatgcatgggaagtgtgagcattctatcaatatgcaggagccatcttgcaggtgtgatgctggttatactggacaacactgtgaaaaaaaggactacagtgttctatacgttgttcccggtcctgtacgatttcagtatgtcttaatcgcagctgtgattggaacaattcagattgctgtcatctgtgtggtggtcctctgcatcacaaggaaatgccccagaagcaacagaattcacagacagaagcaaaatacagggcactacagttcagacaatacaacaagagcgtccacgaggttaatctaaagggagcatgtttcacagtggctggactaccgagagcttggactacacaatacagtattatagacaaaagaataagacaagagatctacacatgttgccttgcatttgtggtaatctacaccaatgaaaacatgtactacagctatatttgattatgtatggatatatttgaaatagtatacattgtcttgatgttttttctgtaatgtaaataaactatttatatcacacaatatagttttttctttcccatgtatttgttatatataataaatactcagtgatgagaaaaaa

SEQ ID NO: 194465 - DNA, 2842 bp, Homo sapiens
  Payload ID: 18431
  Gene Name: transmembrane protein with EGF-like and two follistatin-like domains 2
  Uniprot ID: Q9UIK5
  ENST ID: ENST00000392314
  CDS Start-End: 393-1433
agagctcgagaggcggctgccgggctgcggggcgccttgactctccctccaccctgcctcctcgggctccactcgtctgcccctggactcccgtctcctcctgtcctccggcttcccagagctccctccttatggcagcagcttcccgcgtctccggcgcagcttctcagcggacgaccctctcgctccggggctgagcccagtccctggatgttgctgaaactctcgagatcatgcgcgggtttggctgctgcttccccgccgggtgccactgccaccgccgccgcctctgctgccgccgtccgcgggatgctcagtagcccgctgcccggcccccgcgatcctgtgttcctcggaagccgtttgctgctgcagagttgcacgaactagtcatggtgctgtgggagtccccgcggcagtgcagcagctggacactttgcgagggcttttgctggctgctgctgctgcccgtcatgctactcatcgtagcccgcccggtgaagctcgctgctttccctacctccttaagtgactgccaaacgcccaccggctggaattgctctggttatgatgacagagaaaatgatctcttcctctgtgacaccaacacctgtaaatttgatggggaatgtttaagaattggagacactgtgacttgcgtctgtcagttcaagtgcaacaatgactatgtgcctgtgtgtggctccaatggggagagctaccagaatgagtgttacctgcgacaggctgcatgcaaacagcagagtgagatacttgtggtgtcagaaggatcatgtgccacagatgcaggatcaggatctggagatggagtccatgaaggctctggagaaactagtcaaaaggagacatccacctgtgatatttgccagtttggtgcagaatgtgacgaagatgccgaggatgtctggtgtgtgtgtaatattgactgttctcaaaccaacttcaatcccctctgcgcttctgatgggaaatcttatgataatgcatgccaaatcaaagaagcatcgtgtcagaaacaggagaaaattgaagtcatgtctttgggtcgatgtcaagataacacaactacaactactaagtctgaagatgggcattatgcaagaacagattatgcagagaatgctaacaaattagaagaaagtgccagagaacaccacataccttgtccggaacattacaatggcttctgcatgcatgggaagtgtgagcattctatcaatatgcaggagccatcttgcaggtgtgatgctggttatactggacaacactgtgaaaaaaaggactacagtgttctatacgttgttcccggtcctgtacgatttcagtatgtcttaatcgcagctgtgattggaacaattcagattgctgtcatctgtgtggtggtcctctgcatcacaagggccaaactttaggtaatagcattggactgagatttgtaaactttccaaccttccaggaaatgccccagaagcaacagaattcacagacagaagcaaaatacagggcactacagttcagacaatacaacaagagcgtccacgaggttaatctaaagggagcatgtttcacagtggctggactaccgagagcttggactacacaatacagtattatagacaaaagaataagacaagagatctacacatgttgccttgcatttgtggtaatctacaccaatgaaaacatgtactacagctatatttgattatgtatggatatatttgaaatagtatacattgtcttgatgttttttctgtaatgtaaataaactatttatatcacacaatatagttttttctttcccatgtatttgttatatataataaatactcagtgatgagaaaaaattggcattcttaaatttgcggtatctcataactgtaaatataatcagactagtacaatctgtacagctaccaatatttcatgtttcttctcatcttgagacagcacattagttcgtacaggactcagtggctaggttttgaatgattccaagatcaagggaaatgatggttattggaaaagagaaaaaataatttactttatatcgagtgaggataaaatatttccgatctttgaatcatctctatttcatcaactttcttccctggtcttccattttcatccctagagcagaaaaatctctggcatataaactaaataaaagaagaaggggagggaaagtgttttataactcataaaggagagggaaagaaaatattggtttttattggggaagtagcttagaatcccccagttaagtgcatatatctgaacttactgaacaagttacatactaggtatacacagagtggcaaaatatattccatttaggtgggtggaattaccaggggaaaaatgtaataacaccactagatgtgaaacaccaaaatcgtgaattctcaaaagcaccatacaatatgtatagtatatagttctttgaaaagaagttagaatcacaaccaataccccatgaatagctttgtggctaatgcagcaccataatttgtaatggaactaagatgatgatgacgatatttcatgaaaacagagagatgttttgagcatatttatgtggtgaggtaagaaagaaaattaatcctatagcatctgaaagacctcactgggaagttggtatggatttttgtttgatttgtgcatacaaataggtatcacaacttgatctggaaaaaataagctgtgaaaattctcaaggaataagatgaaaataaatcaattattatcatttagctctgcaaagctttccatggctaacacagtaaatttaaataaagctctctttgtctccttcaaataa

SEQ ID NO: 194466 - DNA, 3364 bp, Homo sapiens
  Payload ID: 18431
  Gene Name: transmembrane protein with EGF-like and two follistatin-like domains 2
  Uniprot ID: Q9UIK5
  ENST ID: ENST00000409056
  CDS Start-End: 1-528
atggtgctgtgggagtccccgcggcagtgcagcagctggacactttgcgagggcttttgctggctgctgctgctgcccgtcatgctactcatcgtagcccgcccggtgaagctcgctgctttccctacctccttaagtgactgccaaacgcccaccggctggaattgctctggttatgatgacagagaaaatgatctcttcctctgtgacaccaacacctgtaaatttgatggggaatgtttaagaattggagacactgtgacttgcgtctgtcagttcaagtgcaacaatgactatgtgcctgtgtgtggctccaatggggagagctaccagaatgagtgttacctgcgacaggctgcatgcaaacagcagagtgagatacttgtggtgtcagaaggatcatgtgccacagatgcaggatcaggatctggagatggaggtaggagttgcctttttacatatttgaagatttactggtggatattattatgtatatttacttatgtatgttccatttcagatatttaagacaaatttcatattttgcattttaggaaaggtgaaaccataaaaaattgtcaccatattaagtacatgtatataccgtgcaaattatttggcatacttatgaatcatactctatctccagttaaccttccttgttcatttgtttgtttgtttgtttgtaagttatctttgatatggataggcataatgtaaaaacttctgaagagaagcatgtaagcatatttggcagggaagaaagaattcatgaggaaatcatttaaatattggatttttaaatatatgacactgctctcaattactaggtgctaataagacatacataacctaccatatagccaaggttttaattatcagatttataatttgaaactgaaggaactttagttcataaaagtgaaaaagataaaatgaagtccaatgaaagtaaaatattatctttgcttccttgattaaatctatagttatttttactaaagtatgatatatgttcccattatttagttttgtttagggaagtatataagatgagagagagagagagagaaactttaaaagtttgatctaatgtacttactaccaaataaagattttacctatagattgaaactaaattgtaaatgtcccaaatacttttcccgatgaaattcaaacaaaattagacttttatacacacaaagcaaaacaaaacacaacctatatataatttcaagattaagaaaaacaaaacaaataaaagcattctctcaagaccttgcttcagttgtgtaaaataattaaatgtgctattccaagttgattttagtttttaaatacagaatttgataaaagataagtaaaagaaggccttgggttcagggtggcagatatttagtgcaccctttatctagttcaggaaacacttgaaagatttatcaagtttccttatgtaatgaaagacttaactagttcaaataagcaatacccacagaacataattagagcagcatattggagcacaatttttttttcataaagactaaaactgaacagcagcagattgaaacacaatttttttcctaaagactaaaactgaacagcagtcaagactcaagcatagaatatgtttcaatgtcccatgatgttggacagtcctttgatgtctggacagtctttctctacttctaataaaagttttcctagctgattaatatagtattcccaagaaagcgtccctagaggttttgaaaataagaccttagaatagcatattaaatcttaaagaaaaaaaaaagacaggaaaaaaggcagttcctttagtagatgttttaccatgggaatattattaataagaaatcaattaattttttaaaatgttgcttttgtaaggaaacagtttctatgcaaaattctgtatattttctagctgtttagttttatatgtagactacctaattttgcaaatattgtgctgagactgaactgttccactgtttacccaccagtcttgttaattttctagcatctttaaagacaaaataaaacataccaagaatgtcttcatttctctttctgttaaagcatcatcatttacttttttctgcttgactatcctaccatactgtacttcatatctttatttttctaacaataagatgtgaactttgtttcacatactagtttctagttttcattcattgttattagcacatgcaaatggaaatgaagtcaaactcactcttccctgttgcgttttatattaaaatctttggttcattatgttgtcttgtgatctgaataagacattttttcaggaaataattttaatctcatgaatatgacatgtataacttataccatataagtgaaacatcacttggaaaacactttattttctttctctttttctgttttttaatcactcttcctttcagttagaggtgcttcatagtaacttggagaaaacaaaaacaacttccgatgtttgctttagaaaaaaaaagcatataacacatttaattctgagcttattcttttaaataactgcagttctgaaaattgtggtgatgagtatttgctcctaattgcatacaatttttaaaattagagactgatcaggtttttctcaacagaactgcttgtttttctagtctacatgttactttggtctgtaagactattagttttaattttctttaaattctttattgagggatgccaaaaatgcttagtaactaaaacctaaaaacctagtttagaataacttgcacaaattcagttcacatatccattgggttgtaatcgtaagatatatttgacttgctatctctcttatacagatgatagactttcctctgtatttttgtagaattcgtattaccaaggttttgagagggcagaatcagcttccttcatttttgaataaagcaaaagtgattgaataacttgtgattgtttggctaatccaacaattgtaactagtgattgttctaactaatctctatataacatattctcagtaatgtgtatttaattaataattgggtttacttggcaagcactttggatggttaatagttattttctaatttcttattttaacaaaagttaatataattccaaaatggagtacactgaacaaaagagtgaagggaacaaatttacttgtaaaacatttatcatgtgtgactatcataaatgatatcattaaacttacaaatctaaaatcatgtaaaaatatatcaaatattactttttaaaaattttcctatattttagcgtgaatgaatattacattagtaatgaaaattagacctgattattctaaaaataatttaagcttaacccatttgcacaaggg

SEQ ID NO: 194467 - DNA, 3962 bp, Homo sapiens
  Payload ID: 18432
  Gene Name: transmembrane protein with metallophosphoesterase domain
  Uniprot ID: Q6ZT21
  ENST ID: ENST00000342462
  CDS Start-End: 192-1553
agctcggtcgcttgtgcgttccgctccggccgccctttgcgcttggatccacttccccatctgtaacgaggtgttgagacgaggcggagttgacctggaaacctctccttggccactgtcctttctaaggaactcatttccagagtccaccagcacagaactggtgggggagcctactaggagcagagaaaatggccatcttcaggcagctgtccctaggcgcgaaggccaccctggctgctgtcactgtcttcgtgtccatgatcgcctcccgctcgtatctggcagagagccttgagctcagggcctggcgttggctgcttcgcttgcagcttgccctgtttgtcaactcgctcttgctcattggctccctctacatttggcgcagcacagtgagcaacctctgccactccccagctgcagagtcaacctgttttcagctttggaaggtggtggttctggcatttctggccctggcccattccagtttctttaccatgttctttttagtggccgaagagccctatctcttttccttggcggcctactcctgcctgggtgcttacatcatcatgctcttcttcctcttcatcctcagcggcatggagcaggcctaccagctcttggcctggcgcagtggtagggtcgtgggcagccttgagaagacaaggaagctcgtgctcaggcctgccctggcagtgggagtgactgctgtgctcagcgtggccgggattctgaatgccgcgcagcccccggctgtgaaaactgtggaggtgcccatccatcagctgcctgcctcaatgaacaacctcaagatcgtgctcctctcagacattcacttgggccccacagtgggcaggaccaagatggaaatgtttgtgaggatggtgaatgtgctggaaccagacatcacggtgattgtgggtgacctctccgactcagaagcctcggtcctgcggacggctgtcgctcctctgggccagcttcattcacatctcggtgcctacttcgtcacaggcaatcatgagtactacacgtcagatgtcagcaactggtttgcacttctggaatccctgcatgtccagcctcttcataatgagaacgtgaagatttccgccacacgggcccaacgtggtggtggtggcagtggcagtgggagtgaggatgaggactggatctgcttggctggggtggacgatattgaagcagacatcctgcactactctggccatggcatggatcttgacaaggccctggagggctgcagcccagaccacacaatcatcttgctagctcaccagcccctggctgccaagagagctctccaggctcggccagatattaacctgatcctttctgggcacacacatgctgggcagatcttccccttgaacgtagcagcctatctcctgaatcccttctttgctggtctctaccaggtggcccaggctacattcgtgtatgtcagcccaggcacagcctactacgggatacccatgaggctgggtagcagggccgagatcacagagctcatcctgcagcggtctccctgaactggccctgccctgtgcacctctgccctgcccttgtcctcgaccctccatcctgcttcagagtggtttgcctgcttttcccctccagccttgcccactcatccttgcctacacacccttggtcacaagcctgactcaaacagtgacttatggtgggcctgcctggcatgttcaggctggtttaactatttccttggccagttgctttttttgatgcacttgtgagatcactaaggtcacatatattagcactcccctctattttccagatgatgtggaatggggaccttctcctgcagagctcccagggatgaacctcccctcggggttgctagaaaggcatacctctagaaggtggggcggggaggagcaggagcatttttctcctggtgttttaaaattgtctttaggacttaagtggtttccagaatcattgatccagagcctttctggggaaggggtagtgttgccaggtaatttgggagaacaggcaagatggaagggccctctggctgctagagaagaatattttcttttcctctgattctatcaggatcacctctattgagggcatcagcaaaatctactggaatgcaaagctcctcctgttccaggccttgagggatgctatttaactgtctgtgctcctgggcctttgggggcaaggtcaggggagaagaacggtgggcgccatggtcggtgatggtgagaacatggctgcttaggaattcagagggctttgcctcccttgtctcattttatacaacccttcggggagctcactggggacaggctgcttttccctatttggagataaggaaaccaaggcaaagagagatagggcacaggcagtatgacaagatatgtaggagatttggggctagaaaccaggtcttgtacctcccagtaaaagcggtgcttttgcccttttgccagaagcaatagatcctttgatcctgagatggagataagcacccgtgttagaaaaggcctcactgagaagacagggctgggctggtttcctgctgggtgatttaggcttgtgatggaaagtcttcctccaatggggagtgaagacactcgctctgactggagaggctaaccctgctgctcactcatagggcagcgttgggtgggtgactttccctcactcagccttggtttccatcaaccctaaaatggggataattatcgtatctacctcaagattgttttgtcaggagggatccatcaagccttgtgcatgagttccacatggcacagcgtgcacagtaaacactcaatgttaatttttcaacgttccagtggagcttgctaaggaactctgttgggcacaggtgcccagaggattcatggagcagccagtcctggggaatgtgagtgggtagcgagctgcctgctgctggggcaggtgatgtgtcaaagcagcaactgctaggggtttgccttccttccctcatgtgcattctggcaggcaaagggggtttcttcctttcctccttgtcctcctggtgtatagtggggttctgggggatctggagaccaccctttttgttcccaggcagccacggtattgacagtgggccataccatgcagtttaaaatgtatctttgagttgaaattttggtggtttccttattcttttttctctcttcactgtccttccaaactcacttttcttgtgtcccgaccgcattttgtgaatcatccttactccctttaagttctcgctttggatttcaccaggtgggctagatggtgccatttcacttccactgtttgatgcggctggtaatgtttgactcacctgttacgtgttatttcactggtttcttgattttacatctttctcatcagtgacctgggcttgatgaaattagctttcattaagtcctattttttttttaattttgcatccttacctcttttctttctcttgaatgccatcattgtgtggtcttatgtacccttcatccactctgaagtccttgcttgactgattgctttctattagcagaaagaaaacaggtccatcctatgtatctgagaaacaacatcaacaccctctcgtatgtggtttgtattccctgacgcggcggacatttttgcagcagaaatttctccatcactgtccagattctggccctggtgggcaggtctccatgacacctttagtccctttgttcaacattcttaaaccatggacctttttgtttgtttgtggccgggggaggtggtgagaaacgttacttgaagcttgatcattctttcaatttcatttgtttctttatttttaatctgttagatgcaaattgaaatgcaatgctttttgaaaatcagcaatagtgtctgtagtatatgatgctgtcacaaaatctcaataaattgatcctgctgccattccttcc

SEQ ID NO: 194468 - DNA, 3451 bp, Homo sapiens
  Payload ID: 18432
  Gene Name: transmembrane protein with metallophosphoesterase domain
  Uniprot ID: Q6ZT21
  ENST ID: ENST00000416695
  CDS Start-End: 88-1038
agctcggtcgcttgtgcgttccgctccggccgccctttgcgcttggatccacttccccatctgtaacgaggtgttgagacgagcggcatggagcaggcctaccagctcttggcctggcgcagtggtagggtcgtgggcagccttgagaagacaaggaagctcgtgctcaggcctgccctggcagtgggagtgactgctgtgctcagcgtggccgggattctgaatgccgcgcagcccccggctgtgaaaactgtggaggtgcccatccatcagctgcctgcctcaatgaacaacctcaagatcgtgctcctctcagacattcacttgggccccacagtgggcaggaccaagatggaaatgtttgtgaggatggtgaatgtgctggaaccagacatcacggtgattgtgggtgacctctccgactcagaagcctcggtcctgcggacggctgtcgctcctctgggccagcttcattcacatctcggtgcctacttcgtcacaggcaatcatgagtactacacgtcagatgtcagcaactggtttgcacttctggaatccctgcatgtccagcctcttcataatgagaacgtgaagatttccgccacacgggcccaacgtggtggtggtggcagtggcagtgggagtgaggatgaggactggatctgcttggctggggtggacgatattgaagcagacatcctgcactactctggccatggcatggatcttgacaaggccctggagggctgcagcccagaccacacaatcatcttgctagctcaccagcccctggctgccaagagagctctccaggctcggccagatattaacctgatcctttctgggcacacacatgctgggcagatcttccccttgaacgtagcagcctatctcctgaatcccttctttgctggtctctaccaggtggcccaggctacattcgtgtatgtcagcccaggcacagcctactacgggatacccatgaggctgggtagcagggccgagatcacagagctcatcctgcagcggtctccctgaactggccctgccctgtgcacctctgccctgcccttgtcctcgaccctccatcctgcttcagagtggtttgcctgcttttcccctccagccttgcccactcatccttgcctacacacccttggtcacaagcctgactcaaacagtgacttatggtgggcctgcctggcatgttcaggctggtttaactatttccttggccagttgctttttttgatgcacttgtgagatcactaaggtcacatatattagcactcccctctattttccagatgatgtggaatggggaccttctcctgcagagctcccagggatgaacctcccctcggggttgctagaaaggcatacctctagaaggtggggcggggaggagcaggagcatttttctcctggtgttttaaaattgtctttaggacttaagtggtttccagaatcattgatccagagcctttctggggaaggggtagtgttgccaggtaatttgggagaacaggcaagatggaagggccctctggctgctagagaagaatattttcttttcctctgattctatcaggatcacctctattgagggcatcagcaaaatctactggaatgcaaagctcctcctgttccaggccttgagggatgctatttaactgtctgtgctcctgggcctttgggggcaaggtcaggggagaagaacggtgggcgccatggtcggtgatggtgagaacatggctgcttaggaattcagagggctttgcctcccttgtctcattttatacaacccttcggggagctcactggggacaggctgcttttccctatttggagataaggaaaccaaggcaaagagagatagggcacaggcagtatgacaagatatgtaggagatttggggctagaaaccaggtcttgtacctcccagtaaaagcggtgcttttgcccttttgccagaagcaatagatcctttgatcctgagatggagataagcacccgtgttagaaaaggcctcactgagaagacagggctgggctggtttcctgctgggtgatttaggcttgtgatggaaagtcttcctccaatggggagtgaagacactcgctctgactggagaggctaaccctgctgctcactcatagggcagcgttgggtgggtgactttccctcactcagccttggtttccatcaaccctaaaatggggataattatcgtatctacctcaagattgttttgtcaggagggatccatcaagccttgtgcatgagttccacatggcacagcgtgcacagtaaacactcaatgttaatttttcaacgttccagtggagcttgctaaggaactctgttgggcacaggtgcccagaggattcatggagcagccagtcctggggaatgtgagtgggtagcgagctgcctgctgctggggcaggtgatgtgtcaaagcagcaactgctaggggtttgccttccttccctcatgtgcattctggcaggcaaagggggtttcttcctttcctccttgtcctcctggtgtatagtggggttctgggggatctggagaccaccctttttgttcccaggcagccacggtattgacagtgggccataccatgcagtttaaaatgtatctttgagttgaaattttggtggtttccttattcttttttctctcttcactgtccttccaaactcacttttcttgtgtcccgaccgcattttgtgaatcatccttactccctttaagttctcgctttggatttcaccaggtgggctagatggtgccatttcacttccactgtttgatgcggctggtaatgtttgactcacctgttacgtgttatttcactggtttcttgattttacatctttctcatcagtgacctgggcttgatgaaattagctttcattaagtcctattttttttttaattttgcatccttacctcttttctttctcttgaatgccatcattgtgtggtcttatgtacccttcatccactctgaagtccttgcttgactgattgctttctattagcagaaagaaaacaggtccatcctatgtatctgagaaacaacatcaacaccctctcgtatgtggtttgtattccctgacgcggcggacatttttgcagcagaaatttctccatcactgtccagattctggccctggtgggcaggtctccatgacacctttagtccctttgttcaacattcttaaaccatggacctttttgtttgtttgtggccgggggaggtggtgagaaacgttacttgaagcttgatcattctttcaatttcatttgtttctttatttttaatctgttagatgcaaattgaaatgcaatgctttttgaaaatcagcaatagtgtctgtagtatatgatgctgtcacaaaatctcaataaattgatcctgctgccattccttccaaat

SEQ ID NO: 194469 - DNA, 1725 bp, Homo sapiens
  Payload ID: 18433
  Gene Name: transmembrane protein, adipocyte asscociated 1
  Uniprot ID: Q86W33
  ENST ID: ENST00000296210
  CDS Start-End: 316-1197
ggctggacgaaaaagacggtcttgctttcccggtcgccgctgtcgggaagggctgcagggtgtccgcgagacccgcggcccggcgagctgaccccgcctcgcctttcctgcctagccctcattccacggagccggtcgcgcccggtccttgcgcgacgcttcccggcccaggccgcctggtctggcgctggaggccggagtcccgcggcctgtgctggatccgcgcacacccagtggcggcggatgggcggccggggcggccggggcggccggtcctgagcgcggcccgggctgtcagggctggctgctggcgggatggacaccctggaggaggtgacttgggccaatgggagcacagcgctacccccacccctggcaccaaacatcagtgtgcctcatcgctgcctgctgctgctctacgaagacattggcacctccagggtccggtactgggacctcttgctgctcatccccaatgtgctcttcctcatcttcctgctctggaagcttccatctgctcgggcgaagatccgcatcacctccagccccatttttatcaccttctacatcctggtgtttgtggtggcgctggtgggcattgcccgggccgtggtatccatgacggtgagcacctcgaacgctgcaactgttgctgataagatcctgtgggagatcacccgcttcttcctgctggccatcgagctgagtgtgatcatcctgggcctggcctttggccacctggagagtaagtccagcatcaagcgggtgctggccatcaccacagtgctgtccctggcctactctgtcacccaggggaccctggagatcctgtaccctgatgcccatctctcagctgaggactttaatatctatggccatgggggccgccagttctggctggtcagctcctgcttcttcttcctgctgtgtagatgccacaaccttcctgtacttcagcttcttcgctccgctcatctacgtggctttcctccggggcttcttcggctcggagcccaagatcctcttctcctacaaatgccaagtggacgagacagaggagccagatgtacacctaccccagccctacgctgtggcccggcgggagggcctggaggctgcaggggctgctggggcctcagctgccagctactcgagcacgcagttcgactctgccggcggggtggcctacctggatgacatcgcttccatgccctgccacactggcagcatcaacagcacagacagcgagcgctggaaggccatcaatgcctgagggcagctgccagggcctgtggaggacaggccagagaggaggccagcaggcccagagtccccaggggaggaggaccaggtcaagggacgttctgtgggcagtagccctgtgtggccctgttcccaccatgagtctggaggccccacctccctggggctcccaatcccctttgccatctctgctctcactggggaccctcctccccttcccacctgctctcatactgctcagtgacatggcccaggctttccttccagggccatgcttggcaaggttggctgagggcaccctccttctctgcacccttggcacgagggcagggctggctctcccaatgcctccatcccatccccatggtgctttggcctcctcaaagcatccaccatggtggatggactgaagtgtgtatattttcttgatctattttttaataaaaaggaaaaggagcagaa

SEQ ID NO: 194470 - DNA, 1933 bp, Homo sapiens
  Payload ID: 18433
  Gene Name: transmembrane protein, adipocyte asscociated 1
  Uniprot ID: Q86W33
  ENST ID: ENST00000355552
  CDS Start-End: 378-1499
gagtgataacagggactctgggactctgggacttgtgggactgtggccgttttcgcaatttgggctggacgaaaaagacggtcttgctttcccggtcgccgctgtcgggaagggctgcagggtgtccgcgagacccgcggcccggcgagctgaccccgcctcgcctttcctgcctagccctcattccacggagccggtcgcgcccggtccttgcgcgacgcttcccggcccaggccgcctggtctggcgctggaggccggagtcccgcggcctgtgctggatccgcgcacacccagtggcggcggatgggcggccggggcggccggggcggccggtcctgagcgcggcccgggctgtcagggctggctgctggcgggatggacaccctggaggaggtgacttgggccaatgggagcacagcgctacccccacccctggcaccaaacatcagtgtgcctcatcgctgcctgctgctgctctacgaagacattggcacctccagggtccggtactgggacctcttgctgctcatccccaatgtgctcttcctcatcttcctgctctggaagcttccatctgctcgggcgaagatccgcatcacctccagccccatttttatcaccttctacatcctggtgtttgtggtggcgctggtgggcattgcccgggccgtggtatccatgacggtgagcacctcgaacgctgcaactgttgctgataagatcctgtgggagatcacccgcttcttcctgctggccatcgagctgagtgtgatcatcctgggcctggcctttggccacctggagagtaagtccagcatcaagcgggtgctggccatcaccacagtgctgtccctggcctactctgtcacccaggggaccctggagatcctgtaccctgatgcccatctctcagctgaggactttaatatctatggccatgggggccgccagttctggctggtcagctcctgcttcttcttcctggtctactctctggtggtcatccttcccaagaccccgctgaaggagcgcatctccctgccttctcggaggagcttctacgtgtatgcgggcatcctggcactgctcaacctactgcaggggctggggagtgtgctgctgtgcttcgacatcatcgaggggctctgctgtgtagatgccacaaccttcctgtacttcagcttcttcgctccgctcatctacgtggctttcctccggggcttcttcggctcggagcccaagatcctcttctcctacaaatgccaagtggacgagacagaggagccagatgtacacctaccccagccctacgctgtggcccggcgggagggcctggaggctgcaggggctgctggggcctcagctgccagctactcgagcacgcagttcgactctgccggcggggtggcctacctggatgacatcgcttccatgccctgccacactggcagcatcaacagcacagacagcgagcgctggaaggccatcaatgcctgagggcagctgccagggcctgtggaggacaggccagagaggaggccagcaggcccagagtccccaggggaggaggaccaggtcaagggacgttctgtgggcagtagccctgtgtggccctgttcccaccatgagtctggaggccccacctccctggggctcccaatcccctttgccatctctgctctcactggggaccctcctccccttcccacctgctctcatactgctcagtgacatggcccaggctttccttccagggccatgcttggcaaggttggctgagggcaccctccttctctgcacccttggcacgagggcagggctggctctcccaatgcctccatcccatccccatggtgctttggcctcctcaaagcatccaccatggtggatggactgaagtgtgtatattttcttgatctattttttaataa

SEQ ID NO: 194471 - DNA, 1831 bp, Homo sapiens
  Payload ID: 18433
  Gene Name: transmembrane protein, adipocyte asscociated 1
  Uniprot ID: Q86W33
  ENST ID: ENST00000393400
  CDS Start-End: 343-1062
tgggactgtggccgttttcgcaatttgggctggacgaaaaagacggtcttgctttcccggtcgccgctgtcgggaagggctgcagggtgtccgcgagacccgcggcccggcgagctgaccccgcctcgcctttcctgcctagccctcattccacggagccggtcgcgcccggtccttgcgcgacgcttcccggcccaggccgcctggtctggcgctggaggccggagtcccgcggcctgtgctggatccgcgcacacccagtggcggcggatgggcggccggggcggccggggcggccggtcctgagcgcggcccgggctgtcagggctggctgctggcgggatggacaccctggaggaggtgacttgggccaatgggagcacagcgctacccccacccctggcaccaaacatcagtgtgcctcatcgctgcctgctgctgctctacgaagacattggcacctccagggtccggtactgggacctcttgctgctcatccccaatgtgctcttcctcatcttcctgctctggaagcttccatctgctcgggcgaagatccgcatcacctccagccccatttttatcaccttctacatcctggtgtttgtggtggcgctggtgggcattgcccgggccgtggtatccatgacggtgagcacctcgaacgctgcaactgttgctgataagatcctgtgggagatcacccgcttcttcctgctggccatcgagctgagtgtgatcatcctgggcctggcctttggccacctggagagtaagtccagcatcaagcgggtgctggccatcaccacagtgctgtccctggcctactctgtcacccaggggaccctggagatcctgtaccctgatgcccatctctcagctgaggactttaatatctatggccatgggggccgccagttctggctggtcagctcctgcttcttcttcctgctcggaggagcttctacgtgtatgcgggcatcctggcactgctcaacctactgcaggggctggggagtgtgctgctgtgcttcgacatcatcgaggggctctgctgtgtagatgccacaaccttcctgtacttcagcttcttcgctccgctcatctacgtggctttcctccggggcttcttcggctcggagcccaagatcctcttctcctacaaatgccaagtggacgagacagaggagccagatgtacacctaccccagccctacgctgtggcccggcgggagggcctggaggctgcaggggctgctggggcctcagctgccagctactcgagcacgcagttcgactctgccggcggggtggcctacctggatgacatcgcttccatgccctgccacactggcagcatcaacagcacagacagcgagcgctggaaggccatcaatgcctgagggcagctgccagggcctgtggaggacaggccagagaggaggccagcaggcccagagtccccaggggaggaggaccaggtcaagggacgttctgtgggcagtagccctgtgtggccctgttcccaccatgagtctggaggccccacctccctggggctcccaatcccctttgccatctctgctctcactggggaccctcctccccttcccacctgctctcatactgctcagtgacatggcccaggctttccttccagggccatgcttggcaaggttggctgagggcaccctccttctctgcacccttggcacgagggcagggctggctctcccaatgcctccatcccatccccatggtgctttggcctcctcaaagcatccaccatggtggatggactgaagtgtgtatattttcttgatctattttt

SEQ ID NO: 194472 - DNA, 1865 bp, Homo sapiens
  Payload ID: 18433
  Gene Name: transmembrane protein, adipocyte asscociated 1
  Uniprot ID: Q86W33
  ENST ID: ENST00000450633
  CDS Start-End: 292-1413
gccttgcacatggagatgcttagctgagggggtggctttgttagactatttgcaggtcgtgagatagagcctgagatgggggactgggcccctgcctgggggattgggtcgtgacctgtgtggagccccacactgagctgcagtgggtggggagggtggtttacaggggtgctctgtgcagcccctctgattttcccctgggagtcccaggtccaggggaaggaggacagtggcccaggccacacagctcactgggcggctctcactcccccagggctggctgctggcgggatggacaccctggaggaggtgacttgggccaatgggagcacagcgctacccccacccctggcaccaaacatcagtgtgcctcatcgctgcctgctgctgctctacgaagacattggcacctccagggtccggtactgggacctcttgctgctcatccccaatgtgctcttcctcatcttcctgctctggaagcttccatctgctcgggcgaagatccgcatcacctccagccccatttttatcaccttctacatcctggtgtttgtggtggcgctggtgggcattgcccgggccgtggtatccatgacggtgagcacctcgaacgctgcaactgttgctgataagatcctgtgggagatcacccgcttcttcctgctggccatcgagctgagtgtgatcatcctgggcctggcctttggccacctggagagtaagtccagcatcaagcgggtgctggccatcaccacagtgctgtccctggcctactctgtcacccaggggaccctggagatcctgtaccctgatgcccatctctcagctgaggactttaatatctatggccatgggggccgccagttctggctggtcagctcctgcttcttcttcctggtctactctctggtggtcatccttcccaagaccccgctgaaggagcgcatctccctgccttctcggaggagcttctacgtgtatgcgggcatcctggcactgctcaacctactgcaggggctggggagtgtgctgctgtgcttcgacatcatcgaggggctctgctgtgtagatgccacaaccttcctgtacttcagcttcttcgctccgctcatctacgtggctttcctccggggcttcttcggctcggagcccaagatcctcttctcctacaaatgccaagtggacgagacagaggagccagatgtacacctaccccagccctacgctgtggcccggcgggagggcctggaggctgcaggggctgctggggcctcagctgccagctactcgagcacgcagttcgactctgccggcggggtggcctacctggatgacatcgcttccatgccctgccacactggcagcatcaacagcacagacagcgagcgctggaaggccatcaatgcctgagggcagctgccagggcctgtggaggacaggccagagaggaggccagcaggcccagagtccccaggggaggaggaccaggtcaagggacgttctgtgggcagtagccctgtgtggccctgttcccaccatgagtctggaggccccacctccctggggctcccaatcccctttgccatctctgctctcactggggaccctcctccccttcccacctgctctcatactgctcagtgacatggcccaggctttccttccagggccatgcttggcaaggttggctgagggcaccctccttctctgcacccttggcacgagggcagggctggctctcccaatgcctccatcccatccccatggtgctttggcctcctcaaagcatccaccatggtggatggactgaagtgtgtatattttcttgatctattttttaataaaaaggaaaaggagcagaa

SEQ ID NO: 194473 - DNA, 841 bp, Homo sapiens
  Payload ID: 18433
  Gene Name: transmembrane protein, adipocyte asscociated 1
  ENST ID: ENST00000490290
  CDS Start-End: 231-841
ggccgcggcccaggccgggaggtggagcgcggctgccgccagctggtccactgacaactgctgccagctggaaggcgcgtagggcgagaggtggcgcgtcctcagctttccagtcttcgattccgcccgctttccgagtgagaaacgcaggcctctctcttccgtgaagcagcgtcttgtctctgcacctcctctgtgctgtctctttaagagggctggctgctggcgggatggacaccctggaggaggtgacttgggccaatgggagcacagcgctacccccacccctggcaccaaacatcagtgtgcctcatcgctgcctgctgctgctctacgaagacattggcacctccagggtccggtactgggacctcttgctgctcatccccaatgtgctcttcctcatcttcctgctctggaagcttccatctgctcgggcgaagatccgcatcacctccagccccatttttatcaccttctacatcctggtgtttgtggtggcgctggtgggcattgcccgggccgtggtatccatgacggtgagcacctcgaacgctgcaactgttgctgataagatcctgtgggagatcacccgcttcttcctgctggccatcgagctgagtgtgatcatcctgggcctggcctttggccacctggagagtaagtccagcatcaagcgggtgctggccatcaccacagtgctgtccctggcctactctgtcacccaggggaccctggagatcctgtaccctgatgcccatctctcagctgaggactttaatatctatggccatgggggccgccagttctggctggtcagctcctgcttcttcttcctggt

SEQ ID NO: 194474 - DNA, 1903 bp, Homo sapiens
  Payload ID: 18433
  Gene Name: transmembrane protein, adipocyte asscociated 1
  Uniprot ID: Q86W33
  ENST ID: ENST00000489960
  CDS Start-End: 407-1528
gcccaggccgggaggtggagcgcggctgccgccagctggtccactgacaactgctgccagctggaaggcgcgtagggcgagaggtggcgcgtcctcagctttccagtcttcgattccgcccgctttccgagtgagaaacgcaggcctctctcttccgtgaagcagcgtcttgtctctgcacctcctctgtgctgtctctttaagagccctcattccacggagccggtcgcgcccggtccttgcgcgacgcttcccggcccaggccgcctggtctggcgctggaggccggagtcccgcggcctgtgctggatccgcgcacacccagtggcggcggatgggcggccggggcggccggggcggccggtcctgagcgcggcccgggctgtcagggctggctgctggcgggatggacaccctggaggaggtgacttgggccaatgggagcacagcgctacccccacccctggcaccaaacatcagtgtgcctcatcgctgcctgctgctgctctacgaagacattggcacctccagggtccggtactgggacctcttgctgctcatccccaatgtgctcttcctcatcttcctgctctggaagcttccatctgctcgggcgaagatccgcatcacctccagccccatttttatcaccttctacatcctggtgtttgtggtggcgctggtgggcattgcccgggccgtggtatccatgacggtgagcacctcgaacgctgcaactgttgctgataagatcctgtgggagatcacccgcttcttcctgctggccatcgagctgagtgtgatcatcctgggcctggcctttggccacctggagagtaagtccagcatcaagcgggtgctggccatcaccacagtgctgtccctggcctactctgtcacccaggggaccctggagatcctgtaccctgatgcccatctctcagctgaggactttaatatctatggccatgggggccgccagttctggctggtcagctcctgcttcttcttcctggtctactctctggtggtcatccttcccaagaccccgctgaaggagcgcatctccctgccttctcggaggagcttctacgtgtatgcgggcatcctggcactgctcaacctactgcaggggctggggagtgtgctgctgtgcttcgacatcatcgaggggctctgctgtgtagatgccacaaccttcctgtacttcagcttcttcgctccgctcatctacgtggctttcctccggggcttcttcggctcggagcccaagatcctcttctcctacaaatgccaagtggacgagacagaggagccagatgtacacctaccccagccctacgctgtggcccggcgggagggcctggaggctgcaggggctgctggggcctcagctgccagctactcgagcacgcagttcgactctgccggcggggtggcctacctggatgacatcgcttccatgccctgccacactggcagcatcaacagcacagacagcgagcgctggaaggccatcaatgcctgagggcagctgccagggcctgtggaggacaggccagagaggaggccagcaggcccagagtccccaggggaggaggaccaggtcaagggacgttctgtgggcagtagccctgtgtggccctgttcccaccatgagtctggaggccccacctccctggggctcccaatcccctttgccatctctgctctcactggggaccctcctccccttcccacctgctctcatactgctcagtgacatggcccaggctttccttccagggccatgcttggcaaggttggctgagggcaccctccttctctgcacccttggcacgagggcagggctggctctcccaatgcctccatcccatccccatggtgctttggcctcctcaaa

SEQ ID NO: 194475 - DNA, 1720 bp, Homo sapiens
  Payload ID: 18433
  Gene Name: transmembrane protein, adipocyte asscociated 1
  ENST ID: ENST00000483868
  CDS Start-End: 312-989
ggacgaaaaagacggtcttgctttcccggtcgccgctgtcgggaagggctgcagggtgtccgcgagacccgcggcccggcgagctgaccccgcctcgcctttcctgcctagccctcattccacggagccggtcgcgcccggtccttgcgcgacgcttcccggcccaggccgcctggtctggcgctggaggccggagtcccgcggcctgtgctggatccgcgcacacccagtggcggcggatgggcggccggggcggccggggcggccggtcctgagcgcggcccgggctgtcagggctggctgctggcgggatggacaccctggaggaggtgacttgggccaatgggagcacagcgctacccccacccctggcaccaaacatcagtgtgcctcatcgctgcctgctgctgctctacgaagacattggcacctccagggtccggtactgggacctcttgctgctcatccccaatgtgctcttcctcatcttcctgctctggaagcttccatctgctcgggcgaagatccgcatcacctccagccccatttttatcaccttctacatcctggtgtttgtggtggcgctggtgggcattgcccgggccgtggtatccatgacggtgagcacctcgaacgctgcaactgttgctgataagatcctgtgggagatcacccgcttcttcctgctggccatcgagctgagtgtgatcatcctgggcctggcctttggccacctggagagtaagtccagcatcaagcgggtgctggccatcaccacagtgctgtccctggcctactctgtcacccaggggaccctggagatcctgtaccctgatgcccatctctcagctgaggactttaatatctatggccatgggggccgccagttctggctggtcagctcctgcttcttcttcctggtctactctctggtggtcatccttcccaagaccccgctgaaggagcgcatctccctgccttctgtgtagatgccacaaccttcctgtacttcagcttcttcgctccgctcatctacgtggctttcctccggggcttcttcggctcggagcccaagatcctcttctcctacaaatgccaagtggacgagacagaggagccagatgtacacctaccccagccctacgctgtggcccggcgggagggcctggaggctgcaggggctgctggggcctcagctgccagctactcgagcacgcagttcgactctgccggcggggtggcctacctggatgacatcgcttccatgccctgccacactggcagcatcaacagcacagacagcgagcgctggaaggccatcaatgcctgagggcagctgccagggcctgtggaggacaggccagagaggaggccagcaggcccagagtccccaggggaggaggaccaggtcaagggacgttctgtgggcagtagccctgtgtggccctgttcccaccatgagtctggaggccccacctccctggggctcccaatcccctttgccatctctgctctcactggggaccctcctccccttcccacctgctctcatactgctcagtgacatggcccaggctttccttccagggccatgcttggcaaggttggctgagggcaccctccttctctgcacccttggcacgagggcagggctggctctcccaatgcctccatcccatccccatggtgctttggcctcctcaaagcatccaccatggtg

SEQ ID NO: 194476 - DNA, 713 bp, Homo sapiens
  Payload ID: 18433
  Gene Name: transmembrane protein, adipocyte asscociated 1
  ENST ID: ENST00000462228
  CDS Start-End: 589-713
ggagcggaggtagaagctgaggctccaggggacccgacgacacttgctggctgcgtgacctcggtcacaccagggccattttgctgacaagacaacagaggccgggcgcggtggctcacgcctgtaatcccagcactttgggaagccgaggtgggcggatcacaagctcaggagttcgagaccagcctgactaacatgcgagaagtgagtcctgaggtccggcccacactgaaggagaggagatcctagcagggctggggattatcaggagccctcccaaaggccactgaagagagcagtcaagatggtggatggggtcagctggctgcccagaggtcatctgataaggactaggagctgttagtggccctggcgatagcagatctgggctggccggtgtgtctggagtcagacactacattgaagtgtgttgacaggtcagtaggcatccagcgctggggcagctgcttcaggacatcgccgaggacaagtctcctccccattctggttccaccatctgtagcctgtggctttcatcctcaagggctccatgcgaccgctgcacatccagggctggctgctggcgggatggacaccctggaggaggtgacttgggccaatgggagcacagcgctacccccacccctggcaccaaacatcagtgtgcctcatcgctgcctgctgctgctctacgaagacattggcacctccag

SEQ ID NO: 194477 - DNA, 1007 bp, Homo sapiens
  Payload ID: 18433
  Gene Name: transmembrane protein, adipocyte asscociated 1
  ENST ID: ENST00000469111
  CDS Start-End: 399-1007
gaaaaagacggtcttgctttcccggtcgccgctgtcgggaagggctgcagggtgtccgcgagacccgcggcccggcgagctgaccccgcctcgcctttcctgcctagccctcattccacggagccggtcgcgcccggtccttgcgcgacgcttcccggcccaggccgcctggtctggcgctggaggccggagtcccgcggcctgtgctggatccgcgcacacccagtggcggcggatgggcggccggggcggccggggcggccggtcctgagcgcggcccgggctgtcaggtggagaagccgaggcctggagaggggcacctggcaagttgttgactgggggcctgggctctggagacagacagcctggattgctggcctgggctggctgctggcgggatggacaccctggaggaggtgacttgggccaatgggagcacagcgctacccccacccctggcaccaaacatcagtgtgcctcatcgctgcctgctgctgctctacgaagacattggcacctccagggtccggtactgggacctcttgctgctcatccccaatgtgctcttcctcatcttcctgctctggaagcttccatctgctcgggcgaagatccgcatcacctccagccccatttttatcaccttctacatcctggtgtttgtggtggcgctggtgggcattgcccgggccgtggtatccatgacggtgagcacctcgaacgctgcaactgttgctgataagatcctgtgggagatcacccgcttcttcctgctggccatcgagctgagtgtgatcatcctgggcctggcctttggccacctggagagtaagtccagcatcaagcgggtgctggccatcaccacagtgctgtccctggcctactctgtcacccaggggaccctggagatcctgtaccctgatgcccatctctcagctgaggactttaatatctatggccatgggggccgccagttctggctggtcagctcctgcttcttcttcctg

SEQ ID NO: 194478 - DNA, 767 bp, Homo sapiens
  Payload ID: 18433
  Gene Name: transmembrane protein, adipocyte asscociated 1
  ENST ID: ENST00000490643
  CDS Start-End: 269-767
cggcccggcgctgtgcgcgtgcgctcgcctgcgctgtggtgggagctggagcggaggtcagtaggcatccagcgctggggcagctgcttcaggacatcgccgaggacaagtctcctccccattctggttccaccatctgtagcctgtggctttcatcctcaagggctccatgcgaccgctgcacatccaggacaggagcaaggagaagaatgggacccaatctcattccagcccagcggtgctgtcgcaagggctggctgctggcgggatggacaccctggaggaggtgacttgggccaatgggagcacagcgctacccccacccctggcaccaaacatcagtgtgcctcatcgctgcctgctgctgctctacgaagacattggcacctccagggtccggtactgggacctcttgctgctcatccccaatgtgctcttcctcatcttcctgctctggaagcttccatctgctcgggcgaagatccgcatcacctccagccccatttttatcaccttctacatcctggtgtttgtggtggcgctggtgggcattgcccgggccgtggtatccatgacggtgagcacctcgaacgctgcaactgttgctgataagatcctgtgggagatcacccgcttcttcctgctggccatcgagctgagtgtgatcatcctgggcctggcctttggccacctggagagtaagtccagcatcaagcgggtgctggccatcaccacagtgctgtccctggcctactctgtcacccagg

SEQ ID NO: 194479 - DNA, 2273 bp, Homo sapiens
  Payload ID: 18434
  Gene Name: transport and golgi organization 2 homolog
  Uniprot ID: Q6ICL3
  ENST ID: ENST00000327374
  CDS Start-End: 179-1009
cggaagtcggcggcggtggcggaggcggtgagtgcgcggctccggggctggccgactccgctagtggcccggccggcctgggctcgggggctccgggctctgggctctgggtgcgcggaccgggccaggctgcttgaagacctcgcgacctgtgtcagcagagccgccctgcaccaccatgtgcatcatcttctttaagtttgatcctcgccctgtttccaaaaacgcgtacaggctcatcttggcagccaacagggatgaattctacagccgaccctccaagttagctgacttctgggggaacaacaacgagatcctcagtgggctggacatggaggaaggcaaggaaggaggcacatggctgggcatcagcacacgtggcaagctggcagcactcaccaactacctgcagccgcagctggactggcaggcccgagggcgaggtgaacttgtcacccactttctgaccactgacgtggacagcttgtcctacctgaagaaggtctctatggagggccatctgtacaatggcttcaacctcatagcagccgacctgagcacagcaaagggagacgtcatttgctactatgggaaccgaggggagcctgatcctatcgttttgacgccaggcacctacgggctgagcaacgcgctgctggagactccctggaggaagctgtgctttgggaagcagctcttcctggaggctgtggaacggagccaggcgctgcccaaggatgtgctcatcgccagcctcctggatgtgctcaacaatgaagaggcgcagctgccagacccggccatcgaggaccagggtggggagtacgtgcagcccatgctgagcaagtacgcggctgtgtgcgtgcgctgccctggctacggcaccagaaccaacactatcatcctggtagatgcggacggccacgtgaccttcactgagcgtagcatgatggacaaggacctctcccactgggagaccagaacctatgagttcacactgcagagctaaccccacctctgggcctggccagtgggctcctggggggccctgccttgaggggcactgtggacaggaaaccttcctttgccatactgcattgcactgcccgtggcttggccagcatcccccggatcagggccctgtggtttgcgtgttacccatctgtgtccccatgcccagttcagggtctgcctttatgccagtgaggagcagcagagtctgatactaggtctaggaccggccgaggtataccatgaacatgtggatacacctgagcccactcttgcacatgtacacaggcactcacatggcacacacatacactcctgcgtgtgcacaagcacacacatgcaagccatatacatggacaccgacacaggcacatgtacgtgcacaggtgtgctacacatgtgcacacatgcacagttgcacagacacacacacacaggtgcacacacacgatgccgaacaaggcagaagggcgactctcacctctcatgtgcttctggccagtaggtctttgttctggtccaacgacaggagtaggcttgtatttaaaagcggcccctcctctcctgtggccacagaacacaggcgtgcttggactcttgacaagcagacctgctcctgcagaggagacagccacatttggaattgggcaccgagaagacctgagaaaaacccactctctcttttttttttttttgagacggagtcttgctctgtcacccaggctggagtgcagtggcacgatctcggctcactgcaacctccgcctcccaagttcaagcaattctcctgccccagcctcctgattagctgggattacaggcgtgtgccaccatgcccagctaatttttgtgtttttagtagagacggggtttcaccatgttggtcaggctggtcttgaactcctgacgtggtgatccacctgcctcggcctcccaaagtgctgggattacaggcgtgagccaccacgcctggccgaaaaacccactctcataacagaagtgcagactcattgctagattcagtgcccttgagtgtgccagaggtcctctgtgtttgagacaatcctgtgtgtgccaggaggctccgtgtgcaccaggggctctcagaatcccgcttacccagctggagaccatgcctctggcagccccatctcagccagccctgctctctccctcttccctccaggtgaggcaaacttcataggaatctgtacctgaatgtgagctcctgataataaaactctgaggctttggtgagcgca

SEQ ID NO: 194480 - DNA, 2011 bp, Homo sapiens
  Payload ID: 18434
  Gene Name: transport and golgi organization 2 homolog
  Uniprot ID: Q6ICL3
  ENST ID: ENST00000398042
  CDS Start-End: 103-747
actgggctggctgcggtggcgcgcgggcgcggcacccggaagtcggcggcggtggcggaggcgacctcgcgacctgtgtcagcagagccgccctgcaccaccatgtgcatcatcttctttaagtttgatcctcgccctgtttccaaaaacgcgtacaggctcatcttggcagccaacagggatgaattctacagccgaccctccaagttagctgacttctgggggaacaacaacgagatcctcagtgggctggacatggaggaaggcaaggaaggaggcacatggctgggcatcagcacacgtggcaagctggcagcactcaccaactacctgcagccgcagctggactggcaggcccgagggcgaggcacctacgggctgagcaacgcgctgctggagactccctggaggaagctgtgctttgggaagcagctcttcctggaggctgtggaacggagccaggcgctgcccaaggatgtgctcatcgccagcctcctggatgtgctcaacaatgaagaggcgcagctgccagacccggccatcgaggaccagggtggggagtacgtgcagcccatgctgagcaagtacgcggctgtgtgcgtgcgctgccctggctacggcaccagaaccaacactatcatcctggtagatgcggacggccacgtgaccttcactgagcgtagcatgatggacaaggacctctcccactgggagaccagaacctatgagttcacactgcagagctaaccccacctctgggcctggccagtgggctcctggggggccctgccttgaggggcactgtggacaggaaaccttcctttgccatactgcattgcactgcccgtggcttggccagcatcccccggatcagggccctgtggtttgcgtgttacccatctgtgtccccatgcccagttcagggtctgcctttatgccagtgaggagcagcagagtctgatactaggtctaggaccggccgaggtataccatgaacatgtggatacacctgagcccactcttgcacatgtacacaggcactcacatggcacacacatacactcctgcgtgtgcacaagcacacacatgcaagccatatacatggacaccgacacaggcacatgtacgtgcacaggtgtgctacacatgtgcacacatgcacagttgcacagacacacacacacaggtgcacacacacgatgccgaacaaggcagaagggcgactctcacctctcatgtgcttctggccagtaggtctttgttctggtccaacgacaggagtaggcttgtatttaaaagcggcccctcctctcctgtggccacagaacacaggcgtgcttggactcttgacaagcagacctgctcctgcagaggagacagccacatttggaattgggcaccgagaagacctgagaaaaacccactctctcttttttttttttttgagacggagtcttgctctgtcacccaggctggagtgcagtggcacgatctcggctcactgcaacctccgcctcccaagttcaagcaattctcctgccccagcctcctgattagctgggattacaggcgtgtgccaccatgcccagctaatttttgtgtttttagtagagacggggtttcaccatgttggtcaggctggtcttgaactcctgacgtggtgatccacctgcctcggcctcccaaagtgctgggattacaggcgtgagccaccacgcctggccgaaaaacccactctcataacagaagtgcagactcattgctagattcagtgcccttgagtgtgccagaggtcctctgtgtttgagacaatcctgtgtgtgccaggaggctccgtgtgcaccaggggctctcagaatcccgcttacccagctggagaccatgcctctggcagccccatctcagccagccctgctctctccctcttccctccaggtgaggcaaacttcataggaatctgtacctgaatgtgagctcctgataataaaactctgaggctttggtgagcgca

SEQ ID NO: 194481 - DNA, 2241 bp, Homo sapiens
  Payload ID: 18434
  Gene Name: transport and golgi organization 2 homolog
  ENST ID: ENST00000399807
  CDS Start-End: 203-655
ggcgcgcgggcgcggcacccggaagtcggcggcggtggcggaggcgacctcgcgacctgtgtcagcagagccgccctgcaccaccatgtgcatcatcttctttaagtttgatcctcgccctgtttccaaaaacgcgtacaggtaaccccctcgctctgcatctgctgcgccctgcagggtcctgggtgcccagccagttctcatgccacccaagctgctgtgtgcaggaaggtgtgtgggccaggacggggctgcacaggcctggcactgccctccaggacagggtcactcagtgtgggatgctgtcagaatgcctctcggggcggggactccagtcaatgtacaaagacgtgaagactcagccacagaaggcagccacaggctcatcttggcagccaacagggatgaattctacagccgaccctccaagttagctgacttctgggggaacaacaacgagatcctcagtgggctggacatggaggaaggcaaggaaggaggcacatggctgggcatcagcacacgtggcaagctggcagcactcaccaactacctgcagccgcagctggactggcaggcccgagggcgagcacagcaaagggagacgtcatttgctactatgggaaccgaggggagcctgatcctatcgttttgacgccaggcacctacgggctgagcaacgcgctgctggagactccctggaggaagctgtgctttgggaagcagctcttcctggaggctgtggaacggagccaggcgctgcccaaggatgtgctcatcgccagcctcctggatgtgctcaacaatgaagaggcgcagctgccagacccggccatcgaggaccagggtggggagtacgtgcagcccatgctgagcaagtacgcggctgtgtgcgtgcgctgccctggctacggcaccagaaccaacactatcatcctggtagatgcggacggccacgtgaccttcactgagcgtagcatgatggacaaggacctctcccactgggagaccagaacctatgagttcacactgcagagctaaccccacctctgggcctggccagtgggctcctggggggccctgccttgaggggcactgtggacaggaaaccttcctttgccatactgcattgcactgcccgtggcttggccagcatcccccggatcagggccctgtggtttgcgtgttacccatctgtgtccccatgcccagttcagggtctgcctttatgccagtgaggagcagcagagtctgatactaggtctaggaccggccgaggtataccatgaacatgtggatacacctgagcccactcttgcacatgtacacaggcactcacatggcacacacatacactcctgcgtgtgcacaagcacacacatgcaagccatatacatggacaccgacacaggcacatgtacgtgcacaggtgtgctacacatgtgcacacatgcacagttgcacagacacacacacacaggtgcacacacacgatgccgaacaaggcagaagggcgactctcacctctcatgtgcttctggccagtaggtctttgttctggtccaacgacaggagtaggcttgtatttaaaagcggcccctcctctcctgtggccacagaacacaggcgtgcttggactcttgacaagcagacctgctcctgcagaggagacagccacatttggaattgggcaccgagaagacctgagaaaaacccactctctcttttttttttttttgagacggagtcttgctctgtcacccaggctggagtgcagtggcacgatctcggctcactgcaacctccgcctcccaagttcaagcaattctcctgccccagcctcctgattagctgggattacaggcgtgtgccaccatgcccagctaatttttgtgtttttagtagagacggggtttcaccatgttggtcaggctggtcttgaactcctgacgtggtgatccacctgcctcggcctcccaaagtgctgggattacaggcgtgagccaccacgcctggccgaaaaacccactctcataacagaagtgcagactcattgctagattcagtgcccttgagtgtgccagaggtcctctgtgtttgagacaatcctgtgtgtgccaggaggctccgtgtgcaccaggggctctcagaatcccgcttacccagctggagaccatgcctctggcagccccatctcagccagccctgctctctccctcttccctccaggtgaggcaaact

SEQ ID NO: 194482 - DNA, 1920 bp, Homo sapiens
  Payload ID: 18434
  Gene Name: transport and golgi organization 2 homolog
  Uniprot ID: Q6ICL3
  ENST ID: ENST00000401833
  CDS Start-End: 265-1218
gtgcgcggctccggggctggccgactccgctagtggcccggccggcctgggctcgggggctccgggctctgggctctgggtgcgcggaccgggccaggctgcttgaagacctcgcgacctgtgtcagcagagccgccctgcaccaccatgtgcatcatcttctttaagtttgatcctcgccctgtttccaaaaacgcgtacaggtaaccccctcgctctgcatctgctgcgccctgcagggtcctgggtgcccagccagttctcatgccacccaagctgctgtgtgcaggaaggtgtgtgggccaggacggggctgcacaggcctggcactgccctccaggacagggtcactcagtgtgggatgctgtcagaatgcctctcggggcggggactccagtcaatgtacaaagacgtgaagactcagccacagaaggcagccacaggctcatcttggcagccaacagggatgaattctacagccgaccctccaagttagctgacttctgggggaacaacaacgagatcctcagtgggctggacatggaggaaggcaaggaaggaggcacatggctgggcatcagcacacgtggcaagctggcagcactcaccaactacctgcagccgcagctggactggcaggcccgagggcgaggtgaacttgtcacccactttctgaccactgacgtggacagcttgtcctacctgaagaaggtctctatggagggccatctgtacaatggcttcaacctcatagcagccgacctgagcacagcaaagggagacgtcatttgctactatgggaaccgaggggagcctgatcctatcgttttgacgccaggcacctacgggctgagcaacgcgctgctggagactccctggaggaagctgtgctttgggaagcagctcttcctggaggctgtggaacggagccaggcgctgcccaaggatgtgctcatcgccagcctcctggatgtgctcaacaatgaagaggcgcagctgccagacccggccatcgaggaccagggtggggagtacgtgcagcccatgctgagcaagtacgcggctgtgtgcgtgcgctgccctggctacggcaccagaaccaacactatcatcctggtagatgcggacggccacgtgaccttcactgagcgtagcatgatggacaaggacctctcccactgggagaccagaacctatgagttcacactgcagagctaaccccacctctgggcctggccagtgggctcctggggggccctgccttgaggggcactgtggacaggaaaccttcctttgccatactgcattgcactgcccgtggcttggccagcatcccccggatcagggccctgtggtttgcgtgttacccatctgtgtccccatgcccagttcagggtctgcctttatgccagtgaggagcagcagagtctgatactaggtctaggaccggccgaggtataccatgaacatgtggatacacctgagcccactcttgcacatgtacacaggcactcacatggcacacacatacactcctgcgtgtgcacaagcacacacatgcaagccatatacatggacaccgacacaggcacatgtacgtgcacaggtgtgctacacatgtgcacacatgcacagttgcacagacacacacacacaggtgcacacacacgatgccgaacaaggcagaagggcgactctcacctctcatgtgcttctggccagtaggtctttgttctggtccaacgacaggagtaggcttgtatttaaaagcggcccctcctctcctgtggccacagaacacaggcgtgcttggactcttgacaagcagacctgctcctgcagaggagacagccacatttggaattgggcaccgagaagacctgagaaaaacccactctctcttttttttttttttgagac

SEQ ID NO: 194483 - DNA, 1559 bp, Homo sapiens
  Payload ID: 18434
  Gene Name: transport and golgi organization 2 homolog
  Uniprot ID: Q6ICL3
  ENST ID: ENST00000401886
  CDS Start-End: 219-863
cggccccgcacctgcccgaacctctgcggcggcggtggcagggtacgcgggaccgctccctcccagccgacttacgagaacatcccccgaccatccagccccgagcagggactggcagagccggcgccccttccccggactctggccgcgtagcctccgccaccactcccagttcacagacctcgcgacctgtgtcagcagagccgccctgcaccaccatgtgcatcatcttctttaagtttgatcctcgccctgtttccaaaaacgcgtacaggctcatcttggcagccaacagggatgaattctacagccgaccctccaagttagctgacttctgggggaacaacaacgagatcctcagtgggctggacatggaggaaggcaaggaaggaggcacatggctgggcatcagcacacgtggcaagctggcagcactcaccaactacctgcagccgcagctggactggcaggcccgagggcgaggcacctacgggctgagcaacgcgctgctggagactccctggaggaagctgtgctttgggaagcagctcttcctggaggctgtggaacggagccaggcgctgcccaaggatgtgctcatcgccagcctcctggatgtgctcaacaatgaagaggcgcagctgccagacccggccatcgaggaccagggtggggagtacgtgcagcccatgctgagcaagtacgcggctgtgtgcgtgcgctgccctggctacggcaccagaaccaacactatcatcctggtagatgcggacggccacgtgaccttcactgagcgtagcatgatggacaaggacctctcccactgggagaccagaacctatgagttcacactgcagagctaaccccacctctgggcctggccagtgggctcctggggggccctgccttgaggggcactgtggacaggaaaccttcctttgccatactgcattgcactgcccgtggcttggccagcatcccccggatcagggccctgtggtttgcgtgttacccatctgtgtccccatgcccagttcagggtctgcctttatgccagtgaggagcagcagagtctgatactaggtctaggaccggccgaggtataccatgaacatgtggatacacctgagcccactcttgcacatgtacacaggcactcacatggcacacacatacactcctgcgtgtgcacaagcacacacatgcaagccatatacatggacaccgacacaggcacatgtacgtgcacaggtgtgctacacatgtgcacacatgcacagttgcacagacacacacacacaggtgcacacacacgatgccgaacaaggcagaagggcgactctcacctctcatgtgcttctggccagtaggtctttgttctggtccaacgacaggagtaggcttgtatttaaaagcggcccctcctctcctgtggccacagaacacaggcgtgcttggactcttgacaagcagacctgctcctgcagaggagacagccacatttggaattgggcaccgagaagacctgagaaaaacccactctctcttttttttttttt

SEQ ID NO: 194484 - DNA, 2086 bp, Homo sapiens
  Payload ID: 18434
  Gene Name: transport and golgi organization 2 homolog
  ENST ID: ENST00000447208
  CDS Start-End: 218-823
ggtactgggctggctgcggtggcgcgcgggcgcggcacccggaagtcggcggcggtggcggaggcggtgagtgcgcggctccggggctggccgactccgctagtggcccggccggcctgggctcgggggctccgggctctgggctctgggtgcgcggaccgggccaggctgcttgaagacctcgcgacctgtgtcagcagagccgccctgcaccaccatgtgcatcatcttctttaagtttgatcctcgccctgtttccaaaaacgcgtacaggctcatcttggcagccaacagggatgaattctacagccgaccctccaagttagctgacttctgggggaacaacaacgagatcctcagtgggctggacatggaggaaggcaaggaaggaggcacatggctgggcatcagcacacgtggcaagctggcagcactcaccaactacctgcagccgcagctggactggcaggcccgagggcgaggtgaacttgtcacccactttctgaccactgacgtggacagcttgtcctacctgaagaaggtctctatggagggccatctgtacaatggcttcaacctcatagcagccgacctgaggcagctgccagacccggccatcgaggaccagggtggggagtacgtgcagcccatgctgagcaagtacgcggctgtgtgcgtgcgctgccctggctacggcaccagaaccaacactatcatcctggtagatgcggacggccacgtgaccttcactgagcgtagcatgatggacaaggacctctcccactgggagaccagaacctatgagttcacactgcagagctaaccccacctctgggcctggccagtgggctcctggggggccctgccttgaggggcactgtggacaggaaaccttcctttgccatactgcattgcactgcccgtggcttggccagcatcccccggatcagggccctgtggtttgcgtgttacccatctgtgtccccatgcccagttcagggtctgcctttatgccagtgaggagcagcagagtctgatactaggtctaggaccggccgaggtataccatgaacatgtggatacacctgagcccactcttgcacatgtacacaggcactcacatggcacacacatacactcctgcgtgtgcacaagcacacacatgcaagccatatacatggacaccgacacaggcacatgtacgtgcacaggtgtgctacacatgtgcacacatgcacagttgcacagacacacacacacaggtgcacacacacgatgccgaacaaggcagaagggcgactctcacctctcatgtgcttctggccagtaggtctttgttctggtccaacgacaggagtaggcttgtatttaaaagcggcccctcctctcctgtggccacagaacacaggcgtgcttggactcttgacaagcagacctgctcctgcagaggagacagccacatttggaattgggcaccgagaagacctgagaaaaacccactctctcttttttttttttttgagacggagtcttgctctgtcacccaggctggagtgcagtggcacgatctcggctcactgcaacctccgcctcccaagttcaagcaattctcctgccccagcctcctgattagctgggattacaggcgtgtgccaccatgcccagctaatttttgtgtttttagtagagacggggtttcaccatgttggtcaggctggtcttgaactcctgacgtggtgatccacctgcctcggcctcccaaagtgctgggattacaggcgtgagccaccacgcctggccgaaaaacccactctcataacagaagtgcagactcattgctagattcagtgcccttgagtgtgccagaggtcctctgtgtttgagacaatcctgtgtgtgccaggaggctccgtgtgcaccaggggctctcagaatcccgcttacccagctggagaccatgcctctggcagccccatctcagccagccctgctctctccctcttccctccaggtgaggcaaacttcataggaatctgtacctgaatgtgagctcctgataataaaactctgaggctttggtgagcgc

SEQ ID NO: 194485 - DNA, 2180 bp, Homo sapiens
  Payload ID: 18434
  Gene Name: transport and golgi organization 2 homolog
  Uniprot ID: Q6ICL3
  ENST ID: ENST00000434570
  CDS Start-End: 223-819
ggtactgggctggctgcggtggcgcgcgggcgcggcacccggaagtcggcggcggtggcggaggcgacctcgcgacctgtgtcagcagagccgccctgcaccaccatgtgcatcatcttctttaagtttgatcctcgccctgtttccaaaaacgcgtacaggtaaccccctcgctctgcatctgctgcgccctgcagggtcctgggtgcccagccagttctcatgccacccaagctgctgtgtgcaggaaggtgtgtgggccaggacggggctgcacaggcctggcactgccctccaggacagggtcactcagtgtgggatgctgtcagaatgcctctcggggcggggactccagtcaatgtacaaagacgtgaagactcagccacagaaggcagccacaggctcatcttggcagccaacagggatgaattctacagccgaccctccaagttagctgacttctgggggaacaacaacgagatcctcagtgggctggacatggaggaaggcaaggaaggaggcacatggctgggcatcagcacacgtggcaagctggcagcactcaccaactacctgcagccgcagctggactggcaggcccgagggcgaggtgaacttgtcacccactttctgaccactgacgtggacagcttgtcctacctgaagaaggtctctatggagggccatctgtacaatggcttcaacctcatagcagccgacctgagcacagcaaagggagacgtcatttgctactatgggaaccgaggggagcctgatcctatcgttttgacgccagaaccaacactatcatcctggtagatgcggacggccacgtgaccttcactgagcgtagcatgatggacaaggacctctcccactgggagaccagaacctatgagttcacactgcagagctaaccccacctctgggcctggccagtgggctcctggggggccctgccttgaggggcactgtggacaggaaaccttcctttgccatactgcattgcactgcccgtggcttggccagcatcccccggatcagggccctgtggtttgcgtgttacccatctgtgtccccatgcccagttcagggtctgcctttatgccagtgaggagcagcagagtctgatactaggtctaggaccggccgaggtataccatgaacatgtggatacacctgagcccactcttgcacatgtacacaggcactcacatggcacacacatacactcctgcgtgtgcacaagcacacacatgcaagccatatacatggacaccgacacaggcacatgtacgtgcacaggtgtgctacacatgtgcacacatgcacagttgcacagacacacacacacaggtgcacacacacgatgccgaacaaggcagaagggcgactctcacctctcatgtgcttctggccagtaggtctttgttctggtccaacgacaggagtaggcttgtatttaaaagcggcccctcctctcctgtggccacagaacacaggcgtgcttggactcttgacaagcagacctgctcctgcagaggagacagccacatttggaattgggcaccgagaagacctgagaaaaacccactctctcttttttttttttttgagacggagtcttgctctgtcacccaggctggagtgcagtggcacgatctcggctcactgcaacctccgcctcccaagttcaagcaattctcctgccccagcctcctgattagctgggattacaggcgtgtgccaccatgcccagctaatttttgtgtttttagtagagacggggtttcaccatgttggtcaggctggtcttgaactcctgacgtggtgatccacctgcctcggcctcccaaagtgctgggattacaggcgtgagccaccacgcctggccgaaaaacccactctcataacagaagtgcagactcattgctagattcagtgcccttgagtgtgccagaggtcctctgtgtttgagacaatcctgtgtgtgccaggaggctccgtgtgcaccaggggctctcagaatcccgcttacccagctggagaccatgcctctggcagccccatctcagccagccctgctctctccctcttccctccaggtgaggcaaacttcataggaatctgtacctgaatgtgagctcctgataataaaactctgaggctttggtgagcgc

SEQ ID NO: 194486 - DNA, 847 bp, Homo sapiens
  Payload ID: 18434
  Gene Name: transport and golgi organization 2 homolog
  ENST ID: ENST00000444651
  CDS Start-End: 41-370
gacctcgcgacctgtgtcagcagagccgccctgcaccaccatgtgcatcatcttctttaagtttgatcctcgccctgtttccaaaaacgcgtacaggctcatcttggcagccaacagggatgaattctacagccgaccctccaagttagctgacttctgggggaacaacaacgagatcctcagtgggctggacatggaggaaggcaaggaaggaggcacatggctgggcatcagcacacgtggcaagctggcagcactcaccaactacctgcagccgcagctggactggcaggcccgagggcgagcacagcaaagggagacgtcatttgctactatgggaaccgaggggagcctgatcctatcgttttgacgccaggcagctgccagacccggccatcgaggaccagggtggggagtacgtgcagcccatgctgagcaagtacgcggctgtgtgcgtgcgctgccctggctacggcaccagaaccaacactatcatcctggtagatgcggacggccacgtgaccttcactgagcgtagcatgatggacaaggacctctcccactgggagaccagaacctatgagttcacactgcagagctaaccccacctctgggcctggccagtgggctcctggggggccctgccttgaggggcactgtggacaggaaaccttcctttgccatactgcattgcactgcccgtggcttggccagcatcccccggatcagggccctgtggtttgcgtgttacccatctgtgtccccatgcccagttcagggtctgcctttatgccagtgaggagcagcagagtctgatactaggtctaggaccggccgaggtatacca

SEQ ID NO: 194487 - DNA, 1859 bp, Homo sapiens
  Payload ID: 18434
  Gene Name: transport and golgi organization 2 homolog
  ENST ID: ENST00000420290
  CDS Start-End: 106-429
ggtactgggctggctgcggtggcgcgcgggcgcggcacccggaagtcggcggcggtggcggaggcgacctcgcgacctgtgtcagcagagccgccctgcaccaccatgtgcatcatcttctttaagtttgatcctcgccctgtttccaaaaacgcgtacaggctcatcttggcagccaacagggatgaattctacagccgaccctccaagttagctgacttctgggggaacaacaacgagatcctcagtgggctggacatggaggaaggcaaggaaggaggcacatggctgggcatcagcacacgtggcaagctggcagcactcaccaactacctgcagccgcagctggactggcaggcccgagggcgaggcagctgccagacccggccatcgaggaccagggtggggagtacgtgcagcccatgctgagcaagtacgcggctgtgtgcgtgcgctgccctggctacggcaccagaaccaacactatcatcctggtagatgcggacggccacgtgaccttcactgagcgtagcatgatggacaaggacctctcccactgggagaccagaacctatgagttcacactgcagagctaaccccacctctgggcctggccagtgggctcctggggggccctgccttgaggggcactgtggacaggaaaccttcctttgccatactgcattgcactgcccgtggcttggccagcatcccccggatcagggccctgtggtttgcgtgttacccatctgtgtccccatgcccagttcagggtctgcctttatgccagtgaggagcagcagagtctgatactaggtctaggaccggccgaggtataccatgaacatgtggatacacctgagcccactcttgcacatgtacacaggcactcacatggcacacacatacactcctgcgtgtgcacaagcacacacatgcaagccatatacatggacaccgacacaggcacatgtacgtgcacaggtgtgctacacatgtgcacacatgcacagttgcacagacacacacacacaggtgcacacacacgatgccgaacaaggcagaagggcgactctcacctctcatgtgcttctggccagtaggtctttgttctggtccaacgacaggagtaggcttgtatttaaaagcggcccctcctctcctgtggccacagaacacaggcgtgcttggactcttgacaagcagacctgctcctgcagaggagacagccacatttggaattgggcaccgagaagacctgagaaaaacccactctctcttttttttttttttgagacggagtcttgctctgtcacccaggctggagtgcagtggcacgatctcggctcactgcaacctccgcctcccaagttcaagcaattctcctgccccagcctcctgattagctgggattacaggcgtgtgccaccatgcccagctaatttttgtgtttttagtagagacggggtttcaccatgttggtcaggctggtcttgaactcctgacgtggtgatccacctgcctcggcctcccaaagtgctgggattacaggcgtgagccaccacgcctggccgaaaaacccactctcataacagaagtgcagactcattgctagattcagtgcccttgagtgtgccagaggtcctctgtgtttgagacaatcctgtgtgtgccaggaggctccgtgtgcaccaggggctctcagaatcccgcttacccagctggagaccatgcctctggcagccccatctcagccagccctgctctctccctcttccctccaggtgaggcaaacttcataggaatctgtacctgaatgtgagctcctgataataaaactctgaggctttggtgagcgc

SEQ ID NO: 194488 - DNA, 2084 bp, Homo sapiens
  Payload ID: 18434
  Gene Name: transport and golgi organization 2 homolog
  Uniprot ID: Q6ICL3
  ENST ID: ENST00000432883
  CDS Start-End: 285-821
ggtactgggctggctgcggtggcgcgcgggcgcggcacccggaagtcggcggcggtggcggaggcgacctcgcgacctgtgtcagcagagccgccctgcaccaccatgtgcatcatcttctttaagtttgatcctcgccctgtttccaaaaacgcgtacaggctcatcttggcagccaacagggatgaattctacagccgaccctccaagttagctgacttctgggggaacaacaacgagatcctcagtgggctggacatggaggaaggcaaggaaggaggcacatggctgggcatcagcacacgtggcaagctggcagcactcaccaactacctgcagccgcagctggactggcaggcccgagggcgagcacagcaaagggagacgtcatttgctactatgggaaccgaggggagcctgatcctatcgttttgacgccaggcacctacgggctgagcaacgcgctgctggagactccctggaggaagctgtgctttgggaagcagctcttcctggaggctgtggaacggagccaggcgctgcccaaggatgtgctcatcgccagcctcctggatgtgctcaacaatgaagaggcgcagctgccagacccggccatcgaggaccagggtggggagtacgtgcagcccatgctgagcaagtacgcggctgtgtgcgtgcgctgccctggctacggcaccagaaccaacactatcatcctggtagatgcggacggccacgtgaccttcactgagcgtagcatgatggacaaggacctctcccactgggagaccagaacctatgagttcacactgcagagctaaccccacctctgggcctggccagtgggctcctggggggccctgccttgaggggcactgtggacaggaaaccttcctttgccatactgcattgcactgcccgtggcttggccagcatcccccggatcagggccctgtggtttgcgtgttacccatctgtgtccccatgcccagttcagggtctgcctttatgccagtgaggagcagcagagtctgatactaggtctaggaccggccgaggtataccatgaacatgtggatacacctgagcccactcttgcacatgtacacaggcactcacatggcacacacatacactcctgcgtgtgcacaagcacacacatgcaagccatatacatggacaccgacacaggcacatgtacgtgcacaggtgtgctacacatgtgcacacatgcacagttgcacagacacacacacacaggtgcacacacacgatgccgaacaaggcagaagggcgactctcacctctcatgtgcttctggccagtaggtctttgttctggtccaacgacaggagtaggcttgtatttaaaagcggcccctcctctcctgtggccacagaacacaggcgtgcttggactcttgacaagcagacctgctcctgcagaggagacagccacatttggaattgggcaccgagaagacctgagaaaaacccactctctcttttttttttttttgagacggagtcttgctctgtcacccaggctggagtgcagtggcacgatctcggctcactgcaacctccgcctcccaagttcaagcaattctcctgccccagcctcctgattagctgggattacaggcgtgtgccaccatgcccagctaatttttgtgtttttagtagagacggggtttcaccatgttggtcaggctggtcttgaactcctgacgtggtgatccacctgcctcggcctcccaaagtgctgggattacaggcgtgagccaccacgcctggccgaaaaacccactctcataacagaagtgcagactcattgctagattcagtgcccttgagtgtgccagaggtcctctgtgtttgagacaatcctgtgtgtgccaggaggctccgtgtgcaccaggggctctcagaatcccgcttacccagctggagaccatgcctctggcagccccatctcagccagccctgctctctccctcttccctccaggtgaggcaaacttcataggaatctgtacctgaatgtgagctcctgataataaaactctgaggctttggtgagcgc

SEQ ID NO: 194489 - DNA, 1689 bp, Homo sapiens
  Payload ID: 18434
  Gene Name: transport and golgi organization 2 homolog
  ENST ID: ENST00000450019
  CDS Start-End: 180-545
ccggaagtcggcggcggtggcggaggcggtgagtgcgcggctccggggctggccgactccgctagtggcccggccggcctgggctcgggggctccgggctctgggctctgggtgcgcggaccgggccaggctgcttgaagacctcgcgacctgtgtcagcagagccgccctgcaccaccatgtgcatcatcttctttaagtttgatcctcgccctgtttccaaaaacgcgtacaggctcatcttggcagccaacagggatgaattctacagccgaccctccaagttagctgacttctgggggaacaacaacgagatcctcagtgggctggacatggaggaaggcaaggaaggaggcacatggctgggcatcagcacacgtggcaagctggcagcactcaccaactacctgcagccgcagctggactggcaggcccgagggcgagggggccccatatcagtgttcctgggagaagagcacatgcctgcagctgtggacacagcatctgtcccctgcctacaggtgaacttgtcacccactttctgaccactgacgtggacagcttgtcctacctgaagaaggtctctatggagggccatctgtacaatggcttcaacctcatagcagccgacctgagcacagcaaagggagacgtcatttgctactatgggaaccgaggggagcctgatcctatcgttttgacgccaggcacctacgggctgagcaacgcgctgctggagactccctggaggaagctgtgctttgggaagcagctcttcctggaggctgtggaacggagccaggcgctgcccaaggatgtgctcatcgccagcctcctggatgtgctcaacaatgaagaggcgcagctgccagacccggccatcgaggaccagggtggggagtacgtgcagcccatgctgagcaagtacgcggctgtgtgcgtgcgctgccctggctacggcaccagaaccaacactatcatcctggtagatgcggacggccacgtgaccttcactgagcgtagcatgatggacaaggacctctcccactgggagaccagaacctatgagttcacactgcagagctaaccccacctctgggcctggccagtgggctcctggggggccctgccttgaggggcactgtggacaggaaaccttcctttgccatactgcattgcactgcccgtggcttggccagcatcccccggatcagggccctgtggtttgcgtgttacccatctgtgtccccatgcccagttcagggtctgcctttatgccagtgaggagcagcagagtctgatactaggtctaggaccggccgaggtataccatgaacatgtggatacacctgagcccactcttgcacatgtacacaggcactcacatggcacacacatacactcctgcgtgtgcacaagcacacacatgcaagccatatacatggacaccgacacaggcacatgtacgtgcacaggtgtgctacacatgtgcacacatgcacagttgcacagacacacacacacaggtgcacacacacgatgccgaacaaggcagaagggcgactctcacctctcatgtgcttctggccagtaggtctttgttctggtccaacgacaggagtaggcttgtatttaaaagcggcccctcctctcctgtggccacagaacacaggcgtgcttggactcttg

SEQ ID NO: 194490 - DNA, 733 bp, Homo sapiens
  Payload ID: 18434
  Gene Name: transport and golgi organization 2 homolog
  ENST ID: ENST00000430807
  CDS Start-End: 160-489
cggaggcggtgagtgcgcggctccggggctggccgactccgctagtggcccggccggcctgggctcgggggctccgggctctgggctctgggtgcgcggaccgggccaggctgcttgaagacctcgcgacctgtgtcagcagagccgccctgcaccaccatgtgcatcatcttctttaagtttgatcctcgccctgtttccaaaaacgcgtacaggctcatcttggcagccaacagggatgaattctacagccgaccctccaagttagctgacttctgggggaacaacaacgagatcctcagtgggctggacatggaggaaggcaaggaaggaggcacatggctgggcatcagcacacgtggcaagctggcagcactcaccaactacctgcagccgcagctggactggcaggcccgagggcgagcacagcaaagggagacgtcatttgctactatgggaaccgaggggagcctgatcctatcgttttgacgccaggcacctacgggctgagcaacgcgctgctggagactccctggaggaagctgtgctttgggaagcagctcttcctggaggctgtggaacggagccaggcgctgcccaaggatgtgctcatcgccagcctcctggatgtgctcaacaatgaagaggcgcagctgccagacccggccatcgaggaccagggtggggagtacgtgcagcccatgctgagcaagtacgcggctgtgtgcgtgcg

SEQ ID NO: 194491 - DNA, 2439 bp, Homo sapiens
  Payload ID: 18434
  Gene Name: transport and golgi organization 2 homolog
  Uniprot ID: Q6ICL3
  ENST ID: ENST00000456048
  CDS Start-End: 223-1176
ggtactgggctggctgcggtggcgcgcgggcgcggcacccggaagtcggcggcggtggcggaggcgacctcgcgacctgtgtcagcagagccgccctgcaccaccatgtgcatcatcttctttaagtttgatcctcgccctgtttccaaaaacgcgtacaggtaaccccctcgctctgcatctgctgcgccctgcagggtcctgggtgcccagccagttctcatgccacccaagctgctgtgtgcaggaaggtgtgtgggccaggacggggctgcacaggcctggcactgccctccaggacagggtcactcagtgtgggatgctgtcagaatgcctctcggggcggggactccagtcaatgtacaaagacgtgaagactcagccacagaaggcagccacaggctcatcttggcagccaacagggatgaattctacagccgaccctccaagttagctgacttctgggggaacaacaacgagatcctcagtgggctggacatggaggaaggcaaggaaggaggcacatggctgggcatcagcacacgtggcaagctggcagcactcaccaactacctgcagccgcagctggactggcaggcccgagggcgaggtgaacttgtcacccactttctgaccactgacgtggacagcttgtcctacctgaagaaggtctctatggagggccatctgtacaatggcttcaacctcatagcagccgacctgagcacagcaaagggagacgtcatttgctactatgggaaccgaggggagcctgatcctatcgttttgacgccaggcacctacgggctgagcaacgcgctgctggagactccctggaggaagctgtgctttgggaagcagctcttcctggaggctgtggaacggagccaggcgctgcccaaggatgtgctcatcgccagcctcctggatgtgctcaacaatgaagaggcgcagctgccagacccggccatcgaggaccagggtggggagtacgtgcagcccatgctgagcaagtacgcggctgtgtgcgtgcgctgccctggctacggcaccagaaccaacactatcatcctggtagatgcggacggccacgtgaccttcactgagcgtagcatgatggacaaggacctctcccactgggagaccagaacctatgagttcacactgcagagctaaccccacctctgggcctggccagtgggctcctggggggccctgccttgaggggcactgtggacaggaaaccttcctttgccatactgcattgcactgcccgtggcttggccagcatcccccggatcagggccctgtggtttgcgtgttacccatctgtgtccccatgcccagttcagggtctgcctttatgccagtgaggagcagcagagtctgatactaggtctaggaccggccgaggtataccatgaacatgtggatacacctgagcccactcttgcacatgtacacaggcactcacatggcacacacatacactcctgcgtgtgcacaagcacacacatgcaagccatatacatggacaccgacacaggcacatgtacgtgcacaggtgtgctacacatgtgcacacatgcacagttgcacagacacacacacacaggtgcacacacacgatgccgaacaaggcagaagggcgactctcacctctcatgtgcttctggccagtaggtctttgttctggtccaacgacaggagtaggcttgtatttaaaagcggcccctcctctcctgtggccacagaacacaggcgtgcttggactcttgacaagcagacctgctcctgcagaggagacagccacatttggaattgggcaccgagaagacctgagaaaaacccactctctcttttttttttttttgagacggagtcttgctctgtcacccaggctggagtgcagtggcacgatctcggctcactgcaacctccgcctcccaagttcaagcaattctcctgccccagcctcctgattagctgggattacaggcgtgtgccaccatgcccagctaatttttgtgtttttagtagagacggggtttcaccatgttggtcaggctggtcttgaactcctgacgtggtgatccacctgcctcggcctcccaaagtgctgggattacaggcgtgagccaccacgcctggccgaaaaacccactctcataacagaagtgcagactcattgctagattcagtgcccttgagtgtgccagaggtcctctgtgtttgagacaatcctgtgtgtgccaggaggctccgtgtgcaccaggggctctcagaatcccgcttacccagctggagaccatgcctctggcagccccatctcagccagccctgctctctccctcttccctccaggtgaggcaaacttcataggaatctgtacctgaatgtgagctcctgataataaaactctgaggctttggtgagcgc

SEQ ID NO: 194492 - DNA, 862 bp, Homo sapiens
  Payload ID: 18434
  Gene Name: transport and golgi organization 2 homolog
  ENST ID: ENST00000434168
  CDS Start-End: 184-862
ctggccgactccgctagtggcccggccggcctgggctcgggggctccgggctctgggctctgggtgcgcggaccgggccaggctgcttgaaggtgggtgggctggccgcacttcctcaccctgcctcagtttcccctttctgagacctcgcgacctgtgtcagcagagccgccctgcaccaccatgtgcatcatcttctttaagtttgatcctcgccctgtttccaaaaacgcgtacaggctcatcttggcagccaacagggatgaattctacagccgaccctccaagttagctgacttctgggggaacaacaacgagatcctcagtgggctggacatggaggaaggcaaggaaggaggcacatggctgggcatcagcacacgtggcaagctggcagcactcaccaactacctgcagccgcagctggactggcaggcccgagggcgaggtgaacttgtcacccactttctgaccactgacgtggacagcttgtcctacctgaagaaggtctctatggagggccatctgtacaatggcttcaacctcatagcagccgacctgagcacagcaaagggagacgtcatttgctactatgggaaccgaggggagcctgatcctatcgttttgacgccaggcacctacgggctgagcaacgcgctgctggagactccctggaggaagctgtgctttgggaagcagctcttcctggaggctgtggaacggagccaggcgctgcccaaggatgtgctcatcgccagcctcctggatgtgctcaacaatgaagaggcgcagctgccagacccggccatcgaggaccagggtggggagtacgtgcagcccatgctgagcaagtacgcggctg

SEQ ID NO: 194493 - DNA, 585 bp, Homo sapiens
  Payload ID: 18434
  Gene Name: transport and golgi organization 2 homolog
  ENST ID: ENST00000432198
  CDS Start-End: 321-585
gaacctctgcggcggcggtggcagggtacgcgggaccgctccctcccagccgacttacgagaacatcccccgaccatccagccccgagcagggactggcagagccggcgccccttccccggactctggccgcgtagcctccgccaccactcccagttcacagctccatgcggacagctgtgaggcccccggagaaagccacagagagaaaatgctttcagctgggtgtcaagaacttttcaagagtggcagctgttgaaatcaaaagagtggccacagaagacctcgcgacctgtgtcagcagagccgccctgcaccaccatgtgcatcatcttctttaagtttgatcctcgccctgtttccaaaaacgcgtacaggctcatcttggcagccaacagggatgaattctacagccgaccctccaagttagctgacttctgggggaacaacaacgagatcctcagtgggctggacatggaggaaggcaaggaaggaggcacatggctgggcatcagcacacgtggcaagctggcagcactcaccaactacctgcagccgcagctggactggcaggcccgagggcgag

SEQ ID NO: 194494 - DNA, 570 bp, Homo sapiens
  Payload ID: 18434
  Gene Name: transport and golgi organization 2 homolog
  ENST ID: ENST00000450664
  CDS Start-End: 73-568
ggcacccggaagtcggcggcggtggcggaggcgacctcgcgacctgtgtcagcagagccgccctgcaccaccatgtgcatcatcttctttaagtttgatcctcgccctgtttccaaaaacgcgtacaggctcatcttggcagccaacagggatgaattctacagccgaccctccaagttagctgacttctgggggaacaacaacgagatcctcagtgggctggacatggaggaaggcaaggaaggaggcacatggctgggcatcagcacacgtggcaagctggcagcactcaccaactacctgcagccgcagctggactggcaggcccgagggcgaggtgaacttgtcacccactttctgaccactgacgtggacagcttgtcctacctgaagaaggtctctatggagggccatctgtacaatggcttcaacctcatagcagccgacctgagcacagcaaagggagacgtcatttgctactatgggaaccgaggggagcctgatcctatcgttttgacgccaggcacctacgggctgagcaacgcgctgctggagactccctggaggaag

SEQ ID NO: 194495 - DNA, 4816 bp, Homo sapiens
  Payload ID: 18435
  Gene Name: transport and golgi organization 6 homolog
  Uniprot ID: Q9C0B7
  ENST ID: ENST00000261778
  CDS Start-End: 13-3297
tacactccagtcatggcggcccgacaggccgtgggcagcggggctcaggagacatgcggtctggatcggattttggaggcattgaagctgctgctgagcccgggaggctcgggctcaagttcactacaggtcacaaaacatgatgtcttgttggctactttaaaatctaacctgtctgctttggaggacaagtttctgaaggatcctcagtggaagaatctgaaactcctaagagatgaaattgctgataaggcagaatggccacaaaactctgtggatgtcacttggagttttacctctcaaaccttgttgttgcttttgtgcttgaaggaaaccatgatccgccttgcagctaatttcaatccaggtaaacccaaccctaggactccggaagttgctcctgccctgagccccgatgcacttagtatctcacaacagaagactgtccagttcgttttgcagtttgtagttaccttgggtatctgcccctatctcatgcctggtgttggagtccctttgagatatagaactgaatttggtgccgtcgttcaagacgtggtgtgttttgatgctgcccccgatgcaactcgaagactgtacaccagctgcaaggcccttctgaatgttgctcagcacacatctctggggagcttgatcttctgccaccactttggggatatcgcagcaggtctgtgccaactgggattctgcccaaccaaaagaaaactgctaacacctgcagaagaggttctaactgaagaggagagaaccctatccaggggggccttgagagacatgctggatcaagtctatcagcccttagcagtccgggaactgcttatcctccagggaggaccaccccagtcctgcacagatgtgaagacacagatgaggtgtcgggccccagcttggcttcggcgtctatgtggacagctgctctctgaaaggttaatgagacctaatggtgttcaggcagtagtccggggcattttggaaggagcaggtgcgggagcagctggtggaagtgatgctgaggtgacggctgctgactggaagaagtgtgacctgatcgcaaagattttggcctcttgtccccagcagtctctttcaccagagaattactacagggacatctgcccccaggttctggatttatttcactttcaagataaattgacagcacgacaatttcagagagttgccaccactacctttataactttgtcaagagaacgcccacatttggcagcaaagtatttgctccagccagtgttagctcctcttcatcgatgtttgaatacagcagagctttcagagagtgacatggtaccaggaactattttggtgacagaagaagaacttagtagatgcattgaggatgtgtttaaggtgtacgtggttgggaatgaacctttaacagttttgatggattccctgcttccagtcctgggagtgctttttcttctctactgttttactaagcagagtgtgtctcacataaggtcactttgccaagaaatcttattatggattctggggaagctggaaaggaagaaggcaattgccagcctgaaaggatttgcagggttggacaaagctgtgccctctctccattctctgtgtcagtttagagttgccactcaaggtggcattatgattaccatcaaagaggccattagtgatgaagatgaagatgaagccctgtaccagaaggtatcctctgagcagggccgggtggagcatctcggggacttgctgtcccactgccaggaatgcggtttggcaggagacttcttcatcttctgtttgaaagagttgactcatgtggcctcggaaaatgaaacagagttaaaaactgagcccttctccagcaagagcctcttggaattagagcaacatcagactcttcttgtggaaggccaagagcggaagctgcttgtcctgcagctgatggctgttctgtgcgagagaatgtctgagcagatattcacaaacgtcactcaggtggtggactttgtagcagcaacattgcagagagcctgtgcaagcctggcccatcaggcagagagcaccgtggaatcacagacgctgagcatgtccatggggctggtggctgtcatgctaggaggagctgttcagttgaagtcaagtgattttgctgttctgaagcagttgttgcctctgttggagaaggtatccaacacataccctgatccggtcatccaagaactcgctgttgatctccgcatcaccatctctacccatggagcctttgccactgaggccgtcagcatggctgcccaaagtacactgaacagaaaagatctggaagggaaaatagaagagcagcaacaaaccagtcatgaaagacccactgatgtagctcatagccaccttgaacaacagcagagccatgagacagccccccagacaggcctgcagtcaaatgctccaatcattcctcaaggagtcaatgagcccagcactactacaagtcagaaatctggaagcgtaaccacagaacagctccaagaggttcttttgtcagcttatgaccctcaaattccaacacgggctgctgccctgcgtactctttcccactggatagagcagagagaagcaaaagcccttgagatgcaagagaagcttctcaagatattcttggaaaacttggaacatgaagacacttttgtatatctatctgcaattcagggggttgccctgctgtcagacgtctatcctgagaaaatcttgccggacttgttggctcaatatgacagcagcaaagacaagcacacaccagagaccagaatgaaagtcggggaagtccttatgcgaatcgtcagggcattaggagacatggtctcaaagtaccgagaacctttgatccataccttcctgaggggagtgagagatcctgatggtgctcacagggccagcagcttggccaaccttggggagctgtgccagaggctggactttctgctgggctccgtggtccatgaggtaacagcttgcctgattgctgtggccaaaacagatggtgaagttcaagtacgcagagctgccatacatgtggttgtgctgctgcttcggggactcagccagaaagctactgaggtgctgagcgccgtcctcaaggatctctaccacctgctgaagcacgtagtgtgtctggagcccgatgacgtggccaagctccatgcccagttggccctagaagagctggatgacatcatgaaaaacttcctgttccctccacagaagctggagaagaagatcatggtcctgccgtagacctggctccaaggacgtggaggaggcaggcagggccaggcacccagagccgtgcccaggtcttccagcaggtggccctgctgcctcttgagtgctggcagcatggctgaccctcggggtggttttatggtgcaggtcacttgggtcttcagggtcccttccgagggcatgtgttcagcactcccgcgttcagcctgaggggtgtacagttaagagaagacagttacagatctcattaatctacatttttcactgtcctctagcattgaaagaaggatgtctacctggtgaaagtatattttaacatgactgatggaatttcactaattgcccactctcttggaacttgaggagaagcggttggccacccatatgtcacctagctctatattctttcaggctgagattcttcttcaggaaaatgaggagcagaactggccacccttggctgctcaagaggcatttcagagtaggagatgcagttggaggtggggaggggaaggaaatagttatcaaataatgcaaaatggaataaagttatcttggatggaaagaacagggctaaatctggtcctctggtgtcgagatggaaaactgtggagttgaagaggctctgatgcccagaaaggacaatcaagctggttgactcttccagagaagaagggtaagccctgtatttatcctcccaggccattcttcttcactcctgctgctgtttgcagagagttgccctgattatcaggagaaaagaaccacgagcatccagagagtttacatcctgccttctgtcctctgctccttcagaaagatgaatgcctagacaatgggttcacactgaatgcaggctggaaagaatgcatgctggtggcctaatgccagggctgttgaaacaatttcagatatagcactgtggtctccactttatttctttatatgttttggccgctgcattttgattgcagctaaaagagataacagaaaggagatactggctggctgcttcatattagccctctctgttgtcaacaccttgatgaggccaacccagagatgcttgatcagtcctcagctttgcagggctaggtacagaattttatcacaggattttatcacgctctctggggtgactagatccacaggaaccaaaacgcagtttccaaaagctcgagtgactgaaggatctatacacaaacatggctatttgctagttaacaacaggatatttctctctggccagatcacagacatggttctgagtcagatcttccttggtggcatccctttaaagaggccatcttatgaacaggatcacaagtgagcttagtgagcagagagttagaacaaatctagctaggtgtgtttaaggaatatttccattcagctagtgtagctggattaatttctattctccaaatcaaggatgtctagaaaatgggcattgtggctttcaaatctaagaagaatctcctttgggccagctggatgtacaataaaaatgcttgtttcttggccttccttt

SEQ ID NO: 194496 - DNA, 552 bp, Homo sapiens
  Payload ID: 18435
  Gene Name: transport and golgi organization 6 homolog
  ENST ID: ENST00000565852
  CDS Start-End: 1-112
gattttggcctcttgtccccagcagtctctttcaccagagaattactacagggacatctgcccccagtttttttgtaggttctggatttatttcactttcaagataaattgacagcacgacaatttcagagagttgccaccactacctttataactttgtcaagagaacgcccacatttggcagcaaagtatttgctccagccagtgttagctcctcttcatcgatgtttgaatacagcagagctttcagagagtgacatggtaccaggaactattttggtgacagaagaagaacttagtagatgcattgaggatgtgtttaaggtgtacgtggttgggaatgaacctttaacagttttgatggattccctgcttccagtcctgggagtgctttttcttctctactgttttactaagcagagtgtgtctcacataaggtcactttgccaagaaatcttattatggattctggggaagctggaaaggaagaaggcaattgccagcctgaaaggatttgcagggttggacaaagctgtgccctctctccattct

SEQ ID NO: 194497 - DNA, 573 bp, Homo sapiens
  Payload ID: 18435
  Gene Name: transport and golgi organization 6 homolog
  ENST ID: ENST00000561856
  CDS Start-End: 1-83
agatattcacaaacgtcactcaggtcagtagttgccacattctggaccgcagcctttttttctttccaaaaaataaagtttaaaaatgttgctgagagtgtgatttgatgacacctggatcatgaggtgtttcctggaatgctggttaaatatggaaactacacagcccacaccaggccactgaatccaaaacgttccagtgtcctgagactccacacgtttaacaagctcccgaggtggtggactttgtagcagcaacattgcagagagcctgtgcaagcctggcccatcaggcagagagcaccgtggaatcacagacgctgagcatgtccatggggctggtggctgtcatgctaggaggagctgttcagttgaagtcaagtgattttgctgttctgaagcagttgttgcctctgttggagaaggtatccaacacataccctgatccggtcatccaagaactcgctgttgatctccgcatcaccatctctacccatggagcctttgccactgaggccgtcagcatggctgcccaaagtacactgaacagaaaagatctggaagggaaaatag

SEQ ID NO: 194498 - DNA, 2959 bp, Homo sapiens
  Payload ID: 18436
  Gene Name: transporter 1, ATP-binding cassette, sub-family B (MDR/TAP)
  Uniprot ID: Q03518
  ENST ID: ENST00000354258
  CDS Start-End: 163-2589
gagaagggtgtgcgtgatggagaaaattgggcaccagggctgctcccgagattctcagatctgatttccacgcttgctaccaaaatagtctgggcaggccacttttggaagtaggcgttatctagtgagcaggcggccgctttcgatttcgctttcccctaaatggctgagcttctcgccagcgcaggatcagcctgttcctgggactttccgagagccccgccctcgttccctcccccagccgccagtaggggaggactcggcggtacccggagcttcaggccccaccggggcgcggagagtcccaggcccggccgggaccgggacggcgtccgagtgccaatggctagctctaggtgtcccgctccccgcgggtgccgctgcctccccggagcttctctcgcatggctggggacagtactgctacttctcgccgactgggtgctgctccggaccgcgctgccccgcatattctccctgctggtgcccaccgcgctgccactgctccgggtctgggcggtgggcctgagccgctgggccgtgctctggctgggggcctgcggggtcctcagggcaacggttggctccaagagcgaaaacgcaggtgcccagggctggctggctgctttgaagccattagctgcggcactgggcttggccctgccgggacttgccttgttccgagagctgatctcatggggagcccccgggtccgcggatagcaccaggctactgcactggggaagtcaccctaccgccttcgttgtcagttatgcagcggcactgcccgcagcagccctgtggcacaaactcgggagcctctgggtgcccggcggtcagggcggctctggaaaccctgtgcgtcggcttctaggctgcctgggctcggagacgcgccgcctctcgctgttcctggtcctggtggtcctctcctctcttggggagatggccattccattctttacgggccgcctcactgactggattctacaagatggctcagccgataccttcactcgaaacttaactctcatgtccattctcaccatagccagtgcagtgctggagttcgtgggtgacgggatctataacaacaccatgggccacgtgcacagccacttgcagggagaggtgtttggggctgtcctgcgccaggagacggagtttttccaacagaaccagacaggtaacatcatgtctcgggtaacagaggacacgtccaccctgagtgattctctgagtgagaatctgagcttatttctgtggtacctggtgcgaggcctatgtctcttggggatcatgctctggggatcagtgtccctcaccatggtcaccctgatcaccctgcctctgcttttccttctgcccaagaaggtgggaaaatggtaccagttgctggaagtgcaggtgcgggaatctctggcaaagtccagccaggtggccattgaggctctgtcggccatgcctacagttcgaagctttgccaacgaggagggcgaagcccagaagtttagggaaaagctgcaagaaataaagacactcaaccagaaggaggctgtggcctatgcagtcaactcctggaccactagtatttcaggtatgctgctgaaagtgggaatcctctacattggtgggcagctggtgaccagtggggctgtaagcagtgggaaccttgtcacatttgttctctaccagatgcagttcacccaggctgtggaggtactgctctccatctaccccagagtacagaaggctgtgggctcctcagagaaaatatttgagtacctggaccgcacccctcgctgcccacccagtggtctgttgactcccttacacttggagggccttgtccagttccaagatgtctcctttgcctacccaaaccgcccagatgtcttagtgctacaggggctgacattcaccctacgccctggcgaggtgacggcgctggtgggacccaatgggtctgggaagagcacagtggctgccctgctgcagaatctgtaccagcccaccgggggacagctgctgttggatgggaagccccttccccaatatgagcaccgctacctgcacaggcaggtggctgcagtgggacaagagccacaggtatttggaagaagtcttcaagaaaatattgcctatggcctgacccagaagccaactatggaggaaatcacagctgctgcagtaaagtctggggcccatagtttcatctctggactccctcagggctatgacacagaggtagacgaggctgggagccagctgtcagggggtcagcgacaggcagtggcgttggcccgagcattgatccggaaaccgtgtgtacttatcctggatgatgccaccagtgccctggatgcaaacagccagttacaggtggagcagctcctgtacgaaagccctgagcggtactcccgctcagtgcttctcatcacccagcacctcagcctggtggagcaggctgaccacatcctctttctggaaggaggcgctatccgggaggggggaacccaccagcagctcatggagaaaaaggggtgctactgggccatggtgcaggctcctgcagatgctccagaatgaaagccttctcagacctgcgcactccatctccctcccttttcttctctctgtggtggagaaccacagctgcagagtaggcagctgcctccaggatgagttacttgaaatttgccttgagtgtgttacctcctttccaagctcctcgtgataatgcagacttcctggagtacaaacacaggatttgtaattccttactgtaacggagtttagagccagggctgatgctttggtgtggccagcactctgaaactgagaaatgttcagaatgtacggaaagatgatcagctattttcaacataactgaaggcatatgctggcccataaacaccctgtaggttcttgatatttataataaaattggtgttttgta

SEQ ID NO: 194499 - DNA, 2959 bp, Homo sapiens; identical to SEQ ID NO: 194498
  Payload ID: 18436
  Gene Name: transporter 1, ATP-binding cassette, sub-family B (MDR/TAP)
  Uniprot ID: Q03518
  ENST ID: ENST00000383235
  CDS Start-End: 163-2589

SEQ ID NO: 194500 - DNA, 2959 bp, Homo sapiens; identical to SEQ ID NO: 194498
  Payload ID: 18436
  Gene Name: transporter 1, ATP-binding cassette, sub-family B (MDR/TAP)
  Uniprot ID: Q03518
  ENST ID: ENST00000418205
  CDS Start-End: 163-2589

SEQ ID NO: 194501 - DNA, 2959 bp, Homo sapiens; identical to SEQ ID NO: 194498
  Payload ID: 18436
  Gene Name: transporter 1, ATP-binding cassette, sub-family B (MDR/TAP)
  Uniprot ID: Q03518
  ENST ID: ENST00000440894
  CDS Start-End: 163-2589

SEQ ID NO: 194502 - DNA, 2959 bp, Homo sapiens; identical to SEQ ID NO: 194498
  Payload ID: 18436
  Gene Name: transporter 1, ATP-binding cassette, sub-family B (MDR/TAP)
  Uniprot ID: Q03518
  ENST ID: ENST00000414467
  CDS Start-End: 163-2589

SEQ ID NO: 194503 - DNA, 2959 bp, Homo sapiens
  Payload ID: 18436
  Gene Name: transporter 1, ATP-binding cassette, sub-family B (MDR/TAP)
  ENST ID: ENST00000428324
  CDS Start-End: 163-2589
gagaagggtgtgcgtgatggagaaaattgggcaccagggctgctcccgagattctcagatctgatttccacgcttgctaccaaaatagtctgggcaggccacttttggaagtaggcgttatctagtgagcaggcggccgctttcgatttcgctttcccctaaatggctgagcttctcgccagcgcaggatcagcctgttcctgggactttccgagagccccgccctcgttccctcccccagccgccagtaggggaggactcggcggtacccggagcttcaggccccaccggggcgcggagagtcccaggcccggccgggaccgggacggcgtccgagtgccaatggctagctctaggtgtcccgctccccgcgggtgccgctgcctccccggagcttctctcgcatggctggggacagtactgctacttctcgccgactgggtgctgctccggaccgcgctgccccgcatattctccctgctggtgcccaccgcgctgccactgctccgggtctgggcggtgggcctgagccgctgggccgtgctctggctgggggcctgcggggtcctcagggcaacgggtggctccaagagcgaaaacgcaggtgcccagggctggctggctgctttgaagccattagctgcggcactgggcttggccctgccgggacttgccttgttccgagagctgatctcatggggagcccccgggtccgcggatagcaccaggctactgcactggggaagtcaccctaccgccttcgttgtcagttatgcagcggcactgcccgcagcagccctgtggcacaaactcgggagcctctgggtgcccggcggtcagggcggctctggaaaccctgtgcgtcggcttctaggctgcctgggctcggagacgcgccgcctctcgctgttcctggtcctggtggtcctctcctctcttggggagatggccattccattctttacgggccgcctcactgactggattctacaagatggctcagccgataccttcactcgaaacttaactctcatgtccattctcaccatagccagtgcagtgctggagttcgtgggtgacgggatctataacaacaccatgggccacgtgcacagccacttgcagggagaggtgtttggggctgtcctgcgccaggagacggagtttttccaacagaaccagacaggtaacatcatgtctcgggtaacagaggacacgtccaccctgagtgattctctgagtgagaatctgagcttatttctgtggtacctggtgcgaggcctatgtctcttggggatcatgctctggggatcagtgtccctcaccatggtcaccctgatcaccctgcctctgcttttccttctgcccaagaaggtgggaaaatggtaccagttgctggaagtgcaggtgcgggaatctctggcaaagtccagccaggtggccattgaggctctgtcggccatgcctacagttcgaagctttgccaacgaggagggcgaagcccagaagtttagggaaaagctgcaagaaataaagacactcaaccagaaggaggctgtggcctatgcagtcaactcctggaccactagtatttcaggtatgctgctgaaagtgggaatcctctacattggtgggcagctggtgaccagtggggctgtaagcagtgggaaccttgtcacatttgttctctaccagatgcagttcacccaggctgtggaggtactgctctccatctaccccagagtacagaaggctgtgggctcctcagagaaaatatttgagtacctggaccgcacccctcgctgcccacccagtggtctgttgactcccttacacttggagggccttgtccagttccaagatgtctcctttgcctacccaaaccgcccagatgtcttagtgctacaggggctgacattcaccctacgccctggcgaggtgacggcgctggtgggacccaatgggtctgggaagagcacagtggctgccctgctgcagaatctgtaccagcccaccgggggacagctgctgttggatgggaagccccttccccaatatgagcaccgctacctgcacaggcaggtggctgcagtgggacaagagccacaggtatttggaagaagtcttcaagaaaatattgcctatggcctgacccagaagccaactatggaggaaatcacagctgctgcagtaaagtctggggcccatagtttcatctctggactccctcagggctatgacacagaggtagacgaggctgggagccagctgtcagggggtcagcgacaggcagtggcgttggcccgagcattgatccggaaaccgtgtgtacttatcctggatgatgccaccagtgccctggatgcaaacagccagttacaggtggagcagctcctgtacgaaagccctgagcggtactcccgctcagtgcttctcatcacccagcacctcagcctggtggagcaggctgaccacatcctctttctggaaggaggcgctatccgggaggggggaacccaccagcagctcatggagaaaaaggggtgctactgggccatggtgcaggctcctgcagatgctccagaatgaaagccttctcagacctgcgcactccatctccctcccttttcttctctctgtggtggagaaccacagctgcagagtaggcagctgcctccaggatgagttacttgaaatttgccttgagtgtgttacctcctttccaagctcctcgtgataatgcagacttcctggagtacaaacacaggatttgtaattccttactgtaacggagtttagagccagggctgatgctttggtgtggccagcactctgaaactgagaaatgttcagaatgtacggaaagatgatcagctattttcaacataactgaaggcatatgctggcccataaacaccctgtaggttcttgatatttataataaaattggtgttttgta

SEQ ID NO: 194504 - DNA, 2959 bp, Homo sapiens; identical to SEQ ID NO: 194498
  Payload ID: 18436
  Gene Name: transporter 1, ATP-binding cassette, sub-family B (MDR/TAP)
  Uniprot ID: Q03518
  ENST ID: ENST00000424897
  CDS Start-End: 163-2589

SEQ ID NO: 194505 - DNA, 2959 bp, Homo sapiens
  Payload ID: 18436
  Gene Name: transporter 1, ATP-binding cassette, sub-family B (MDR/TAP)
  Uniprot ID: Q03518
  ENST ID: ENST00000439781
  CDS Start-End: 163-2589
gagaagggtgtgcgtgatggagaaaattgggcaccagggctgctcccgagattctcagatctgatttccacgcttgctaccaaaatagtctgggcaggccacttttggaagtaggcgttatctagtgagcaggcggccgctttcgatttcgctttcccctaaatggctgagcttctcgccagcgcaggatcagcctgttcctgggactttccgagagccccgccctcgttccctcccccagccgccagtaggggaggactcggcggtacccggagcttcaggccccaccggggcgcggagagtcccagacccggccgggaccgggacggcgtccgagtgccaatggctagctctaggtgtcccgctccccgcgggtgccgctgcctccccggagcttctctcgcatggctggggacagtactgctacttctcgccgactgggtgctgctccggaccgcgctgccccgcatattctccctgctggtgcccaccgcgctgccactgctccgggtctgggcggtgggcctgagccgctgggccgtgctctggctgggggcctgcggggtcctcagggcaacggttggctccaagagcgaaaacgcaggtgcccagggctggctggctgctttgaagccattagctgcggcactgggcttggccctgccgggacttgccttgttccgagagctgatctcatggggagcccccgggtccgcggatagcaccaggctactgcactggggaagtcaccctaccgccttcgttgtcagttatgcagcggcactgcccgcagcagccctgtggcacaaactcgggagcctctgggtgcccggcggtcagggcggctctggaaaccctgtgcgtcggcttctaggctgcctgggctcggagacgcgccgcctctcgctgttcctggtcctggtggtcctctcctctcttggggagatggccattccattctttacgggccgcctcactgactggattctacaagatggctcagccgataccttcactcgaaacttaactctcatgtccattctcaccatagccagtgcagtgctggagttcgtgggtgacgggatctataacaacaccatgggccacgtgcacagccacttgcagggagaggtgtttggggctgtcctgcgccaggagacggagtttttccaacagaaccagacaggtaacatcatgtctcgggtaacagaggacacgtccaccctgagtgattctctgagtgagaatctgagcttatttctgtggtacctggtgcgaggcctatgtctcttggggatcatgctctggggatcagtgtccctcaccatggtcaccctgatcaccctgcctctgcttttccttctgcccaagaaggtgggaaaatggtaccagttgctggaagtgcaggtgcgggaatctctggcaaagtccagccaggtggccattgaggctctgtcggccatgcctacagttcgaagctttgccaacgaggagggcgaagcccagaagtttagggaaaagctgcaagaaataaagacactcaaccagaaggaggctgtggcctatgcagtcaactcctggaccactagtatttcaggtatgctgctgaaagtgggaatcctctacattggtgggcagctggtgaccagtggggctgtaagcagtgggaaccttgtcacatttgttctctaccagatgcagttcacccaggctgtggaggtactgctctccatctaccccagagtacagaaggctgtgggctcctcagagaaaatatttgagtacctggaccgcacccctcgctgcccacccagtggtctgttgactcccttacacttggagggccttgtccagttccaagatgtctcctttgcctacccaaaccgcccagatgtcttagtgctacaggggctgacattcaccctacgccctggcgaggtgacggcgctggtgggacccaatgggtctgggaagagcacagtggctgccctgctgcagaatctgtaccagcccaccgggggacagctgctgttggatgggaagccccttccccaatatgagcaccgctacctgcacaggcaggtggctgcagtgggacaagagccacaggtatttggaagaagtcttcaagaaaatattgcctatggcctgacccagaagccaactatggaggaaatcacagctgctgcagtaaagtctggggcccatagtttcatctctggactccctcagggctatgacacagaggtagacgaggctgggagccagctgtcagggggtcagcgacaggcagtggcgttggcccgagcattgatccggaaaccgtgtgtacttatcctggatgatgccaccagtgccctggatgcaaacagccagttacaggtggagcagctcctgtacgaaagccctgagcggtactcccgctcagtgcttctcatcacccagcacctcagcctggtggagcaggctgaccacatcctctttctggaaggaggcgctatccgggaggggggaacccaccagcagctcatggagaaaaaggggtgctactgggccatggtgcaggctcctgcagatgctccagaatgaaagccttctcagacctgcgcactccatctccctcccttttcttctctctgtggtggagaaccacagctgcagagtaggcagctgcctccaggatgagttacttgaaatttgccttgagtgtgttacctcctttccaagctcctcgtgataatgcagacttcctggagtacaaacacaggatttgtaattccttactgtaacggagtttagagccagggctgatgctttggtgtggccagcactctgaaactgagaaatgttcagaatgtacggaaagatgatcagctattttcaacataactgaaggcatatgctggcccataaacaccctgtaggttcttgatatttataataaaattggtgttttgta

SEQ ID NO: 194506 - DNA, 5684 bp, Homo sapiens
  Payload ID: 18437
  Gene Name: transporter 2, ATP-binding cassette, sub-family B (MDR/TAP)
  Uniprot ID: Q03519
  ENST ID: ENST00000374897
  CDS Start-End: 133-2193
gagccctgacgcccgccctggccgagcgtagctggcggaccagagccggtagcgaggttgggagagacggagcggacctcagcgctgaagcagaagtccccggagctgcggtctccccgccgcggctgagccatgcggctccctgacctgagaccctggacctccctgctgctggtggacgcggctttactgtggctgcttcagggccctctggggactttgcttcctcaagggctgccaggactatggctggaggggaccctgcggctgggagggctgtgggggctgctaaagctaagagggctgctgggatttgtggggacactgctgctcccgctctgtctggccacccccctgactgtctccctgagagccctggtcgcgggggcctcacgtgctcccccagccagagtcgcttcagccccttggagctggctgctggtggggtacggggctgcggggctcagctggtcactgtgggctgttctgagccctcctggagcccaggagaaggagcaggaccaggtgaacaacaaagtcttgatgtggaggctgctgaagctctccaggccggacctgcctctcctcgttgccgccttcttcttccttgtccttgctgttttgggtgagacattaatccctcactattctggtcgtgtgattgacatcctgggaggtgattttgacccccatgcctttgccagtgccatcttcttcatgtgcctcttctcctttggcagctcactgtctgcaggctgccgaggaggctgcttcacctacaccatgtctcgaatcaacttgcggatccgggagcagcttttctcctccctgctgcgccaggacctcggtttcttccaggagactaagacaggggagctgaactcacggctgagctcggataccaccctgatgagtaactggcttcctttaaatgccaatgtgctcttgcgaagcctggtgaaagtggtggggctgtatggcttcatgctcagcatatcgcctcgactcaccctcctttctctgctgcacatgcccttcacaatagcagcggagaaggtgtacaacacccgccatcaggaagtgcttcgggagatccaggatgcagtggccagggcggggcaggtggtgcgggaagccgttggagggctgcagaccgttcgcagttttggggccgaggagcatgaagtctgtcgctataaagaggcccttgaacaatgtcggcagctgtattggcggagagacctggaacgcgccttgtacctgctcgtaaggagggtgctgcacttgggggtgcagatgctgatgctgagctgtgggctgcagcagatgcaggatggggagctcacccagggcagcctgctttcctttatgatctaccaggagagcgtggggagctatgtgcagaccctggtatacatatatggggatatgctcagcaacgtgggagctgcagagaaggttttctcctacatggaccgacagccaaatctgccttcacctggcacgcttgcccccaccactctgcagggggttgtgaaattccaagacgtctcctttgcatatcccaatcgccctgacaggcctgtgctcaaggggctgacgtttaccctacgtcctggtgaggtgacggcgctggtgggacccaatgggtctgggaagagcacagtggctgccctgctgcagaatctgtaccagcccacagggggacaggtgctgctggatgaaaagcccatctcacagtatgaacactgctacctgcacagccaggtggtttcagttgggcaggagcctgtgctgttctccggttctgtgaggaacaacattgcttatgggctgcagagctgcgaagatgataaggtgatggcggctgcccaggctgcccacgcagatgacttcatccaggaaatggagcatggaatatacacagatgtaggggagaagggaagccagctggctgcgggacagaaacaacgtctggccattgcccgggcccttgtacgagacccgcgggtcctcatcctggatgaggctactagtgccctagatgtgcagtgcgagcaggccctgcaggactggaattcccgtggggatcgcacagtgctggtgattgctcacaggctgcagacagttcagcgcgcccaccagatcctggtgctccaggagggcaagctgcagaagcttgcccagctctaggagggacaggacctctattcccgcctggtgcagcagcggctgatggactgaggccccagggatactgggccctcttctcaggggcgtctccaggacccagagctgttcctgctttgagtttccctagagctgtgcggccagatagctgttcctgagttgcaggcacgatggagatttggacactgtgtgcttttggtggggtagagaggtggggtggggtggggtgggggctgtctgtgtccaggaaacttaattccctggtgactagagctttgcctggtgatgaggagtattttgtggcataatacatatattttaaaatattttccttcttacatgaactgtatacattcatatagaaaatttagacaatataaaaaagtacaaagaagaaaagtaaaagtacccattgtttcacttcctggagataaccatagttgctattttgctgcctgtcccatcagtcgtttatctgttgtttgagatagaaattaaccaaaaatgacataaatattcatgagattgccttcctatatccttccttgttcctaccagtgtctgctattttgaagaagctagggtctggagggacagagaacagttccctgattaacagtattaatagcgacattggtaacagctaccatttatagagttttaatgggagtaggagctatgctaagtgtttttcatgtattatcgtttttaatcattatccccaaccctatgaggttggttattatccccattttacagatgaggaaactgaagctcaaagaggctcaatgactttcccaaggtggtcgtagtggtggagttggagtttgaacacaggcctgaccctagagtccacaccctgacccaatcaattatattgcatcttgggtccataaaccctaatccataatcccatcaagaaaagctctgctgctcttagctctaaataattcagaatctattctcttctctccagtcccgttgttatagtcttcactcatagacttaagatgatcccatcaccagagaggtttctctaccattagcttccctcttccggccattcttcacaaagtcatttttctaaattctgtgtcacatacgatgatggcatttctggaaattccttcaggtgctctcaagccctgctgcagagatccttttcagagcacacactgttccagcccatctgtctcaccctctcctgttgtatccagctccacgacaaacttctgccttccccaacacctttgtgcctttgcatatggtgttttcttgcccattttctgctcgactcgcccctgattttcaagttcaagacttaactcagggttcaggtcttccaggaggccttacttatgtcgtcagtctggggaactctccatgtgcttctatcactgtgcggttacctctttcacagcccttttaaagttctatcttccctttcccaccttttttgaccttccactagaccatgagcacctgggcggaaagccatatatcttattaagctttatatctgctacctggccgagggcctaattcatagtggagaataaatagtcaattgaataaatgaataaatatctccaccatcgtactaatcttaatcctccctgcccactcccaccactgaaaatgcaacattgtacacatcactggttgttgggagggacttaccttggaaagttgctattctaggaaagagaaaccttcatattcctggaaacagcaggtagtttccagtgctggcaatgaattccccagaactgctgttttggattttttcttgcctggcagctgttgggagcagggtgcagtgaggatggggtgagagtgggcagtttcttgtgcagatttgcctttctttcatcctggggctgacttgcagctccacacccatccatctctcaaatttcacagagggtaaaataggcatttggagagaaagaactctggcctgattcctttctctcccacaaatgtcctttattcataaaacaggaataataattcctgtatctcccaactacatggaagctgcagccctcacagaagaagatgatctgagaaattctttgatttcctcagtacagttatacccatgcatcataatactttaagcctggaaggcatcttaaaaataatgcaacagtcaaacctaattttacagagaaactgacatgaaatcacgcagctaatcatgataaagctgggtggaaaacttatcttgatgggcagtacaggaagatgcagtagaccttaagatgtcctgaaagtttcttatctcaggggaaactcccaggtaggctttatgtcagggacacagaaaaatgctccctgaaagtcaaaatattcgggctagacagacaaattcctgtaagtgtggtttgtctgggaaccacagatgtcactaatcctggtttgctccagagttctttttgttcactcctaccccccatcaccatttgattgatctccttaccctgtaatttccccttcttgtcgcttacctgcagtatctttcccacccaggcatgccttattctttctaaaggaaagtatgaatggagaggggaaagcttgggaaactgatagatttccttggatgccaaaacacctccatagcctgtctgcccggccctatgtggaaacagcattgagtttcaagtcctttatgcctccacccagggatagccacttgtaatccacatggcaattgtgaaacaagcaggaaatgcgtaattgtcagaattttgtggggaaaggactagggaataaggaaaacaaagatcttccttgtgttttagagctgtcagctagaggagcacctgcttgagtctgatgccatctaatggtcccagaagaaactgggttttgaacctagagttccatggactcttaggaattagactactactactactaagcattcactggtgcttactatgtgctattgctgtgccaagtatctgaaacctgtcttcttaccttatttttcaagataattctatgtggcaggtattactatctcaattctaagagtgagaaaatggagttttagaaacatttactaacttgcctgggtcacatagctaaggaagaggtggacttgcccagctttgcataaaactcctcaaaagagttgcctatactccctgactccacttatcttcctactatcctctttttaaaatatattatttatttatttaaataagcaatatatgaatgtggtttgaaattcaaaagacacaaagaagtatacagaggaaagcctcactctcaatccttctcaaggtttgctaattcctcttgcataggcaatccgttcttccagctttgtgtttatctttccagagaagtttactgtgtattaagcaaatatgtatatctttattcttgctcagtattttcgcaaacagcagctgtctaagttcactgttctgaactttattttttaaattaaaaatatatggctatgtagtattcta

SEQ ID NO: 194507 - DNA, 2497 bp, Homo sapiens
  Payload ID: 18437
  Gene Name: transporter 2, ATP-binding cassette, sub-family B (MDR/TAP)
  Uniprot ID: Q03519
  ENST ID: ENST00000374899
  CDS Start-End: 80-2041
gaggttgggagagacggagcggacctcagcgctgaagcagaagtccccggagctgcggtctccccgccgcggctgagccatgcggctccctgacctgagaccctggacctccctgctgctggtggacgcggctttactgtggctgcttcagggccctctggggactttgcttcctcaagggctgccaggactatggctggaggggaccctgcggctgggagggctgtgggggctgctaaagctaagagggctgctgggatttgtggggacactgctgctcccgctctgtctggccacccccctgactgtctccctgagagccctggtcgcgggggcctcacgtgctcccccagccagagtcgcttcagccccttggagctggctgctggtggggtacggggctgcggggctcagctggtcactgtgggctgttctgagccctcctggagcccaggagaaggagcaggaccaggtgaacaacaaagtcttgatgtggaggctgctgaagctctccaggccggacctgcctctcctcgttgccgccttcttcttccttgtccttgctgttttgggtgagacattaatccctcactattctggtcgtgtgattgacatcctgggaggtgattttgacccccatgcctttgccagtgccatcttcttcatgtgcctcttctcctttggcagctcactgtctgcaggctgccgaggaggctgcttcacctacaccatgtctcgaatcaacttgcggatccgggagcagcttttctcctccctgctgcgccaggacctcggtttcttccaggagactaagacaggggagctgaactcacggctgagctcggataccaccctgatgagtaactggcttcctttaaatgccaatgtgctcttgcgaagcctggtgaaagtggtggggctgtatggcttcatgctcagcatatcgcctcgactcaccctcctttctctgctgcacatgcccttcacaatagcagcggagaaggtgtacaacacccgccatcaggaagtgcttcgggagatccaggatgcagtggccagggcggggcaggtggtgcgggaagccgttggagggctgcagaccgttcgcagttttggggccgaggagcatgaagtctgtcgctataaagaggcccttgaacaatgtcggcagctgtattggcggagagacctggaacgcgccttgtacctgctcgtaaggagggtgctgcacttgggggtgcagatgctgatgctgagctgtgggctgcagcagatgcaggatggggagctcacccagggcagcctgctttcctttatgatctaccaggagagcgtggggagctatgtgcagaccctggtatacatatatggggatatgctcagcaacgtgggagctgcagagaaggttttctcctacatggaccgacagccaaatctgccttcacctggcacgcttgcccccaccactctgcagggggttgtgaaattccaagacgtctcctttgcatatcccaatcgccctgacaggcctgtgctcaaggggctgacgtttaccctacgtcctggtgaggtgacggcgctggtgggacccaatgggtctgggaagagcacagtggctgccctgctgcagaatctgtaccagcccacagggggacaggtgctgctggatgaaaagcccatctcacagtatgaacactgctacctgcacagccaggtggtttcagttgggcaggagcctgtgctgttctccggttctgtgaggaacaacattgcttatgggctgcagagctgcgaagatgataaggtgatggcggctgcccaggctgcccacgcagatgacttcatccaggaaatggagcatggaatatacacagatgtaggggagaagggaagccagctggctgcgggacagaaacaacgtctggccattgcccgggcccttgtacgagacccgcgggtcctcatcctggatgaggctactagtgccctagatgtgcagtgcgagcaggccaaaaccctttggaagttcatgatattttgaatttcaatggatatttcctgggaataatgagttcaaatgaacgaatatgtggaacaaagcatcaccaacatttattttttcaggatgaggtgatggacaaaaccatcacagggaaattgaggcaaatagtacatgtaaaacaatacttcgggtgagtccacctatcccaaagtcgtatcaaagaagtggctgcagattggagcccaaagcctttggttcctcagtttccaaatggattctcactaggtgggatcatgagtttgctttggacaccccaaattctaactatttcttttgtttcttacatcctttccctcttccccagccccttcccctcatgttacacctcttgctggtttgagacgtcaatcaccactgagaaagaattaaaccagtattttgagctggcaaaattcttagcctagtacaattccttcaattaaactgtagctcaac

SEQ ID NO: 194508 - DNA, 5684 bp, Homo sapiens
  Payload ID: 18437
  Gene Name: transporter 2, ATP-binding cassette, sub-family B (MDR/TAP)
  Uniprot ID: Q03519
  ENST ID: ENST00000383118
  CDS Start-End: 133-2193
gagccctgacgcccgccctggccgagcgtagctggcggaccagagccggtagcgaggttgggagagacggagcggacctcagcgctgaagcagaagtccccggagctgcggtctccccgccgcggctgagccatgcggctccctgacctgagaccctggacctccctgctgctggtggacgcggctttactgtggctgcttcagggccctctggggactttgcttcctcaagggctgccaggactatggctggaggggaccctgcggctgggagggctgtgggggctgctaaagctaagagggctgctgggatttgtggggacactgctgctcccgctctgtctggccacccccctgactgtctccctgagagccctggtcgcgggggcctcacgtgctcccccagccagagtcgcttcagccccttggagctggctgctggtggggtacggggctgcggggctcagctggtcactgtgggctgttctgagccctcctggagcccaggagaaggagcaggaccaggtgaacaacaaagtcttgatgtggaggctgctgaagctctccaggccggacctgcctctcctcgttgccgccttcttcttccttgtccttgctgttttgggtgagacattaatccctcactattctggtcgtgtgattgacatcctgggaggtgattttgacccccatgcctttgccagtgccatcttcttcatgtgcctcttctcctttggcagctcactgtctgcaggctgccgaggaggctgcttcacctacaccatgtctcgaatcaacttgcggatccgggagcagcttttctcctccctgctgcgccaggacctcggtttcttccaggagactaagacaggggagctgaactcacggctgagctcggataccaccctgatgagtaactggcttcctttaaatgccaatgtgctcttgcgaagcctggtgaaagtggtggggctgtatggcttcatgctcagcatatcgcctcgactcaccctcctttctctgctgcacatgcccttcacaatagcagcggagaaggtgtacaacacccgccatcaggaagtgcttcgggagatccaggatgcagtggccagggcggggcaggtggtgcgggaagccgttggagggctgcagaccgttcgcagttttggggccgaggagcatgaagtctgtcgctataaagaggcccttgaacaatgtcggcagctgtattggcggagagacctggaacgcgccttgtacctgctcgtaaggagggtgctgcacttgggggtgcagatgctgatgctgagctgtgggctgcagcagatgcaggatggggagctcacccagggcagcctgctttcctttatgatctaccaggagagcgtggggagctatgtgcagaccctggtatacatatatggggatatgctcagcaacgtgggagctgcagagaaggttttctcctacatggaccgacagccaaatctgccttcacctggcacgcttgcccccaccactctgcagggggttgtgaaattccaagacgtctcctttgcatatcccaatcgccctgacaggcctgtgctcaaggggctgacgtttaccctacgtcctggtgaggtgacggcgctggtgggacccaatgggtctgggaagagcacagtggctgccctgctgcagaatctgtaccagcccacagggggacaggtgctgctggatgaaaagcccatctcacagtatgaacactgctacctgcacagccaggtggtttcagttgggcaggagcctgtgctgttctccggttctgtgaggaacaacattgcttatgggctgcagagctgcgaagatgataaggtgatggcggctgcccaggctgcccacgcagatgacttcatccaggaaatggagcatggaatatacacagatgtaggggagaagggaagccagctggctgcgggacagaaacaacgtctggccattgcccgggcccttgtacgagacccgcgggtcctcatcctggatgaggctactagtgccctagatgtgcagtgcgagcaggccctgcaggactggaattcccgtggggatcgcacagtgctggtgattgctcacaggctgcagacagttcagcgcgcccaccagatcctggtgctccaggagggcaagctgcagaagcttgcccagctctaggagggacaggacctctattcccgcctggtgcagcagcggctgatggactgaggccccagggatactgggccctcttctcaggggcgtctccaggacccagagctgttcctgctttgagtttccctagagctgtgcggccagatagctgttcctgagttgcaggcacgatggagatttggacactgtgtgcttttggtggggtagagaggtggggtggggtggggtgggggctgtctgtgtccaggaaacttaattccctggtgactagagctttgcctggtgatgaggagtattttgtggcataatacatatattttaaaatattttccttcttacatgaactgtatacattcatatagaaaatttagacaatataaaaaagtacaaagaagaaaagtaaaagtacccattgtttcacttcctggagataaccatagttgctattttgctgcctgtcccatcagtcgtttatctgttgtttgagatagaaattaaccaaaaatgacataaatattcatgagattgccttcctatatccttccttgttcctaccagtgtctgctattttgaagaagctagggtctggagggacagagaacagttccctgattaacagtattaatagcgacattggtaacagctaccatttatagagttttaatgggagtaggagctatgctaagtgtttttcatgtattatcgtttttaatcattatccccaaccctatgaggttggttattatccccattttacagatgaggaaactgaagctcaaagaggctcaatgactttcccaaggtggtcgtagtggtggagttggagtttgaacacaggcctgaccctagagtccacaccctgacccaatcaattatattgcatcttgggtccataaaccctaatccataatcccatcaagaaaagctctgctgctcttagctctaaataattcagaatctattctcttctctccagtcccgttgttatagtcttcactcatagacttaagatgatcccatcaccagagaggtttctctaccattagcttccctcttccggccattcttcacaaagtcatttttctaaattctgtgtcacatacgatgatggcatttctggaaattccttcaggtgctctcaagccctgctgcagagatccttttcagagcacacactgttccagcccatctgtctcaccctctcctgttgtatccagctccacgacaaacttctgccttccccaacacctttgtgcctttgcatatggtgttttcttgcccattttctgctcgactcgcccctgattttcaagttcaagacttaactcagggttcaggtcttccaggaggccttacttatgtcgtcagtctggggaactctccatgtgcttctatcactgtgcggttacctctttcacagcccttttaaagttctatcttccctttcccaccttttttgaccttccactagaccatgagcacctgggcggaaagccatatatcttattaagctttatatctgctacctggccgagggcctaattcatagtggagaataaatagtcaattgaataaatgaataaatatctccaccatcgtactaatcttaatcctccctgcccactcccaccactgaaaatgcaacattgtacacatcactggttgttgggagggacttaccttggaaagttgctattctaggaaagagaaaccttcatattcctggaaacagcaggtagtttccagtgctggcaatgaattccccagaactgctgttttggattttttcttgcctggcagctgttgggagcagggtgcagtgaggatggagtgagagtgggcagtttcttgtgcagatttgcctttctttcatcctggggctgacttgcagctccacacccatccatctctcaaatttcacagagggtaaaataggcatttggagagaaagaactctggcctgattcctttctctcccacaaatgtcctttattcataaaacaggaataataattcctgtatctcccaactacatggaagctgcagccctcacagaagaagatgatctgagaaattctttgatttcctcagtacagttatacccatgcatcataatactttaagcctggaaggcatcttaaaaataatgcaacagtcaaacctaattttacagagaaactgacatgaaatcacgcagctaatcatgataaagctgggtggaaaacttatcttgatgggcagtacaggaagatgcagtagaccttaagatgtcctgaaagtttcttatctcaggggaaactcccaggtaggctttatgtcagggacacagaaaaatgctccctgaaagtcaaaatattcgggctagacagacaaattcctgtaagtgtggtttgtctgggaaccacagatgtcactaatcctggtttgctccagagttctttttgttcactcctaccccccatcaccatttgattgatctccttaccctgtaatttccccttcttgtcgcttacctgcagtatctttcccacccaggcatgccttattctttctaaaggaaagtatgaatggagaggggaaagcttgggaaactgatagatttccttggatgccaaaacacctccatagcctgtctgcccggccctatgtggaaacagcattgagtttcaagtcctttatgcctccacccagggatagccacttggaatccacatggcaattgtgaaacaagcaggaaatgcgtaattgtcagaattttgtggggaaaggactagggaataaggaaaacaaagatcttccttgtgttttagagctgtcagctagaggagcacctgcttgagtctgatgccatctaatggtcccagaagaaactgggttttgaacctagagttccatggactcttaggaattagactcctactactactaagcattcactggtgcttactatgtgctattgctgtgccaagtatctgaaacctgtcttcttaccttatttttcaagataattctatgtggcaggtattactatctcaattctaagagtgagaaaatggagttttagaaacatttactaacttgcctgggtcacatagctaaggaagaggtggacttgcccagctttgcataaaactcctcaaaagagttgcctatactccctgactccacttatcttcctactatcctctttttaaaatatattatttatttatttaaataagcaatatatgaatgtggtttgaaattcaaaagacacaaagaagtatacagaggaaagcctcactctcaatccttctcaaggtttgctaattcctcttgcataggcaatccgttcttccagctttgtgtttatctttccagagaagtttactgtgtattaagcaaatatgtatatctttattcttgctcagtattttcgcaaacagcagctgtctaagttcactgttctgaactttattttttaaattaaaaatatatggctatgtagtattcta

SEQ ID NO: 194509 - DNA, 2497 bp, Homo sapiens
  Payload ID: 18437
  Gene Name: transporter 2, ATP-binding cassette, sub-family B (MDR/TAP)
  Uniprot ID: Q03519
  ENST ID: ENST00000383119
  CDS Start-End: 80-2041
gaggttgggagagacggagcggacctcagcgctgaagcagaagtccccggagctgcggtctccccgccgcggctgagccatgcggctccctgacctgagaccctggacctccctgctgctggtggacgcggctttactgtggctgcttcagggccctctggggactttgcttcctcaagggctgccaggactatggctggaggggaccctgcggctgggagggctgtgggggctgctaaagctaagagggctgctgggatttgtggggacactgctgctcccgctctgtctggccacccccctgactgtctccctgagagccctggtcgcgggggcctcacgtgctcccccagccagagtcgcttcagccccttggagctggctgctggtggggtacggggctgcggggctcagctggtcactgtgggctgttctgagccctcctggagcccaggagaaggagcaggaccaggtgaacaacaaagtcttgatgtggaggctgctgaagctctccaggccggacctgcctctcctcgttgccgccttcttcttccttgtccttgctgttttgggtgagacattaatccctcactattctggtcgtgtgattgacatcctgggaggtgattttgacccccatgcctttgccagtgccatcttcttcatgtgcctcttctcctttggcagctcactgtctgcaggctgccgaggaggctgcttcacctacaccatgtctcgaatcaacttgcggatccgggagcagcttttctcctccctgctgcgccaggacctcggtttcttccaggagactaagacaggggagctgaactcacggctgagctcggataccaccctgatgagtaactggcttcctttaaatgccaatgtgctcttgcgaagcctggtgaaagtggtggggctgtatggcttcatgctcagcatatcgcctcgactcaccctcctttctctgctgcacatgcccttcacaatagcagcggagaaggtgtacaacacccgccatcaggaagtgcttcgggagatccaggatgcagtggccagggcggggcaggtggtgcgggaagccgttggagggctgcagaccgttcgcagttttggggccgaggagcatgaagtctgtcgctataaagaggcccttgaacaatgtcggcagctgtattggcggagagacctggaacgcgccttgtacctgctcgtaaggagggtgctgcacttgggggtgcagatgctgatgctgagctgtgggctgcagcagatgcaggatggggagctcacccagggcagcctgctttcctttatgatctaccaggagagcgtggggagctatgtgcagaccctggtatacatatatggggatatgctcagcaacgtgggagctgcagagaaggttttctcctacatggaccgacagccaaatctgccttcacctggcacgcttgcccccaccactctgcagggggttgtgaaattccaagacgtctcctttgcatatcccaatcgccctgacaggcctgtgctcaaggggctgacgtttaccctacgtcctggtgaggtgacggcgctggtgggacccaatgggtctgggaagagcacagtggctgccctgctgcagaatctgtaccagcccacagggggacaggtgctgctggatgaaaagcccatctcacagtatgaacactgctacctgcacagccaggtggtttcagttgggcaggagcctgtgctgttctccggttctgtgaggaacaacattgcttatgggctgcagagctgcgaagatgataaggtgatggcggctgcccaggctgcccacgcagatgacttcatccaggaaatggagcatggaatatacacagatgtaggggagaagggaagccagctggctgcgggacagaaacaacgtctggccattgcccgggcccttgtacgagacccgcgggtcctcatcctggatgaggctactagtgccctagatgtgcagtgcgagcaggccaaaaccctttggaagttcatgatattttgaatttcagtggatatttcctgggaataatgagttcaaatgaacgaatatgtggaacaaagcatcaccaacatttattttttcaggatgaggtgatggacaaaaccatcacagggaaattgaggcaaatagtacatgtaaaacaatacttcgggtgagtccacctatcccaaagtcgtatcaaagaagtggctgcagattggagcccaaagcctttggttcctcagtttccaaatggattctcactaggtgggatcatgagtttgctttggacaccccaaattctaactatttcttttgtttcttacatcctttccctcttccccagccccttcccctcatgttacacctcttgctggtttgagacgtcaatcaccactgagaaagaattaaaccagtattttgagctggcaaaattcttagcctagtacaattccttcaattaaactgtagctcaac

SEQ ID NO: 194510 - DNA, 5684 bp, Homo sapiens
  Payload ID: 18437
  Gene Name: transporter 2, ATP-binding cassette, sub-family B (MDR/TAP)
  Uniprot ID: Q03519
  ENST ID: ENST00000383239
  CDS Start-End: 133-2193
gagccctgacgcccgccctggccgagcgtagctggcggaccagagccggtagcgaggttgggagagacggagcggacctcagcgctgaagcagaagtccccggagctgcggtctccccgccgcggctgagccatgcggctccctgacctgagaccctggacctccctgctgctggtggacgcggctttactgtggctgcttcagggccctctggggactttgcttcctcaagggctgccaggactatggctggaggggaccctgcggctgggagggctgtgggggctgctaaagctaagagggctgctgggatttgtggggacactgctgctcccgctctgtctggccacccccctgactgtctccctgagagccctggtcgcgggggcctcacgtgctcccccagccagagtcgcttcagccccttggagctggctgctggtggggtacggggctgcggggctcagctggtcactgtgggctgttctgagccctcctggagcccaggagaaggagcaggaccaggtgaacaacaaagtcttgatgtggaggctgctgaagctctccaggccggacctgcctctcctcgttgccgccttcttcttccttgtccttgctgttttgggtgagacattaatccctcactattctggtcgtgtgattgacatcctgggaggtgattttgacccccatgcctttgccagtgccatcttcttcatgtgcctcttctcctttggcagctcactgtctgcaggctgccgaggaggctgcttcacctacaccatgtctcgaatcaacttgcggatccgggagcagcttttctcctccctgctgcgccaggacctcggtttcttccaggagactaagacaggggagctgaactcacggctgagctcggataccaccctgatgagtaactggcttcctttaaatgccaatgtgctcttgcgaagcctggtgaaagtggtggggctgtatggcttcatgctcagcatatcgcctcgactcaccctcctttctctgctgcacatgcccttcacaatagcagcggagaaggtgtacaacacccgccatcaggaagtgcttcgggagatccaggatgcagtggccagggcggggcaggtggtgcgggaagccgttggagggctgcagaccgttcgcagttttggggccgaggagcatgaagtctgtcgctataaagaggcccttgaacaatgtcggcagctgtattggcggagagacctggaacgcgccttgtacctgctcgtaaggagggtgctgcacttgggggtgcagatgctgatgctgagctgtgggctgcagcagatgcaggatggggagctcacccagggcagcctgctttcctttatgatctaccaggagagcgtggggagctatgtgcagaccctggtatacatatatggggatatgctcagcaacgtgggagctgcagagaaggttttctcctacatggaccgacagccaaatctgccttcacctggcacgcttgcccccaccactctgcagggggttgtgaaattccaagacgtctcctttgcatatcccaatcgccctgacaggcctgtgctcaaggggctgacgtttaccctacgtcctggtgaggtgacggcgctggtgggacccaatgggtctgggaagagcacagtggctgccctgctgcagaatctgtaccagcccacagggggacaggtgctgctggatgaaaagcccatctcacagtatgaacactgctacctgcacagccaggtggtttcagttgggcaggagcctgtgctgttctccggttctgtgaggaacaacattgcttatgggctgcagagctgcgaagatgataaggtgatggcggctgcccaggctgcccacgcagatgacttcatccaggaaatggagcatggaatatacacagatgtaggggagaagggaagccagctggctgcgggacagaaacaacgtctggccattgcccgggcccttgtacgagacccgcgggtcctcatcctggatgaggctactagtgccctagatgtgcagtgcgagcaggccctgcaggactggaattcccgtggggatcgcacagtgctggtgattgctcacaggctgcagacagttcagcgcgcccaccagatcctggtgctccaggagggcaagctgcagaagcttgcccagctctaggagggacaggacctctattcccgcctggtgcagcagcggctgatggactgaggccccagggatactgggccctcttctcaggggcgtctccaggacccagagctgttcctgctttgagtttccctagagctgtgcggccagatagctgttcctgagttgcaggcacgatggagatttggacactgtgtgcttttggtggggtagagaggtggggtggggtggggtgggggctgtctgtgtccaggaaacttaattccctggtgactagagctttgcctggtgatgaggagtattttgtggcataatacatatattttaaaatattttccttcttacatgaactgtatacattcatatagaaaatttagacaatataaaaaagtacaaagaagaaaagtaaaagtacccattgtttcacttcctggagataaccatagttgctattttgctgcctgtcccatcagtcgtttatctgttgtttgagatagaaattaaccaaaaatgacataaatattcatgagattgccttcctatatccttccttgttcctaccagtgtctgctattttgaagaagctagggtctggagggacagagaacagttccctgattaacagtattaatagcgacattggtaacagctaccatttatagagttttaatgggagtaggagctatgctaagtgtttttcatgtattatcgtttttaatcattatccccaaccctatgaggttggttattatccccattttacagatgaggaaactgaagctcaaagaggctcaatgactttcccaaggtggtcgtagtggtggagttggagtttgaacacaggcctgaccctagagtccacaccctgacccaatcaattatattgcatcttgggtccataaaccctaatccataatcccatcaagaaaagctctgctgctcttagctctaaataattcagaatctattctcttctctccagtcccgttgttatagtcttcactcatagacttaagatgatcccatcaccagagaggtttctctaccattagcttccctcttccggccattcttcacaaagtcatttttctaaattctgtgtcacatacgatgatggcatttctggaaattccttcaggtgctctcaagccctgctgcagagatccttttcagagcacacactgttccagcccatctgtctcaccctctcctgttgtatccagctccacgacaaacttctgccttccccaacacctttgtgcctttgcatatggtgttttcttgcccattttctgctcgactcgcccctgattttcaagttcaagacttaactcagggttcaggtcttccaggaggccttacttatgtcgtcagtctggggaactctccatgtgcttctatcactgtgcggttacctctttcacagcccttttaaagttctatcttccctttcccaccttttttgaccttccactagaccatgagcacctgggcggaaagccatatatcttattaagctttatatctgctacctggccgagggcctaattcatagtggagaataaatagtcaattgaataaatgaataaatatctccaccatcgtactaatcttaatcctccctgcccactcccaccactgaaaatgcaacattgtacacatcactggttgttgggagggacttaccttggaaagttgctattctaggaaagagaaaccttcatattcctggaaacagcaggtagtttccagtgctggcaatgaattccccagaactgctgttttggattttttcttgcctggcagctgttgggagcagggtgcagtgaggatggggtgagagtgggcagtttcttgtgcagatttgcctttctttcatcctggggctgacttgcagctccacacccatccatctctcaaatttcacagagggtaaaataggcatttggagagaaagaactctggcctgattcctttctctcccacaaatgtcctttattcataaaacaggaataataattcctgtatctcccaactacatggaagctgcagccctcacagaagaagatgatctgagaaattctttgatttcctcagtacagttatacccatgcatcataatactttaagcctggaaggcatcttaaaaataatgcaacagtcaaacctaattttacagagaaactgacatgaaatcacgcagctaatcatgataaagctgggtggaaaacttatcttgatgggcagtacaggaagatgcagtagaccttaagatgtcctgaaagtttcttatctcaggggaaactcccaggtaggctttatgtcagggacacagaaaaatgctccctgaaagtcaaaatattcgggctagacagacaaattcctgtaagtgtggtttgtctgggaaccacagatgtcactaatcctggtttgctccagagttctttttgttcactcctaccccccatcaccatttgattgatctccttaccctgtaatttccccttcttgtcgcttacctgcagtatctttcccacccaggcatgccttattctttctaaaggaaagtatgaatggagaggggaaagcttgggaaactgatagatttccttggatgccaaaacacctccatagcctgtctgcccggccctatgtggaaacagcattgagtttcaagtcctttatgcctccacccagggatagccacttggaatccacatggcaattgtgaaacaagcaggaaatgcgtaattgtcagaattttgtggggaaaggactagggaataaggaaaacaaagatcttccttgtgttttagagctgtcagctagaggagcacctgcttgagtctgatgccatctaatggtcccagaagaaactgggttttgaacctagagttccatggactcttaggaattagactcctactactactaagcattcactggtgcttactatgtgctattgctgtgccaagtatctgaaacctgtcttcttaccttatttttcaagataattctatgtggcaggtattactatctcaattctaagagtgagaaaatggagttttagaaacatttactaacttgcctgggtcacatagctaaggaagaggtggacttgcccagctttgcataaaactcctcaaaagagttgcctatactccctgactccacttatcttcctactatcctctttttaaaatatattatttatttatttaaataagcaatatatgaatgtggtttgaaattcaaaagacacaaagaagtatacagaggaaagcctcactctcaatccttctcaaggtttgctaattcctcttgcataggcaatccgttcttccagctttgtgtttatctttccagagaagtttactgtgtattaagcaaatatgtatatctttattcttgctcagtattttcgcaaacagcagctgtctaagttcactgttctgaactttattttttaaattaaaaatatatggctatgtagtattcta

SEQ ID NO: 194511 - DNA, 2497 bp, Homo sapiens; identical to SEQ ID NO: 194509
  Payload ID: 18437
  Gene Name: transporter 2, ATP-binding cassette, sub-family B (MDR/TAP)
  Uniprot ID: Q03519
  ENST ID: ENST00000383240
  CDS Start-End: 80-2041

SEQ ID NO: 194512 - DNA, 2497 bp, Homo sapiens
  Payload ID: 18437
  Gene Name: transporter 2, ATP-binding cassette, sub-family B (MDR/TAP)
  Uniprot ID: Q03519
  ENST ID: ENST00000426977
  CDS Start-End: 80-2041
gaggttgggagagacggagcggacctcagcgctgaagcagaagcccccggagctgcggtctccccgccgcggctgagccatgcggctccctgacctgagaccctggacctccctgctgctggtggacgcggctttactgtggctgcttcagggccctctggggactttgcttcctcaagggctgccaggactatggctggaggggaccctgcggctgggagggctgtgggggctgctaaagctaagagggctgctgggatttgtggggacactgctgctcccgctctgtctggccacccccctgactgtctccctgagagccctggtcgcgggggcctcacgtgctcccccagccagagtcgcttcagccccttggagctggctgctggtggggtacggggctgcggggctcagctggtcactgtgggctgttctgagccctcctggagcccaggagaaggagcaggaccaggtgaacaacaaagtcttgatgtggaggctgctgaagctctccaggccggacctgcctctcctcgttgccgccttcttcttccttgtccttgctgttttgggtgagacattaatccctcactattctggtcgtgtgattgacatcctgggaggtgattttgacccccatgcctttgccagtgccatcttcttcatgtgcctcttctcctttggcagctcactgtctgcaggctgccgaggaggctgcttcacctacaccatgtctcgaatcaacttgcggatccgggagcagcttttctcctccctgctgcgccaggacctcggtttcttccaggagactaagacaggggagctgaactcacggctgagctcggataccaccctgatgagtaactggcttcctttaaatgccaatgtgctcttgcgaagcctggtgaaagtggtggggctgtatggcttcatgctcagcatatcgcctcgactcaccctcctttctctgctgcacatgcccttcacaatagcagcggagaaggtgtacaacacccgccatcaggaagtgcttcgggagatccaggatgcagtggccagggcggggcaggtggtgcgggaagccgttggagggctgcagaccgttcgcagttttggggccgaggagcatgaagtctgtcgctataaagaggcccttgaacaatgtcggcagctgtattggcggagagacctggaacgcgccttgtacctgctcgtaaggagggtgctgcacttgggggtgcagatgctgatgctgagctgtgggctgcagcagatgcaggatggggagctcacccagggcagcctgctttcctttatgatctaccaggagagcgtggggagctatgtgcagaccctggtatacatatatggggatatgctcagcaacgtgggagctgcagagaaggttttctcctacatggaccgacagccaaatctgccttcacctggcacgcttgcccccaccactctgcagggggttgtgaaattccaagacgtctcctttgcatatcccaatcgccctgacaggcctgtgctcaaggggctgacgtttaccctacgtcctggtgaggtgacggcgctggtgggacccaatgggtctgggaagagcacagtggctgccctgctgcagaatctgtaccagcccacagggggacaggtgctgctggatgaaaagcccatctcacagtatgaacactgctacctgcacagccaggtggtttcagttgggcaggagcctgtgctgttctccggttctgtgaggaacaacattgcttatgggctgcagagctgcgaagatgataaggtgatggcggctgcccaggctgcccacgcagatgacttcatccaggaaatggagcatggaatatacacagatgtaggggagaaggggagccagctggctgcgggacagaaacaacgtctggccattgcccgggcccttgtacgagacccgcgggtcctcatcctggatgaggctactagtgccctagatgtgcagtgcgagcaggccaaaaccctttggaagttcatgatattttgaatttcaatggatatttcctgggaataatgagttcaaatgaacgaatatgtggaacaaagcatcaccaacatttattttttcaggatgaggtgatggacaaaaccatcacagggaaattgaggcaaatagtacatgtaaaacaatacttcgggtgagtccacctatcccaaagtcgtatcaaagaagtggctgcagattggagcccaaagcctttggttcctcagtttccaaatggattctcactaggtgggatcatgagtttgctttggacaccccaaattctaactatttcttttgtttcttacatcctttccctcttccccagccccttcccctcatgttacacctcttgctggtttgagacgtcaatcaccactgagaaagaattaaaccagtattttgagctggcaaaattcttagcctagtacaattccttcaattaaactgtagctcaac

SEQ ID NO: 194513 - DNA, 5684 bp, Homo sapiens
  Payload ID: 18437
  Gene Name: transporter 2, ATP-binding cassette, sub-family B (MDR/TAP)
  Uniprot ID: Q03519
  ENST ID: ENST00000419142
  CDS Start-End: 133-2193
gagccctgacgcccgccctggccgagcgtagctggcggaccagagccggtagcgaggttgggagagacggagcggacctcagcgctgaagcagaagcccccggagctgcggtctccccgccgcggctgagccatgcggctccctgacctgagaccctggacctccctgctgctggtggacgcggctttactgtggctgcttcagggccctctggggactttgcttcctcaagggctgccaggactatggctggaggggaccctgcggctgggagggctgtgggggctgctaaagctaagagggctgctgggatttgtggggacactgctgctcccgctctgtctggccacccccctgactgtctccctgagagccctggtcgcgggggcctcacgtgctcccccagccagagtcgcttcagccccttggagctggctgctggtggggtacggggctgcggggctcagctggtcactgtgggctgttctgagccctcctggagcccaggagaaggagcaggaccaggtgaacaacaaagtcttgatgtggaggctgctgaagctctccaggccggacctgcctctcctcgttgccgccttcttcttccttgtccttgctgttttgggtgagacattaatccctcactattctggtcgtgtgattgacatcctgggaggtgattttgacccccatgcctttgccagtgccatcttcttcatgtgcctcttctcctttggcagctcactgtctgcaggctgccgaggaggctgcttcacctacaccatgtctcgaatcaacttgcggatccgggagcagcttttctcctccctgctgcgccaggacctcggtttcttccaggagactaagacaggggagctgaactcacggctgagctcggataccaccctgatgagtaactggcttcctttaaatgccaatgtgctcttgcgaagcctggtgaaagtggtggggctgtatggcttcatgctcagcatatcgcctcgactcaccctcctttctctgctgcacatgcccttcacaatagcagcggagaaggtgtacaacacccgccatcaggaagtgcttcgggagatccaggatgcagtggccagggcggggcaggtggtgcgggaagccgttggagggctgcagaccgttcgcagttttggggccgaggagcatgaagtctgtcgctataaagaggcccttgaacaatgtcggcagctgtattggcggagagacctggaacgcgccttgtacctgctcataaggagggtgctgcacttgggggtgcagatgctgatgctgagctgtgggctgcagcagatgcaggatggggagctcacccagggcagcctgctttcctttatgatctaccaggagagcgtggggagctatgtgcagaccctggtatacatatatggggatatgctcagcaacgtgggagctgcagagaaggttttctcctacatggaccgacagccaaatctgccttcacctggcacgcttgcccccaccactctgcagggggttgtgaaattccaagacgtctcctttgcatatcccaatcgccctgacaggcctgtgctcaaggggctgacgtttaccctacgtcctggtgaggtgacggcgctggtgggacccaatgggtctgggaagagcacagtggctgccctgctgcagaatctgtaccagcccacagggggacaggtgctgctggatgaaaagcccatctcacagtatgaacactgctacctgcacagccaggtggtttcagttgggcaggagcctgtgctgttctccggttctgtgaggaacaacattacttatgggctgcagagctgcgaagatgataaggtgatggcggctgcccaggctgcccacgcagatgacttcatccaggaaatggagcatggaatatacacagatgtaggggagaagggaagccagctggctgcgggacagaaacaacgtctggccattgcccgggcccttgtacgagacccgcgggtcctcatcctggatgaggctactagtgccctagatgtgcagtgcgagcaggccctgcaggactggaattcccgtggggatcgcacagtgctggtgattgctcacaggctgcagacagttcagcgcgcccaccagatcctggtgctccaggagggcaagctgcagaagcttgcccagctctaggagggacaggacctctattcccgcctggtgcagcagcggctgatggactgaggccccagggatactgggccctcttctcaggggcgtctccaggacccagagctgttcctgctttgagtttccctagagctgtgcggccagatagctgttcctgagttgcaggcacgatggagatttggacactgtgtgcttttggtggggtagagaggtggggtggggtggggtgggggctgtctgtgtccaggaaacttaattccctggtgactagagctttgcctggtgatgaggagtattttgtggcataatacatatattttaaaatattttccttcttacatgaactgtatacattcatatagaaaatttagacaatataaaaaagtacaaagaagaaaagtaaaagtacccattgtttcacttcctggagataaccatagttgctattttgctgcctgtcccatcagtcgtttatctgttgtttgagatagaaattaaccaaaaatgacataaatattcatgagattgccttcctatatccttccttgttcctaccagtgtctgctattttgaagaagctagggtctggagggacagagaacagttccctgattaacagtattaatagcgacattggtaacagctaccatttatagagttttaatgggagtaggagctatgctaagtgtttttcatgtattatcgtttttaatcattatccccaaccctatgaggttggttattatccccattttacagatgaggaaactgaagctcaaagaggctcaatgactttcccaaggtggtcgtagtggtggagttggagtttgaacacaggcctgaccctagagtccacaccctgacccaatcaattatattgcatcttgggtccataaaccctaatccataatcccatcaagaaaagctctgctgctcttagctctaaataattcagaatctattctcttctctccagtcccgttgttatagtcttcactcatagacttaagatgatcccatcaccagagaggtttctctaccattagcttccctcttccggccattcttcacaaagtcatttttctaaattctgtgtcacatacgatgatggcatttctggaaattccttcaggtgctctcaagccctgctgcagagatccttttcagagcacacactgttccagcccatctgtctcaccctctcctgttgtatccagctccacgacaaacttctgccttccccaacacctttgtgcctttgcatatggtgttttcttgcccattttctgctcgactcgcccctgattttcaagttcaagacttaactcagggttcaggtcttccaggaggccttacttatgtcgtcagtctggggaactctccatgtgcttctatcactgtgcggttacctctttcacagcccttttaaagttctatcttccctttcccaccttttttgaccttccactagaccatgagcacctgggcggaaagccatatatcttattaagctttatatctgctacctggccgagggcctaattcatagtggagaataaatagtcaattgaataaatgaataaatatctccaccatcgtactaatcttaatcctccctgcccactcccaccactgaaaatgcaacattgtacacatcactggttgttgggagggacttaccttggaaagttgctattctaggaaagagaaaccttcatattcctggaaacagcaggtagtttccagtgctggcaatgaattccccagaactgctgttttggattttttcttgcctggcagctgttgggagcagggtgcagtgaggatggggtgagagtgggcagtttcttgtgcagatttgcctttctttcatcctggggctgacttgcagctccacacccatccatctctcaaatttcacagagggtaaaataggcatttggagagaaagaactctggcctgattcctttctctcccacaaatgtcctttattcataaaacaggaataataattcctgtatctcccaactacatggaagctgcagccctcacagaagaagatgatctgagaaattctttgatttcctcagtacagttatacccatgcatcataatactttaagcctggaaggcatcttaaaaataatgcaacagtcaaacctaattttacagagaaactgacatgaaatcacgcagctaatcatgataaagctgggtggaaaacttatcttgatgggcagtacaggaagatgcagtagaccttaagatgtcctgaaagtttcttatctcaggggaaactcccaggtaggctttatgtcagggacacagaaaaatgctccctgaaagtcaaaatattcgggctagacagacaaattcctgtaagtgtggtttgtctgggaaccacagatgtcactaatcctggtttgctccagagttctttttgttcactcctaccccccatcaccatttgattgatctccttaccctgtaatttccccttcttgtcgcttacctgcagtatctttcccacccaggcatgccttattctttctaaaggaaagtatgaatggagaggggaaagcttgggaaactgatagatttccttggatgccaaaacacctccatagcctgtctgcccggccctatgtggaaacagcattgagtttcaagtcctttatgcctccacccagggatagccacttggaatccacatggcaattgtgaaacaagcaggaaatgcgtaattgtcagaattttgtggggaaaggactagggaataaggaaaacaaagatcttccttgtgttttagagctgtcagctagaggagcacctgcttgagtctgatgccatctaatggtcccagaagaaactgggttttgaacctagagttccatggactcttaggaattagactactactactactaagcattcactggtgcttactatgtgctattgctgtgccaagtatctgaaacctgtcttcttaccttatttttcaagataattctatgtggcaggtattactatctcaattctaagagtgagaaaatggagttttagaaacatttactaacttgcctgggtcacatagctaaggaagaggtggacttgcccagctttgcataaaactcctcaaaagagttgcctatactccctgactccacttatcttcctactatcctctttttaaaatatattatttatttatttaaataagcaatatatgaatgtggtttgaaattcaaaagacacaaagaagtatacagaggaaagcctcactctcaatccttctcaaggtttgctaattcctcttgcataggcaatccgttcttccagctttgtgtttatctttccagagaagtttactgtgtattaagcaaatatgtatatctttattcttgctcagtattttcgcaaacagcagctgtctaagttcactgttctgaactttattttttaaattaaaaatatatggctatgtagtattcta

SEQ ID NO: 194514 - DNA, 2497 bp, Homo sapiens; identical to SEQ ID NO: 194512
  Payload ID: 18437
  Gene Name: transporter 2, ATP-binding cassette, sub-family B (MDR/TAP)
  Uniprot ID: Q03519
  ENST ID: ENST00000451907
  CDS Start-End: 80-2041

SEQ ID NO: 194515 - DNA, 5511 bp, Homo sapiens
  Payload ID: 18437
  Gene Name: transporter 2, ATP-binding cassette, sub-family B (MDR/TAP)
  ENST ID: ENST00000455842
  CDS Start-End: 133-2244
gagccctgacgcccgccctggccgagcgtagctggcggaccagagccggtagcgaggttgggagagacggagcggacctcagcgctgaagcagaagcccccggagctgcggtctccccgccgcggctgagccatgcggctccctgacctgagaccctggacctccctgctgctggtggacgcggctttactgtggctgcttcagggccctctggggactttgcttcctcaagggctgccaggactatggctggaggggaccctgcggctgggagggctgtgggggctgctaaagctaagagggctgctgggatttgtggggacactgctgctcccgctctgtctggccacccccctgactgtctccctgagagccctggtcgcgggggcctcacgtgctcccccagccagagtcgcttcagccccttggagctggctgctggtggggtacggggctgcggggctcagctggtcactgtgggctgttctgagccctcctggagcccaggagaaggagcaggaccaggtgaacaacaaagtcttgatgtggaggctgctgaagctctccaggccggacctgcctctcctcgttgccgccttcttcttccttgtccttgctgttttgggtgagacattaatccctcactattctggtcgtgtgattgacatcctgggaggtgattttgacccccatgcctttgccagtgccatcttcttcatgtgcctcttctcctttggcagctcactgtctgcaggctgccgaggaggctgcttcacctacaccatgtctcgaatcaacttgcggatccgggagcagcttttctcctccctgctgcgccaggacctcggtttcttccaggagactaagacaggggagctgaactcacggctgagctcggataccaccctgatgagtaactggcttcctttaaatgccaatgtgctcttgcgaagcctggtgaaagtggtggggctgtatggcttcatgctcagcatatcgcctcgactcaccctcctttctctgctgcacatgcccttcacaatagcagcggagaaggtgtacaacacccgccatcaggaagtgcttcgggagatccaggatgcagtggccagggcggggcaggtggtgcgggaagccgttggagggctgcagaccgttcgcagttttggggccgaggagcatgaagtctgtcgctataaagaggcccttgaacaatgtcggcagctgtattggcggagagacctggaacgcgccttgtacctgctcgtaaggagggtgctgcacttgggggtgcagatgctgatgctgagctgtgggctgcagcagatgcaggatggggagctcacccagggcagcctgctttcctttatgatctaccaggagagcgtggggagctatgtgcagaccctggtatacatatatggggatatgctcagcaacgtgggagctgcagagaaggttttctcctacatggaccgacagccaaatctgccttcacctggcacgcttgcccccaccactctgcagggggttgtgaaattccaagacgtctcctttgcatatcccaatcgccctgacaggcctgtgctcaaggggctgacgtttaccctacgtcctggtgaggtgacggcgctggtgggacccaatgggtctgggaagagcacagtggctgccctgctgcagaatctgtaccagcccacagggggacaggtgctgctggatgaaaagcccatctcacagtatgaacactgctacctgcacagccaggtggtttcagttgggcaggagcctgtgctgttctccggttctgtgaggaacaacattgcttatgggctgcagagctgcgaagatgataaggtgatggcggctgcccaggctgcccacgcagatgacttcatccaggaaatggagcatggaatatacacagatgtaggggagaaggggagccagctggctgcgggacagaaacaacgtctggccattgcccgggcccttgtacgagacccgcgggtcctcatcctggatgaggctactagtgccctagatgtgcagtgcgagcaggccctgcaggactggaattcccgtggggatcgcacagtgctggtgattgctcacaggctgcaggcagttcagcgcgcccaccagatcctggtgctccaggagggcaagctgcagaagcttgcccagctccaggagggacaggacctctattcccgcctggttcagcagcggctgatggactgaggccccagggatactgggccctcttctcaggggcgtctccaggacccagagctgttcctgctttgagtttccctagagctgtgcggccagatagctgttcctgagttgcaagcacgatggagatttggacactgtgtgcttttggtggggtggagaggtggggtggggtggggtgtggtggggtggaggctgtctgtgtccaggaaacttaattccctggtgactagagctttgcctggtgatgaggagtattttgtggcataatacatatattttaaaatattttccttcttacgtgaactgtatacattcatatagaaaatttagacaatataaaaaagtacaaagaagaaaagtaaaagtacccattgtttcacttcctggagataaccatagttgctattttgctgcctgttccatcagtcgtttatctgttgtttgagatagaaattaaccaaaaatgacataaatattcatgagattgccttcctatatccctccttgttcctaccagtgtctgctattttgaagaagctagggtctggagggacagagaacagttccctgattaacagtattaataatgacattggtaacagctaccatttatagagttttaatgtgagtaggagctatgctaagtgtttttcatgtattatcgtttttaatcattatctccaaccctatgaggttggttattatccccattttacagatgaggaaactgaagctcaaagaggctcaatgactttcccaaggtggtcgtagtggtggagttggagtttgaacacaggcctgaccctagagtccacaccctgacccaatcaattatattgcatcttgggtccataaaccctaatccataatcccatcaagaaaagctctgctgctcttagctctaaataattcagaatctattctcttctctccagtcccgttgttatagtcttcactcatagacagcccatctgtctcaccctctcctgttgtatccagctccacgacaaacttctgccttccccaacacctttgtgcctttgcatatggtgttttcttgcccattttctgctcgactcgcccctgattttcaagttcaagacttaactcagggttcaggtcttccaggaggccttacttatgtcgtcagtctggggaactctccatgtgcttctatcactgtgcggttacctctttcacagcccttttaaagttctatcttccctttcccaccttttttgaccttccactagaccatgagcacctgggcggaaagccatatatcttattaagctttatatctgctacctggccgagggcctaattcatagtggagaataaatagtcaattgaataaatgaataaatatctccaccatcgtactaatcttaatcctccctgcccactcccaccactgaaaatgcaacattgtacacatcactggttgttgggagggacttaccttggaaagttgctattctaggaaagagaaaccttcatattcctggaaacagcaggtagtttccagtgctggcaatgaattccccagaactgctgttttggattttttcttgcctggcagctgttgggagcagggtgcagtgaggatggggtgagagtgggcagtttcttgtgcagatttgcctttctttcatcctggggctgacttgcagctccacacccatccatctctcaaatttcacagagggtaaaataggcatttggagagaaagaactctggcctgattcctttctctcccacaaatgtcctttattcataaaacaggaatagtaattcctgtatctcccaactacatggaagctgcagccctcacagaagaagatgatctgagaaattctttgatttcctcagtacagttatacccatgcatcataatactttaagcctggaaggcatcttaaaaataatgcaacagtcaaacctaattttacagagaaactgacatgaaatcacgcagctaatcatgataaagctgggtggaaaacttatcttgatgggcagtacaggaagatgcagtagaccttaagatgtcctgaaagtttcttatctcaggggaaactcccaggtaggctttatgtcagggacacagaaaaatgctccctgaaagtcaaaatattcgggctagacagacaaattcctgtaagtgtggtttgtctgggaaccacagatgtcactaatcctggtttgctccagagttctttttgttcactcctaccccccatcaccatttgattgatctccttaccctgtaatttccccttcttgtcgcttacctgcagtatctttcccacccaggcatgccttattctttctaaaggaaagtatgaatggagaggggaaagcttgggaaactgatagatttccttggatgccaaaacacctccatagcctgtctgcccggccctatgtggaaacagcattgagtttcaagtcctttatgcctccacccagggatagccacttggaatccacatggcaattgtgaaacaagcaggaaatgcgtaattgtcagaattttgtggggaaaggactagggaataaggaaaacaaagatcttccttgtgttttagagctgtcagctagaggagcacctgcttgagtctgatgccatctaatggtcccagaagaaactgggttttgaacctagagttccatggactcttaggaattagactactactactactaagcattcactggtgcttactatgtgctattgctgtgccaagtatctgaaacctgtcttcttaccttatttttcaagataattctatgtggcaggtattactatctcaattctaagagtgagaaaatggagttttagaaacatttactaacttgcctgggtcacatagctaaggaagaggtggacttgcccagctttgcataaaactcctcaaaagagttgcctatactccctgattccacttatcttcctactatcctctttttaaaatatattatttatttatttaaataagcaatatatgaatgtggtttgaaattcaaaagacacaaagaagtatacagaggaaagcctcactctcaatccttctcaaggtttgctaattcctcttgcataggcaatccgttcttccagctttgtgtttatctttccagagaagtttactgtgtattaagcaaatatgtatatctttattcttgctcagtattttcgcaaacagcagctgtctaagttcactgttctgaactttattttttaaattaaaaatatatggctatgtagt

SEQ ID NO: 194516 - DNA, 5684 bp, Homo sapiens
  Payload ID: 18437
  Gene Name: transporter 2, ATP-binding cassette, sub-family B (MDR/TAP)
  Uniprot ID: Q03519
  ENST ID: ENST00000443713
  CDS Start-End: 133-2193
gagccctgacgcccgccctggccgagcgtagctggcggaccagagccggtagcgaggttgggagagacggagcggacctcagcgctgaagcagaagtccccggagctgcggtctccccgccgcggctgagccatgcggctccctgacctgagaccctggacctccctgctgctggtggacgcggctttactgtggctgcttcagggccctctggggactttgcttcctcaagggctgccaggactatggctggaggggaccctgcggctgggagggctgtgggggctgctaaagctaagagggctgctgggatttgtggggacactgctgctcccgctctgtctggccacccccctgactgtctccctgagagccctggtcgcgggggcctcacgtgctcccccagccagagtcgcttcagccccttggagctggctgctggtggggtacggggctgcggggctcagctggtcactgtgggctgttctgagccctcctggagcccaggagaaggagcaggaccaggtgaacaacaaagtcttgatgtggaggctgctgaagctctccaggccggacctgcctctcctcgttgccgccttcttcttccttgtccttgctgttttgggtgagacattaatccctcactattctggtcgtgtgattgacatcctgggaggtgattttgacccccatgcctttgccagtgccatcttcttcatgtgcctcttctcctttggcagctcactgtctgcaggctgccgaggaggctgcttcacctacaccatgtctcgaatcaacttgcggatccgggagcagcttttctcctccctgctgcgccaggacctcggtttcttccaggagactaagacaggggagctgaactcacggctgagctcggataccaccctgatgagtaactggcttcctttaaatgccaatgtgctcttgcgaagcctggtgaaagtggtggggctgtatggcttcatgctcagcatatcgcctcgactcaccctcctttctctgctgcacatgcccttcacaatagcagcggagaaggtgtacaacacccgccatcaggaagtgcttcgggagatccaggatgcagtggccagggcggggcaggtggtgcgggaagccgttggagggctgcagaccgttcgcagttttggggccgaggagcatgaagtctgtcgctataaagaggcccttgaacaatgtcggcagctgtattggcggagagacctggaacgcgccttgtacctgctcgtaaggagggtgctgcacttgggggtgcagatgctgatgctgagctgtgggctgcagcagatgcaggatggggagctcacccagggcagcctgctttcctttatgatctaccaggagagcgtggggagctatgtgcagaccctggtatacatatatggggatatgctcagcaatgtgggagctgcagagaaggttttctcctacatggaccgacagccaaatctgccttcacctggcacgcttgcccccaccactctgcagggggttgtgaaattccaagacgtctcctttgcatatcccaatcgccctgacaggcctgtgctcaaggggctgacgtttaccctacgtcctggtgaggtgacggcgctggtgggacccaatgggtctgggaagagcacagtggctgccctgctgcagaatctgtaccagcccacagggggacaggtgctgctggatgaaaagcccatctcacagtatgaacactgctacctgcacagccaggtggtttcagttgggcaggagcctgtgctgttctccggttctgtgaggaacaacattgcttatgggctgcagagctgcgaagatgataaggtgatggcggctgcccaggctgcccacgcagatgacttcatccaggaaatggagcatggaatatacacagatgtaggggagaagggaagccagctggctgcgggacagaaacaacgtctggccattgcccgggcccttgtacgagacccgcgggtcctcatcctggatgaggctactagtgccctagatgtgcagtgcgagcaggccctgcaggactggaattcccgtggggatcgcacagtgctggtgattgctcacaggctgcagacagttcagcgcgcccaccagatcctggtgctccaggagggcaagctgcagaagcttgcccagctctaggagggacaggacctctattcccgcctggtgcagcagcggctgatggactgaggccccagggatactgggccctcttctcaggggcgtctccaggacccagagctgttcctgctttgagtttccctagagctgtgcggccagatagctgttcctgagttgcaggcacgatggagatttggacactgtgtgcttttggtggggtagagaggtggggtggggtggggtgggggctgtctgtgtccaggaaacttaattccctggtgactagagctttgcctggtgatgaggagtattttgtggcataatacatatattttaaaatattttccttcttacatgaactgtatacattcatatagaaaatttagacaatataaaaaagtacaaagaagaaaagtaaaagtacccattgtttcacttcctggagataaccatagttgctattttgctgcctgtcccatcagtcgtttatctgttgtttgagatagaaattaaccaaaaatgacataaatattcatgagattgccttcctatatccttccttgttcctaccagtgtctgctattttgaagaagctagggtctggagggacagagaacagttccctgattaacagtattaatagcgacattggtaacagctaccatttatagagttttaatgggagtaggagctatgctaagtgtttttcatgtattatcgtttttaatcattatccccaaccctatgaggttggttattatccccattttacagatgaggaaactgaagctcaaagaggctcaatgactttcccaaggtggtcgtagtggtggagttggagtttgaacacaggcctgaccctagagtccacaccctgacccaatcaattatattgcatcttgggtccataaaccctaatccataatcccatcaagaaaagctctgctgctcttagctctaaataattcagaatctattctcttctctccagtcccgttgttatagtcttcactcatagacttaagatgatcccatcaccagagaggtttctctaccattagcttccctcttccggccattcttcacaaagtcatttttctaaattctgtgtcacatacgatgatggcatttctggaaattccttcaggtgctctcaagccctgctgcagagatccttttcagagcacacactgttccagcccatctgtctcaccctctcctgttgtatccagctccacgacaaacttctgccttccccaacacctttgtgcctttgcatatggtgttttcttgcccattttctgctcgactcgcccctgattttcaagttcaagacttaactcagggttcaggtcttccaggaggccttacttatgtcgtcagtctggggaactctccatgtgcttctatcactgtgcggttacctctttcacagcccttttaaagttctatcttccctttcccaccttttttgaccttccactagaccatgagcacctgggcggaaagccatatatcttattaagctttatatctgctacctggccgagggcctaattcatagtggagaataaatagtcaattgaataaatgaataaatatctccaccatcgtactaatcttaatcctccctgcccactcccaccactgaaaatgcaacattgtacacatcactggttgttgggagggacttaccttggaaagttgctattctaggaaagagaaaccttcatattcctggaaacagcaggtagtttccagtgctggcaatgaattccccagaactgctgttttggattttttcttgcctggcagctgttgggagcagggtgcagtgaggatggggtgagagtgggcagtttcttgtgcagatttgcctttctttcatcctggggctgacttgcagctccacacccatccatctctcaaatttcacagagggtaaaataggcatttggagagaaagaactctggcctgattcctttctctcccacaaatgtcctttattcataaaacaggaataataattcctgtatctcccaactacatggaagctgcagccctcacagaagaagatgatctgagaaattctttgatttcctcagtacagttatacccatgcatcataatactttaagcctggaaggcatcttaaaaataatgcaacagtcaaacctaattttacagagaaactgacatgaaatcacgcagctaatcatgataaagctgggtggaaaacttatcttgatgggcagtacaggaagatgcagtagaccttaagatgtcctgaaagtttcttatctcaggggaaactcccaggtaggctttatgtcagggacacagaaaaatgctccctgaaagtcaaaatattcgggctagacagacaaattcctgtaagtgtggtttgtctgggaaccacagatgtcactaatcctggtttgctccagagttctttttgttcactcctaccccccatcaccatttgattgatctccttaccctgtaatttccccttcttgtcgcttacctgcagtatctttcccacccaggcatgccttattctttctaaaggaaagtatgaatggagaggggaaagcttgggaaactgatagatttccttggatgccaaaacacctccatagcctgtctgcccggccctatgtggaaacagcattgagtttcaagtcctttatgcctccacccagggatagccacttggaatccacatggcaattgtgaaacaagcaggaaatgcgtaattgtcagaattttgtggggaaaggactagggaataaggaaaacaaagatcttccttgtgttttagagctgtcagctagaggagcacctgcttgagtctgatgccatctaatggtcccagaagaaactgggttttgaacctagagttccatggactcttaggaattagactactactactactaagcattcactggtgcttactatgtgctattgctgtgccaagtatctgaaacctgtcttcttaccttatttttcaagataattctatgtggcaggtattactatctcaattctaagagtgagaaaatggagttttagaaacatttactaacttgcctgggtcacatagctaaggaagaggtggacttgcccagctttgcataaaactcctcaaaagagttgcctatactccctgactccacttatcttcctactatcctctttttaaaatatattatttatttatttaaataagcaatatatgaatgtggtttgaaattcaaaagacacaaagaagtatacagaggaaagcctcactctcaatccttctcaaggtttgctaattcctcttgcataggcaatccgttcttccagctttgtgtttatctttccagagaagtttactgtgtattaagcaaatatgtatatctttattcttgctcagtattttcgcaaacagcagctgtctaagttcactgttctgaactttattttttaaattaaaaatatatggctatgtagtattcta

SEQ ID NO: 194517 - DNA, 2497 bp, Homo sapiens; identical to SEQ ID NO: 194512
  Payload ID: 18437
  Gene Name: transporter 2, ATP-binding cassette, sub-family B (MDR/TAP)
  Uniprot ID: Q03519
  ENST ID: ENST00000439425
  CDS Start-End: 80-2041

SEQ ID NO: 194518 - DNA, 2497 bp, Homo sapiens
  Payload ID: 18437
  Gene Name: transporter 2, ATP-binding cassette, sub-family B (MDR/TAP)
  Uniprot ID: Q03519
  ENST ID: ENST00000414145
  CDS Start-End: 80-2041
gaggttgggagagacggagcggacctcagcgctgaagcagaagtccccggagctgcggtctccccgccgcggctgagccatgcggctccctgacctgagaccctggacctccctgctgctggtggacgcggctttactgtggctgcttcagggccctctggggactttgcttcctcaagggctgccaggactatggctggaggggaccctgcggctgggagggctgtgggggctgctaaagctaagagggctgctgggatttgtggggacactgctgctcccgctctgtctggccacccccctgactgtctccctgagagccctggtcgcgggggcctcacgtgctcccccagccagagtcgcttcagccccttggagctggctgctggtggggtacggggctgcggggctcagctggtcactgtgggctgttctgagccctcctggagcccaggagaaggagcaggaccaggtgaacaacaaagtcttgatgtggaggctgctgaagctctccaggccggacctgcctctcctcgttgccgccttcttcttccttgtccttgctgttttgggtgagacattaatccctcactattctggtcgtgtgattgacatcctgggaggtgattttgacccccatgcctttgccagtgccatcttcttcatgtgcctcttctcctttggcagctcactgtctgcaggctgccgaggaggctgcttcacctacaccatgtctcgaatcaacttgcggatccgggagcagcttttctcctccctgctgcgccaggacctcggtttcttccaggagactaagacaggggagctgaactcacggctgagctcggataccaccctgatgagtaactggcttcctttaaatgccaatgtgctcttgcgaagcctggtgaaagtggtggggctgtatggcttcatgctcagcatatcgcctcgactcaccctcctttctctgctgcacatgcccttcacaatagcagcggagaaggtgtacaacacccgccatcaggaagtgcttcgggagatccaggatgcagtggccagggcggggcaggtggtgcgggaagccgttggagggctgcagaccgttcgcagttttggggccgaggagcatgaagtctgtcgctataaagaggcccttgaacaatgtcggcagctgtattggcggagagacctggaacgcgccttgtacctgctcgtaaggagggtgctgcacttgggggtgcagatgctgatgctgagctgtgggctgcagcagatgcaggatggggagctcacccagggcagcctgctttcctttatgatctaccaggagagcgtggggagctatgtgcagaccctggtatacatatatggggatatgctcagcaatgtgggagctgcagagaaggttttctcctacatggaccgacagccaaatctgccttcacctggcacgcttgcccccaccactctgcagggggttgtgaaattccaagacgtctcctttgcatatcccaatcgccctgacaggcctgtgctcaaggggctgacgtttaccctacgtcctggtgaggtgacggcgctggtgggacccaatgggtctgggaagagcacagtggctgccctgctgcagaatctgtaccagcccacagggggacaggtgctgctggatgaaaagcccatctcacagtatgaacactgctacctgcacagccaggtggtttcagttgggcaggagcctgtgctgttctccggttctgtgaggaacaacattgcttatgggctgcagagctgcgaagatgataaggtgatggcggctgcccaggctgcccacgcagatgacttcatccaggaaatggagcatggaatatacacagatgtaggggagaagggaagccagctggctgcgggacagaaacaacgtctggccattgcccgggcccttgtacgagacccgcgggtcctcatcctggatgaggctactagtgccctagatgtgcagtgcgagcaggccaaaaccctttggaagttcatgatattttgaatttcaatggatatttcctgggaataatgagttcaaatgaacgaatatgtggaacaaagcatcaccaacatttattttttcaggatgaggtgatggacaaaaccatcacagggaaattgaggcaaatagtacatgtaaaacaatacttcgggtgagtccacctatcccaaagtcgtatcaaagaagtggctgcagattggagcccaaagcctttggttcctcagtttccaaatggattctcactaggtgggatcatgagtttgctttggacaccccaaattctaactatttcttttgtttcttacatcctttccctcttccccagccccttcccctcatgttacacctcttgctggtttgagacgtcaatcaccactgagaaagaattaaaccagtattttgagctggcaaaattcttagcctagtacaattccttcaattaaactgtagctcaac

SEQ ID NO: 194519 - DNA, 5511 bp, Homo sapiens; identical to SEQ ID NO: 194515
  Payload ID: 18437
  Gene Name: transporter 2, ATP-binding cassette, sub-family B (MDR/TAP)
  ENST ID: ENST00000452371
  CDS Start-End: 133-2244

SEQ ID NO: 194520 - DNA, 2497 bp, Homo sapiens
  Payload ID: 18437
  Gene Name: transporter 2, ATP-binding cassette, sub-family B (MDR/TAP)
  ENST ID: ENST00000445986
  CDS Start-End: 80-2041
gaggttgggagagacggagcggacctcagcgctgaagcagaagcccccggagctgcggtctccccgccgcggctgagccatgcggctccctgacctgagaccctggacctccctgctgctggtggacgcggctttactgtggctgcttcagggccctctggggactttgcttcctcaagggctgccaggactatggctggaggggaccctgcggctgggagggctgtgggggctgctaaagctaagagggctgctgggatttgtggggacactgctgctcccgctctgtctggccacccccctgactgtctccctgagagccctggtcgcgggggcctcacgtgctcccccagccagagtcgcttcagccccttggagctggctgctggtggggtacggggctgcggggctcagctggtcactgtgggctgttctgagccctcctggagcccaggagaaggagcaggaccaggtgaacaacaaagtcttgatgtggaggctgctgaagctctccaggccggacctgcctctcctcgttgccgccttcttcttccttgtccttgctgttttgggtgagacattaatccctcactattctggtcgtgtgattgacatcctgggaggtgattttgacccccatgcctttgccagtgccatcttcttcatgtgcctcttctcctttggcagctcactgtctgcaggctgccgaggaggctgcttcacctacaccatgtctcgaatcaacttgcggatccgggagcagcttttctcctccctgctgcgccaggacctcggtttcttccaggagactaagacaggggagctgaactcacggctgagctcggataccaccctgatgagtaactggcttcctttaaatgccaatgtgctcttgcgaagcctggtgaaagtggtggggctgtatggcttcatgctcagcatatcgcctcgactcaccctcctttctctgctgcacatgcccttcacaatagcagcggagaaggtgtacaacacccgccatcaggaagtgcttcgggagatccaggatgcagtggccagggcggggcaggtggtgcgggaagccgttggagggctgcagaccgttcgcagttttggggccgaggagcatgaagtctgtcgctataaagaggcccttgaacaatgtcggcagctgtattggcggagagacctggaacgcgccttgtacctgctcataaggagggtgctgcacttgggggtgcagatgctgatgctgagctgtgggctgcagcagatgcaggatggggagctcacccagggcagcctgctttcctttatgatctaccaggagagcgtggggagctatgtgcagaccctggtatacatatatggggatatgctcagcaacgtgggagctgcagagaaggttttctcctacatggaccgacagccaaatctgccttcacctggcacgcttgcccccaccactctgcagggggttgtgaaattccaagacgtctcctttgcatatcccaatcgccctgacaggcctgtgctcaaggggctgacgtttaccctacgtcctggtgaggtgacggcgctggtgggacccaatgggtctgggaagagcacagtggctgccctgctgcagaatctgtaccagcccacagggggacaggtgctgctggatgaaaagcccatctcacagtatgaacactgctacctgcacagccaggtggtttcagttgggcaggagcctgtgctgttctccggttctgtgaggaacaacattacttatgggctgcagagctgcgaagatgataaggtgatggcggctgcccaggctgcccacgcagatgacttcatccaggaaatggagcatggaatatacacagatgtaggggagaagggaagccagctggctgcgggacagaaacaacgtctggccattgcccgggcccttgtacgagacccgcgggtcctcatcctggatgaggctactagtgccctagatgtgcagtgcgagcaggccaaaaccctttggaagttcatgatattttgaatttcaatggatatttcctgggaataatgagttcaaatgaacgaatatgtggaacaaagcatcaccaacatttattttttcaggatgaggtgatggacaaaaccatcacagggaaattgaggcaaatagtacatgtaaaacaatacttcgggtgagtccacctatcccaaagtcgtatcaaagaagtggctgcagattggagcccaaagcctttggttcctcagtttccaaatggattctcactaggtgggatcatgagtttgctttggacaccccaaattctaactatttcttttgtttcttacatcctttccctcttccccagccccttcccctcatgttacacctcttgctggtttgagacgtcaatcaccactgagaaagaattaaaccagtattttgagctggcaaaattcttagcctagtacaattccttcaattaaactgtagctcaac

SEQ ID NO: 194521 - DNA, 5517 bp, Homo sapiens
  Payload ID: 18437
  Gene Name: transporter 2, ATP-binding cassette, sub-family B (MDR/TAP)
  ENST ID: ENST00000457634
  CDS Start-End: 133-2244
gagccctgacgcccgccctggccgagcgtagctggcggaccagagccggtagcgaggttgggagagacggagcggacctcagcgctgaagcagaagcccccggagctgcggtctccccgccgcggctgagccatgcggctccctgacctgagaccctggacctccctgctgctggtggacgcggctttactgtggctgcttcagggccctctggggactttgcttcctcaagggctgccaggactatggctggaggggaccctgcggctgggagggctgtgggggctgctaaagctaagagggctgctgggatttgtggggacactgctgctcccgctctgtctggccacccccctgactgtctccctgagagccctggtcgcgggggcctcacgtgctcccccagccagagtcgcttcagccccttggagctggctgctggtggggtacggggctgcggggctcagctggtcactgtgggctgttctgagccctcctggagcccaggagaaggagcaggaccaggtgaacaacaaagtcttgatgtggaggctgctgaagctctccaggccggacctgcctctcctcgttgccgccttcttcttccttgtccttgctgttttgggtgagacattaatccctcactattctggtcgtgtgattgacatcctgggaggtgattttgacccccatgcctttgccagtgccatcttcttcatgtgcctcttctcctttggcagctcactgtctgcaggctgccgaggaggctgcttcacctacaccatgtctcgaatcaacttgcggatccgggagcagcttttctcctccctgctgcgccaggacctcggtttcttccaggagactaagacaggggagctgaactcacggctgagctcggataccaccctgatgagtaactggcttcctttaaatgccaatgtgctcttgcgaagcctggtgaaagtggtggggctgtatggcttcatgctcagcatatcgcctcgactcaccctcctttctctgctgcacatgcccttcacaatagcagcggagaaggtgtacaacacccgccatcaggaagtgcttcgggagatccaggatgcagtggccagggcggggcaggtggtgcgggaagccgttggagggctgcagaccgttcgcagttttggggccgaggagcatgaagtctgtcgctataaagaggcccttgaacaatgtcggcagctgtattggcggagagacctggaacgcgccttgtacctgctcgtaaggagggtgctgcacttgggggtgcagatgctgatgctgagctgtgggctgcagcagatgcaggatggggagctcacccagggcagcctgctttcctttatgatctaccaggagagcgtggggagctatgtgcagaccctggtatacatatatggggatatgctcagcaacgtgggagctgcagagaaggttttctcctacatggaccgacagccaaatctgccttcacctggcacgcttgcccccaccactctgcagggggttgtgaaattccaagacgtctcctttgcatatcccaatcgccctgacaggcctgtgctcaaggggctgacgtttaccctacgtcctggtgaggtgacggcgctggtgggacccaatgggtctgggaagagcacagtggctgccctgctgcagaatctgtaccagcccacagggggacaggtgctgctggatgaaaagcccatctcacagtatgaacactgctacctgcacagccaggtggtttcagttgggcaggagcctgtgctgttctccggttctgtgaggaacaacattgcttatgggctgcagagctgcgaagatgataaggtgatggcggctgcccaggctgcccacgcagatgacttcatccaggaaatggagcatggaatatacacagatgtaggggagaaggggagccagctggctgcgggacagaaacaacgtctggccattgcccgggcccttgtacgagacccgcgggtcctcatcctggatgaggctactagtgccctagatgtgcagtgcgagcaggccctgcaggactggaattcccgtggggatcgcacagtgctggtgattgctcacaggctgcaggcagttcagcgcgcccaccagatcctggtgctccaggagggcaagctgcagaagcttgcccagctccaggagggacaggacctctattcccgcctggttcagcagcggctgatggactgaggccccagggatactgggccctcttctcaggggcgtctccaggacccagagctgttcctgctttgagtttccctagagctgtgcggccagatagctgttcctgagttgcaagcacgatggagatttggacactgtgtgcttttggtggggtggagaggtggggtggggtggggtgtggtggggtggaggctgtctgtgtccaggaaacttaattccctggtgactagagctttgcctggtgatgaggagtattttgtggcataatacatatattttaaaatattttccttcttacgtgaactgtatacattcatatagaaaatttagacaatataaaaaagtacaaagaagaaaagtaaaagtacccattgtttcacttcctggagataaccatagttgctattttgctgcctgttccatcagtcgtttatctgttgtttgagatagaaattaaccaaaaatgacataaatattcatgagattgccttcctatatccctccttgttcctaccagtgtctgctattttgaagaagctagggtctggagggacagagaacagttccctgattaacagtattaataatgacattggtaacagctaccatttatagagttttaatgtgagtaggagctatgctaagtgtttttcatgtattatcgtttttaatcattatctccaaccctatgaggttggttattatccccattttacagatgaggaaactgaagctcaaagaggctcaatgactttcccaaggtggtcgtagtggtggagttggagtttgaacacaggcctgaccctagagtccacaccctgacccaatcaattatattgcatcttgggtccataaaccctaatccataatcccatcaagaaaagctctgctgctcttagctctaaataattcagaatctattctcttctctccagtcccgttgttatagtcttcactcatagacagcccatctgtctcaccctctcctgttgtatccagctccacgacaaacttctgccttccccaacacctttgtgcctttgcatatggtgttttcttgcccattttctgctcgactcgcccctgattttcaagttcaagacttaactcagggttcaggtcttccaggaggccttacttatgtcgtcagtctggggaactctccatgtgcttctatcactgtgcggttacctctttcacagcccttttaaagttctatcttccctttcccaccttttttgaccttccactagaccatgagcacctgggcggaaagccatatatcttattaagctttatatctgctacctggccgagggcctaattcatagtggagaataaatagtcaattgaataaatgaataaatatctccaccatcgtactaatcttaatcctccctgcccactcccaccactgaaaatgcaacattgtacacatcactggttgttgggagggacttaccttggaaagttgctattctaggaaagagaaaccttcatattcctggaaacagcaggtagtttccagtgctggcaatgaattccccagaactgctgttttggattttttcttgcctggcagctgttgggagcagggtgcagtgaggatggggtgagagtgggcagtttcttgtgcagatttgcctttctttcatcctggggctgacttgcagctccacacccatccatctctcaaatttcacagagggtaaaataggcatttggagagaaagaactctggcctgattcctttctctcccacaaatgtcctttattcataaaacaggaatagtaattcctgtatctcccaactacatggaagctgcagccctcacagaagaagatgatctgagaaattctttgatttcctcagtacagttatacccatgcatcataatactttaagcctggaaggcatcttaaaaataatgcaacagtcaaacctaattttacagagaaactgacatgaaatcacgcagctaatcatgataaagctgggtggaaaacttatcttgatgggcagtacaggaagatgcagtagaccttaagatgtcctgaaagtttcttatctcaggggaaactcccaggtaggctttatgtcagggacacagaaaaatgctccctgaaagtcaaaatattcgggctagacagacaaattcctgtaagtgtggtttgtctgggaaccacagatgtcactaatcctggtttgctccagagttctttttgttcactcctaccccccatcaccatttgattgatctccttaccctgtaatttccccttcttgtcgcttacctgcagtatctttcccacccaggcatgccttattctttctaaaggaaagtatgaatggagaggggaaagcttgggaaactgatagatttccttggatgccaaaacacctccatagcctgtctgcccggccctatgtggaaacagcattgagtttcaagtcctttatgcctccacccagggatagccacttggaatccacatggcaattgtgaaacaagcaggaaatgcgtaattgtcagaattttgtggggaaaggactagggaataaggaaaacaaagatcttccttgtgttttagagctgtcagctagaggagcacctgcttgagtctgatgccatctaatggtcccagaagaaactgggttttgaacctagagttccatggactcttaggaattagactactactactactaagcattcactggtgcttactatgtgctattgctgtgccaagtatctgaaacctgtcttcttaccttatttttcaagataattctatgtggcaggtattactatctcaattctaagagtgagaaaatggagttttagaaacatttactaacttgcctgggtcacatagctaaggaagaggtggacttgcccagctttgcataaaactcctcaaaagagttgcctatactccctgattccacttatcttcctactatcctctttttaaaatatattatttatttatttaaataagcaatatatgaatgtggtttgaaattcaaaagacacaaagaagtatacagaggaaagcctcactctcaatccttctcaaggtttgctaattcctcttgcataggcaatccgttcttccagctttgtgtttatctttccagagaagtttactgtgtattaagcaaatatgtatatctttattcttgctcagtattttcgcaaacagcagctgtctaagttcactgttctgaactttattttttaaattaaaaatatatggctatgtagtattcta

SEQ ID NO: 194522 - DNA, 5676 bp, Homo sapiens
  Payload ID: 18437
  Gene Name: transporter 2, ATP-binding cassette, sub-family B (MDR/TAP)
  ENST ID: ENST00000619283
  CDS Start-End: 123-2231
gcccgccctggccgagcgtagctggcggaccagagccggtagcgaggttgggagagacggagcggacctcagcgctgaagcagaagcccccggagctgcggtctccccgccgcggctgagccatgcggctccctgacctgagaccctggacctccctgctgctggtggacgcggctttactgtggctgcttcagggccctctggggactttgcttcctcaagggctgccaggactatggctggaggggaccctgcggctgggagggctgtgggggctgctaaagctaagagggctgctgggatttgtggggacactgctgctcccgctctgtctggccacccccctgactgtctccctgagagccctggtcgcgggggcctcacgtgctcccccagccagagtcgcttcagccccttggagctggctgctggtggggtacggggctgcggggctcagctggtcactgtgggctgttctgagccctcctggagcccaggagaaggagcaggaccaggtgaacaacaaagtcttgatgtggaggctgctgaagctctccaggccggacctgcctctcctcgttgccgccttcttcttccttgtccttgctgttttgggtgagacattaatccctcactattctggtcgtgtgattgacatcctgggaggtgattttgacccccatgcctttgccagtgccatcttcttcatgtgcctcttctcctttggcagctcactgtctgcaggctgccgaggaggctgcttcacctacaccatgtctcgaatcaacttgcggatccgggagcagcttttctcctccctgctgcgccaggacctcggtttcttccaggagactaagacaggggagctgaactcacggctgagctcggataccaccctgatgagtaactggcttcctttaaatgccaatgtgctcttgcgaagcctggtgaaagtggtggggctgtatggcttcatgctcagcatatcgcctcgactcaccctcctttctctgctgcacatgcccttcacaatagcagcggagaaggtgtacaacacccgccatcaggaagtgcttcgggagatccaggatgcagtggccagggcggggcaggtggtgcgggaagccgttggagggctgcagaccgttcgcagttttggggccgaggagcatgaagtctgtcgctataaagaggcccttgaacaatgtcggcagctgtattggcggagagacctggaacgcgccttgtacctgctcataaggagggtgctgcacttgggggtgcagatgctgatgctgagctgtgggctgcagcagatgcaggatggggagctcacccagggcagcctgctttcctttatgatctaccaggagagcgtggggagctatgtgcagaccctggtatacatatatggggatatgctcagcaacgtgggagctgcagagaaggttttctcctacatggaccgacagccaaatctgccttcacctggcacgcttgcccccaccactctgcagggggttgtgaaattccaagacgtctcctttgcatatcccaatcgccctgacaggcctgtgctcaaggggctgacgtttaccctacgtcctggtgaggtgacggcgctggtgggacccaatgggtctgggaagagcacagtggctgccctgctgcagaatctgtaccagcccacagggggacaggtgctgctggatgaaaagcccatctcacagtatgaacactgctacctgcacagccaggtggtttcagttgggcaggagcctgtgctgttctccggttctgtgaggaacaacattacttatgggctgcagagctgcgaagatgataaggtgatggcggctgcccaggctgcccacgcagatgacttcatccaggaaatggagcatggaatatacacagatgtaggggagaagggaagccagctggctgcgggacagaaacaacgtctggccattgcccgggcccttgtacgagacccgcgggtcctcatcctggatgaggctactagtgccctagatgtgcagtgcgagcaggccctgcaggactggaattcccgtggggatcgcacagtgctggtgattgctcacaggctgcagacagttcagcgcgcccaccagatcctggtgctccaggagggcaagctgcagaagcttgcccagctcgagggacaggacctctattcccgcctggtgcagcagcggctgatggactgaggccccagggatactgggccctcttctcaggggcgtctccaggacccagagctgttcctgctttgagtttccctagagctgtgcggccagatagctgttcctgagttgcaggcacgatggagatttggacactgtgtgcttttggtggggtagagaggtggggtggggtggggtgggggctgtctgtgtccaggaaacttaattccctggtgactagagctttgcctggtgatgaggagtattttgtggcataatacatatattttaaaatattttccttcttacatgaactgtatacattcatatagaaaatttagacaatataaaaaagtacaaagaagaaaagtaaaagtacccattgtttcacttcctggagataaccatagttgctattttgctgcctgtcccatcagtcgtttatctgttgtttgagatagaaattaaccaaaaatgacataaatattcatgagattgccttcctatatccttccttgttcctaccagtgtctgctattttgaagaagctagggtctggagggacagagaacagttccctgattaacagtattaatagcgacattggtaacagctaccatttatagagttttaatgggagtaggagctatgctaagtgtttttcatgtattatcgtttttaatcattatccccaaccctatgaggttggttattatccccattttacagatgaggaaactgaagctcaaagaggctcaatgactttcccaaggtggtcgtagtggtggagttggagtttgaacacaggcctgaccctagagtccacaccctgacccaatcaattatattgcatcttgggtccataaaccctaatccataatcccatcaagaaaagctctgctgctcttagctctaaataattcagaatctattctcttctctccagtcccgttgttatagtcttcactcatagacttaagatgatcccatcaccagagaggtttctctaccattagcttccctcttccggccattcttcacaaagtcatttttctaaattctgtgtcacatacgatgatggcatttctggaaattccttcaggtgctctcaagccctgctgcagagatccttttcagagcacacactgttccagcccatctgtctcaccctctcctgttgtatccagctccacgacaaacttctgccttccccaacacctttgtgcctttgcatatggtgttttcttgcccattttctgctcgactcgcccctgattttcaagttcaagacttaactcagggttcaggtcttccaggaggccttacttatgtcgtcagtctggggaactctccatgtgcttctatcactgtgcggttacctctttcacagcccttttaaagttctatcttccctttcccaccttttttgaccttccactagaccatgagcacctgggcggaaagccatatatcttattaagctttatatctgctacctggccgagggcctaattcatagtggagaataaatagtcaattgaataaatgaataaatatctccaccatcgtactaatcttaatcctccctgcccactcccaccactgaaaatgcaacattgtacacatcactggttgttgggagggacttaccttggaaagttgctattctaggaaagagaaaccttcatattcctggaaacagcaggtagtttccagtgctggcaatgaattccccagaactgctgttttggattttttcttgcctggcagctgttgggagcagggtgcagtgaggatggggtgagagtgggcagtttcttgtgcagatttgcctttctttcatcctggggctgacttgcagctccacacccatccatctctcaaatttcacagagggtaaaataggcatttggagagaaagaactctggcctgattcctttctctcccacaaatgtcctttattcataaaacaggaataataattcctgtatctcccaactacatggaagctgcagccctcacagaagaagatgatctgagaaattctttgatttcctcagtacagttatacccatgcatcataatactttaagcctggaaggcatcttaaaaataatgcaacagtcaaacctaattttacagagaaactgacatgaaatcacgcagctaatcatgataaagctgggtggaaaacttatcttgatgggcagtacaggaagatgcagtagaccttaagatgtcctgaaagtttcttatctcaggggaaactcccaggtaggctttatgtcagggacacagaaaaatgctccctgaaagtcaaaatattcgggctagacagacaaattcctgtaagtgtggtttgtctgggaaccacagatgtcactaatcctggtttgctccagagttctttttgttcactcctaccccccatcaccatttgattgatctccttaccctgtaatttccccttcttgtcgcttacctgcagtatctttcccacccaggcatgccttattctttctaaaggaaagtatgaatggagaggggaaagcttgggaaactgatagatttccttggatgccaaaacacctccatagcctgtctgcccggccctatgtggaaacagcattgagtttcaagtcctttatgcctccacccagggatagccacttggaatccacatggcaattgtgaaacaagcaggaaatgcgtaattgtcagaattttgtggggaaaggactagggaataaggaaaacaaagatcttccttgtgttttagagctgtcagctagaggagcacctgcttgagtctgatgccatctaatggtcccagaagaaactgggttttgaacctagagttccatggactcttaggaattagactactactactactaagcattcactggtgcttactatgtgctattgctgtgccaagtatctgaaacctgtcttcttaccttatttttcaagataattctatgtggcaggtattactatctcaattctaagagtgagaaaatggagttttagaaacatttactaacttgcctgggtcacatagctaaggaagaggtggacttgcccagctttgcataaaactcctcaaaagagttgcctatactccctgactccacttatcttcctactatcctctttttaaaatatattatttatttatttaaataagcaatatatgaatgtggtttgaaattcaaaagacacaaagaagtatacagaggaaagcctcactctcaatccttctcaaggtttgctaattcctcttgcataggcaatccgttcttccagctttgtgtttatctttccagagaagtttactgtgtattaagcaaatatgtatatctttattcttgctcagtattttcgcaaacagcagctgtctaagttcactgttctgaactttattttttaaattaaaaatatatggctatgtagtattctatttta

SEQ ID NO: 194523 - DNA, 5676 bp, Homo sapiens
  Payload ID: 18437
  Gene Name: transporter 2, ATP-binding cassette, sub-family B (MDR/TAP)
  ENST ID: ENST00000613095
  CDS Start-End: 123-2231
gcccgccctggccgagcgtagctggcggaccagagccggtagcgaggttgggagagacggagcggacctcagcgctgaagcagaagtccccggagctgcggtctccccgccgcggctgagccatgcggctccctgacctgagaccctggacctccctgctgctggtggacgcggctttactgtggctgcttcagggccctctggggactttgcttcctcaagggctgccaggactatggctggaggggaccctgcggctgggagggctgtgggggctgctaaagctaagagggctgctgggatttgtggggacactgctgctcccgctctgtctggccacccccctgactgtctccctgagagccctggtcgcgggggcctcacgtgctcccccagccagagtcgcttcagccccttggagctggctgctggtggggtacggggctgcggggctcagctggtcactgtgggctgttctgagccctcctggagcccaggagaaggagcaggaccaggtgaacaacaaagtcttgatgtggaggctgctgaagctctccaggccggacctgcctctcctcgttgccgccttcttcttccttgtccttgctgttttgggtgagacattaatccctcactattctggtcgtgtgattgacatcctgggaggtgattttgacccccatgcctttgccagtgccatcttcttcatgtgcctcttctcctttggcagctcactgtctgcaggctgccgaggaggctgcttcacctacaccatgtctcgaatcaacttgcggatccgggagcagcttttctcctccctgctgcgccaggacctcggtttcttccaggagactaagacaggggagctgaactcacggctgagctcggataccaccctgatgagtaactggcttcctttaaatgccaatgtgctcttgcgaagcctggtgaaagtggtggggctgtatggcttcatgctcagcatatcgcctcgactcaccctcctttctctgctgcacatgcccttcacaatagcagcggagaaggtgtacaacacccgccatcaggaagtgcttcgggagatccaggatgcagtggccagggcggggcaggtggtgcgggaagccgttggagggctgcagaccgttcgcagttttggggccgaggagcatgaagtctgtcgctataaagaggcccttgaacaatgtcggcagctgtattggcggagagacctggaacgcgccttgtacctgctcgtaaggagggtgctgcacttgggggtgcagatgctgatgctgagctgtgggctgcagcagatgcaggatggggagctcacccagggcagcctgctttcctttatgatctaccaggagagcgtggggagctatgtgcagaccctggtatacatatatggggatatgctcagcaacgtgggagctgcagagaaggttttctcctacatggaccgacagccaaatctgccttcacctggcacgcttgcccccaccactctgcagggggttgtgaaattccaagacgtctcctttgcatatcccaatcgccctgacaggcctgtgctcaaggggctgacgtttaccctacgtcctggtgaggtgacggcgctggtgggacccaatgggtctgggaagagcacagtggctgccctgctgcagaatctgtaccagcccacagggggacaggtgctgctggatgaaaagcccatctcacagtatgaacactgctacctgcacagccaggtggtttcagttgggcaggagcctgtgctgttctccggttctgtgaggaacaacattgcttatgggctgcagagctgcgaagatgataaggtgatggcggctgcccaggctgcccacgcagatgacttcatccaggaaatggagcatggaatatacacagatgtaggggagaagggaagccagctggctgcgggacagaaacaacgtctggccattgcccgggcccttgtacgagacccgcgggtcctcatcctggatgaggctactagtgccctagatgtgcagtgcgagcaggccctgcaggactggaattcccgtggggatcgcacagtgctggtgattgctcacaggctgcagacagttcagcgcgcccaccagatcctggtgctccaggagggcaagctgcagaagcttgcccagctcgagggacaggacctctattcccgcctggtgcagcagcggctgatggactgaggccccagggatactgggccctcttctcaggggcgtctccaggacccagagctgttcctgctttgagtttccctagagctgtgcggccagatagctgttcctgagttgcaggcacgatggagatttggacactgtgtgcttttggtggggtagagaggtggggtggggtggggtgggggctgtctgtgtccaggaaacttaattccctggtgactagagctttgcctggtgatgaggagtattttgtggcataatacatatattttaaaatattttccttcttacatgaactgtatacattcatatagaaaatttagacaatataaaaaagtacaaagaagaaaagtaaaagtacccattgtttcacttcctggagataaccatagttgctattttgctgcctgtcccatcagtcgtttatctgttgtttgagatagaaattaaccaaaaatgacataaatattcatgagattgccttcctatatccttccttgttcctaccagtgtctgctattttgaagaagctagggtctggagggacagagaacagttccctgattaacagtattaatagcgacattggtaacagctaccatttatagagttttaatgggagtaggagctatgctaagtgtttttcatgtattatcgtttttaatcattatccccaaccctatgaggttggttattatccccattttacagatgaggaaactgaagctcaaagaggctcaatgactttcccaaggtggtcgtagtggtggagttggagtttgaacacaggcctgaccctagagtccacaccctgacccaatcaattatattgcatcttgggtccataaaccctaatccataatcccatcaagaaaagctctgctgctcttagctctaaataattcagaatctattctcttctctccagtcccgttgttatagtcttcactcatagacttaagatgatcccatcaccagagaggtttctctaccattagcttccctcttccggccattcttcacaaagtcatttttctaaattctgtgtcacatacgatgatggcatttctggaaattccttcaggtgctctcaagccctgctgcagagatccttttcagagcacacactgttccagcccatctgtctcaccctctcctgttgtatccagctccacgacaaacttctgccttccccaacacctttgtgcctttgcatatggtgttttcttgcccattttctgctcgactcgcccctgattttcaagttcaagacttaactcagggttcaggtcttccaggaggccttacttatgtcgtcagtctggggaactctccatgtgcttctatcactgtgcggttacctctttcacagcccttttaaagttctatcttccctttcccaccttttttgaccttccactagaccatgagcacctgggcggaaagccatatatcttattaagctttatatctgctacctggccgagggcctaattcatagtggagaataaatagtcaattgaataaatgaataaatatctccaccatcgtactaatcttaatcctccctgcccactcccaccactgaaaatgcaacattgtacacatcactggttgttgggagggacttaccttggaaagttgctattctaggaaagagaaaccttcatattcctggaaacagcaggtagtttccagtgctggcaatgaattccccagaactgctgttttggattttttcttgcctggcagctgttgggagcagggtgcagtgaggatggagtgagagtgggcagtttcttgtgcagatttgcctttctttcatcctggggctgacttgcagctccacacccatccatctctcaaatttcacagagggtaaaataggcatttggagagaaagaactctggcctgattcctttctctcccacaaatgtcctttattcataaaacaggaataataattcctgtatctcccaactacatggaagctgcagccctcacagaagaagatgatctgagaaattctttgatttcctcagtacagttatacccatgcatcataatactttaagcctggaaggcatcttaaaaataatgcaacagtcaaacctaattttacagagaaactgacatgaaatcacgcagctaatcatgataaagctgggtggaaaacttatcttgatgggcagtacaggaagatgcagtagaccttaagatgtcctgaaagtttcttatctcaggggaaactcccaggtaggctttatgtcagggacacagaaaaatgctccctgaaagtcaaaatattcgggctagacagacaaattcctgtaagtgtggtttgtctgggaaccacagatgtcactaatcctggtttgctccagagttctttttgttcactcctaccccccatcaccatttgattgatctccttaccctgtaatttccccttcttgtcgcttacctgcagtatctttcccacccaggcatgccttattctttctaaaggaaagtatgaatggagaggggaaagcttgggaaactgatagatttccttggatgccaaaacacctccatagcctgtctgcccggccctatgtggaaacagcattgagtttcaagtcctttatgcctccacccagggatagccacttggaatccacatggcaattgtgaaacaagcaggaaatgcgtaattgtcagaattttgtggggaaaggactagggaataaggaaaacaaagatcttccttgtgttttagagctgtcagctagaggagcacctgcttgagtctgatgccatctaatggtcccagaagaaactgggttttgaacctagagttccatggactcttaggaattagactcctactactactaagcattcactggtgcttactatgtgctattgctgtgccaagtatctgaaacctgtcttcttaccttatttttcaagataattctatgtggcaggtattactatctcaattctaagagtgagaaaatggagttttagaaacatttactaacttgcctgggtcacatagctaaggaagaggtggacttgcccagctttgcataaaactcctcaaaagagttgcctatactccctgactccacttatcttcctactatcctctttttaaaatatattatttatttatttaaataagcaatatatgaatgtggtttgaaattcaaaagacacaaagaagtatacagaggaaagcctcactctcaatccttctcaaggtttgctaattcctcttgcataggcaatccgttcttccagctttgtgtttatctttccagagaagtttactgtgtattaagcaaatatgtatatctttattcttgctcagtattttcgcaaacagcagctgtctaagttcactgttctgaactttattttttaaattaaaaatatatggctatgtagtattctatttta

SEQ ID NO: 194524 - DNA, 5676 bp, Homo sapiens
  Payload ID: 18437
  Gene Name: transporter 2, ATP-binding cassette, sub-family B (MDR/TAP)
  ENST ID: ENST00000620674
  CDS Start-End: 123-2231
gcccgccctggccgagcgtagctggcggaccagagccggtagcgaggttgggagagacggagcggacctcagcgctgaagcagaagtccccggagctgcggtctccccgccgcggctgagccatgcggctccctgacctgagaccctggacctccctgctgctggtggacgcggctttactgtggctgcttcagggccctctggggactttgcttcctcaagggctgccaggactatggctggaggggaccctgcggctgggagggctgtgggggctgctaaagctaagagggctgctgggatttgtggggacactgctgctcccgctctgtctggccacccccctgactgtctccctgagagccctggtcgcgggggcctcacgtgctcccccagccagagtcgcttcagccccttggagctggctgctggtggggtacggggctgcggggctcagctggtcactgtgggctgttctgagccctcctggagcccaggagaaggagcaggaccaggtgaacaacaaagtcttgatgtggaggctgctgaagctctccaggccggacctgcctctcctcgttgccgccttcttcttccttgtccttgctgttttgggtgagacattaatccctcactattctggtcgtgtgattgacatcctgggaggtgattttgacccccatgcctttgccagtgccatcttcttcatgtgcctcttctcctttggcagctcactgtctgcaggctgccgaggaggctgcttcacctacaccatgtctcgaatcaacttgcggatccgggagcagcttttctcctccctgctgcgccaggacctcggtttcttccaggagactaagacaggggagctgaactcacggctgagctcggataccaccctgatgagtaactggcttcctttaaatgccaatgtgctcttgcgaagcctggtgaaagtggtggggctgtatggcttcatgctcagcatatcgcctcgactcaccctcctttctctgctgcacatgcccttcacaatagcagcggagaaggtgtacaacacccgccatcaggaagtgcttcgggagatccaggatgcagtggccagggcggggcaggtggtgcgggaagccgttggagggctgcagaccgttcgcagttttggggccgaggagcatgaagtctgtcgctataaagaggcccttgaacaatgtcggcagctgtattggcggagagacctggaacgcgccttgtacctgctcgtaaggagggtgctgcacttgggggtgcagatgctgatgctgagctgtgggctgcagcagatgcaggatggggagctcacccagggcagcctgctttcctttatgatctaccaggagagcgtggggagctatgtgcagaccctggtatacatatatggggatatgctcagcaatgtgggagctgcagagaaggttttctcctacatggaccgacagccaaatctgccttcacctggcacgcttgcccccaccactctgcagggggttgtgaaattccaagacgtctcctttgcatatcccaatcgccctgacaggcctgtgctcaaggggctgacgtttaccctacgtcctggtgaggtgacggcgctggtgggacccaatgggtctgggaagagcacagtggctgccctgctgcagaatctgtaccagcccacagggggacaggtgctgctggatgaaaagcccatctcacagtatgaacactgctacctgcacagccaggtggtttcagttgggcaggagcctgtgctgttctccggttctgtgaggaacaacattgcttatgggctgcagagctgcgaagatgataaggtgatggcggctgcccaggctgcccacgcagatgacttcatccaggaaatggagcatggaatatacacagatgtaggggagaagggaagccagctggctgcgggacagaaacaacgtctggccattgcccgggcccttgtacgagacccgcgggtcctcatcctggatgaggctactagtgccctagatgtgcagtgcgagcaggccctgcaggactggaattcccgtggggatcgcacagtgctggtgattgctcacaggctgcagacagttcagcgcgcccaccagatcctggtgctccaggagggcaagctgcagaagcttgcccagctcgagggacaggacctctattcccgcctggtgcagcagcggctgatggactgaggccccagggatactgggccctcttctcaggggcgtctccaggacccagagctgttcctgctttgagtttccctagagctgtgcggccagatagctgttcctgagttgcaggcacgatggagatttggacactgtgtgcttttggtggggtagagaggtggggtggggtggggtgggggctgtctgtgtccaggaaacttaattccctggtgactagagctttgcctggtgatgaggagtattttgtggcataatacatatattttaaaatattttccttcttacatgaactgtatacattcatatagaaaatttagacaatataaaaaagtacaaagaagaaaagtaaaagtacccattgtttcacttcctggagataaccatagttgctattttgctgcctgtcccatcagtcgtttatctgttgtttgagatagaaattaaccaaaaatgacataaatattcatgagattgccttcctatatccttccttgttcctaccagtgtctgctattttgaagaagctagggtctggagggacagagaacagttccctgattaacagtattaatagcgacattggtaacagctaccatttatagagttttaatgggagtaggagctatgctaagtgtttttcatgtattatcgtttttaatcattatccccaaccctatgaggttggttattatccccattttacagatgaggaaactgaagctcaaagaggctcaatgactttcccaaggtggtcgtagtggtggagttggagtttgaacacaggcctgaccctagagtccacaccctgacccaatcaattatattgcatcttgggtccataaaccctaatccataatcccatcaagaaaagctctgctgctcttagctctaaataattcagaatctattctcttctctccagtcccgttgttatagtcttcactcatagacttaagatgatcccatcaccagagaggtttctctaccattagcttccctcttccggccattcttcacaaagtcatttttctaaattctgtgtcacatacgatgatggcatttctggaaattccttcaggtgctctcaagccctgctgcagagatccttttcagagcacacactgttccagcccatctgtctcaccctctcctgttgtatccagctccacgacaaacttctgccttccccaacacctttgtgcctttgcatatggtgttttcttgcccattttctgctcgactcgcccctgattttcaagttcaagacttaactcagggttcaggtcttccaggaggccttacttatgtcgtcagtctggggaactctccatgtgcttctatcactgtgcggttacctctttcacagcccttttaaagttctatcttccctttcccaccttttttgaccttccactagaccatgagcacctgggcggaaagccatatatcttattaagctttatatctgctacctggccgagggcctaattcatagtggagaataaatagtcaattgaataaatgaataaatatctccaccatcgtactaatcttaatcctccctgcccactcccaccactgaaaatgcaacattgtacacatcactggttgttgggagggacttaccttggaaagttgctattctaggaaagagaaaccttcatattcctggaaacagcaggtagtttccagtgctggcaatgaattccccagaactgctgttttggattttttcttgcctggcagctgttgggagcagggtgcagtgaggatggggtgagagtgggcagtttcttgtgcagatttgcctttctttcatcctggggctgacttgcagctccacacccatccatctctcaaatttcacagagggtaaaataggcatttggagagaaagaactctggcctgattcctttctctcccacaaatgtcctttattcataaaacaggaataataattcctgtatctcccaactacatggaagctgcagccctcacagaagaagatgatctgagaaattctttgatttcctcagtacagttatacccatgcatcataatactttaagcctggaaggcatcttaaaaataatgcaacagtcaaacctaattttacagagaaactgacatgaaatcacgcagctaatcatgataaagctgggtggaaaacttatcttgatgggcagtacaggaagatgcagtagaccttaagatgtcctgaaagtttcttatctcaggggaaactcccaggtaggctttatgtcagggacacagaaaaatgctccctgaaagtcaaaatattcgggctagacagacaaattcctgtaagtgtggtttgtctgggaaccacagatgtcactaatcctggtttgctccagagttctttttgttcactcctaccccccatcaccatttgattgatctccttaccctgtaatttccccttcttgtcgcttacctgcagtatctttcccacccaggcatgccttattctttctaaaggaaagtatgaatggagaggggaaagcttgggaaactgatagatttccttggatgccaaaacacctccatagcctgtctgcccggccctatgtggaaacagcattgagtttcaagtcctttatgcctccacccagggatagccacttggaatccacatggcaattgtgaaacaagcaggaaatgcgtaattgtcagaattttgtggggaaaggactagggaataaggaaaacaaagatcttccttgtgttttagagctgtcagctagaggagcacctgcttgagtctgatgccatctaatggtcccagaagaaactgggttttgaacctagagttccatggactcttaggaattagactactactactactaagcattcactggtgcttactatgtgctattgctgtgccaagtatctgaaacctgtcttcttaccttatttttcaagataattctatgtggcaggtattactatctcaattctaagagtgagaaaatggagttttagaaacatttactaacttgcctgggtcacatagctaaggaagaggtggacttgcccagctttgcataaaactcctcaaaagagttgcctatactccctgactccacttatcttcctactatcctctttttaaaatatattatttatttatttaaataagcaatatatgaatgtggtttgaaattcaaaagacacaaagaagtatacagaggaaagcctcactctcaatccttctcaaggtttgctaattcctcttgcataggcaatccgttcttccagctttgtgtttatctttccagagaagtttactgtgtattaagcaaatatgtatatctttattcttgctcagtattttcgcaaacagcagctgtctaagttcactgttctgaactttattttttaaattaaaaatatatggctatgtagtattctatttta

SEQ ID NO: 194525 - DNA, 5676 bp, Homo sapiens
  Payload ID: 18437
  Gene Name: transporter 2, ATP-binding cassette, sub-family B (MDR/TAP)
  ENST ID: ENST00000612574
  CDS Start-End: 123-2231
gcccgccctggccgagcgtagctggcggaccagagccggtagcgaggttgggagagacggagcggacctcagcgctgaagcagaagtccccggagctgcggtctccccgccgcggctgagccatgcggctccctgacctgagaccctggacctccctgctgctggtggacgcggctttactgtggctgcttcagggccctctggggactttgcttcctcaagggctgccaggactatggctggaggggaccctgcggctgggagggctgtgggggctgctaaagctaagagggctgctgggatttgtggggacactgctgctcccgctctgtctggccacccccctgactgtctccctgagagccctggtcgcgggggcctcacgtgctcccccagccagagtcgcttcagccccttggagctggctgctggtggggtacggggctgcggggctcagctggtcactgtgggctgttctgagccctcctggagcccaggagaaggagcaggaccaggtgaacaacaaagtcttgatgtggaggctgctgaagctctccaggccggacctgcctctcctcgttgccgccttcttcttccttgtccttgctgttttgggtgagacattaatccctcactattctggtcgtgtgattgacatcctgggaggtgattttgacccccatgcctttgccagtgccatcttcttcatgtgcctcttctcctttggcagctcactgtctgcaggctgccgaggaggctgcttcacctacaccatgtctcgaatcaacttgcggatccgggagcagcttttctcctccctgctgcgccaggacctcggtttcttccaggagactaagacaggggagctgaactcacggctgagctcggataccaccctgatgagtaactggcttcctttaaatgccaatgtgctcttgcgaagcctggtgaaagtggtggggctgtatggcttcatgctcagcatatcgcctcgactcaccctcctttctctgctgcacatgcccttcacaatagcagcggagaaggtgtacaacacccgccatcaggaagtgcttcgggagatccaggatgcagtggccagggcggggcaggtggtgcgggaagccgttggagggctgcagaccgttcgcagttttggggccgaggagcatgaagtctgtcgctataaagaggcccttgaacaatgtcggcagctgtattggcggagagacctggaacgcgccttgtacctgctcgtaaggagggtgctgcacttgggggtgcagatgctgatgctgagctgtgggctgcagcagatgcaggatggggagctcacccagggcagcctgctttcctttatgatctaccaggagagcgtggggagctatgtgcagaccctggtatacatatatggggatatgctcagcaacgtgggagctgcagagaaggttttctcctacatggaccgacagccaaatctgccttcacctggcacgcttgcccccaccactctgcagggggttgtgaaattccaagacgtctcctttgcatatcccaatcgccctgacaggcctgtgctcaaggggctgacgtttaccctacgtcctggtgaggtgacggcgctggtgggacccaatgggtctgggaagagcacagtggctgccctgctgcagaatctgtaccagcccacagggggacaggtgctgctggatgaaaagcccatctcacagtatgaacactgctacctgcacagccaggtggtttcagttgggcaggagcctgtgctgttctccggttctgtgaggaacaacattgcttatgggctgcagagctgcgaagatgataaggtgatggcggctgcccaggctgcccacgcagatgacttcatccaggaaatggagcatggaatatacacagatgtaggggagaagggaagccagctggctgcgggacagaaacaacgtctggccattgcccgggcccttgtacgagacccgcgggtcctcatcctggatgaggctactagtgccctagatgtgcagtgcgagcaggccctgcaggactggaattcccgtggggatcgcacagtgctggtgattgctcacaggctgcagacagttcagcgcgcccaccagatcctggtgctccaggagggcaagctgcagaagcttgcccagctcgagggacaggacctctattcccgcctggtgcagcagcggctgatggactgaggccccagggatactgggccctcttctcaggggcgtctccaggacccagagctgttcctgctttgagtttccctagagctgtgcggccagatagctgttcctgagttgcaggcacgatggagatttggacactgtgtgcttttggtggggtagagaggtggggtggggtggggtgggggctgtctgtgtccaggaaacttaattccctggtgactagagctttgcctggtgatgaggagtattttgtggcataatacatatattttaaaatattttccttcttacatgaactgtatacattcatatagaaaatttagacaatataaaaaagtacaaagaagaaaagtaaaagtacccattgtttcacttcctggagataaccatagttgctattttgctgcctgtcccatcagtcgtttatctgttgtttgagatagaaattaaccaaaaatgacataaatattcatgagattgccttcctatatccttccttgttcctaccagtgtctgctattttgaagaagctagggtctggagggacagagaacagttccctgattaacagtattaatagcgacattggtaacagctaccatttatagagttttaatgggagtaggagctatgctaagtgtttttcatgtattatcgtttttaatcattatccccaaccctatgaggttggttattatccccattttacagatgaggaaactgaagctcaaagaggctcaatgactttcccaaggtggtcgtagtggtggagttggagtttgaacacaggcctgaccctagagtccacaccctgacccaatcaattatattgcatcttgggtccataaaccctaatccataatcccatcaagaaaagctctgctgctcttagctctaaataattcagaatctattctcttctctccagtcccgttgttatagtcttcactcatagacttaagatgatcccatcaccagagaggtttctctaccattagcttccctcttccggccattcttcacaaagtcatttttctaaattctgtgtcacatacgatgatggcatttctggaaattccttcaggtgctctcaagccctgctgcagagatccttttcagagcacacactgttccagcccatctgtctcaccctctcctgttgtatccagctccacgacaaacttctgccttccccaacacctttgtgcctttgcatatggtgttttcttgcccattttctgctcgactcgcccctgattttcaagttcaagacttaactcagggttcaggtcttccaggaggccttacttatgtcgtcagtctggggaactctccatgtgcttctatcactgtgcggttacctctttcacagcccttttaaagttctatcttccctttcccaccttttttgaccttccactagaccatgagcacctgggcggaaagccatatatcttattaagctttatatctgctacctggccgagggcctaattcatagtggagaataaatagtcaattgaataaatgaataaatatctccaccatcgtactaatcttaatcctccctgcccactcccaccactgaaaatgcaacattgtacacatcactggttgttgggagggacttaccttggaaagttgctattctaggaaagagaaaccttcatattcctggaaacagcaggtagtttccagtgctggcaatgaattccccagaactgctgttttggattttttcttgcctggcagctgttgggagcagggtgcagtgaggatggggtgagagtgggcagtttcttgtgcagatttgcctttctttcatcctggggctgacttgcagctccacacccatccatctctcaaatttcacagagggtaaaataggcatttggagagaaagaactctggcctgattcctttctctcccacaaatgtcctttattcataaaacaggaataataattcctgtatctcccaactacatggaagctgcagccctcacagaagaagatgatctgagaaattctttgatttcctcagtacagttatacccatgcatcataatactttaagcctggaaggcatcttaaaaataatgcaacagtcaaacctaattttacagagaaactgacatgaaatcacgcagctaatcatgataaagctgggtggaaaacttatcttgatgggcagtacaggaagatgcagtagaccttaagatgtcctgaaagtttcttatctcaggggaaactcccaggtaggctttatgtcagggacacagaaaaatgctccctgaaagtcaaaatattcgggctagacagacaaattcctgtaagtgtggtttgtctgggaaccacagatgtcactaatcctggtttgctccagagttctttttgttcactcctaccccccatcaccatttgattgatctccttaccctgtaatttccccttcttgtcgcttacctgcagtatctttcccacccaggcatgccttattctttctaaaggaaagtatgaatggagaggggaaagcttgggaaactgatagatttccttggatgccaaaacacctccatagcctgtctgcccggccctatgtggaaacagcattgagtttcaagtcctttatgcctccacccagggatagccacttggaatccacatggcaattgtgaaacaagcaggaaatgcgtaattgtcagaattttgtggggaaaggactagggaataaggaaaacaaagatcttccttgtgttttagagctgtcagctagaggagcacctgcttgagtctgatgccatctaatggtcccagaagaaactgggttttgaacctagagttccatggactcttaggaattagactcctactactactaagcattcactggtgcttactatgtgctattgctgtgccaagtatctgaaacctgtcttcttaccttatttttcaagataattctatgtggcaggtattactatctcaattctaagagtgagaaaatggagttttagaaacatttactaacttgcctgggtcacatagctaaggaagaggtggacttgcccagctttgcataaaactcctcaaaagagttgcctatactccctgactccacttatcttcctactatcctctttttaaaatatattatttatttatttaaataagcaatatatgaatgtggtttgaaattcaaaagacacaaagaagtatacagaggaaagcctcactctcaatccttctcaaggtttgctaattcctcttgcataggcaatccgttcttccagctttgtgtttatctttccagagaagtttactgtgtattaagcaaatatgtatatctttattcttgctcagtattttcgcaaacagcagctgtctaagttcactgttctgaactttattttttaaattaaaaatatatggctatgtagtattctatttta

SEQ ID NO: 194526 - DNA, 5676 bp, Homo sapiens
  Payload ID: 18437
  Gene Name: transporter 2, ATP-binding cassette, sub-family B (MDR/TAP)
  ENST ID: ENST00000620123
  CDS Start-End: 123-2231
gcccgccctggccgagcgtagctggcggaccagagccggtagcgaggttgggagagacggagcggacctcagcgctgaagcagaagtccccggagctgcggtctccccgccgcggctgagccatgcggctccctgacctgagaccctggacctccctgctgctggtggacgcggctttactgtggctgcttcagggccctctggggactttgcttcctcaagggctgccaggactatggctggaggggaccctgcggctgggagggctgtgggggctgctaaagctaagagggctgctgggatttgtggggacactgctgctcccgctctgtctggccacccccctgactgtctccctgagagccctggtcgcgggggcctcacgtgctcccccagccagagtcgcttcagccccttggagctggctgctggtggggtacggggctgcggggctcagctggtcactgtgggctgttctgagccctcctggagcccaggagaaggagcaggaccaggtgaacaacaaagtcttgatgtggaggctgctgaagctctccaggccggacctgcctctcctcgttgccgccttcttcttccttgtccttgctgttttgggtgagacattaatccctcactattctggtcgtgtgattgacatcctgggaggtgattttgacccccatgcctttgccagtgccatcttcttcatgtgcctcttctcctttggcagctcactgtctgcaggctgccgaggaggctgcttcacctacaccatgtctcgaatcaacttgcggatccgggagcagcttttctcctccctgctgcgccaggacctcggtttcttccaggagactaagacaggggagctgaactcacggctgagctcggataccaccctgatgagtaactggcttcctttaaatgccaatgtgctcttgcgaagcctggtgaaagtggtggggctgtatggcttcatgctcagcatatcgcctcgactcaccctcctttctctgctgcacatgcccttcacaatagcagcggagaaggtgtacaacacccgccatcaggaagtgcttcgggagatccaggatgcagtggccagggcggggcaggtggtgcgggaagccgttggagggctgcagaccgttcgcagttttggggccgaggagcatgaagtctgtcgctataaagaggcccttgaacaatgtcggcagctgtattggcggagagacctggaacgcgccttgtacctgctcgtaaggagggtgctgcacttgggggtgcagatgctgatgctgagctgtgggctgcagcagatgcaggatggggagctcacccagggcagcctgctttcctttatgatctaccaggagagcgtggggagctatgtgcagaccctggtatacatatatggggatatgctcagcaacgtgggagctgcagagaaggttttctcctacatggaccgacagccaaatctgccttcacctggcacgcttgcccccaccactctgcagggggttgtgaaattccaagacgtctcctttgcatatcccaatcgccctgacaggcctgtgctcaaggggctgacgtttaccctacgtcctggtgaggtgacggcgctggtgggacccaatgggtctgggaagagcacagtggctgccctgctgcagaatctgtaccagcccacagggggacaggtgctgctggatgaaaagcccatctcacagtatgaacactgctacctgcacagccaggtggtttcagttgggcaggagcctgtgctgttctccggttctgtgaggaacaacattgcttatgggctgcagagctgcgaagatgataaggtgatggcggctgcccaggctgcccacgcagatgacttcatccaggaaatggagcatggaatatacacagatgtaggggagaagggaagccagctggctgcgggacagaaacaacgtctggccattgcccgggcccttgtacgagacccgcgggtcctcatcctggatgaggctactagtgccctagatgtgcagtgcgagcaggccctgcaggactggaattcccgtggggatcgcacagtgctggtgattgctcacaggctgcagacagttcagcgcgcccaccagatcctggtgctccaggagggcaagctgcagaagcttgcccagctcgagggacaggacctctattcccgcctggtgcagcagcggctgatggactgaggccccagggatactgggccctcttctcaggggcgtctccaggacccagagctgttcctgctttgagtttccctagagctgtgcggccagatagctgttcctgagttgcaggcacgatggagatttggacactgtgtgcttttggtggggtagagaggtggggtggggtggggtgggggctgtctgtgtccaggaaacttaattccctggtgactagagctttgcctggtgatgaggagtattttgtggcataatacatatattttaaaatattttccttcttacatgaactgtatacattcatatagaaaatttagacaatataaaaaagtacaaagaagaaaagtaaaagtacccattgtttcacttcctggagataaccatagttgctattttgctgcctgtcccatcagtcgtttatctgttgtttgagatagaaattaaccaaaaatgacataaatattcatgagattgccttcctatatccttccttgttcctaccagtgtctgctattttgaagaagctagggtctggagggacagagaacagttccctgattaacagtattaatagcgacattggtaacagctaccatttatagagttttaatgggagtaggagctatgctaagtgtttttcatgtattatcgtttttaatcattatccccaaccctatgaggttggttattatccccattttacagatgaggaaactgaagctcaaagaggctcaatgactttcccaaggtggtcgtagtggtggagttggagtttgaacacaggcctgaccctagagtccacaccctgacccaatcaattatattgcatcttgggtccataaaccctaatccataatcccatcaagaaaagctctgctgctcttagctctaaataattcagaatctattctcttctctccagtcccgttgttatagtcttcactcatagacttaagatgatcccatcaccagagaggtttctctaccattagcttccctcttccggccattcttcacaaagtcatttttctaaattctgtgtcacatacgatgatggcatttctggaaattccttcaggtgctctcaagccctgctgcagagatccttttcagagcacacactgttccagcccatctgtctcaccctctcctgttgtatccagctccacgacaaacttctgccttccccaacacctttgtgcctttgcatatggtgttttcttgcccattttctgctcgactcgcccctgattttcaagttcaagacttaactcagggttcaggtcttccaggaggccttacttatgtcgtcagtctggggaactctccatgtgcttctatcactgtgcggttacctctttcacagcccttttaaagttctatcttccctttcccaccttttttgaccttccactagaccatgagcacctgggcggaaagccatatatcttattaagctttatatctgctacctggccgagggcctaattcatagtggagaataaatagtcaattgaataaatgaataaatatctccaccatcgtactaatcttaatcctccctgcccactcccaccactgaaaatgcaacattgtacacatcactggttgttgggagggacttaccttggaaagttgctattctaggaaagagaaaccttcatattcctggaaacagcaggtagtttccagtgctggcaatgaattccccagaactgctgttttggattttttcttgcctggcagctgttgggagcagggtgcagtgaggatggggtgagagtgggcagtttcttgtgcagatttgcctttctttcatcctggggctgacttgcagctccacacccatccatctctcaaatttcacagagggtaaaataggcatttggagagaaagaactctggcctgattcctttctctcccacaaatgtcctttattcataaaacaggaataataattcctgtatctcccaactacatggaagctgcagccctcacagaagaagatgatctgagaaattctttgatttcctcagtacagttatacccatgcatcataatactttaagcctggaaggcatcttaaaaataatgcaacagtcaaacctaattttacagagaaactgacatgaaatcacgcagctaatcatgataaagctgggtggaaaacttatcttgatgggcagtacaggaagatgcagtagaccttaagatgtcctgaaagtttcttatctcaggggaaactcccaggtaggctttatgtcagggacacagaaaaatgctccctgaaagtcaaaatattcgggctagacagacaaattcctgtaagtgtggtttgtctgggaaccacagatgtcactaatcctggtttgctccagagttctttttgttcactcctaccccccatcaccatttgattgatctccttaccctgtaatttccccttcttgtcgcttacctgcagtatctttcccacccaggcatgccttattctttctaaaggaaagtatgaatggagaggggaaagcttgggaaactgatagatttccttggatgccaaaacacctccatagcctgtctgcccggccctatgtggaaacagcattgagtttcaagtcctttatgcctccacccagggatagccacttgtaatccacatggcaattgtgaaacaagcaggaaatgcgtaattgtcagaattttgtggggaaaggactagggaataaggaaaacaaagatcttccttgtgttttagagctgtcagctagaggagcacctgcttgagtctgatgccatctaatggtcccagaagaaactgggttttgaacctagagttccatggactcttaggaattagactactactactactaagcattcactggtgcttactatgtgctattgctgtgccaagtatctgaaacctgtcttcttaccttatttttcaagataattctatgtggcaggtattactatctcaattctaagagtgagaaaatggagttttagaaacatttactaacttgcctgggtcacatagctaaggaagaggtggacttgcccagctttgcataaaactcctcaaaagagttgcctatactccctgactccacttatcttcctactatcctctttttaaaatatattatttatttatttaaataagcaatatatgaatgtggtttgaaattcaaaagacacaaagaagtatacagaggaaagcctcactctcaatccttctcaaggtttgctaattcctcttgcataggcaatccgttcttccagctttgtgtttatctttccagagaagtttactgtgtattaagcaaatatgtatatctttattcttgctcagtattttcgcaaacagcagctgtctaagttcactgttctgaactttattttttaaattaaaaatatatggctatgtagtattctatttta

SEQ ID NO: 194527 - DNA, 11183 bp, Homo sapiens
  Payload ID: 18438
  Gene Name: transportin 1
  Uniprot ID: Q92973
  ENST ID: ENST00000337273
  CDS Start-End: 427-3123
acagtctgggcaaccacaccggcgggccgttttgctcacagccccaccgcgccgggcagcgtctgcagctgctgcgtgcgagacccagaggctccggtcagcgcgccggccgcagggagtgcgagcacttgtgagccccgcgccgggccggtgaagtctggtgctgccgagcccgcttagaaagcacggccgcgcgctgtcggacgcaggcccacaggcccagccgacccaggcagcaattttcctagccccgccgccgttgccaaggcgaccgccgccgaatgttcccgccgcgggctccgccccccggccaatcggaccggcgctcggtgaagcccagattctctttgttccgcagccatttcaggccccggacaggaggcagtgccgcttcggccgaaggcccgagcgcccgaggcgtctgggatggtgtgggaccggcaaaccaagatggagtatgagtggaaacctgacgagcaagggcttcagcaaatcctgcagctgttgaaggagtcccagtccccagacaccaccatccagagaaccgtgcaacaaaaactggaacaacttaatcagtatccagactttaacaactacttgatttttgttcttacaaaattaaaatctgaagatgaacccacaagatcattgagtggtcttatcttgaagaataatgtgaaagcacactttcagaacttcccaaatggtgtaacagactttattaaaagtgaatgtttaaataatattggtgactcctctcctctgattagagccactgttggtattttgatcacaactatagcctccaagggagaattgcagaattggcctgacctcttaccaaaactctgtagcctgttggattctgaagattataatacctgtgagggagcatttggtgcccttcagaagatttgtgaagattctgctgagattttagacagtgatgttttagatcgtcctctcaacatcatgattcccaaatttttacagttcttcaagcatagtagtccaaaaataaggtctcacgctgttgcatgtgtcaatcagtttatcatcagtaggactcaagctctaatgttgcacattgattcttttattgagaatctctttgcattagctggtgatgaagaaccagaggtacggaaaaatgtgtgccgagcacttgtgatgttgctcgaagttcgaatggatcgcctgcttcctcacatgcataatatagttgagtacatgctacagaggactcaagatcaagatgaaaatgtggctttagaagcctgtgaattttggctaactttagctgaacagccaatatgcaaagatgtactcgtaaggcatcttcctaagttgattcctgtgttagtgaatggcatgaagtactcagacatagatattatcctacttaagggtgatgttgaagaagacgaaacgattcctgatagtgaacaggatatacggccacgttttcaccgatcgaggacggtggctcagcagcatgatgaagatggaattgaagaggaagatgatgatgatgatgaaattgatgatgatgatacaatttctgactggaatctaagaaaatgttctgctgctgccctggatgttcttgcaaatgtgtatcgtgatgaactgctgccacatattttgccccttttgaaagaattactttttcatcatgaatgggttgttaaagaatcaggcattttggttttaggagcaattgctgaaggttgcatgcagggcatgattccatacttgcctgagcttattcctcaccttattcagtgcctctctgataaaaaggctcttgtgcgttccataacatgctggactcttagccgctatgcacactgggtggtcagccagccgccagacacgtacctgaagccattaatgacagaattgctaaagcgcatcctggacagcaacaagagagtacaagaagctgcctgcagtgcctttgctaccctagaagaggaggcttgtacagaacttgttccttaccttgcttatatacttgataccctggtctttgcatttagtaaataccagcataagaacctgctcattctttacgatgccataggaacattagcagattcagtaggacatcatttaaacaaaccagaatatattcagatgctaatgcctccactgatccagaaatggaacatgttaaaggatgaagataaagatctcttccctttacttgagtgcctatcttcagttgccacagcactgcagtctggattccttccgtactgtgaacctgtgtatcagcgttgtgtaaacctagtacagaagactcttgcacaagccatgctaaacaatgctcaaccagatcaatatgaagctccagataaagattttatgatagtggctcttgatttactgagtggcctggctgaaggacttggaggcaacattgaacagctggtagcccgaagtaacatcctgacactaatgtatcagtgcatgcaggataaaatgccagaagttcgacagagttcttttgccctgttaggtgacctcacaaaagcttgctttcagcatgttaagccttgtatagctgatttcatgccaatattgggaaccaacctaaatccagaattcatttcagtctgcaacaatgccacatgggcaattggagaaatctccattcaaatgggtatagagatgcagccttatattcctatggtgttgcaccagcttgtagaaatcattaacagacccaacacaccaaagacgttgttagagaatacagcaataacaattggtcgtcttggttacgtttgtcctcaagaggtggcccccatgctacagcagtttataagaccctggtgcacctctctgagaaacataagagacaatgaggaaaaggattcagcattccgtggaatttgtaccatgatcagtgtgaatcccagtggcgtaatccaagattttatatttttttgtgatgccgttgcatcatggattaacccaaaagatgatctcagagacatgttctgtaagatccttcatggatttaaaaatcaagttggcgatgaaaattggaggcgtttctctgaccagtttcctcttcccttaaaagagcgtcttgcagctttttatggtgtttaatctaatacacttaagctgcagtcccaaaattaggggtccttcagtcttggagactataagggagcctctgcacccagggaaaatgttaccctttacaggggggaagggtaaaccagtagggaatacagtacaatcccaaccctactgggaggggcgggagggaggtgttgccgtcactgtattaagtcgatgttgggaaacgttttaacatctggagcctttgtgggtggaaatatgtctccagttacaactccgcagtggatgtgaagaagcaaaaaaaaaaaaatctattcagtctactcacaaaacagtacattgtggaatattatggggaattgtaccaaaacaagaaccatataaatgatgcctagggacaagaaagaggaacaattctatagcgcacaataaaggaaacctaagaatgggagttacaaatagtaaagaagctttttttttttttttaatttaaagtttttttatgtaagttttcccacatgatggggccttgttttgcatgttgatgaagaactacacaaagaaaactaatatagttaaaagtcagcttgccttcccgtagtagaagcaggttcttggaagttacaatttaaggtaccccaaaaaagttggaaataaaacaaaacaaacataaacaatgaagcaccctgtgaaatgccaaatgagtcactccttttaccttttttggggtgggcagggagggaggaataaatggggttgggcatatcaaactaaagatgacatcttaattttgcattgaacattaatgtagcggatataatttgatgattatacttcattagatttaatttctaggccaagatgttactttttaaagtgcagtttaaggttcaggcatgcattctggctcatagtggttgaaagtaatttaaattagtgggaaagtagcatgcttgcatcacatagagtgagattggtattcatttacctatgttgcgccagtttgtgttgcagtttaccaattcaatatagccctgcatttaaagttcctttttaagatttgtggattttatttttattaagaacatagatatataaagtactgtagtttacaggtaggccttgaaatatcttttttaggatctgttaggaataagattgatattgtattgtgtgtaacctgcacaatgtggaaagctgatatacctgtgcaaaatctttgcctctgtgctgtcagtgtgatgtgctttctgcatggttatatactactagtgattttatcaaaacttctaaaatttaaattacgtggtaaaagatctgtaaaaggctgcataaatgttagttggcacataaagacaattgtagaagttgaaaaatgattgctatatttcaatgtttattcccactcaacatactgccttctaagcttccctttttttgttcaaagcatgatcttaaagatatgtttaagttaatggatgtaatgcagggttcctacactgtattttggcgcatgttggtggccctctgtgccctagatatatgcacacagggtgcaagttaaaagctacagagtgaaagttggtttggatcctcttcatttcatttgtttagcttttctgttatttttctctacttacatgtattcctgtgaataaatccttgttaagttaaccctttacttttccttccatgtgtattttcttatatactgtgaatgtgaaaacctaactggtacacttgatcttgtgttcatatgaaagtgcaagtctttattaatttggattgcctgaacagtgtatcccatgatgatgaaggaaaatggagagatttttctttttaactctgctggtcagagatgaagccacgcctttccatttttcaatgctgcatatttaatctgcaacaaaaatgttaagccataacagcctttttatattttagtttgtcacctttgcattgcagaataaatactgaataaccatttttataagcagttgctcctctttgcatggttctattctctaaaagtgttgaatgatacagccattgcactgaagtttgagctgtgtgcgtgtgaatttatactgtttcaaaaatttcaaatgcatggtagcatgtagaaaggtttttgttactatgtgtgtgtgtgtgttttgttttgttttgttctgttttttaacgttctttcacctttcctctactttggctttgcaaatttcagtctgtagagcctgaaattaaattattttatagtgcctgatatttttaatattataagttggattcaaagggtatacagcattttgttttctagtaccattgcttcactgggagctcaaaatttgcctccctgttagtctttaataactgagtagagtagcttttttattcttagattatagtgatattctgtagtgcttcaaatacttagaattctaatatgagagatagtttaatattctggaatagagagtattttaaattgaaatgaccaaattcgatttaaaacaaacacataacaatcttcagtaaagttatttgaacctgtggttgacaattctgtattgactaaaggcaatattgtcacctgtctcattaaaaattagtttccagttaggcagatgaataacactattaaaaatgcacccagttttgtagtcacttgactttttttttttatttaaatgaaatttaatttgaaaatagaaaataaaattaggtaaatatgactggcaacctgaatttgagttgggattctttgtgtatttttcccccttgaggttattgtttcttcctaatttatatttcagatacatagtgtagaacaggaatttgcagaagccatttaagttatcttttgaggtaagctctgatttagcatttattctgataaaatctaatacatcatgggatatatataaagcaacttaattcttgtggtgtagtcttaatagttttgaatgttgactgaatgtctataaaattgtgagtttgtctttgttacattccagtgtttctgcctcttggcatgcttaaagcacggcttacttcatctgctccttacacactaaaatgctgttagtgtgctcaactacagaaatagccgctgctaagtgatgtagattttctacttgaatatttttatgttgtaggaacctcaggaggtcagtgtttactgttttatatatgccttctttttcctgtttgagcttctctctttgaaggattctaacagaacaaagctgctgatcaacctaagttggaaacagaaagtgtaattaatataacttaaatgcatgtttggcagttccatgttacagtccattagcgagtgaacttagtgccacaggtattcatttattcaggaaagaattttgctttttgtattgtctaatctcttcaatgacttcatactgtgtaaaaaaaaatcactttttaatattttttggttggttatttcccaaataatcaacatgtaaataatcttttaagagccagttctgatgctttacattattgctacttgattttgttatgcaagttagatttcagaagaatagattttaaaacacttaaccaagccattacatcttaaaaacaaaacaagtagcatacattttgtaattaacattgataaacactgtgatttttttggttaagactttttcattgatctgaattgcttaaattgcatatattgtaaaataggatcagatgtatattttaaactaatttcaatggattttcctcttgaaatgctttgtctactcagttataaaatattcagatacaagttttatctcaggtgaatactcttgtattgtttttgctttggtgacatgcttataaagggtcatcctagttacattctttgttttttaagtgtatttcattgagaatctttccatttagtctgatttttttcctaatattctagcaggctggggtggtataaagccctcctgacaagccttttgcctacaggtttacctgaaaatgagctacatatggtcgtcattttcttcaaactctcaaaataggaaagtggaaatttttctcccctatataaaattattctgcctagcagaaatgccagaaataaattaattgcatcttagtctaaatttaagtcctttgccatgaggaaaaagtggttttttgcttcatatggtaaatctatattattcatattgaatgtattaacagataatggtgcaaaagcattcttcccaggggaagagtgtatcatgcataactgcaatttaagtccttcctttgataatacttcaaaacatacacagctttgcttactgaattatttttgcaaataatacaaggaggggaaactaacttgctactagtgttgttaatgaagtataggccttggaacatttaagaaaactggtcttcagatagttaagggcttgggataatttaagtgaaaagtgagatcagtaatgagctgtgttgttaacaatattatctggtaataataccatgcaatatagcgttgtataccaacttagtgcattttatactgtattaaatatggagatacttctaatgcctctctaaaattaaattttacataaaagttagttttattcacctttaggctttccaagtgaattgtgactaattttttcaatcttacatagatctttcacccattagcattacttacgtagataattctttatgcctagttattatacatattaatttttaaggtatacatttaaattacacaattgttcattgtggtttgtatcccagaatgtgttgtgttttttaaaagatgcataatagctgaatgtatgcatgactttgaaagaagttaaaatggtgattttttttcacctcttgtacattttaaaaccaggccaaatctatttgccaagcagtgtatcactaataagaaaagcagtttttccttttattgcagtttttgtttatctgccatagaatttccttatactgtggcttggtattattcaagattagctatttcgctggtattacatctttttaaaagcctattataacatggttagcctataaggcagtgttggtccccttctaatattggcctcataaaggggttccactgtactttccgcatattactgtgttgttgttttcctttgtggatatataagcaaattgagcttgggtgatttttatggagacaataattagacaatactgtataattagttttacttaatagattatcatcttgtgagaagagatgtttaaacgtggtaaatcacttcatattacaaaacagttttacacttaatatgttaacattgggtgcaataatttagtagcattagctttagttacaaatataactggatctttctgctgacaacttaggttgtatgagttatgcttaaaagctttaaatctgatgtttcctgtacctgccacactatgttagaatgtgtccttcaaacatatcctcctgcaacttctcaaactgtactaaattgatatttcttgaagtctaactctgtgctaacagatctccattttaaatagaatacggttttaatttttgataagctgctgaattttaaagagagttttttggggccaccaaatattttggatcatgcagagaatatatattgtactgtagtaattttgtatttacatttgtatgatgtgacataatagatgtgaatgttaatcactgcttgactatgttaataaagttgtttaactatagatgttgcactctgatttttaatgaaaggaaatgagttttctttttccctcttaccccattttggatctagataagccttatgttttttgggatttttttccttgtttttagtttgaggttttgttttgttttttccttagcttacacattagtacacttttgttgttgaacatcatttatttcttaaaacaagtgttttcttatttgtatagtatagtaaaaacctgtttttccacattttaacttaactccttgatgtgttttaaacagttgattataggttctgctgtttgaggataggggacatactattctgtaaaaggaattaaaggcgaaattgtgaatataaaaagttgatgtaaggagagattgcatgagtgtgtatgaatgtatgtcctattaaggcttcctctttatccttcaaacagttaagatttgtaatttggggaattaacatttataagagtaattttttcttcaggttgtaaggcattaatatagttgcatgttactaattaaatgtattaacacatttcagggagtatgtgtgcataactgtcatggttttttttgttttttgtcttgtttttgagatggagtcttgctctgttgcccaggctggagtgcagtggcacagtcttgtctcactgcaacctctgcctcccgggttcaaacgactctcctgcctcagcttcccaagtagttgggattaaggcatgtgccgtcacacccggctaacttttatattttcagtaaagatgggggttcaccatgttggccaggctagtctcgaactcctggcctcaggtgatccacctgtctcggcctctcaaagtgttgggattacagctgtgagccaccatgcctggccttgtcatacagccttttgagatttagaacaggaaagagcctaaaattaaatcagtacaattccaaaacttttaagagaggtgaggcttgggtttctttttctttgttacctggccaagaaaatatttgagaagagagagttctcttgtgttaacaagaaaataaaattgaaacttggacatcatgttctaaaacacagcctcaagagtttaatattccagaattttaggacttaggttgtggggaaaagataattaaagtcatcctaattcttgttcaagattaggaaccaaaagtcttttctaagtcgtcaatattttagtgatactaaagccctatccattttatgcaaatgatctttttcttctcagttcaggtgatgaaaccatcgtaatgataaatgagtaaggctggcttaacaattcttggactggcgggcattcttgtaatgagttcataatcagtatgactccacaatttcacgtgattctttaagaatgattggaaaagtggcagcaggaactacagagctaacttgaatttcctttgtgttctatacagttgaatatggaattaccaaagctctgtcattttaaaaattctttatttctgagttgttaatttgatgtaaaagtgtaagaacccccgaaacatctccattattcagatagacacaaataatgtacacatcacaattagtatatattttttttaattgagaggactctggctctgtctcccagtcttcagtggcacgatatctgctccctgcaacttccgcctcctaggttcaagcaattctcccatctcagcctcccaagtagctgggattacaggcgcacgccaccaggcctggctaatttttttttttttttttttttttttttttttttaggagagagtttggccgtgttggccaggctggtctcgaactcctgacctcgagtgaacacctcgagtggtacgcccacctttgcctcccaaattgctgggattacagttgtgagccaccgcccctggcgacaatttgtaaatttaacgcaatttctaaaccattggcaagaacaatacagagaagagttgttatactgagaccctttaggtttttgtaccagtcaattcttacatgcatgttatggcagtctcactctgatgatttaaatcttaagtattcttttcaagctttgtgttacttcttgaagaacttgaaacaattttaagaaagacaagtgaacagttaaatgaattgtaatacaactacctagtgataactgctgttaatatcctgtgcacatatataaatatatggtgaatttgtgtttttagttatatccagaattgtttgttaatatacatggacatacctacatattattctataagcaatttatgcaactgtcttactgttgttggacattcagaagttttttctaatttttcactcttagaaataaagttttagtgagagtcgcaa

SEQ ID NO: 194528 - DNA, 3028 bp, Homo sapiens
  Payload ID: 18438
  Gene Name: transportin 1
  Uniprot ID: Q92973
  ENST ID: ENST00000506351
  CDS Start-End: 78-2750
gccgggctgccaggagcagttccgccgggtttcactgtccgtgacttccttcggggcacctcaggcagcaaaccaagatggagtatgagtggaaacctgacgagcaagggcttcagcaaatcctgcagctgttgaaggagtcccagtccccagacaccaccatccagagaaccgtgcaacaaaaactggaacaacttaatcagtatccagactttaacaactacttgatttttgttcttacaaaattaaaatctgaagatgaacccacaagatcattgagtggtcttatcttgaagaataatgtgaaagcacactttcagaacttcccaaatggtgtaacagactttattaaaagtgaatgtttaaataatattggtgactcctctcctctgattagagccactgttggtattttgatcacaactatagcctccaagggagaattgcagaattggcctgacctcttaccaaaactctgtagcctgttggattctgaagattataatacctgtgagggagcatttggtgcccttcagaagatttgtgaagattctgctgagattttagacagtgatgttttagatcgtcctctcaacatcatgattcccaaatttttacagttcttcaagcatagtagtccaaaaataaggtctcacgctgttgcatgtgtcaatcagtttatcatcagtaggactcaagctctaatgttgcacattgattcttttattgagaatctctttgcattagctggtgatgaagaaccagaggtacggaaaaatgtgtgccgagcacttgtgatgttgctcgaagttcgaatggatcgcctgcttcctcacatgcataatatagttgagtacatgctacagaggactcaagatcaagatgaaaatgtggctttagaagcctgtgaattttggctaactttagctgaacagccaatatgcaaagatgtactcgtaaggcatcttcctaagttgattcctgtgttagtgaatggcatgaagtactcagacatagatattatcctacttaagggtgatgttgaagaagacgaaacgattcctgatagtgaacaggatatacggccacgttttcaccgatcgaggacggtggctcagcagcatgatgaagatggaattgaagaggaagatgatgatgatgatgaaattgatgatgatgatacaatttctgactggaatctaagaaaatgttctgctgctgccctggatgttcttgcaaatgtgtatcgtgatgaactgctgccacatattttgccccttttgaaagaattactttttcatcatgaatgggttgttaaagaatcaggcattttggttttaggagcaattgctgaaggttgcatgcagggcatgattccatacttgcctgagcttattcctcaccttattcagtgcctctctgataaaaaggctcttgtgcgttccataacatgctggactcttagccgctatgcacactgggtggtcagccagccgccagacacgtacctgaagccattaatgacagaattgctaaagcgcatcctggacagcaacaagagagtacaagaagctgcctgcagtgcctttgctaccctagaagaggaggcttgtacagaacttgttccttaccttgcttatatacttgataccctggtctttgcatttagtaaataccagcataagaacctgctcattctttacgatgccataggaacattagcagattcagtaggacatcatttaaacaaaccagaatatattcagatgctaatgcctccactgatccagaaatggaacatgttaaaggatgaagataaagatctcttccctttacttgagtgcctatcttcagttgccacagcactgcagtctggattccttccgtactgtgaacctgtgtatcagcgttgtgtaaacctagtacagaagactcttgcacaagccatgctaaacaatgctcaaccagatcaatatgaagctccagataaagattttatgatagtggctcttgatttactgagtggcctggctgaaggacttggaggcaacattgaacagctggtagcccgaagtaacatcctgacactaatgtatcagtgcatgcaggataaaatgccagaagttcgacagagttcttttgccctgttaggtgacctcacaaaagcttgctttcagcatgttaagccttgtatagctgatttcatgccaatattgggaaccaacctaaatccagaattcatttcagtctgcaacaatgccacatgggcaattggagaaatctccattcaaatgggtatagagatgcagccttatattcctatggtgttgcaccagcttgtagaaatcattaacagacccaacacaccaaagacgttgttagagaatacagcaataacaattggtcgtcttggttacgtttgtcctcaagaggtggcccccatgctacagcagtttataagaccctggtgcacctctctgagaaacataagagacaatgaggaaaaggattcagcattccgtggaatttgtaccatgatcagtgtgaatcccagtggcgtaatccaagattttatatttttttgtgatgccgttgcatcatggattaacccaaaagatgatctcagagacatgttctgtaagatccttcatggatttaaaaatcaagttggcgatgaaaattggaggcgtttctctgaccagtttcctcttcccttaaaagagcgtcttgcagctttttatggtgtttaatctaatacacttaagctgcagtcccaaaattaggggtccttcagtcttggagactataagggagcctctgcacccagggaaaatgttaccctttacaggggggaagggtaaaccagtagggaatacagtacaatcccaaccctactgggaggggcgggagggaggtgttgccgtcactgtattaagtcgatgttgggaaacgttttaacatctggagcctttgtgggtggaaatatgtctccagttacaactccgcagtggatgtgaagaagcaaaaa

SEQ ID NO: 194529 - DNA, 2632 bp, Homo sapiens
  Payload ID: 18438
  Gene Name: transportin 1
  Uniprot ID: Q92973
  ENST ID: ENST00000523768
  CDS Start-End: 67-2613
atttcaggccccggacaggaggcagtgccgcttcggccgaaggcccgagcgcccgaggcgtctgggatggtgtgggaccggcaaaccaagatggagtatgagtggaaacctgacgagcaagggcttcagcaaatcctgcagctgttgaaggagtcccagtccccagacaccaccatccagagaaccgtgcaacaaaaactggaacaacttaatcagtatccagactttaacaactacttgatttttgttcttacaaaattaaaatctgaaggtattttgatcacaactatagcctccaagggagaattgcagaattggcctgacctcttaccaaaactctgtagcctgttggattctgaagattataatacctgtgagggagcatttggtgcccttcagaagatttgtgaagattctgctgagattttagacagtgatgttttagatcgtcctctcaacatcatgattcccaaatttttacagttcttcaagcatagtagtccaaaaataaggtctcacgctgttgcatgtgtcaatcagtttatcatcagtaggactcaagctctaatgttgcacattgattcttttattgagaatctctttgcattagctggtgatgaagaaccagaggtacggaaaaatgtgtgccgagcacttgtgatgttgctcgaagttcgaatggatcgcctgcttcctcacatgcataatatagttgagtacatgctacagaggactcaagatcaagatgaaaatgtggctttagaagcctgtgaattttggctaactttagctgaacagccaatatgcaaagatgtactcgtaaggcatcttcctaagttgattcctgtgttagtgaatggcatgaagtactcagacatagatattatcctacttaagggtgatgttgaagaagacgaaacgattcctgatagtgaacaggatatacggccacgttttcaccgatcgaggacggtggctcagcagcatgatgaagatggaattgaagaggaagatgatgatgatgatgaaattgatgatgatgatacaatttctgactggaatctaagaaaatgttctgctgctgccctggatgttcttgcaaatgtgtatcgtgatgaactgctgccacatattttgccccttttgaaagaattactttttcatcatgaatgggttgttaaagaatcaggcattttggttttaggagcaattgctgaaggttgcatgcagggcatgattccatacttgcctgagcttattcctcaccttattcagtgcctctctgataaaaaggctcttgtgcgttccataacatgctggactcttagccgctatgcacactgggtggtcagccagccgccagacacgtacctgaagccattaatgacagaattgctaaagcgcatcctggacagcaacaagagagtacaagaagctgcctgcagtgcctttgctaccctagaagaggaggcttgtacagaacttgttccttaccttgcttatatacttgataccctggtctttgcatttagtaaataccagcataagaacctgctcattctttacgatgccataggaacattagcagattcagtaggacatcatttaaacaaaccagaatatattcagatgctaatgcctccactgatccagaaatggaacatgttaaaggatgaagataaagatctcttccctttacttgagtgcctatcttcagttgccacagcactgcagtctggattccttccgtactgtgaacctgtgtatcagcgttgtgtaaacctagtacagaagactcttgcacaagccatgctaaacaatgctcaaccagatcaatatgaagctccagataaagattttatgatagtggctcttgatttactgagtggcctggctgaaggacttggaggcaacattgaacagctggtagcccgaagtaacatcctgacactaatgtatcagtgcatgcaggataaaatgccagaagttcgacagagttcttttgccctgttaggtgacctcacaaaagcttgctttcagcatgttaagccttgtatagctgatttcatgccaatattgggaaccaacctaaatccagaattcatttcagtctgcaacaatgccacatgggcaattggagaaatctccattcaaatgggtatagagatgcagccttatattcctatggtgttgcaccagcttgtagaaatcattaacagacccaacacaccaaagacgttgttagagaatacagcaataacaattggtcgtcttggttacgtttgtcctcaagaggtggcccccatgctacagcagtttataagaccctggtgcacctctctgagaaacataagagacaatgaggaaaaggattcagcattccgtggaatttgtaccatgatcagtgtgaatcccagtggcgtaatccaagattttatatttttttgtgatgccgttgcatcatggattaacccaaaagatgatctcagagacatgttctgtaagatccttcatggatttaaaaatcaagttggcgatgaaaattggaggcgtttctctgaccagtttcctcttcccttaaaagagcgtcttgcagctttttatggtgtttaatctaatacacttaagctgc

SEQ ID NO: 194530 - DNA, 863 bp, Homo sapiens
  Payload ID: 18438
  Gene Name: transportin 1
  ENST ID: ENST00000520850
  CDS Start-End: 90-500
cagattctctttgttccgcagccatttcaggccccggacaggaggcagtgccgcttcggccgaaggcccgagcgcccgaggcgtctgggatggtgtgggaccggcaaaccaagatggagtatgagtggaaacctgacgagcaagggcttcagcaaatcctgcagctgttgaaggagtcccagtccccagacaccaccatccagagaaccgtgcaacaaaaactggaacaacttaatcagtatccagactttaacaactacttgatttttgttcttacaaaattaaaatctgaagatgaacccacaagatcattgagtggtcttatcttgaagaataatgtgaaagcacactttcagaacttcccaaatggtgtaacagactttattaaaagtgaatgtttaaataatattggtgactcctctcctctgattagagccactgttggtctcacgctgttgcatgtgtcaatcagtttatcatcagtaggactcaagctctaatgttgcacattgattcttttattgagaatctctttgcattagctggtgatgaagaaccagaggtacggaaaaatgtgtgccgagcacttgtgatgttgctcgaagttcgaatggatcgcctgcttcctcacatgcataatatagttgagtacatgctacagaggactcaagatcaagatgaaaatgtggctttagaagcctgtgaattttggctaactttagctgaacagccaatatgcaaagatgtactcgtaaggcatcttcctaagttgattcctgtgttagtgaatggcatgaagtactcagacatagatattatcctacttaagggtgatgttgaagaagacgaaacgattcctgata

SEQ ID NO: 194531 - DNA, 752 bp, Homo sapiens
  Payload ID: 18438
  Gene Name: transportin 1
  ENST ID: ENST00000605210
  CDS Start-End: 1-582
tgctttcagcatgttaagccttgtatagctgatttcatgccaatattgggaaccaacctaaatccagaattcatttcagtctgcaacaatgccacatgggcaattggagaaatctccattcaaatgggtatagagatgcagccttatattcctatggtgttgcaccagcttgtagaaatcattaacagacccaacacaccaaagacgttgttagagaatacagcaataacaattggtcgtcttggttacgtttgtcctcaagaggtggcccccatgctacagcagtttataagaccctggtgcacctctctgagaaacataagagacaatgaggaaaaggattcagcattccgtggaatttgtaccatgatcagtgtgaatcccagtggcgtaatccaagattttatatttttttgtgatgccgttgcatcatggattaacccaaaagatgatctcagagacatgttctgtaagatccttcatggatttaaaaatcaagttggcgatgaaaattggaggcgtttctctgaccagtttcctcttcccttaaaagagcgtcttgcagctttttatggtgtttaatctaatacacttaagctgcagtcccaaaattaggggtaagttataagaagtttggaaattttcaggatgaagaaaattttgttagggctgtcatttcaaactactaaatagaataaaaagctatttgttttctatagaggttgaataaaacatagcctcatatcattcta

SEQ ID NO: 194532 - DNA, 4962 bp, Homo sapiens
  Payload ID: 18439
  Gene Name: transportin 2
  Uniprot ID: O14787
  ENST ID: ENST00000356861
  CDS Start-End: 236-2899
gggaagccggttgggcccgatcctcctggcagctagaacgggccgggcgggggaggggggaaccgagcagagcttagggggtggggcctcggagccaggccatgtcggggctcctcaagaagagggccagtgggactgctggggtcgggctggaggggatctgattgggggaagcgtctggggactgcttggggcctgattgggggacgtcgcgaggatcggcttgccttgcgccatggactggcagccagacgagcagggcctgcagcaggtcctgcagctgctcaaagactcacagtcgcccaacacagccactcagcgcatcgtgcaggataaactcaaacaactcaatcagtttcctgacttcaacaactacctgattttcgtcctgaccagactcaagtcagaagatgagccaacgcgctctctcagtggcctcatcctcaagaacaacgtgaaggcacactatcagagcttcccaccccctgtggcagacttcatcaaacaggagtgtctcaacaacattggcgatgcctcctcgctcatccgagccaccattggcattctcatcaccaccatcgcttccaagggtgagctgcagatgtggcccgagctgctgccccagctctgcaacctgcttaactcggaggattacaacacttgtgagggagcctttggagccctgcagaagatctgtgaagactcatcagagcttctggacagtgacgccctcaacaggcccctcaacatcatgatccccaagttcctgcagttcttcaagcactgcagtcccaagatccggtcccacgccatcgcctgcgtgaaccagttcatcatggaccgggcccaggcgctgatggacaatattgacaccttcatcgagcacctatttgccctggctgtggatgatgaccccgaggtgcggaagaatgtgtgccgtgccctggtgatgcttctggaagtgcggattgacaggctcatcccccacatgcacagcatcatccagtacatgctgcagaggacccaggaccatgatgagaacgttgcccttgaggcctgtgagttctggctgacgctggccgagcagcccatctgcaaggaagtcctggcctcccatctggtccagttgatccccatcttggtgaatgggatgaagtactcggaaattgacatcatcctgctcaagggggatgtggaggaggatgaggctgtccccgacagtgagcaggacatcaagccacgcttccacaagtcacgcacggtcacactgccccacgaggctgagcggcctgatggctccgaggacgcggaggatgacgatgatgatgatgctctgtccgactggaatttgaggaagtgctcagcggctgcactggacgtcctcgccaatgtcttccgggaggaactgctgccccacctactcccactactcaaaggcctcctcttccaccccgagtgggtggtcaaggagtcgggcatcctggtgctgggcgccattgctgagggctgcatgcagggcatggtgccctacctgcctgagctgatcccgcacctgatccagtgcctgtcggataagaaggccttggtccgctccatcgcctgctggacgctgagccgctatgcccactgggtggtcagccagccacccgacatgcacctcaagcccctgatgacagagctgctcaaacgcatcctggatggcaacaagagggtacaggaggcggcctgcagtgcttttgccaccctggaggaagaggcctgcacggagctggtgccctacctcagctacatcctggacacccttgtctttgcctttgggaaataccagcacaagaacctgctcatcctctatgacgccattggcaccctggccgactctgtaggccaccacctcaaccagccggaatacatccagaagctgatgcccccactgatccagaagtggaatgagctcaaggacgaagacaaggacctcttccccctgctggagtgtctgtcatcggtggccaccgccctgcagagtggcttcctgccttactgtgagcccgtctaccagcgctgtgtcaccctggtgcagaagacactggctcaggccatgatgtacacccagcaccctgagcagtatgaggctcccgacaaggacttcatgatcgtagcactggatctgctcagcggcctggccgagggcctgggtggtcacgtggagcagctggtggcccgcagcaacatcatgacattgctgttccagtgcatgcaggactcgatgcctgaggtccggcagagctcctttgccctcctgggagacctcaccaaagcctgcttcatccatgtcaagccctgtatcgccgagttcatgcccattctgggcaccaacctgaacccagagttcatctccgtctgcaacaacgccacctgggccattggtgaaatctgcatgcagatgggggcagagatgcagccttatgtgcagatggtcctcaacaacctggtggaaatcattaaccgacccaacacacccaagacactgctggaaaacacagccatcaccatcggccgcttgggctacgtgtgcccccaggaggtggcacccatgctgcagcagttcatccggccttggtgcacgtccctcaggaacatcagggacaacgaggagaaggactcagccttccgcggcatctgcatgatgatcggtgtcaacccggggggcgttgtgcaggactttattttcttctgcgatgctgtagcctcctgggtgagcccgaaggatgaccttcgggacatgttttataagattctccacggcttcaaagaccaagttggggaagataactggcagcagttctctgagcaattcccgccgctgctcaaggagaggctggcggctttctatggggtctaggtgatcatggagactgccaggtttctgtctgcgtcgtcgtcggagggattactggggagtgcgctgcatccggaagtcgctgtgccctggttgaggggggttagggaggagtgagtgggactcaaatccagatgccttccccgtccgtccgtccgtccgtccatccgtccacttgccctcctggcaggtgggtggggccaccatgctcatcctacaaacggggaggtgggggggacttctggtgggcaagggcccctgggctctaatagggtcatctctggcagcccacttgggccagctacgtgggagggaggaattacacagctgaccgaatccggcttcggatgaggtgagggaggagcaggtcaggaggggggccctcgtagggacgcgtacactcacacggacacacatggccacacgcatgtgcgggtgccataaccggcgaggctgggccagccgctccaccatttccccgactgcatggagacagtagaattagtgaacccctgagttaacccgtaaggccttccgtgtaacctgcatctagagtttaagaagcttctgctgttttgccggaattggcggtgactggggagggctgggtgggtggggggcctcaggcgggatctcggggcggggggaggaggatggtgaccttgggagtcgccctgtcagcacgcacatgcttgggacccactccacacactccctgccagctttgttgcagcctcagctggtggtgtctccgtccttatcctagcctagctcgcagggtgagaaccactggagtggctggggctggccagaggtcaccgtttctccttcctgtgtgctccagtggcttttgaagacactgggttgggacctttttcctgaagagagctgggtgtagccagagctactggcacctaccccgagcatctctctctgtaagcagcttcaggggcagtccgtttctctgtgcttctgaaacccccttctcacgtttcaggccccagttttaactcaaggcctggggcaggggcgtttaattgatgatgacagaggacacaggtttttgccagcaaaaaggaaaaccaaggcttggtggaagggaaaggtggtgtgtcccctgttccctattccatctccctgggacttcctgctcatcatagtacccagtgagcccagagatcctactagactgggtcagcaattctagagaaccttccggaatagtctgggaacatggtcaaggtggaaggggctcccctagagagggtgggggtgtagttacttcccagttggccagaaaactgggccttgcagacccccttagcattttttccctttttttccttccctgctttctacttctttggggagccccttgtgttttggagtctgactggagtctcgcatcctggggcctgctccatccatccctcctgggcgccagaccctccatccaagccctgtgtctttccatagtcagggtcaggccctgcatctattccaaggggcactcagtacacattccataaattagctgggtgtccctgcacgcccaccccatgaaactcgagcaggtctctggaagccatttgttaaaaaaaaaaaaaaaagttttaaaaataccttttaattttctggtaattccagttctttgaagcatcctctgctgggtcttggggtgtgtggatggattggctgtctgatgggattggtaacccctcgctactcaagatggggggatacaaacaccttcagggaaggggagcctggttcttctcgttttcctttttttttttttttttaaaaaaaaactatttaattttttaatttatttttggttgttttttgcacaatgaagtttcagcttctcaaccttctcccctacccagggctgtggacccagactggccttgagccacagtccctctttccctcctcaccctcttccccctgcgggctcccgggtctgtccatttgttactgtgctgtgctggggattggcgccgaggtggcgtgagattccacttgtgtagaactttgttgagtaaagatcagtttcttgtgaa

SEQ ID NO: 194533 - DNA, 4993 bp, Homo sapiens
  Payload ID: 18439
  Gene Name: transportin 2
  Uniprot ID: O14787
  ENST ID: ENST00000450764
  CDS Start-End: 739-3402
ggccgggcttggctggctctcattcgaagaggcagcagagacctacctggggactgctttgggcctgattaaggggaatccttagaatttggctaggccacagagggggatatctggcatccactgagcttgaagggcaggaacaggggacaggagagatcaggacgatcgtcttgggagggcgcatctggggaagctcagaaattggactagggcaggaggcctctgggatctggcagaagttaagggcagagtgtcgggggaaggggactcttcagggactgtgcctgcatagaagagaccacgggggccggggcgctatcacggtctggggcggggcccctggatgtggaggcggctgggccctcgcccagccgctgcgagggaggtggaagccttcgggctcggagccggggtcagcggcatgggccaccctgggacgagggctcttcgctgggtcccatgaggatccgccgggccccgccgccgccgcctgtggcccgtttccacatcccccctcccgcgctcccgagcccgcgactgcgcggccgaggatggcgcagctggcggggaccccgcacttgggcgggcgtggatcggaggcctccgcctgtccgccgagggcgttcccgtcgtcatgcggccaccgcggcctcaggggctccacctgggtctcacacggagccccagagacccagcgctgaccccggcccctacctccgcagcttgccttgcgccatggactggcagccagacgagcagggcctgcagcaggtcctgcagctgctcaaagactcacagtcgcccaacacagccactcagcgcatcgtgcaggataaactcaaacaactcaatcagtttcctgacttcaacaactacctgattttcgtcctgaccagactcaagtcagaagatgagccaacgcgctctctcagtggcctcatcctcaagaacaacgtgaaggcacactatcagagcttcccaccccctgtggcagacttcatcaaacaggagtgtctcaacaacattggcgatgcctcctcgctcatccgagccaccattggcattctcatcaccaccatcgcttccaagggtgagctgcagatgtggcccgagctgctgccccagctctgcaacctgcttaactcggaggattacaacacttgtgagggagcctttggagccctgcagaagatctgtgaagactcatcagagcttctggacagtgacgccctcaacaggcccctcaacatcatgatccccaagttcctgcagttcttcaagcactgcagtcccaagatccggtcccacgccatcgcctgcgtgaaccagttcatcatggaccgggcccaggcgctgatggacaatattgacaccttcatcgagcacctatttgccctggctgtggatgatgaccccgaggtgcggaagaatgtgtgccgtgccctggtgatgcttctggaagtgcggattgacaggctcatcccccacatgcacagcatcatccagtacatgctgcagaggacccaggaccatgatgagaacgttgcccttgaggcctgtgagttctggctgacgctggccgagcagcccatctgcaaggaagtcctggcctcccatctggtccagttgatccccatcttggtgaatgggatgaagtactcggaaattgacatcatcctgctcaagggggatgtggaggaggatgaggctgtccccgacagtgagcaggacatcaagccacgcttccacaagtcacgcacggtcacactgccccacgaggctgagcggcctgatggctccgaggacgcggaggatgacgatgatgatgatgctctgtccgactggaatttgaggaagtgctcagcggctgcactggacgtcctcgccaatgtcttccgggaggaactgctgccccacctactcccactactcaaaggcctcctcttccaccccgagtgggtggtcaaggagtcgggcatcctggtgctgggcgccattgctgagggctgcatgcagggcatggtgccctacctgcctgagctgatcccgcacctgatccagtgcctgtcggataagaaggccttggtccgctccatcgcctgctggacgctgagccgctatgcccactgggtggtcagccagccacccgacatgcacctcaagcccctgatgacagagctgctcaaacgcatcctggatggcaacaagagggtacaggaggcggcctgcagtgcttttgccaccctggaggaagaggcctgcacggagctggtgccctacctcagctacatcctggacacccttgtctttgcctttgggaaataccagcacaagaacctgctcatcctctatgacgccattggcaccctggccgactctgtaggccaccacctcaaccagccggaatacatccagaagctgatgcccccactgatccagaagtggaatgagctcaaggacgaagacaaggacctcttccccctgctggagtgtctgtcatcggtggccaccgccctgcagagtggcttcctgccttactgtgagcccgtctaccagcgctgtgtcaccctggtgcagaagacactggctcaggccatgatgtacacccagcaccctgagcagtatgaggctcccgacaaggacttcatgatcgtagcactggatctgctcagcggcctggccgagggcctgggtggtcacgtggagcagctggtggcccgcagcaacatcatgacattgctgttccagtgcatgcaggactcgatgcctgaggtccggcagagctcctttgccctcctgggagacctcaccaaagcctgcttcatccatgtcaagccctgtatcgccgagttcatgcccattctgggcaccaacctgaacccagagttcatctccgtctgcaacaacgccacctgggccattggtgaaatctgcatgcagatgggggcagagatgcagccttatgtgcagatggtcctcaacaacctggtggaaatcattaaccgacccaacacacccaagacactgctggaaaacacagccatcaccatcggccgcttgggctacgtgtgcccccaggaggtggcacccatgctgcagcagttcatccggccttggtgcacgtccctcaggaacatcagggacaacgaggagaaggactcagccttccgcggcatctgcatgatgatcggtgtcaacccggggggcgttgtgcaggactttattttcttctgcgatgctgtagcctcctgggtgagcccgaaggatgaccttcgggacatgttttataagattctccacggcttcaaagaccaagttggggaagataactggcagcagttctctgagcaattcccgccgctgctcaaggagaggctggcggctttctatggggtctaggtgatcatggagactgccaggtttctgtctgcgtcgtcgtcggagggattactggggagtgcgctgcatccggaagtcgctgtgccctggttgaggggggttagggaggagtgagtgggactcaaatccagatgccttccccgtccgtccgtccgtccgtccatccgtccacttgccctcctggcaggtgggtggggccaccatgctcatcctacaaacggggaggtgggggggacttctggtgggcaagggcccctgggctctaatagggtcatctctggcagcccacttgggccagctacgtgggagggaggaattacacagctgaccgaatccggcttcggatgaggtgagggaggagcaggtcaggaggggggccctcgtagggacgcgtacactcacacggacacacatggccacacgcatgtgcgggtgccataaccggcgaggctgggccagccgctccaccatttccccgactgcatggagacagtagaattagtgaacccctgagttaacccgtaaggccttccgtgtaacctgcatctagagtttaagaagcttctgctgttttgccggaattggcggtgactggggagggctgggtgggtggggggcctcaggcgggatctcggggcggggggaggaggatggtgaccttgggagtcgccctgtcagcacgcacatgcttgggacccactccacacactccctgccagctttgttgcagcctcagctggtggtgtctccgtccttatcctagcctagctcgcagggtgagaaccactggagtggctggggctggccagaggtcaccgtttctccttcctgtgtgctccagtggcttttgaagacactgggttgggacctttttcctgaagagagctgggtgtagccagagctactggcacctaccccgagcatctctctctgtaagcagcttcaggggcagtccgtttctctgtgcttctgaaacccccttctcacgtttcaggccccagttttaactcaaggcctggggcaggggcgtttaattgatgatgacagaggacacaggtttttgccagcaaaaaggaaaaccaaggcttggtggaagggaaaggtggtgtgtcccctgttccctattccatctccctgggacttcctgctcatcatagtacccagtgagcccagagatcctactagactgggtcagcaattctagagaaccttccggaatagtctgggaacatggtcaaggtggaaggggctcccctagagagggtgggggtgtagttacttcccagttggccagaaaactgggccttgcagacccccttagcattttttccctttttttccttccctgctttctacttctttggggagccccttgtgttttggagtctgactggagtctcgcatcctggggcctgctccatccatccctcctgggcgccagaccctccatccaagccctgtgtctttccatagtcagggtcaggccctgcatctattccaaggggcactcagtacacattccataaattagctgggtgtccctgcacgcccaccccatgaaactcgagcaggtctctggaagccatttgtt

SEQ ID NO: 194534 - DNA, 5122 bp, Homo sapiens
  Payload ID: 18439
  Gene Name: transportin 2
  Uniprot ID: O14787
  ENST ID: ENST00000425528
  CDS Start-End: 359-3052
agagggaggcctttacgcatgccttggtggcggctttctgcacgtgtttctcagcccaggtttcagtccagcggaactggctacctcggaatcccaactgctcctttagggtgtcttccgcgattctccgagtggagttaggcgcctgccgacacttccctaaccttggaggcccgggacttgattttcatgaatgaacggagccgggactgactttgcctacggcaaagaaggaaaaacggtgccctactgtcttcagacgtcgcaaggatcaagaagatttctttcttcatgaccctgcccttgccagaatttcctgcgctgttccacctcattcaacttcagcttgccttgcgccatggactggcagccagacgagcagggcctgcagcaggtcctgcagctgctcaaagactcacagtcgcccaacacagccactcagcgcatcgtgcaggataaactcaaacaactcaatcagtttcctgacttcaacaactacctgattttcgtcctgaccagactcaagtcagaagatgagccaacgcgctctctcagtggcctcatcctcaagaacaacgtgaaggcacactatcagagcttcccaccccctgtggcagacttcatcaaacaggagtgtctcaacaacattggcgatgcctcctcgctcatccgagccaccattggcattctcatcaccaccatcgcttccaagggtgagctgcagatgtggcccgagctgctgccccagctctgcaacctgcttaactcggaggattacaacacttgtgagggagcctttggagccctgcagaagatctgtgaagactcatcagagcttctggacagtgacgccctcaacaggcccctcaacatcatgatccccaagttcctgcagttcttcaagcactgcagtcccaagatccggtcccacgccatcgcctgcgtgaaccagttcatcatggaccgggcccaggcgctgatggacaatattgacaccttcatcgagcacctatttgccctggctgtggatgatgaccccgaggtgcggaagaatgtgtgccgtgccctggtgatgcttctggaagtgcggattgacaggctcatcccccacatgcacagcatcatccagtacatgctgcagaggacccaggaccatgatgagaacgttgcccttgaggcctgtgagttctggctgacgctggccgagcagcccatctgcaaggaagtcctggcctcccatctggtccagttgatccccatcttggtgaatgggatgaagtactcggaaattgacatcatcctgctcaagggggatgtggaggaggatgaggctgtccccgacagtgagcaggacatcaagccacgcttccacaagtcacgcacggtcacactgccccacgaggctgagcggcctgatggctccgaggacgcggaggatgacgatgatgatgatgctctgtccgactggaatttgaggaagtgctcagcggctgcactggacgtcctcgccaatgtcttccgggaggaactgctgccccacctactcccactactcaaaggcctcctcttccaccccgagtgggtggtcaaggagtcgggcatcctggtgctgggcgccattgctgagggctgcatgcagggcatggtgccctacctgcctgagctgatcccgcacctgatccagtgcctgtcggataagaaggccttggtccgctccatcgcctgctggacgctgagccgctatgcccactgggtggtcagccagccacccgacatgcacctcaagcccctgatgacagagctgctcaaacgcatcctggatggcaacaagagggtacaggaggcggcctgcagtgcttttgccaccctggaggaagaggcctgcacggagctggtgccctacctcagctacatcctggacacccttgtctttgcctttgggaaataccagcacaagaacctgctcatcctctatgacgccattggcaccctggccgactctgtaggccaccacctcaaccagccggaatacatccagaagctgatgcccccactgatccagaagtggaatgagctcaaggacgaagacaaggacctcttccccctgctggagtgtctgtcatcggtggccaccgccctgcagagtggcttcctgccttactgtgagcccgtctaccagcgctgtgtcaccctggtgcagaagacactggctcaggccatgatgtacacccagcaccctgagcagtatgaggctcccgacaaggacttcatgatcgtagcactggatctgctcagcggcctggccgagggcctgggtggtcacgtggagcagctggtggcccgcagcaacatcatgacattgctgttccagtgcatgcaggactcgatgcctgaggtccggcagagctcctttgccctcctgggagacctcaccaaagcctgcttcatccatgtcaagccctgtatcgccgagttcatgcccattctgggcaccaacctgaacccagagttcatctccgtctgcaacaacgccacctgggccattggtgaaatctgcatgcagatgggggcagagatgcagccttatgtgcagatggtcctcaacaacctggtggaaatcattaaccgacccaacacacccaagacactgctggaaaacacaggtcgcctgacgagtccctctgccattccagccatcaccatcggccgcttgggctacgtgtgcccccaggaggtggcacccatgctgcagcagttcatccggccttggtgcacgtccctcaggaacatcagggacaacgaggagaaggactcagccttccgcggcatctgcatgatgatcggtgtcaacccggggggcgttgtgcaggactttattttcttctgcgatgctgtagcctcctgggtgagcccgaaggatgaccttcgggacatgttttataagattctccacggcttcaaagaccaagttggggaagataactggcagcagttctctgagcaattcccgccgctgctcaaggagaggctggcggctttctatggggtctaggtgatcatggagactgccaggtttctgtctgcgtcgtcgtcggagggattactggggagtgcgctgcatccggaagtcgctgtgccctggttgaggggggttagggaggagtgagtgggactcaaatccagatgccttccccgtccgtccgtccgtccgtccatccgtccacttgccctcctggcaggtgggtggggccaccatgctcatcctacaaacggggaggtgggggggacttctggtgggcaagggcccctgggctctaatagggtcatctctggcagcccacttgggccagctacgtgggagggaggaattacacagctgaccgaatccggcttcggatgaggtgagggaggagcaggtcaggaggggggccctcgtagggacgcgtacactcacacggacacacatggccacacgcatgtgcgggtgccataaccggcgaggctgggccagccgctccaccatttccccgactgcatggagacagtagaattagtgaacccctgagttaacccgtaaggccttccgtgtaacctgcatctagagtttaagaagcttctgctgttttgccggaattggcggtgactggggagggctgggtgggtggggggcctcaggcgggatctcggggcggggggaggaggatggtgaccttgggagtcgccctgtcagcacgcacatgcttgggacccactccacacactccctgccagctttgttgcagcctcagctggtggtgtctccgtccttatcctagcctagctcgcagggtgagaaccactggagtggctggggctggccagaggtcaccgtttctccttcctgtgtgctccagtggcttttgaagacactgggttgggacctttttcctgaagagagctgggtgtagccagagctactggcacctaccccgagcatctctctctgtaagcagcttcaggggcagtccgtttctctgtgcttctgaaacccccttctcacgtttcaggccccagttttaactcaaggcctggggcaggggcgtttaattgatgatgacagaggacacaggtttttgccagcaaaaaggaaaaccaaggcttggtggaagggaaaggtggtgtgtcccctgttccctattccatctccctgggacttcctgctcatcatagtacccagtgagcccagagatcctactagactgggtcagcaattctagagaaccttccggaatagtctgggaacatggtcaaggtggaaggggctcccctagagagggtgggggtgtagttacttcccagttggccagaaaactgggccttgcagacccccttagcattttttccctttttttccttccctgctttctacttctttggggagccccttgtgttttggagtctgactggagtctcgcatcctggggcctgctccatccatccctcctgggcgccagaccctccatccaagccctgtgtctttccatagtcagggtcaggccctgcatctattccaaggggcactcagtacacattccataaattagctgggtgtccctgcacgcccaccccatgaaactcgagcaggtctctggaagccatttgttaaaaaaaaaaaaaaaagttttaaaaataccttttaattttctggtaattccagttctttgaagcatcctctgctgggtcttggggtgtgtggatggattggctgtctgatgggattggtaacccctcgctactcaagatggggggatacaaacaccttcagggaaggggagcctggttcttctcgttttcctttttttttttttttttaaaaaaaaactatttaattttttaatttatttttggttgttttttgcacaatgaagtttcagcttctcaaccttctcccctacccagggctgtggacccagactggccttgagccacagtccctctttccctcctcaccctcttccccctgcgggctcccgggtctgtccatttgttactgtgctgtgctggggattggcgccgaggtggcgtgagattccacttgtgtagaactttgttgagtaaagatcagtttcttgtgaactcctta

SEQ ID NO: 194535 - DNA, 3056 bp, Homo sapiens
  Payload ID: 18439
  Gene Name: transportin 2
  Uniprot ID: O14787
  ENST ID: ENST00000588216
  CDS Start-End: 374-3037
atcggagggtgggggagagggaggcctttacgcatgccttggtggcggctttctgcacgtgtttctcagcccaggtttcagtccagcggaactggctacctcggaatcccaactgctcctttagggtgtcttccgcgattctccgagtggagttaggcgcctgccgacacttccctaaccttggaggcccgggacttgattttcatgaatgaacggagccgggactgactttgcctacggcaaagaaggaaaaacggtgccctactgtcttcagacgtcgcaaggatcaagaagatttctttcttcatgaccctgcccttgccagaatttcctgcgctgttccacctcattcaacttcagcttgccttgcgccatggactggcagccagacgagcagggcctgcagcaggtcctgcagctgctcaaagactcacagtcgcccaacacagccactcagcgcatcgtgcaggataaactcaaacaactcaatcagtttcctgacttcaacaactacctgattttcgtcctgaccagactcaagtcagaagatgagccaacgcgctctctcagtggcctcatcctcaagaacaacgtgaaggcacactatcagagcttcccaccccctgtggcagacttcatcaaacaggagtgtctcaacaacattggcgatgcctcctcgctcatccgagccaccattggcattctcatcaccaccatcgcttccaagggtgagctgcagatgtggcccgagctgctgccccagctctgcaacctgcttaactcggaggattacaacacttgtgagggagcctttggagccctgcagaagatctgtgaagactcatcagagcttctggacagtgacgccctcaacaggcccctcaacatcatgatccccaagttcctgcagttcttcaagcactgcagtcccaagatccggtcccacgccatcgcctgcgtgaaccagttcatcatggaccgggcccaggcgctgatggacaatattgacaccttcatcgagcacctatttgccctggctgtggatgatgaccccgaggtgcggaagaatgtgtgccgtgccctggtgatgcttctggaagtgcggattgacaggctcatcccccacatgcacagcatcatccagtacatgctgcagaggacccaggaccatgatgagaacgttgcccttgaggcctgtgagttctggctgacgctggccgagcagcccatctgcaaggaagtcctggcctcccatctggtccagttgatccccatcttggtgaatgggatgaagtactcggaaattgacatcatcctgctcaagggggatgtggaggaggatgaggctgtccccgacagtgagcaggacatcaagccacgcttccacaagtcacgcacggtcacactgccccacgaggctgagcggcctgatggctccgaggacgcggaggatgacgatgatgatgatgctctgtccgactggaatttgaggaagtgctcagcggctgcactggacgtcctcgccaatgtcttccgggaggaactgctgccccacctactcccactactcaaaggcctcctcttccaccccgagtgggtggtcaaggagtcgggcatcctggtgctgggcgccattgctgagggctgcatgcagggcatggtgccctacctgcctgagctgatcccgcacctgatccagtgcctgtcggataagaaggccttggtccgctccatcgcctgctggacgctgagccgctatgcccactgggtggtcagccagccacccgacatgcacctcaagcccctgatgacagagctgctcaaacgcatcctggatggcaacaagagggtacaggaggcggcctgcagtgcttttgccaccctggaggaagaggcctgcacggagctggtgccctacctcagctacatcctggacacccttgtctttgcctttgggaaataccagcacaagaacctgctcatcctctatgacgccattggcaccctggccgactctgtaggccaccacctcaaccagccggaatacatccagaagctgatgcccccactgatccagaagtggaatgagctcaaggacgaagacaaggacctcttccccctgctggagtgtctgtcatcggtggccaccgccctgcagagtggcttcctgccttactgtgagcccgtctaccagcgctgtgtcaccctggtgcagaagacactggctcaggccatgatgtacacccagcaccctgagcagtatgaggctcccgacaaggacttcatgatcgtagcactggatctgctcagcggcctggccgagggcctgggtggtcacgtggagcagctggtggcccgcagcaacatcatgacattgctgttccagtgcatgcaggactcgatgcctgaggtccggcagagctcctttgccctcctgggagacctcaccaaagcctgcttcatccatgtcaagccctgtatcgccgagttcatgcccattctgggcaccaacctgaacccagagttcatctccgtctgcaacaacgccacctgggccattggtgaaatctgcatgcagatgggggcagagatgcagccttatgtgcagatggtcctcaacaacctggtggaaatcattaaccgacccaacacacccaagacactgctggaaaacacagccatcaccatcggccgcttgggctacgtgtgcccccaggaggtggcacccatgctgcagcagttcatccggccttggtgcacgtccctcaggaacatcagggacaacgaggagaaggactcagccttccgcggcatctgcatgatgatcggtgtcaacccggggggcgttgtgcaggactttattttcttctgcgatgctgtagcctcctgggtgagcccgaaggatgaccttcgggacatgttttataagattctccacggcttcaaagaccaagttggggaagataactggcagcagttctctgagcaattcccgccgctgctcaaggagaggctggcggctttctatggggtctaggtgatcatggagactgcca

SEQ ID NO: 194536 - DNA, 737 bp, Homo sapiens
  Payload ID: 18439
  Gene Name: transportin 2
  ENST ID: ENST00000588491
  CDS Start-End: 1-358
ctgggtggtcagccagccacccgacatgcacctcaagcccctgatgacagagctgctcaaacgcatcctggatggcaacaagagggtacaggaggcggcctgcagtgcttttgccaccctggaggaagaggcctgcacggagctggtgccctacctcagctacatcctggacacccttgtctttgcctttgggaaataccagcacaagaacctgctcatcctctatgacgccattggcaccctggccgactctgtaggccaccacctcaaccagccggtacctgagtcacagtctgccaccccgacccagggagcgcccatttcgtgctccctctccaggaatacatccagaagctgatgcccccactgatccagaagtggaatgagctcaaggacgaagacaaggacctcttccccctgctggagtgtctgtcatcggtggccaccgccctgcagagtggcttcctgccttactgtgagcccgtctaccagcgctgtgtcaccctggtgcagaagacactggctcaggccatgatgtacacccagcaccctgagcagtatgaggctcccgacaaggacttcatgatcgtagcactggatctgctcagcggcctggccgagggcctgggtggtcacgtggagcagctggtggcccgcagcaacatcatgacattgctgttccagtgcatgcaggactcgatgcctgaggtccggcagagctcctttgccctcctggg

SEQ ID NO: 194537 - DNA, 547 bp, Homo sapiens
  Payload ID: 18439
  Gene Name: transportin 2
  ENST ID: ENST00000590781
  CDS Start-End: 379-547
cagtaaaagaacagccttgagccttggagggtaaagccacgtttttaaggaacaattcagagctggccaggtcatgcttaacttggatgatctctaatcgcgcgaactgctcttatacccatttgacaagtggggaaactgaggcttcaagtggcaggaggtctcccactttgttatcggcagggcagggaggggaaaccaagacgctacagggtctccagctttttaccatctgctcctctctcaagagaaggaaaaacggtgccctactgtcttcagacgtcgcaaggatcaagaagatttctttcttcatgaccctgcccttgccagaatttcctgcgctgttccacctcattcaacttcagcttgccttgcgccatggactggcagccagacgagcagggcctgcagcaggtcctgcagctgctcaaagactcacagtcgcccaacacagccactcagcgcatcgtgcaggataaactcaaacaactcaatcagtttcctgacttcaacaactacctgattttcgtcctgaccagactcaagt

SEQ ID NO: 194538 - DNA, 945 bp, Homo sapiens
  Payload ID: 18439
  Gene Name: transportin 2
  ENST ID: ENST00000586775
  CDS Start-End: 168-497
agagcttagggggtggggcctcggagccaggccatgtcggggctcctcaagaagagggccagtgggactgctggggtcgggctggaggggatctgattgggggaagcgtctggggactgcttggggcctgattgggggacgtcgcgaggatcggcttgccttgcgccatggactggcagccagacgagcagggcctgcagcaggtcctgcagctgctcaaagactcacagtcgcccaacacagccactcagcgcatcgtgcaggataaactcaaacaactcaatcagtttcctgacttcaacaactacctgattttcgtcctgaccagactcaagtcagaagatgagccaacgcgctctctcagtggcctcatcctcaagaacaacgtgaaggcacactatcagagcttcccaccccctgtggcagacttcatcaaacaggagtgtctcaacaacattggcgatgcctcctcgctcatccgagccaccattgggtgagctgcagatgtggcccgagctgctgccccagctctgcaacctgcttaactcggaggattacaacacttgtgagggagcctttggagccctgcagaagatctgtgaagactcatcagagcttctggacagtgacgccctcaacaggcccctcaacatcatgatccccaagttcctgcagttcttcaagcactgcagtcccaagatccggtcccacgccatcgcctgcgtgaaccagttcatcatggaccgggcccaggcgctgatggacaatattgacaccttcatcgagcacctatttgccctggctgtggatgatgaccccgaggtgcggaagaatgtgtgccgtgccctggtgatgcttctggaagtgcggattgacaggctcatcccccacatgcacagcatcatccagtacatgctgcagaggacccaggaccatgatgagaac

SEQ ID NO: 194539 - DNA, 541 bp, Homo sapiens
  Payload ID: 18439
  Gene Name: transportin 2
  ENST ID: ENST00000589337
  CDS Start-End: 286-541
agtccagcggaactggctacctcggaatcccaactgctcctttagggtgtcttccgcgattctccgagtggagttaggcgcctgccgacacttccctaaccttggaggcccgggacttgattttcatgaatgaacggagccgggactgactttgcctacggaaaaacggtgccctactgtcttcagacgtcgcaaggatcaagaagatttctttcttcatgaccctgcccttgccagaatttcctgcgctgttccacctcattcaacttcagcttgccttgcgccatggactggcagccagacgagcagggcctgcagcaggtcctgcagctgctcaaagactcacagtcgcccaacacagccactcagcgcatcgtgcaggataaactcaaacaactcaatcagtttcctgacttcaacaactacctgattttcgtcctgaccagactcaagtcagaagatgagccaacgcgctctctcagtggcctcatcctcaagaacaacgtgaaggcacactatcagagcttcccaccccctgtgg

SEQ ID NO: 194540 - DNA, 2362 bp, Homo sapiens
  Payload ID: 18439
  Gene Name: transportin 2
  ENST ID: ENST00000585886
  CDS Start-End: 63-2362
ctctggagaagccgcagcgcgagttgccgccgctgctgcccggggccggcttgccttgcgccatggactggcagccagacgagcagggcctgcagcaggtcctgcagctgctcaaagactcacagtcgcccaacacagccactcagcgcatcgtgcaggataaactcaaacaactcaatcagtttcctgacttcaacaactacctgattttcgtcctgaccagactcaagtcagaagatgagccaacgcgctctctcagtggcctcatcctcaagaacaacgtgaaggcacactatcagagcttcccaccccctgtggcagacttcatcaaacaggagtgtctcaacaacattggcgatgcctcctcgctcatccgagccaccattggcattctcatcaccaccatcgcttccaagggtgagctgcagatgtggcccgagctgctgccccagctctgcaacctgcttaactcggaggattacaacacttgtgagggagcctttggagccctgcagaagatctgtgaagactcatcagagcttctggacagtgacgccctcaacaggcccctcaacatcatgatccccaagttcctgcagttcttcaagcactgcagtcccaagatccggtcccacgccatcgcctgcgtgaaccagttcatcatggaccgggcccaggcgctgatggacaatattgacaccttcatcgagcacctatttgccctggctgtggatgatgaccccgaggtgcggaagaatgtgtgccgtgccctggtgatgcttctggaagtgcggattgacaggctcatcccccacatgcacagcatcatccagtacatgctgcagaggacccaggaccatgatgagaacgttgcccttgaggcctgtgagttctggctgacgctggccgagcagcccatctgcaaggaagtcctggcctcccatctggtccagttgatccccatcttggtgaatgggatgaagtactcggaaattgacatcatcctgctcaagggggatgtggaggaggatgaggctgtccccgacagtgagcaggacatcaagccacgcttccacaagtcacgcacggtcacactgccccacgaggctgagcggcctgatggctccgaggacgcggaggatgacgatgatgatgatgctctgtccgactggaatttgaggaagtgctcagcggctgcactggacgtcctcgccaatgtcttccgggaggaactgctgccccacctactcccactactcaaaggcctcctcttccaccccgagtgggtggtcaaggagtcgggcatcctggtgctgggcgccattgctgagggctgcatgcagggcatggtgccctacctgcctgagctgatcccgcacctgatccagtgcctgtcggataagaaggccttggtccgctccatcgcctgctggacgctgagccgctatgcccactgggtggtcagccagccacccgacatgcacctcaagcccctgatgacagagctgctcaaacgcatcctggatggcaacaagagggtacaggaggcggcctgcagtgcttttgccaccctggaggaagaggcctgcacggagctggtgccctacctcagctacatcctggacacccttgtctttgcctttgggaaataccagcacaagaacctgctcatcctctatgacgccattggcaccctggccgactctgtaggccaccacctcaaccagccggaatacatccagaagctgatgcccccactgatccagaagtggaatgagctcaaggacgaagacaaggacctcttccccctgctggagtgtctgtcatcggtggccaccgccctgcagagtggcttcctgccttactgtgagcccgtctaccagcgctgtgtcaccctggtgcagaagacactggctcaggccatgatgtacacccagcaccctgagcagtatgaggctcccgacaaggacttcatgatcgtagcactggatctgctcagcggcctggccgagggcctgggtggtcacgtggagcagctggtggcccgcagcaacatcatgacattgctgttccagtgcatgcaggactcgatgcctgaggtccggcagagctcctttgccctcctgggagacctcaccaaagcctgcttcatccatgtcaagccctgtatcgccgagttcatgcccattctgggcaccaacctgaacccagagttcatctccgtctgcaacaacgccacctgggccattggtgaaatctgcatgcagatgggggcagagatgcagccttatgtgcagatggtcctcaacaacctggtggaaatcattaaccgacccaacacacccaagacactgctggaaaa

SEQ ID NO: 194541 - DNA, 2914 bp, Homo sapiens
  Payload ID: 18439
  Gene Name: transportin 2
  Uniprot ID: O14787
  ENST ID: ENST00000592287
  CDS Start-End: 110-2803
tttttttttttaattctctctctttggctccctccttccgcgcgagtctctggagaagccgcagcgcgagttgccgccgctgctgcccggggccggcttgccttgcgccatggactggcagccagacgagcagggcctgcagcaggtcctgcagctgctcaaagactcacagtcgcccaacacagccactcagcgcatcgtgcaggataaactcaaacaactcaatcagtttcctgacttcaacaactacctgattttcgtcctgaccagactcaagtcagaagatgagccaacgcgctctctcagtggcctcatcctcaagaacaacgtgaaggcacactatcagagcttcccaccccctgtggcagacttcatcaaacaggagtgtctcaacaacattggcgatgcctcctcgctcatccgagccaccattggcattctcatcaccaccatcgcttccaagggtgagctgcagatgtggcccgagctgctgccccagctctgcaacctgcttaactcggaggattacaacacttgtgagggagcctttggagccctgcagaagatctgtgaagactcatcagagcttctggacagtgacgccctcaacaggcccctcaacatcatgatccccaagttcctgcagttcttcaagcactgcagtcccaagatccggtcccacgccatcgcctgcgtgaaccagttcatcatggaccgggcccaggcgctgatggacaatattgacaccttcatcgagcacctatttgccctggctgtggatgatgaccccgaggtgcggaagaatgtgtgccgtgccctggtgatgcttctggaagtgcggattgacaggctcatcccccacatgcacagcatcatccagtacatgctgcagaggacccaggaccatgatgagaacgttgcccttgaggcctgtgagttctggctgacgctggccgagcagcccatctgcaaggaagtcctggcctcccatctggtccagttgatccccatcttggtgaatgggatgaagtactcggaaattgacatcatcctgctcaagggggatgtggaggaggatgaggctgtccccgacagtgagcaggacatcaagccacgcttccacaagtcacgcacggtcacactgccccacgaggctgagcggcctgatggctccgaggacgcggaggatgacgatgatgatgatgctctgtccgactggaatttgaggaagtgctcagcggctgcactggacgtcctcgccaatgtcttccgggaggaactgctgccccacctactcccactactcaaaggcctcctcttccaccccgagtgggtggtcaaggagtcgggcatcctggtgctgggcgccattgctgagggctgcatgcagggcatggtgccctacctgcctgagctgatcccgcacctgatccagtgcctgtcggataagaaggccttggtccgctccatcgcctgctggacgctgagccgctatgcccactgggtggtcagccagccacccgacatgcacctcaagcccctgatgacagagctgctcaaacgcatcctggatggcaacaagagggtacaggaggcggcctgcagtgcttttgccaccctggaggaagaggcctgcacggagctggtgccctacctcagctacatcctggacacccttgtctttgcctttgggaaataccagcacaagaacctgctcatcctctatgacgccattggcaccctggccgactctgtaggccaccacctcaaccagccggaatacatccagaagctgatgcccccactgatccagaagtggaatgagctcaaggacgaagacaaggacctcttccccctgctggagtgtctgtcatcggtggccaccgccctgcagagtggcttcctgccttactgtgagcccgtctaccagcgctgtgtcaccctggtgcagaagacactggctcaggccatgatgtacacccagcaccctgagcagtatgaggctcccgacaaggacttcatgatcgtagcactggatctgctcagcggcctggccgagggcctgggtggtcacgtggagcagctggtggcccgcagcaacatcatgacattgctgttccagtgcatgcaggactcgatgcctgaggtccggcagagctcctttgccctcctgggagacctcaccaaagcctgcttcatccatgtcaagccctgtatcgccgagttcatgcccattctgggcaccaacctgaacccagagttcatctccgtctgcaacaacgccacctgggccattggtgaaatctgcatgcagatgggggcagagatgcagccttatgtgcagatggtcctcaacaacctggtggaaatcattaaccgacccaacacacccaagacactgctggaaaacacaggtcgcctgacgagtccctctgccattccagccatcaccatcggccgcttgggctacgtgtgcccccaggaggtggcacccatgctgcagcagttcatccggccttggtgcacgtccctcaggaacatcagggacaacgaggagaaggactcagccttccgcggcatctgcatgatgatcggtgtcaacccggggggcgttgtgcaggactttattttcttctgcgatgctgtagcctcctgggtgagcccgaaggatgaccttcgggacatgttttataagattctccacggcttcaaagaccaagttggggaagataactggcagcagttctctgagcaattcccgccgctgctcaaggagaggctggcggctttctatggggtctaggtgatcatggagactgccaggtttctgtctgcgtcgtcgtcggagggattactggggagtgcgctgcatccggaagtcgctgtgccctggttgaggggggttagggaggag

SEQ ID NO: 194542 - DNA, 575 bp, Homo sapiens
  Payload ID: 18439
  Gene Name: transportin 2
  ENST ID: ENST00000587654
  CDS Start-End: 75-404
ttccgcgcgagtctctggagaagccgcagcgcgagttgccgccgctgctgcccggggccggcttgccttgcgccatggactggcagccagacgagcagggcctgcagcaggtcctgcagctgctcaaagactcacagtcgcccaacacagccactcagcgcatcgtgcaggataaactcaaacaactcaatcagtttcctgacttcaacaactacctgattttcgtcctgaccagactcaagtcagaagatgagccaacgcgctctctcagtggcctcatcctcaagaacaacgtgaaggcacactatcagagcttcccaccccctgtggcagacttcatcaaacaggagtgtctcaacaacattggcgatgcctcctcgctcatccgagccaccattgggtgagctgcagatgtggcccgagctgctgccccagctctgcaacctgcttaactcggaggattacaacacttgtgagggagcctttggagccctgcagaagatctgtgaagactcatcagagcttctggacagtgacgccctcaacaggcccctcaacatcatgatccccaagtt

SEQ ID NO: 194543 - DNA, 564 bp, Homo sapiens
  Payload ID: 18439
  Gene Name: transportin 2
  ENST ID: ENST00000589149
  CDS Start-End: 1-354
caagacactgctggaaaacacagccatcaccatcggccgcttgggctacgtgtgcccccaggaggtggcacccatgctgcagcagttcatccggccttggtgcacgtccctcaggaacatcagggacaacgaggagaaggactcagccttccgcggcatctgcatgatgatcggtgtcaacccggggggcgttgtgcagcctcctgggtgagcccgaaggatgaccttcgggacatgttttataagattctccacggcttcaaagaccaagttggggaagataactggcagcagttctctgagcaattcccgccgctgctcaaggagaggctggcggctttctatggggtctaggtgatcatggagactgccaggtttctgtctgcgtcgtcgtcggagggattactggggagtgcgctgcatccggaagtcgctgtgccctggttgaggggggttagggaggagtgagtgggactcaaatccagatgccttccccgtccgtccgtccgtccgtccatccgtccacttgccctcctggcaggtgggtggggccaccatgctcat

SEQ ID NO: 194544 - DNA, 586 bp, Homo sapiens
  Payload ID: 18439
  Gene Name: transportin 2
  ENST ID: ENST00000589572
  CDS Start-End: 1-156
gggaaataccagcacaagaacctgctcatcctctatgacgccattggcaccctggccgactctgtaggccaccacctcaaccagccgggacgtggccgtgacctcgacaggcagacagacagacccggccccgccctcgccctgctcccagtctagtgggggagaaagacagttatgagacagcgtggaatacatccagaagctgatgcccccactgatccagaagtggaatgagctcaaggacgaagacaaggacctcttccccctgctggagtgtctgtcatcggtggccaccgccctgcagagtggcttcctgccttactgtgagcccgtctaccagcgctgtgtcaccctggtgcagaagacactggctcaggccatgatgtacacccagcaccctgagcagtatgaggctcccgacaaggacttcatgatcgtagcactggatctgctcagcggcctggccgagggcctgggtggtcacgtggagcagctggtggcccgcagcaacatcatgacattgctgttccagtgcatgcaggactcgatgcctgaggtccggcagagctcctttgccctcctggga

SEQ ID NO: 194545 - DNA, 4153 bp, Homo sapiens
  Payload ID: 18440
  Gene Name: transportin 3
  Uniprot ID: Q9Y5L0
  ENST ID: ENST00000265388
  CDS Start-End: 145-2916
ccctggtaacggccaaagaggaggagatggcgccagtcagggagcggccgtggcccagacagtgaggaagcgcgaaggcggagcaaccgaggaatcctccggagaagaatcagagccgtcgctaccgccactaccgccaccaccatggaaggagcaaagccgacattgcagctcgtgtaccaggcagtgcaggcgctttaccacgacccagatcccagcggaaaggagcgcgcctctttttggcttggggagctgcagcgttcggttcatgcatgggagatctcagaccagttgttacagatccggcaggatgtggagtcatgctattttgctgcacagaccatgaaaatgaagattcagacctcattttatgagctccccacagactctcatgcctctttacgggactcattgctaacccatatccagaacttgaaagacttgtcacctgttattgtaacgcagctggctttagcaatagcagatcttgccctacagatgccttcctggaagggatgtgtgcaaacactggtggaaaaatacagcaatgatgtgacttctttgccttttttgctggagatccttacagtgttacctgaagaagtacatagtcgttccttacgaattggagctaatcggcgcacagaaattatagaagatttggccttctactctagtacagtagtatctctattgatgacctgtgtagaaaaagcaggaacagatgagaaaatgcttatgaaggtttttcgctgtttgggaagttggtttaacttgggagttttggacagtaacttcatggctaacaataaattactagcactcctttttgaggttttgcaacaggataagacctcgtctaacctacatgaagctgcttcggactgtgtatgctcagctctctatgccattgagaatgtggagactaacttgccattagccatgcaactttttcagggagtgctgacattggagactgcctatcatatggccgtggcacgtgaagatttagacaaagttctgaattactgccgtattttcactgaactatgtgaaacttttcttgaaaaaattgtttgtactccaggccaaggtcttggggaccttcgaactctggagctgctgcttatctgtgcaggccatcctcaatatgaggtagtagaaatttcatttaacttttggtaccgactgggggaacatttgtacaaaactaacgatgaagttattcatggcatcttcaaagcttacattcagaggctgcttcacgccttggctcgacactgccagctggaaccagaccatgagggggttcctgaggagactgatgactttggggagtttcgcatgagggtatcagacctggtaaaggacttgattttcttgatagggtctatggagtgttttgctcagttatattctactctgaaagaaggcaacccaccctgggaggtgacagaagcggttctctttatcatggctgctatagcaaagagtgttgatccggaaaacaatccaacacttgtggaagtcctagaaggagttgtccgcctcccggagaccgtacatacggctgtgcgatacaccagcattgaattggttggagagatgagtgaagtcgttgatcgaaatcctcagttccttgaccctgtgttgggctatttgatgaaaggcctgtgtgaaaagcccctggcttctgctgcagccaaagccattcataacatttgctctgtctgccgagatcacatggctcagcactttaatggactcctggagattgcccgctccctcgattccttcctgttgtctccagaagctgctgtgggcttgctaaaagggacagcacttgtcctagcccgattacctttggataagattaccgaatgtcttagtgaactatgttctgttcaggttatggcattgaaaaagctgttgtctcaagagcccagcaatggcatatcctcagatcccacagtgttcttagatcgccttgcagtgatatttaggcataccaatcccattgtggaaaatggacagactcatccgtgtcagaaagtcatacaggaaatatggccagttttatccgagactctaaataagcaccgagctgataatcggattgtagagcgttgttgcaggtgcctgcgctttgctgttcgctgtgtaggcaaaggatctgcagcactgctgcagccactagtcacacagatggtgaatgtgtaccacgtacatcagcattcctgcttcctgtaccttggcagtatccttgtggatgaatatggcatggaagaaggctgtcggcagggactgctagacatgctccaggcactgtgcatccccacctttcagctcctagaacagcagaatggtctccagaatcaccctgacactgtagatgacctgttccggctagccaccaggtttattcagcgtagccctgtcaccttgctgcggagccaagtggtcatccctatcttacagtgggccattgcctctactaccctggaccaccgggatgccaattgtagtgtcatgaggtttctacgagacctcattcatacaggggtagccaatgatcatgaagaagactttgaattacggaaagaactgattggacaggtgatgaaccagcttggacagcagcttgtcagccagctgctgcacacctgctgcttttgcctccccccctataccctaccagatgtggctgaagtgctctgggagatcatgcaggttgacagaccgactttttgtcgatggttagaaaattccttaaaaggtttgccaaaggaaacaaccgtgggagccgtcacagtgacacacaaacaacttacagacttccacaagcaagtcactagtgctgaggaatgtaaacaagtttgctgggccttgcgagacttcaccaggttgtttcgatagctcacactcctgcactgtgcctgtcacccaggaatgtcttttttaattagaagacaggaagaaaacaaaaaccagactgtgtcccacaatcagaaacctccgttgtggcagaggggccttcaccgccaccagggtgtcccgccagacagggagagactccagccttctgaggccatcctgaggagttcctgtttgggggtgtgagggaaaatcagcgcggattttaaaaagatggctgtggcctgcccggcgtggtgggaggggagctggtttcctggtgaactttctaaaaggaaaaataattttaagtaaagaaaaaagaaaaaaaaggaagactaaacagaaaccagaactgaaacattcacctggtagcaaatgacacatgcacgcacacacacatacacgcacaagcgccagtgcgcacgtgtacacagaaaaacaaaaggacaagctttctgtgaaacaaaatatttacttagggataatgtggggattcacatgaattaaatagctgcaattggaagaagagggtcagggtcatttgttcaggttttctattgttttgtcctctctttcctctcctacccttccttctctttctctctcccctccttttaaatgcaaatgagtagaaatttcttctaccttccccagctgtttcttcccacctttagagttgtttagacaaggaggagtaagcaaggaacttgttctgctttctatcgtggtcacattggtgatgctcgggacctgccagggtcagaatttatggatatctgaaccctgaccccgttcattctctcagtccacttccaatccacatcagtttgttgtctgccttggagagaagagccaaaactggggtgggcgggtgggtggggagtgcaggatataaatgtgtaagtttttgttttttaaggtttttttcttagtgaattattcacccacagacatgagagaaaaaaagagggagggtgtgtggagaaaaaatgtttacagggctaacaagggatgatgtgtcatttagtatgttactaaaaagtgtggaaatgacttgattttaaggggagggtgaggccgaagagggaagcccaaagcagatcttaatgtttcaaaggagtgcagcccttcacagccatcagatatgagggcactgttctgtctggtgttgtagccatctcaagaacaaatcaacagcaacaaaagagaaagaataaatttttaaaatttaaccagt

SEQ ID NO: 194546 - DNA, 3019 bp, Homo sapiens
  Payload ID: 18440
  Gene Name: transportin 3
  ENST ID: ENST00000471166
  CDS Start-End: 114-2987
gccagtcagggagcggccgtggcccagacagtgaggaagcgcgaaggcggagcaaccgaggaatcctccggagaagaatcagagccgtcgctaccgccactaccgccaccaccatggaaggagcaaagccgacattgcagctcgtgtaccaggcagtgcaggcgctttaccacgacccagatcccagcggaaaggagcgcgcctctttttggcttggggagctgcagcgttcggttcatgcatgggagatctcagaccagttgttacagatccggcaggatgtggagtcatgctattttgctgcacagaccatgaaaatgaagattcagacctcattttatgagctccccacagactctcatgcctctttacgggactcattgctaacccatatccagaacttgaaagacttgtcacctgttattgtaacgcagctggctttagcaatagcagatcttgccctacagatgccttcctggaagggatgtgtgcaaacactggtggaaaaatacagcaatgatgtgacttctttgccttttttgctggagatccttacagtgttacctgaagaagtacatagtcgttccttacgaattggagctaatcggcgcacagaaattatagaagatttggccttctactctagtacagtagtatctctattgatgacctgtgtagaaaaagcaggaacagatgagaaaatgcttatgaaggtttttcgctgtttgggaagttggtttaacttgggagttttggacagtaacttcatggctaacaataaattactagcactcctttttgaggttttgcaacaggataagacctcgtctaacctacatgaagctgcttcggactgtgtatgctcagctctctatgccattgagaatgtggagactaacttgccattagccatgcaactttttcagggagtgctgacattggagactgcctatcatatggccgtggcacgtgaagatttagacaaagttctgaattactgccgtattttcactgaactatgtgaaacttttcttgaaaaaattgtttgtactccaggccaaggtcttggggaccttcgaactctggagctgctgcttatctgtgcaggccatcctcaatatgaggtagtagaaatttcatttaacttttggtaccgactgggggaacatttgtacaaaactaacgatgaagttattcatggcatcttcaaagcttacattcagaggctgcttcacgccttggctcgacactgccagctggaaccagaccatgagggggttcctgaggagactgatgactttggggagtttcgcatgagggtatcagacctggtaaaggacttgattttcttgatagggtctatggagtgttttgctcagttatattctactctgaaagaaggcaacccaccctgggaggtgacagaagcggttctctttatcatggctgctatagcaaagagtgttgatccaaagaagccctttagcaatgctgtgtgtcgtcacagcctgttatttggccagaatataacctctgaaatcagtaactgtgagtacttaccgcctgtactcagggaaaacaatccaacacttgtggaagtcctagaaggagttgtccgcctcccggagaccgtacatacggctgtgcgatacaccagcattgaattggttggagagatgagtgaagtcgttgatcgaaatcctcagttccttgaccctgtgttgggctatttgatgaaaggcctgtgtgaaaagcccctggcttctgctgcagccaaagccattcataacatttgctctgtctgccgagatcacatggctcagcactttaatggactcctggagattgcccgctccctcgattccttcctgttgtctccagaagctgctgtgggcttgctaaaagggacagcacttgtcctagcccgattacctttggataagattaccgaatgtcttagtgaactatgttctgttcaggttatggcattgaaaaagctgttgtctcaagagcccagcaatggcatatcctcagatcccacagtgttcttagatcgccttgcagtgatatttaggcataccaatcccattgtggaaaatggacagactcatccgtgtcagaaagtcatacaggaaatatggccagttttatccgagactctaaataagcaccgagctgataatcggattgtagagcgttgttgcaggtgcctgcgctttgctgttcgctgtgtaggcaaaggatctgcagcactgctgcagccactagtcacacagatggtgaatgtgtaccacgtacatcagcattcctgcttcctgtaccttggcagtatccttgtggatgaatatggcatggaagaaggctgtcggcagggactgctagacatgctccaggcactgtgcatccccacctttcagctcctagaacagcagaatggtctccagaatcaccctgacactgtagatgacctgttccggctagccaccaggtttattcagcgtagccctgtcaccttgctgcggagccaagtggtcatccctatcttacagtgggccattgcctctactaccctggaccaccgggatgccaattgtagtgtcatgaggtttctacgagacctcattcatacaggggtagccaatgatcatgaagaagactttgaattacggaaagaactgattggacaggtgatgaaccagcttggacagcagcttgtcagccagctgctgcacacctgctgcttttgcctccccccctataccctaccagatgtggctgaagtgctctgggagatcatgcaggttgacagaccgactttttgtcgatggttagaaaattccttaaaaggtttgccaaaggaaacaaccgtgggagccgtcacagtgacacacaaacaacttacagacttccacaagcaagtcactagtgctgaggaatgtaaacaagtttgctgggccttgcgagacttcaccaggttgtttcgatagctcacactcctgcactgtgcctgtcacccagg

SEQ ID NO: 194547 - DNA, 3283 bp, Homo sapiens
  Payload ID: 18440
  Gene Name: transportin 3
  Uniprot ID: Q9Y5L0
  ENST ID: ENST00000471234
  CDS Start-End: 375-2954
aaaggtatcggtgctgtcgcttccggtccgggtaaacgaaccttaggtacactggtgtgtggcctcccaagataggcttctgagggcaagtcagcgactgaagacgggagcgccagaatctgtggactcaagagtctagaatcaagtggaaaaaccggaaaaaaggccaggaacctgaatacgacctaatagctgtttccgagggggcaacttccacggagagccttctgccctggtaacggccaaagaggaggagatggcgccagtcagggagcggccgtggcccagacagtgaggaagcgcgaaggcggagcaaccgaggaatcctccggagaagaatcagagccgtcgctaccgccactaccgccaccaccatggaaggagcaaagccgacattgcagctcgtgtaccaggcagtgcaggcgctttaccacgacccagatcccagcggaaaggagcgcgcctctttttggcttggggagctgcagcgttcggttcatgcatgggagatctcagaccagttgttacagatccggcaggatgtggagtcatgctattttgctgcacagaccatgaaaatgaagattcagacctcattttatgagctccccacagactctcatgcctctttacgggactcattgctaacccatatccagaacttgaaagacttgtcacctgttattgtaacgcagctggctttagcaatagcagatcttgccctacagatgccttcctggaagggatgtgtgcaaacactggtggaaaaatacagcaatgatgtgacttctttgccttttttgctggagatccttacagtgttacctgaagaagtacatagtcgttccttacgaattggagctaatcggcgcacagaaattatagaagatttggccttctactctagtacagtagtatctctattgatgacctgtgtagaaaaagcaggaacagatgagaaaatgcttatgaaggtttttcgctgtttgggaagttggtttaacttgggagttttggacagtaacttcatggctaacaataaattactagcactcctttttgaggttttgcaacaggataagacctcgtctaacctacatgaagctgcttcggactgtgtatgctcagctctctatgccattgagaatgtggagactaacttgccattagccatgcaactttttcagggagtgctgacattggagactgcctatcatatggccgtggcacgtgaagatttagacaaagttctgaattactgccgtattttcactgaactatgtgaaacttttcttgaaaaaattgtttgtactccaggccaaggtcttggggaccttcgaactctggagctgctgcttatctgtgcaggccatcctcaatatgaggtagtagaaatttcatttaacttttggtaccgactgggggaacatttgtacaaaactaacgatgaagttattcatggcatcttcaaagcttacattcagaggctgcttcacgccttggctcgacactgccagctggaaccagaccatgagggggttcctgaggagactgatgactttggggagtttcgcatgagggtatcagacctggtaaaggacttgattttcttgatagggtctatggagtgttttgctcagttatattctactctgaaagaaggcaacccaccctgggaggtgacagaagcggttctctttatcatggctgctatagcaaagagtgttgatccggaaaacaatccaacacttgtggaagtcctagaaggagttgtccgcctcccggagaccgtacatacggctgtgcgatacaccagcattgaattggttggagagatgagtgaagtcgttgatcgaaatcctcagttccttgggacagcacttgtcctagcccgattacctttggataagattaccgaatgtcttagtgaactatgttctgttcaggttatggcattgaaaaagctgttgtctcaagagcccagcaatggcatatcctcagatcccacagtgttcttagatcgccttgcagtgatatttaggcataccaatcccattgtggaaaatggacagactcatccgtgtcagaaagtcatacaggaaatatggccagttttatccgagactctaaataagcaccgagctgataatcggattgtagagcgttgttgcaggtgcctgcgctttgctgttcgctgtgtaggcaaaggatctgcagcactgctgcagccactagtcacacagatggtgaatgtgtaccacgtacatcagcattcctgcttcctgtaccttggcagtatccttgtggatgaatatggcatggaagaaggctgtcggcagggactgctagacatgctccaggcactgtgcatccccacctttcagctcctagaacagcagaatggtctccagaatcaccctgacactgtagatgacctgttccggctagccaccaggtttattcagcgtagccctgtcaccttgctgcggagccaagtggtcatccctatcttacagtgggccattgcctctactaccctggaccaccgggatgccaattgtagtgtcatgaggtttctacgagacctcattcatacaggggtagccaatgatcatgaagaagactttgaattacggaaagaactgattggacaggtgatgaaccagcttggacagcagcttgtcagccagctgctgcacacctgctgcttttgcctccccccctataccctaccagatgtggctgaagtgctctgggagatcatgcaggttgacagaccgactttttgtcgatggttagaaaattccttaaaaggtttgccaaaggaaacaaccgtgggagccgtcacagtgacacacaaacaacttacagacttccacaagcaagtcactagtgctgaggaatgtaaacaagtttgctgggccttgcgagacttcaccaggttgtttcgatagctcacactcctgcactgtgcctgtcacccaggaatgtcttttttaattagaagacaggaagaaaacaaaaaccagactgtgtcccacaatcagaaacctccgttgtggcagaggggccttcaccgccaccagggtgtcccgccagacagggagagactccagccttctgaggccatcctgaggagttcctgtttgggggtgtgagggaaaatcagcgcggattttaaaaagatggctgtggcctgcccggcgtggtgggaggggagctggtttcctggtgaactttctaaaaggaaaaataattttaagtaaagaaaaaagaaaaaaaa

SEQ ID NO: 194548 - DNA, 3585 bp, Homo sapiens
  Payload ID: 18440
  Gene Name: transportin 3
  ENST ID: ENST00000482320
  CDS Start-End: 683-3256
ctggtgtgtggcctcccaagataggcttctgagggcaagtcagcgactgaagacgggagcgccagaatctgtggactcaagagtctagaatcaagtggaaaaaccggaaaaaaggccaggaacctgaatacgacctaatagctgtttccgagggggcaacttccacggagagccttctgccctggtaacggccaaagaggaggagatggcgccagtcagggagcggccgtggcccagacagtgaggaagcgcgaaggcggagcaaccgaggaatcctccggagaagaatcagagccgtcgctaccgccactaccgccaccaccatggaaggagcaaagccgacattgcagctcgtgtaccaggcagtgcaggcgctttaccacgacccagatcccagcggaaaggagcgcgcctctttttggcttggggagctgcagcgttcgcctctttgaaatgtgctgctagtgggagctgcagcttcctcctgctgactctgagccccaggcttcagttgagatggtcctttcagaaatgtggagcttagtccaagcctggatttcagtgggtagcacctggcatctgtggctagaaagtcctatgaagtgttcatgcatgggagatctcagaccagttgttacagatccggcaggatgtggagtcatgctattttgctgcacagaccatgaaaatgaagattcagacctcattttatgagctccccacagactctcatgcctctttacgggactcattgctaacccatatccagaacttgaaagacttgtcacctgttattgtaacgcagctggctttagcaatagcagatcttgccctacagatgccttcctggaagggatgtgtgcaaacactggtggaaaaatacagcaatgatgtgacttctttgccttttttgctggagatccttacagtgttacctgaagaagtacatagtcgttccttacgaattggagctaatcggcgcacagaaattatagaagatttggccttctactctagtacagtagtatctctattgatgacctgtgtagaaaaagcaggaacagatgagaaaatgcttatgaaggtttttcgctgtttgggaagttggtttaacttgggagttttggacagtaacttcatggctaacaataaattactagcactcctttttgaggttttgcaacaggataagacctcgtctaacctacatgaagctgcttcggactgtgtatgctcagctctctatgccattgagaatgtggagactaacttgccattagccatgcaactttttcagggagtgctgacattggagactgcctatcatatggccgtggcacgtgaagatttagacaaagttctgaattactgccgtattttcactgaactatgtgaaacttttcttgaaaaaattgtttgtactccaggccaaggtcttggggaccttcgaactctggagctgctgcttatctgtgcaggccatcctcaatatgaggtagtagaaatttcatttaacttttggtaccgactgggggaacatttgtacaaaactaacgatgaagttattcatggcatcttcaaagcttacattcagaggctgcttcacgccttggctcgacactgccagctggaaccagaccatgagggggttcctgaggagactgatgactttggggagtttcgcatgagggtatcagacctggtaaaggacttgattttcttgatagggtctatggagtgttttgctcagttatattctactctgaaagaaggcaacccaccctgggaggtgacagaagcggttctctttatcatggctgctatagcaaagagtgttgatccggaaaacaatccaacacttgtggaagtcctagaaggagttgtccgcctcccggagaccgtacatacggctgtgcgatacaccagcattgaattggttggagagatgagtgaagtcgttgatcgaaatcctcagttccttgaccctgtgttgggctatttgatgaaaggcctgtgtgaaaagcccctggcttctgctgcagccaaagccattcataacatttgctctgtctgccgagatcacatggctcagcactttaatggactcctggagattgcccgctccctcgattccttcctgttgtctccagaagctgctgtgggcttgctaaaagggacagcacttgtcctagcccgattacctttggataagattaccgaatgtcttagtgaactatgttctgttcaggttatggcattgaaaaagctgttgtctcaagagcccagcaatggcatatcctcagatcccacagtgttcttagatcgccttgcagtgatatttaggcataccaatcccattgtggaaaatggacagactcatccgtgtcagaaagtcatacaggaaatatggccagttttatccgagactctaaataagcaccgagctgataatcggattgtagagcgttgttgcaggtgcctgcgctttgctgttcgctgtgtaggcaaaggatctgcagcactgctgcagccactagtcacacagatggtgaatgtgtaccacgtacatcagcattcctgcttcctgtaccttggcagtatccttgtggatgaatatggcatggaagaaggctgtcggcagggactgctagacatgctccaggcactgtgcatccccacctttcagctcctagaacagcagaatggtctccagaatcaccctgacactgtagatgacctgttccggctagccaccaggtttattcagcgtagccctgtcaccttgctgcggagccaagtggtcatccctatcttacagtgggccattgcctctactaccctggaccaccgggatgccaattgtagtgtcatgaggtttctacgagacctcattcatacaggggtagccaatgatcatgaagaagactttgaattacggaaagaactgattggacaggtgatgaaccagcttggacagcagcttgtcagccagctgctgcacacctgctgcttttgcctccccccctataccctaccagatgtggctgaagtgctctgggagatcatgcaggttgacagaccgactttttgtcgatggttagaaaattccttaaaaggtttgccaaaggaaacaaccgtgggagccgtcacagtgacacacaaacaacttacagacttccacaagcaagtcactagtgctgaggaatgtaaacaagtttgctgggccttgcgagacttcaccaggttgtttcgatagctcacactcctgcactgtgcctgtcacccaggaatgtcttttttaattagaagacaggaagaaaacaaaaaccagactgtgtcccacaatcagaaacctccgttgtggcagaggggccttcaccgccaccagggtgtcccgccagacagggagagactccagccttctgaggccatcctgaggagttcctgtttgggggtgtgagggaaaatcagcgcggattttaaaaagatggctgtggcctgcccggcgtggtgggaggggagctggtttcctggtgaactttctaaaaggaaaaataattttaagtaaagaaaaaagaaaaaaaa

SEQ ID NO: 194549 - DNA, 4514 bp, Homo sapiens
  Payload ID: 18440
  Gene Name: transportin 3
  ENST ID: ENST00000627585
  CDS Start-End: 404-3277
gtttgtagtgtaccaggcggaagtgtgccaaaggtatcggtgctgtcgcttccggtccgggtaaacgaaccttaggtacactggtgtgtggcctcccaagataggcttctgagggcaagtcagcgactgaagacgggagcgccagaatctgtggactcaagagtctagaatcaagtggaaaaaccggaaaaaaggccaggaacctgaatacgacctaatagctgtttccgagggggcaacttccacggagagccttctgccctggtaacggccaaagaggaggagatggcgccagtcagggagcggccgtggcccagacagtgaggaagcgcgaaggcggagcaaccgaggaatcctccggagaagaatcagagccgtcgctaccgccactaccgccaccaccatggaaggagcaaagccgacattgcagctcgtgtaccaggcagtgcaggcgctttaccacgacccagatcccagcggaaaggagcgcgcctctttttggcttggggagctgcagcgttcggttcatgcatgggagatctcagaccagttgttacagatccggcaggatgtggagtcatgctattttgctgcacagaccatgaaaatgaagattcagacctcattttatgagctccccacagactctcatgcctctttacgggactcattgctaacccatatccagaacttgaaagacttgtcacctgttattgtaacgcagctggctttagcaatagcagatcttgccctacagatgccttcctggaagggatgtgtgcaaacactggtggaaaaatacagcaatgatgtgacttctttgccttttttgctggagatccttacagtgttacctgaagaagtacatagtcgttccttacgaattggagctaatcggcgcacagaaattatagaagatttggccttctactctagtacagtagtatctctattgatgacctgtgtagaaaaagcaggaacagatgagaaaatgcttatgaaggtttttcgctgtttgggaagttggtttaacttgggagttttggacagtaacttcatggctaacaataaattactagcactcctttttgaggttttgcaacaggataagacctcgtctaacctacatgaagctgcttcggactgtgtatgctcagctctctatgccattgagaatgtggagactaacttgccattagccatgcaactttttcagggagtgctgacattggagactgcctatcatatggccgtggcacgtgaagatttagacaaagttctgaattactgccgtattttcactgaactatgtgaaacttttcttgaaaaaattgtttgtactccaggccaaggtcttggggaccttcgaactctggagctgctgcttatctgtgcaggccatcctcaatatgaggtagtagaaatttcatttaacttttggtaccgactgggggaacatttgtacaaaactaacgatgaagttattcatggcatcttcaaagcttacattcagaggctgcttcacgccttggctcgacactgccagctggaaccagaccatgagggggttcctgaggagactgatgactttggggagtttcgcatgagggtatcagacctggtaaaggacttgattttcttgatagggtctatggagtgttttgctcagttatattctactctgaaagaaggcaacccaccctgggaggtgacagaagcggttctctttatcatggctgctatagcaaagagtgttgatccaaagaagccctttagcaatgctgtgtgtcgtcacagcctgttatttggccagaatataacctctgaaatcagtaactgtgagtacttaccgcctgtactcagggaaaacaatccaacacttgtggaagtcctagaaggagttgtccgcctcccggagaccgtacatacggctgtgcgatacaccagcattgaattggttggagagatgagtgaagtcgttgatcgaaatcctcagttccttgaccctgtgttgggctatttgatgaaaggcctgtgtgaaaagcccctggcttctgctgcagccaaagccattcataacatttgctctgtctgccgagatcacatggctcagcactttaatggactcctggagattgcccgctccctcgattccttcctgttgtctccagaagctgctgtgggcttgctaaaagggacagcacttgtcctagcccgattacctttggataagattaccgaatgtcttagtgaactatgttctgttcaggttatggcattgaaaaagctgttgtctcaagagcccagcaatggcatatcctcagatcccacagtgttcttagatcgccttgcagtgatatttaggcataccaatcccattgtggaaaatggacagactcatccgtgtcagaaagtcatacaggaaatatggccagttttatccgagactctaaataagcaccgagctgataatcggattgtagagcgttgttgcaggtgcctgcgctttgctgttcgctgtgtaggcaaaggatctgcagcactgctgcagccactagtcacacagatggtgaatgtgtaccacgtacatcagcattcctgcttcctgtaccttggcagtatccttgtggatgaatatggcatggaagaaggctgtcggcagggactgctagacatgctccaggcactgtgcatccccacctttcagctcctagaacagcagaatggtctccagaatcaccctgacactgtagatgacctgttccggctagccaccaggtttattcagcgtagccctgtcaccttgctgcggagccaagtggtcatccctatcttacagtgggccattgcctctactaccctggaccaccgggatgccaattgtagtgtcatgaggtttctacgagacctcattcatacaggggtagccaatgatcatgaagaagactttgaattacggaaagaactgattggacaggtgatgaaccagcttggacagcagcttgtcagccagctgctgcacacctgctgcttttgcctccccccctataccctaccagatgtggctgaagtgctctgggagatcatgcaggttgacagaccgactttttgtcgatggttagaaaattccttaaaaggtttgccaaaggaaacaaccgtgggagccgtcacagtgacacacaaacaacttacagacttccacaagcaagtcactagtgctgaggaatgtaaacaagtttgctgggccttgcgagacttcaccaggttgtttcgatagctcacactcctgcactgtgcctgtcacccaggaatgtcttttttaattagaagacaggaagaaaacaaaaaccagactgtgtcccacaatcagaaacctccgttgtggcagaggggccttcaccgccaccagggtgtcccgccagacagggagagactccagccttctgaggccatcctgaggagttcctgtttgggggtgtgagggaaaatcagcgcggattttaaaaagatggctgtggcctgcccggcgtggtgggaggggagctggtttcctggtgaactttctaaaaggaaaaataattttaagtaaagaaaaaagaaaaaaaaggaagactaaacagaaaccagaactgaaacattcacctggtagcaaatgacacatgcacgcacacacacatacacgcacaagcgccagtgcgcacgtgtacacagaaaaacaaaaggacaagctttctgtgaaacaaaatatttacttagggataatgtggggattcacatgaattaaatagctgcaattggaagaagagggtcagggtcatttgttcaggttttctattgttttgtcctctctttcctctcctacccttccttctctttctctctcccctccttttaaatgcaaatgagtagaaatttcttctaccttccccagctgtttcttcccacctttagagttgtttagacaaggaggagtaagcaaggaacttgttctgctttctatcgtggtcacattggtgatgctcgggacctgccagggtcagaatttatggatatctgaaccctgaccccgttcattctctcagtccacttccaatccacatcagtttgttgtctgccttggagagaagagccaaaactggggtgggcgggtgggtggggagtgcaggatataaatgtgtaagtttttgttttttaaggtttttttcttagtgaattattcacccacagacatgagagaaaaaaagagggagggtgtgtggagaaaaaatgtttacagggctaacaagggatgatgtgtcatttagtatgttactaaaaagtgtggaaatgacttgattttaaggggagggtgaggccgaagagggaagcccaaagcagatcttaatgtttcaaaggagtgcagcccttcacagccatcagatatgagggcactgttctgtctggtgttgtagccatctcaagaacaaatcaacagcaacaaaagagaaagaataaatttttaaaatttaaccagt

SEQ ID NO: 194550 - DNA, 957 bp, Homo sapiens
  Payload ID: 18441
  Gene Name: transthyretin
  Uniprot ID: P02766
  ENST ID: ENST00000237014
  CDS Start-End: 178-621
agacaaggttcatatttgtatgggttacttattctctctttgttgactaagtcaataatcagaatcagcaggtttgcagtcagattggcagggataagcagcctagctcaggagaagtgagtataaaagccccaggctgggagcagccatcacagaagtccactcattcttggcaggatggcttctcatcgtctgctcctcctctgccttgctggactggtatttgtgtctgaggctggccctacgggcaccggtgaatccaagtgtcctctgatggtcaaagttctagatgctgtccgaggcagtcctgccatcaatgtggccgtgcatgtgttcagaaaggctgctgatgacacctgggagccatttgcctctgggaaaaccagtgagtctggagagctgcatgggctcacaactgaggaggaatttgtagaagggatatacaaagtggaaatagacaccaaatcttactggaaggcacttggcatctccccattccatgagcatgcagaggtggtattcacagccaacgactccggcccccgccgctacaccattgccgccctgctgagcccctactcctattccaccacggctgtcgtcaccaatcccaaggaatgagggacttctcctccagtggacctgaaggacgagggatgggatttcatgtaaccaagagtattccatttttactaaagcagtgttttcacctcatatgctatgttagaagtccaggcagagacaataaaacattcctgtgaaaggcacttttcattccactttaacttgattttttaaattcccttattgtcccttccaaaaaaaagagaatcaaaattttacaaagaatcaaaggaattctagaaagtatctgggcagaacgctaggagagatccaaatttccattgtcttgcaagcaaagcacgtattaaatatgatctgcagccattaaaaaga

SEQ ID NO: 194551 - DNA, 1040 bp, Homo sapiens
  Payload ID: 18441
  Gene Name: transthyretin
  ENST ID: ENST00000610404
  CDS Start-End: 137-694
gttgactaagtcaataatcagaatcagcaggtttgcagtcagattggcagggataagcagcctagctcaggagaagtgagtataaaagccccaggctgggagcagccatcacagaagtccactcattcttggcaggatggcttctcatcgtctgctcctcctctgccttgctggactggtatttgtgtctgaggctggccctacgggcaccggtgaatccaagtgtcctctgatggtcaaagttctagatgctgtccgaggcagtcctgccatcaatgtggccgtgcatgtgttcagaaaggctgctgatgacacctgggagccatttgcctctgggaaaaccagtgagtctggagagctgcatgggctcacaactgaggaggaatttgtagaagggatatacaaagtggaaatagacaccaaatcttactggaaggcacttggcatctccccattccatgagcatgcagaggtgagtatacagaccttcgagtcatttgaaacagatggctgtcatggaaatagaatccagacatgttcaagctggtctgaactccagacctcagggttccatcagaatgtagacgtggtattcacagccaacgactccggcccccgccgctacaccattgccgccctgctgagcccctactcctattccaccacggctgtcgtcaccaatcccaaggaatgagggacttctcctccagtggacctgaaggacgagggatgggatttcatgtaaccaagagtattccatttttactaaagcagtgttttcacctcatatgctatgttagaagtccaggcagagacaataaaacattcctgtgaaaggcacttttcattccactttaacttgattttttaaattcccttattgtcccttccaaaaaaaagagaatcaaaattttacaaagaatcaaaggaattctagaaagtatctgggcagaacgctaggagagatccaaatttccattgtcttgcaagcaaagcacgtattaaatatgatctgcagccattaaaaagacacattctgt

SEQ ID NO: 194552 - DNA, 556 bp, Homo sapiens
  Payload ID: 18441
  Gene Name: transthyretin
  ENST ID: ENST00000613781
  CDS Start-End: 137-556
gttgactaagtcaataatcagaatcagcaggtttgcagtcagattggcagggataagcagcctagctcaggagaagtgagtataaaagccccaggctgggagcagccatcacagaagtccactcattcttggcaggatggcttctcatcgtctgctcctcctctgccttgctggactggtatttgtgtctgaggctggccctacgggcaccggtgaatccaagtgtcctctgatggtcaaagttctagatgctgtccgaggcagtcctgccatcaatgtggccgtgcatgtgttcagaaaggctgctgatgacacctgggagccatttgcctctgggaaaaccagtgagtctggagagctgcatgggctcacaactgaggaggaatttgtagaagggatatacaaagtggaaatagacaccaaatcttactggaaggcacttggcatctccccattccatgagcatgcagaggtggtattcacagccaacgactccggcccccgccgctactactcctattccaccacggctgtcgtcaccaatcccaaggaatga

SEQ ID NO: 194553 - DNA, 4832 bp, Homo sapiens
  Payload ID: 18442
  Gene Name: Treacher Collins-Franceschetti syndrome 1
  Uniprot ID: Q13428
  ENST ID: ENST00000323668
  CDS Start-End: 76-4311
taagggcgcgagggaagtggcgggcggggactaaggcggggcgtgcaggtagccggccggccgggggtcgcgggtatggccgaggccaggaagcggcgggagctacttcccctgatctaccaccatctgctgcgggctggctatgtgcgtgcggcgcgggaagtgaaggagcagagcggccagaagtgtttcctggctcagcccgtaacccttctggacatctatacacactggcaacaaacctcagagcttggtcggaagcggaaggcagaggaagatgcggcactgcaagctaagaaaacccgtgtgtcagaccccatcagcacctcggagagctcggaagaggaggaagaagcagaagccgaaaccgccaaagccaccccaagactagcatctaccaactcctcagtcctgggggcggacttgccatcaagcatgaaagaaaaagccaaggcagagacagagaaagctggcaagactgggaattccatgccacaccctgccactgggaagacggtggccaaccttctttctgggaagtctcccaggaagtcagcagagccctcagcaaatactacgttggtctcagaaactgaggaggagggcagcgtcccggcctttggagctgctgccaagcctgggatggtgtcagcgggccaggccgacagctccagcgaggacacctccagctccagtgatgagacagacgtggaggtaaaggcctctgaaaaaattctccaggtcagagctgcctcagcccctgccaaggggacccctgggaaaggggctaccccagcaccccctgggaaggcaggggctgtagcctcccagaccaaggcagggaagccagaggaggactcagagagcagcagcgaggagtcatctgacagtgaggaggagacgccagctgccaaggccctgcttcaggcgaaggcctcaggaaaaacctctcaggtcggagctgcctcagcccctgccaaggagtcccccaggaaaggagctgccccagcgccccctgggaagacagggcctgcagttgccaaggcccaggcggggaagcgggaggaggactcgcagagcagcagcgaggaatcggacagtgaggaggaggcgcctgctcaggcgaagccttcagggaaggccccccaggtcagagccgcctcggcccctgccaaggagtcccccaggaaaggggctgccccagcacctcctaggaaaacagggcctgcagccgcccaggtccaggtggggaagcaggaggaggactcaagaagcagcagcgaggagtcagacagtgacagagaggcactggcagccatgaatgcagctcaggtgaagcccttggggaaaagcccccaggtgaaacctgcctctaccatgggcatggggcccttggggaaaggcgccggcccagtgccacccgggaaggtggggcctgcaaccccctcagcccaggtggggaagtgggaggaggactcagagagcagtagtgaggagtcatcagacagcagtgatggagaggtgcccacagctgtggccccggctcaggaaaagtccttggggaacatcctccaggccaaacccacctccagtcctgccaaggggccccctcagaaggcagggcctgtagccgtccaggtcaaggctgaaaagcccatggacaactcggagagcagcgaggagtcatcggacagtgcggacagtgaggaggcaccagcagccatgactgcagctcaggcaaaaccagctctgaaaattcctcagaccaaggcctgcccaaagaaaaccaataccactgcatctgccaaggtcgcccctgtgcgagtgggcacccaagccccccggaaagcaggaactgcgacttctccagcaggctcatccccagctgtggctgggggcacccagagaccagcagaggattcttcaagcagtgaggaatcagatagtgaggaagagaagacaggtcttgcagtaaccgtgggacaggcaaagtctgtggggaaaggcctccaggtgaaagcagcctcagtgcctgtcaaggggtccttggggcaagggactgctccagtactccctgggaagacggggcctacagtcacccaggtgaaagctgaaaagcaggaagactctgagagcagtgaggaggaatcagacagtgaggaagcagctgcatctccagcacaggtgaaaacctcagtaaagaaaacccaggccaaagccaacccagctgccgccagagcaccttcagcaaaagggacaatttcagcccctggaaaagttgtcactgcagctgctcaagccaagcagaggtctccatccaaggtgaagccaccagtgagaaacccccagaacagtaccgtcttggcgaggggcccagcatctgtgccatctgtggggaaggccgtggctacagcagctcaggcccagacagggccagaggaggactcagggagcagtgaggaggagtcagacagtgaggaggaggcggagacgctggctcaggtgaagccttcagggaagacccaccagatcagagctgccttggctcctgccaaggagtcccccaggaaaggggctgccccaacacctcctgggaagacagggccttcggctgcccaggcagggaagcaggatgactcagggagcagcagcgaggaatcagacagtgatggggaggcaccggcagctgtgacctctgcccaggtgattaaaccccctctgatttttgtcgaccctaatcgtagtccagctggcccagctgctacacccgcacaagcccaggctgcaagcaccccgaggaaggcccgagcctcggagagcacagccaggagctcctcctccgagagcgaggatgaggacgtgatccccgctacacagtgcttgactcctggcatcagaaccaatgtggtgaccatgcccactgcccacccaagaatagcccccaaagccagcatggctggggccagcagcagcaaggagtccagtcggatatcagatggcaagaaacaggagggaccagccactcaggtgtcaaagaagaacccagcttccctcccactgacccaggctgccctgaaggtcctcgcccagaaagccagtgaggctcagcctcctgttgccaggacccagccttcaagtggggttgacagtgctgtgggaacactccctgcaacaagtccccagagcacctccgtccaggccaaagggaccaacaagctcagaaaacctaagcttcctgaggtccagcaggccaccaaagcccctgagagctcagatgacagtgaggacagcagcgacagttcttcagggagtgaggaagatggtgaagggccccagggggccaagtcagcccacacgctgggtcccaccccctccaggacagagaccctggtggaggagaccgcagcagagtccagcgaggatgatgtggtggcgccatcccagtctctcctctcaggttatatgacccctggactaaccccagccaattcccaggcctcaaaagccactcccaagctagactccagcccctcagtttcctctactctggccgccaaagatgacccagatggcaagcaggaggcaaagccccaacaggcagcaggcatgttgtcccctaaaacaggtggaaaagaggctgcttcaggcaccacacctcagaagtcccggaagcccaagaaaggggctgggaacccccaagcctcaaccctggcgctgcaaagcaacatcacccagtgcctcctgggccaaccctggcccctgaatgaggcccaggtgcaggcctcagtggtgaaggtcctgactgagctgctggaacaggaaagaaagaaggtggtggacaccaccaaggagagcagcaggaagggctgggagagccgcaagcggaagctatcgggagaccagccagctgccaggacccccaggagcaagaagaagaagaagctgggggccggggaaggtggggaggcctctgtttccccagaaaagacctccacgacttccaaggggaaagcaaagagagacaaagcaagtggtgatgtcaaggagaagaaagggaaggggtctcttggctcccaaggggccaaggacgagccagaagaggagcttcagaaggggatggggacggttgaaggtggagatcaaagcaacccaaagagcaagaaggagaagaagaaatccgacaagagaaaaaaagacaaagaaaaaaaagaaaagaagaagaaagcaaaaaaggcctcaaccaaagattctgagtcaccgtcccagaagaaaaagaagaaaaagaagaagacagcagagcagactgtatgacgagcaccagcaccaggcacagggatttcctagccgagcagtggccatccccatgcctctgacctccaccgacctctgcccaccatgggttggaactaaactgttaccttccctcgctccacagaagaagacagccagcttcaggggtccctgtgctggccaagccagtgagcctgcggggaggctggtccaaggagaaagtggaccagctcccatgacctcaccccactcccccaacacaggacgcttcatatagatgtgtacagtatatgtatttttttaagtgacctcctctccttccacagaccccacatgcccaaaggcctcgggacttcccaccaccttgctccacagatccagctaggcctgacctgtgcctcatcccgtgccgctcggtctctggctgatcccgaggctttgtcttcctctcgtcagttcttttggttgtgttttttgttttttttttaataactcaaaaaaaaaataaaagacttggaggaagggtgcaagctcccagtgca

SEQ ID NO: 194554 - DNA, 5095 bp, Homo sapiens
  Payload ID: 18442
  Gene Name: Treacher Collins-Franceschetti syndrome 1
  Uniprot ID: Q13428
  ENST ID: ENST00000377797
  CDS Start-End: 109-4575
gaaagaggagccggaagtgtggcgcgcgaggtctaagggcgcgagggaagtggcgggcggggactaaggcggggcgtgcaggtagccggccggccgggggtcgcgggtatggccgaggccaggaagcggcgggagctacttcccctgatctaccaccatctgctgcgggctggctatgtgcgtgcggcgcgggaagtgaaggagcagagcggccagaagtgtttcctggctcagcccgtaacccttctggacatctatacacactggcaacaaacctcagagcttggtcggaagcggaaggcagaggaagatgcggcactgcaagctaagaaaacccgtgtgtcagaccccatcagcacctcggagagctcggaagaggaggaagaagcagaagccgaaaccgccaaagccaccccaagactagcatctaccaactcctcagtcctgggggcggacttgccatcaagcatgaaagaaaaagccaaggcagagacagagaaagctggcaagactgggaattccatgccacaccctgccactgggaagacggtggccaaccttctttctgggaagtctcccaggaagtcagcagagccctcagcaaatactacgttggtctcagaaactgaggaggagggcagcgtcccggcctttggagctgctgccaagcctgggatggtgtcagcgggccaggccgacagctccagcgaggacacctccagctccagtgatgagacagacgtggaggggaaaccctcagtaaaaccagcccaggtcaaagcctcatcagtttctactaaggagtctccagcaagaaaggcggccccagcccctgggaaggtgggggatgtgacaccccaggtcaaaggaggggccctgcccccagccaagagggccaagaagccagaagaggagtcagagagtagtgaggagggatctgaaagtgaggaggaggcccctgcagggacacgaagccaggtaaaggcctctgaaaaaattctccaggtcagagctgcctcagcccctgccaaggggacccctgggaaaggggctaccccagcaccccctgggaaggcaggggctgtagcctcccagaccaaggcagggaagccagaggaggactcagagagcagcagcgaggagtcatctgacagtgaggaggagacgccagctgccaaggccctgcttcaggcgaaggcctcaggaaaaacctctcaggtcggagctgcctcagcccctgccaaggagtcccccaggaaaggagctgccccagcgccccctgggaagacagggcctgcagttgccaaggcccaggcggggaagcgggaggaggactcgcagagcagcagcgaggaatcggacagtgaggaggaggcgcctgctcaggcgaagccttcagggaaggccccccaggtcagagccgcctcggcccctgccaaggagtcccccaggaaaggggctgccccagcacctcctaggaaaacagggcctgcagccgcccaggtccaggtggggaagcaggaggaggactcaagaagcagcagcgaggagtcagacagtgacagagaggcactggcagccatgaatgcagctcaggtgaagcccttggggaaaagcccccaggtgaaacctgcctctaccatgggcatggggcccttggggaaaggcgccggcccagtgccacccgggaaggtggggcctgcaaccccctcagcccaggtggggaagtgggaggaggactcagagagcagtagtgaggagtcatcagacagcagtgatggagaggtgcccacagctgtggccccggctcaggaaaagtccttggggaacatcctccaggccaaacccacctccagtcctgccaaggggccccctcagaaggcagggcctgtagccgtccaggtcaaggctgaaaagcccatggacaactcggagagcagcgaggagtcatcggacagtgcggacagtgaggaggcaccagcagccatgactgcagctcaggcaaaaccagctctgaaaattcctcagaccaaggcctgcccaaagaaaaccaataccactgcatctgccaaggtcgcccctgtgcgagtgggcacccaagccccccggaaagcaggaactgcgacttctccagcaggctcatccccagctgtggctgggggcacccagagaccagcagaggattcttcaagcagtgaggaatcagatagtgaggaagagaagacaggtcttgcagtaaccgtgggacaggcaaagtctgtggggaaaggcctccaggtgaaagcagcctcagtgcctgtcaaggggtccttggggcaagggactgctccagtactccctgggaagacggggcctacagtcacccaggtgaaagctgaaaagcaggaagactctgagagcagtgaggaggaatcagacagtgaggaagcagctgcatctccagcacaggtgaaaacctcagtaaagaaaacccaggccaaagccaacccagctgccgccagagcaccttcagcaaaagggacaatttcagcccctggaaaagttgtcactgcagctgctcaagccaagcagaggtctccatccaaggtgaagccaccagtgagaaacccccagaacagtaccgtcttggcgaggggcccagcatctgtgccatctgtggggaaggccgtggctacagcagctcaggcccagacagggccagaggaggactcagggagcagtgaggaggagtcagacagtgaggaggaggcggagacgctggctcaggtgaagccttcagggaagacccaccagatcagagctgccttggctcctgccaaggagtcccccaggaaaggggctgccccaacacctcctgggaagacagggccttcggctgcccaggcagggaagcaggatgactcagggagcagcagcgaggaatcagacagtgatggggaggcaccggcagctgtgacctctgcccaggtgattaaaccccctctgatttttgtcgaccctaatcgtagtccagctggcccagctgctacacccgcacaagcccaggctgcaagcaccccgaggaaggcccgagcctcggagagcacagccaggagctcctcctccgagagcgaggatgaggacgtgatccccgctacacagtgcttgactcctggcatcagaaccaatgtggtgaccatgcccactgcccacccaagaatagcccccaaagccagcatggctggggccagcagcagcaaggagtccagtcggatatcagatggcaagaaacaggagggaccagccactcaggtgtcaaagaagaacccagcttccctcccactgacccaggctgccctgaaggtcctcgcccagaaagccagtgaggctcagcctcctgttgccaggacccagccttcaagtggggttgacagtgctgtgggaacactccctgcaacaagtccccagagcacctccgtccaggccaaagggaccaacaagctcagaaaacctaagcttcctgaggtccagcaggccaccaaagcccctgagagctcagatgacagtgaggacagcagcgacagttcttcagggagtgaggaagatggtgaagggccccagggggccaagtcagcccacacgctgggtcccaccccctccaggacagagaccctggtggaggagaccgcagcagagtccagcgaggatgatgtggtggcgccatcccagtctctcctctcaggttatatgacccctggactaaccccagccaattcccaggcctcaaaagccactcccaagctagactccagcccctcagtttcctctactctggccgccaaagatgacccagatggcaagcaggaggcaaagccccaacaggcagcaggcatgttgtcccctaaaacaggtggaaaagaggctgcttcaggcaccacacctcagaagtcccggaagcccaagaaaggggctgggaacccccaagcctcaaccctggcgctgcaaagcaacatcacccagtgcctcctgggccaaccctggcccctgaatgaggcccaggtgcaggcctcagtggtgaaggtcctgactgagctgctggaacaggaaagaaagaaggtggtggacaccaccaaggagagcagcaggaagggctgggagagccgcaagcggaagctatcgggagaccagccagctgccaggacccccaggagcaagaagaagaagaagctgggggccggggaaggtggggaggcctctgtttccccagaaaagacctccacgacttccaaggggaaagcaaagagagacaaagcaagtggtgatgtcaaggagaagaaagggaaggggtctcttggctcccaaggggccaaggacgagccagaagaggagcttcagaaggggatggggacggttgaaggtggagatcaaagcaacccaaagagcaagaaggagaagaagaaatccgacaagagaaaaaaagacaaagaaaaaaaagaaaagaagaagaaagcaaaaaaggcctcaaccaaagattctgagtcaccgtcccagaagaaaaagaagaaaaagaagaagacagcagagcagactgtatgacgagcaccagcaccaggcacagggatttcctagccgagcagtggccatccccatgcctctgacctccaccgacctctgcccaccatgggttggaactaaactgttaccttccctcgctccacagaagaagacagccagcttcaggggtccctgtgctggccaagccagtgagcctgcggggaggctggtccaaggagaaagtggaccagctcccatgacctcaccccactcccccaacacaggacgcttcatatagatgtgtacagtatatgtatttttttaagtgacctcctctccttccacagaccccacatgcccaaaggcctcgggacttcccaccaccttgctccacagatccagctaggcctgacctgtgcctcatcccgtgccgctcggtctctggctgatcccgaggctttgtcttcctctcgtcagttcttttggttgtgttttttgttttttttttaataactcaaaaaaaaaataaaagacttggaggaagggtgcaagctcccagtgc

SEQ ID NO: 194555 - DNA, 3400 bp, Homo sapiens
  Payload ID: 18442
  Gene Name: Treacher Collins-Franceschetti syndrome 1
  Uniprot ID: Q13428
  ENST ID: ENST00000394269
  CDS Start-End: 30-2906
aggtagccggccggccgggggtcgcgggtatggccgaggccaggaagcggcgggagctacttcccctgatctaccaccatctgctgcgggctggctatgtgcgtgcggcgcgggaagtgaaggagcagagcggccagaagtgtttcctggctcagcccgtaacccttctggacatctatacacactggcaacaaacctcagagcttggtcggaagcggaaggcagaggaagatgcggcactgcaagctaagaaaacccgtgtgtcagaccccatcagcacctcggagagctcggaagaggaggaagaagcagaagccgaaaccgccaaagccaccccaagactagcatctaccaactcctcagtcctgggggcggacttgccatcaagcatgaaagaaaaagccaaggcagagacagagaaagctggcaagactgggaattccatgccacaccctgccactgggaagacggtggccaaccttctttctgggaagtctcccaggaagtcagcagagccctcagcaaatactacgttggtctcagaaactgaggaggagggcagcgtcccggcctttggagctgctgccaagcctgggatggtgtcagcgggccaggccgacagctccagcgaggacacctccagctccagtgatgagacagacgtggaggggaaaccctcagtaaaaccagcccaggtcaaagcctcatcagtttctactaaggagtctccagcaagaaaggcggccccagcccctgggaaggtgggggatgtgacaccccaggtcaaaggaggggccctgcccccagccaagagggccaagaagccagaagaggagtcagagagtagtgaggagggatctgaaagtgaggaggaggcccctgcagggacacgaagccaggtaaaggcctctgaaaaaattctccaggtcagagctgcctcagcccctgccaaggggacccctgggaaaggggctaccccagcaccccctgggaaggcaggggctgtagcctcccagaccaaggcagggaagccagaggaggactcagagagcagcagcgaggagtcatctgacagtgaggaggagacgccagctgccaaggccctgcttcaggcgaaggcctcaggaaaaacctctcaggtcggagctgcctcagcccctgccaaggagtcccccaggaaaggagctgccccagcgccccctgggaagacagggcctgcagttgccaaggcccaggcggggaagcgggaggaggactcgcagagcagcagcgaggaatcggacagtgaggaggaggcgcctgctcaggcgaagccttcagggaaggccccccaggtcagagccgcctcggcccctgccaaggagtcccccaggaaaggggctgccccagcacctcctaggaaaacagggcctgcagccgcccaggtccaggtggggaagcaggaggaggactcaagaagcagcagcgaggagtcagacagtgacagagaggcactggcagccatgaatgcagctcaggtgaagcccttggggaaaagcccccaggtgaaacctgcctctaccatgggcatggggcccttggggaaaggcgccggcccagtgccacccgggaaggtggggcctgcaaccccctcagcccaggtggggaagtgggaggaggactcagagagcagtagtgaggagtcatcagacagcagtgatggagaggtgcccacagctgtggccccggctcaggaaaagtccttggggaacatcctccaggccaaacccacctccagtcctgccaaggggccccctcagaaggcagggcctgtagccgtccaggtcaaggctgaaaagcccatggacaactcggagagcagcgaggagtcatcggacagtgcggacagtgaggaggcaccagcagccatgactgcagctcaggcaaaaccagctctgaaaattcctcagaccaaggcctgcccaaagaaaaccaataccactgcatctgccaaggtcgcccctgtgcgagtgggcacccaagccccccggaaagcaggaactgcgacttctccagcaggctcatccccagctgtggctgggggcacccagagaccagcagaggattcttcaagcagtgaggaatcagatagtgaggaagagaagacaggtcttgcagtaaccgtgggacaggcaaagtctgtggggaaaggcctccaggtgaaagcagcctcagtgcctgtcaaggggtccttggggcaagggactgctccagtactccctgggaagacggggcctacagtcacccaggtgaaagctgaaaagcaggaagactctgagagcagtgaggaggaatcagacagtgaggaagcagctgcatctccagcacaggtgaaaacctcagtaaagaaaacccaggccaaagccaacccagctgccgccagagcaccttcagcaaaagggacaatttcagcccctggaaaagttgtcactgcagctgctcaagccaagcagaggtctccatccaaggtgaagccaccagtgagaaacccccagaacagtaccgtcttggcgaggggcccagcatctgtgccatctgtggggaaggccgtggctacagcagctcaggcccagacagggccagaggaggactcagggagcagtgaggaggagtcagacagtgaggaggaggcggagacgctggctcaggtgaagccttcagggaagacccaccagatcagagctgccttggctcctgccaaggagtcccccaggaaaggggctgccccaacacctcctgggaagacagggccttcggctgcccaggcagggaagcaggatgactcagggagcagcagcgaggaatcagacagtgatggggaggcaccggcagctgtgacctctgcccaggaccaggagtcttcttgaatcccatgagctctgcccaggaccctctctcaagcacctgtggcataccttcatgtgctccactgcacccagagcttaagccacagtcctgctcaggctacacctccaagggtgggaccaggcccaccttatcttcctgtactccagaggcccaagtcagccatgctggtgtggtccaagcttctgtgtgaaccctggcccttccatcagacagcattaccctttgtcctcctctagccccaagctcccagaagcttctgccaggcacctcagagcaccagctcccctgtcccagggcctaaccacagatcctggagttctgcaacctccagaccagagcggtctcatgaaccacctccccttgaatatcacataccacattgttatcaattcatcagtaaggtcagatgctgtttgcacacctccagcaatagggtgctcactgcctctcactttccaatggcacagattacaaaagtaaagaacaaccacca

SEQ ID NO: 194556 - DNA, 4272 bp, Homo sapiens
  Payload ID: 18442
  Gene Name: Treacher Collins-Franceschetti syndrome 1
  ENST ID: ENST00000427724
  CDS Start-End: 29-4272
ggtagccggccggccgggggtcgcgggtatggccgaggccaggaagcggcgggagctacttcccctgatctaccaccatctgctgcgggctggctatgtgcgtgcggcgcgggaagtgaaggagcagagcggccagaagtgtttcctggctcagcccgtaacccttctggacatctatacacactggcaacaaacctcagagcttggtcggaagcggaaggcagaggaagatgcggcactgcaagctaagaaaacccgtgtgtcagaccccatcagcacctcggagagctcggaagaggaggaagaagcagaagccgaaaccgccaaagccaccccaagactagcatctaccaactcctcagtcctgggggcggacttgccatcaagcatgaaagaaaaagccaaggcagagacagagaaagctggcaagactgggaattccatgccacaccctgccactgggaagacggtggccaaccttctttctgggaagtctcccaggaagtcagcagagccctcagcaaatactacgttggtctcagaaactgaggaggagggcagcgtcccggcctttggagctgctgccaagcctgggatggtgtcagcgggccaggccgacagctccagcgaggacacctccagctccagtgatgagacagacgtggaggggaaaccctcagtaaaaccagcccaggtcaaagcctcatcagtttctactaaggagtctccagcaagaaaggcggccccagcccctgggaaggtgggggatgtgacaccccaggtcaaaggaggggccctgcccccagccaagagggccaagaagccagaagaggagtcagagagtagtgaggagggatctgaaagtgaggaggaggcccctgcagggacacgaagccaggtaaaggcctctgaaaaaattctccaggtcagagctgcctcagcccctgccaaggggacccctgggaaaggggctaccccagcaccccctgggaaggcaggggctgtagcctcccagaccaaggcagggaagccagaggaggactcagagagcagcagcgaggagtcatctgacagtgaggaggagacgccagctgccaaggccctgcttcaggcgaaggcctcaggaaaaacctctcaggtcggagctgcctcagcccctgccaaggagtcccccaggaaaggagctgccccagcgccccctgggaagacagggcctgcagttgccaaggcccaggcggggaagcgggaggaggactcgcagagcagcagcgaggaatcggacagtgaggaggaggcgcctgctcaggcgaagccttcagggaaggccccccaggtcagagccgcctcggcccctgccaaggagtcccccaggaaaggggctgccccagcacctcctaggaaaacagggcctgcagccgcccaggtccaggtggggaagcaggaggaggactcaagaagcagcagcgaggagtcagacagtgacagagaggcactggcagccatgaatgcagctcaggtgaagcccttggggaaaagcccccaggtgaaacctgcctctaccatgggcatggggcccttggggaaaggcgccggcccagtgccacccgggaaggtggggcctgcaaccccctcagcccaggtggggaagtgggaggaggactcagagagcagtagtgaggagtcatcagacagcagtgatggagaggtgcccacagctgtggccccggctcaggaaaagtccttggggaacatcctccaggccaaacccacctccagtcctgccaaggggccccctcagaaggcagggcctgtagccgtccaggtcaaggctgaaaagcccatggacaactcggagagcagcgaggagtcatcggacagtgcggacagtgaggaggcaccagcagccatgactgcagctcaggcaaaaccagctctgaaaattcctcagaccaaggcctgcccaaagaaaaccaataccactgcatctgccaaggtcgcccctgtgcgagtgggcacccaagccccccggaaagcaggaactgcgacttctccagcaggctcatccccagctgtggctgggggcacccagagaccagcagaggattcttcaagcagtgaggaatcagatagtgaggaagagaagacaggtcttgcagtaaccgtgggacaggcaaagtctgtggggaaaggcctccaggtgaaagcagcctcagtgcctgtcaaggggtccttggggcaagggactgctccagtactccctgggaagacggggcctacagtcacccaggtgaaagctgaaaagcaggaagactctgagagcagtgaggaggaatcagacagtgaggaagcagctgcatctccagcacaggtgaaaacctcagtaaagaaaacccaggccaaagccaacccagctgccgccagagcaccttcagcaaaagggacaatttcagcccctggaaaagttgtcactgcagctgctcaagccaagcagaggtctccatccaaggtgaagccaccagtgagaaacccccagaacagtaccgtcttggcgaggggcccagcatctgtgccatctgtggggaaggccgtggctacagcagctcaggcccagacagggccagaggaggactcagggagcagtgaggaggagtcagacagtgaggaggaggcggagacgctggctcaggtgaagccttcagggaagacccaccagatcagagctgccttggctcctgccaaggagtcccccaggaaaggggctgccccaacacctcctgggaagacagggccttcggctgcccaggcagggaagcaggatgactcagggagcagcagcgaggaatcagacagtgatggggaggcaccggcagctgtgacctctgcccaggtgattaaaccccctctgatttttgtcgaccctaatcgtagtccagctggcccagctgctacacccgcacaagcccaggctgcaagcaccccgaggaaggcccgagcctcggagagcacagccaggagctcctcctccgagagcgaggatgaggacgtgatccccgctacacagtgcttgactcctggcatcagaaccaatgtggtgaccatgcccactgcccacccaagaatagcccccaaagccagcatggctggggccagcagcagcaaggagtccagtcggatatcagatggcaagaaacaggagggaccagccactcaggttgacagtgctgtgggaacactccctgcaacaagtccccagagcacctccgtccaggccaaagggaccaacaagctcagaaaacctaagcttcctgaggtccagcaggccaccaaagcccctgagagctcagatgacagtgaggacagcagcgacagttcttcagggagtgaggaagatggtgaagggccccagggggccaagtcagcccacacgctgggtcccaccccctccaggacagagaccctggtggaggagaccgcagcagagtccagcgaggatgatgtggtggcgccatcccagtctctcctctcaggttatatgacccctggactaaccccagccaattcccaggcctcaaaagccactcccaagctagactccagcccctcagtttcctctactctggccgccaaagatgacccagatggcaagcaggaggcaaagccccaacaggcagcaggcatgttgtcccctaaaacaggtggaaaagaggctgcttcaggcaccacacctcagaagtcccggaagcccaagaaaggggctgggaacccccaagcctcaaccctggcgctgcaaagcaacatcacccagtgcctcctgggccaaccctggcccctgaatgaggcccaggtgcaggcctcagtggtgaaggtcctgactgagctgctggaacaggaaagaaagaaggtggtggacaccaccaaggagagcagcaggaagggctgggagagccgcaagcggaagctatcgggagaccagccagctgccaggacccccaggagcaagaagaagaagaagctgggggccggggaaggtggggaggcctctgtttccccagaaaagacctccacgacttccaaggggaaagcaaagagagacaaagcaagtggtgatgtcaaggagaagaaagggaaggggtctcttggctcccaaggggccaaggacgagccagaagaggagcttcagaaggggatggggacggttgaaggtggagatcaaagcaacccaaagagcaagaaggagaagaagaaatccgacaagagaaaaaaagacaaaga

SEQ ID NO: 194557 - DNA, 4644 bp, Homo sapiens
  Payload ID: 18442
  Gene Name: Treacher Collins-Franceschetti syndrome 1
  Uniprot ID: Q13428
  ENST ID: ENST00000439160
  CDS Start-End: 34-4389
gtgcaggtagccggccggccgggggtcgcgggtatggccgaggccaggaagcggcgggagctacttcccctgatctaccaccatctgctgcgggctggctatgtgcgtgcggcgcgggaagtgaaggagcagagcggccagaagtgtttcctggctcagcccgtaacccttctggacatctatacacactggcaacaaacctcagagcttggtcggaagcggaaggcagaggaagatgcggcactgcaagctaagaaaacccgtgtgtcagaccccatcagcacctcggagagctcggaagaggaggaagaagcagaagccgaaaccgccaaagccaccccaagactagcatctaccaactcctcagtcctgggggcggacttgccatcaagcatgaaagaaaaagccaaggcagagacagagaaagctggcaagactgggaattccatgccacaccctgccactgggaagacggtggccaaccttctttctgggaagtctcccaggaagtcagcagagccctcagcaaatactacgttggtctcagaaactgaggaggagggcagcgtcccggcctttggagctgctgccaagcctgggatggtgtcagcgggccaggccgacagctccagcgaggacacctccagctccagtgatgagacagacgtggaggggaaaccctcagtaaaaccagcccaggtcaaagcctcatcagtttctactaaggagtctccagcaagaaaggcggccccagcccctgggaaggtgggggatgtgacaccccaggtcaaaggaggggccctgcccccagccaagagggccaagaagccagaagaggagtcagagagtagtgaggagggatctgaaagtgaggaggaggcccctgcagggacacgaagccaggtaaaggcctctgaaaaaattctccaggtcagagctgcctcagcccctgccaaggggacccctgggaaaggggctaccccagcaccccctgggaaggcaggggctgtagcctcccagaccaaggcagggaagccagaggaggactcagagagcagcagcgaggagtcatctgacagtgaggaggagacgccagctgccaaggccctgcttcaggcgaaggcctcaggaaaaacctctcaggtcggagctgcctcagcccctgccaaggagtcccccaggaaaggagctgccccagcgccccctgggaagacagggcctgcagttgccaaggcccaggcggggaagcgggaggaggactcgcagagcagcagcgaggaatcggacagtgaggaggaggcgcctgctcaggcgaagccttcagggaaggccccccaggtcagagccgcctcggcccctgccaaggagtcccccaggaaaggggctgccccagcacctcctaggaaaacagggcctgcagccgcccaggtccaggtggggaagcaggaggaggactcaagaagcagcagcgaggagtcagacagtgacagagaggcactggcagccatgaatgcagctcaggtgaagcccttggggaaaagcccccaggtgaaacctgcctctaccatgggcatggggcccttggggaaaggcgccggcccagtgccacccgggaaggtggggcctgcaaccccctcagcccaggtggggaagtgggaggaggactcagagagcagtagtgaggagtcatcagacagcagtgatggagaggtgcccacagctgtggccccggctcaggaaaagtccttggggaacatcctccaggccaaacccacctccagtcctgccaaggggccccctcagaaggcagggcctgtagccgtccaggtcaaggctgaaaagcccatggacaactcggagagcagcgaggagtcatcggacagtgcggacagtgaggaggcaccagcagccatgactgcagctcaggcaaaaccagctctgaaaattcctcagaccaaggcctgcccaaagaaaaccaataccactgcatctgccaaggtcgcccctgtgcgagtgggcacccaagccccccggaaagcaggaactgcgacttctccagcaggctcatccccagctgtggctgggggcacccagagaccagcagaggattcttcaagcagtgaggaatcagatagtgaggaagagaagacaggtcttgcagtaaccgtgggacaggcaaagtctgtggggaaaggcctccaggtgaaagcagcctcagtgcctgtcaaggggtccttggggcaagggactgctccagtactccctgggaagacggggcctacagtcacccaggtgaaagctgaaaagcaggaagactctgagagcagtgaggaggaatcagacagtgaggaagcagctgcatctccagcacaggtgaaaacctcagtaaagaaaacccaggccaaagccaacccagctgccgccagagcaccttcagcaaaagggacaatttcagcccctggaaaagttgtcactgcagctgctcaagccaagcagaggtctccatccaaggtgaagccaccagtgagaaacccccagaacagtaccgtcttggcgaggggcccagcatctgtgccatctgtggggaaggccgtggctacagcagctcaggcccagacagggccagaggaggactcagggagcagtgaggaggagtcagacagtgaggaggaggcggagacgctggctcaggtgaagccttcagggaagacccaccagatcagagctgccttggctcctgccaaggagtcccccaggaaaggggctgccccaacacctcctgggaagacagggccttcggctgcccaggcagggaagcaggatgactcagggagcagcagcgaggaatcagacagtgatggggaggcaccggcagctgtgacctctgcccaggtgattaaaccccctctgatttttgtcgaccctaatcgtagtccagctggcccagctgctacacccgcacaagcccaggctgcaagcaccccgaggaaggcccgagcctcggagagcacagccaggagctcctcctccgagagcgaggatgaggacgtgatccccgctacacagtgcttgactcctggcatcagaaccaatgtggtgaccatgcccactgcccacccaagaatagcccccaaagccagcatggctggggccagcagcagcaaggagtccagtcggatatcagatggcaagaaacaggagggaccagccactcaggttgacagtgctgtgggaacactccctgcaacaagtccccagagcacctccgtccaggccaaagggaccaacaagctcagaaaacctaagcttcctgaggtccagcaggccaccaaagcccctgagagctcagatgacagtgaggacagcagcgacagttcttcagggagtgaggaagatggtgaagggccccagggggccaagtcagcccacacgctggtaggtcccaccccctccaggacagagaccctggtggaggagaccgcagcagagtccagcgaggatgatgtggtggcgccatcccagtctctcctctcaggttatatgacccctggactaaccccagccaattcccaggcctcaaaagccactcccaagctagactccagcccctcagtttcctctactctggccgccaaagatgacccagatggcaagcaggaggcaaagccccaacaggcagcaggcatgttgtcccctaaaacaggtggaaaagaggctgcttcaggcaccacacctcagaagtcccggaagcccaagaaaggggctgggaacccccaagcctcaaccctggcgctgcaaagcaacatcacccagtgcctcctgggccaaccctggcccctgaatgaggcccaggtgcaggcctcagtggtgaaggtcctgactgagctgctggaacaggaaagaaagaaggtggtggacaccaccaaggagagcagcaggaagggctgggagagccgcaagcggaagctatcgggagaccagccagctgccaggacccccaggagcaagaagaagaagaagctgggggccggggaaggtggggaggcctctgtttccccagaaaagacctccacgacttccaaggggaaagcaaagagagacaaagcaagtggtgatgtcaaggagaagaaagggaaggggtctcttggctcccaaggggccaaggacgagccagaagaggagcttcagaaggggatggggacggttgaaggtggagatcaaagcaacccaaagagcaagaaggagaagaagaaatccgacaagagaaaaaaagacaaagaaaaaaaagaaaagaagaagaaagcaaaaaaggcctcaaccaaagattctgagtcaccgtcccagaagaaaaagaagaaaaagaagaagacagcagagcagactgtatgacgagcaccagcaccaggcacagggatttcctagccgagcagtggccatccccatgcctctgacctccaccgacctctgcccaccatgggttggaactaaactgttaccttccctcgctccacagaagaagacagccagcttcaggggtccctgtgctggccaagccagtgagcctgcggggaggctggtccaaggagaaagtggaccagctcccatgacctcaccccactcccccaacacaggacgcttcatata

SEQ ID NO: 194558 - DNA, 4825 bp, Homo sapiens
  Payload ID: 18442
  Gene Name: Treacher Collins-Franceschetti syndrome 1
  Uniprot ID: Q13428
  ENST ID: ENST00000445265
  CDS Start-End: 82-4320
gaggtctaagggcgcgagggaagtggcgggcggggactaaggcggggcgtgcaggtagccggccggccgggggtcgcgggtatggccgaggccaggaagcggcgggagctacttcccctgatctaccaccatctgctgcgggctggctatgtgcgtgcggcgcgggaagtgaaggagcagagcggccagaagtgtttcctggctcagcccgtaacccttctggacatctatacacactggcaacaaacctcagagcttggtcggaagcggaaggcagaggaagatgcggcactgcaagctaagaaaacccgtgtgtcagaccccatcagcacctcggagagctcggaagaggaggaagaagcagaagccgaaaccgccaaagccaccccaagactagcatctaccaactcctcagtcctgggggcggacttgccatcaagcatgaaagaaaaagccaaggcagagacagagaaagctggcaagactgggaattccatgccacaccctgccactgggaagacggtggccaaccttctttctgggaagtctcccaggaagtcagcagagccctcagcaaatactacgttggtctcagaaactgaggaggagggcagcgtcccggcctttggagctgctgccaagcctgggatggtgtcagcgggccaggccgacagctccagcgaggacacctccagctccagtgatgagacagacgtggaggtaaaggcctctgaaaaaattctccaggtcagagctgcctcagcccctgccaaggggacccctgggaaaggggctaccccagcaccccctgggaaggcaggggctgtagcctcccagaccaaggcagggaagccagaggaggactcagagagcagcagcgaggagtcatctgacagtgaggaggagacgccagctgccaaggccctgcttcaggcgaaggcctcaggaaaaacctctcaggtcggagctgcctcagcccctgccaaggagtcccccaggaaaggagctgccccagcgccccctgggaagacagggcctgcagttgccaaggcccaggcggggaagcgggaggaggactcgcagagcagcagcgaggaatcggacagtgaggaggaggcgcctgctcaggcgaagccttcagggaaggccccccaggtcagagccgcctcggcccctgccaaggagtcccccaggaaaggggctgccccagcacctcctaggaaaacagggcctgcagccgcccaggtccaggtggggaagcaggaggaggactcaagaagcagcagcgaggagtcagacagtgacagagaggcactggcagccatgaatgcagctcaggtgaagcccttggggaaaagcccccaggtgaaacctgcctctaccatgggcatggggcccttggggaaaggcgccggcccagtgccacccgggaaggtggggcctgcaaccccctcagcccaggtggggaagtgggaggaggactcagagagcagtagtgaggagtcatcagacagcagtgatggagaggtgcccacagctgtggccccggctcaggaaaagtccttggggaacatcctccaggccaaacccacctccagtcctgccaaggggccccctcagaaggcagggcctgtagccgtccaggtcaaggctgaaaagcccatggacaactcggagagcagcgaggagtcatcggacagtgcggacagtgaggaggcaccagcagccatgactgcagctcaggcaaaaccagctctgaaaattcctcagaccaaggcctgcccaaagaaaaccaataccactgcatctgccaaggtcgcccctgtgcgagtgggcacccaagccccccggaaagcaggaactgcgacttctccagcaggctcatccccagctgtggctgggggcacccagagaccagcagaggattcttcaagcagtgaggaatcagatagtgaggaagagaagacaggtcttgcagtaaccgtgggacaggcaaagtctgtggggaaaggcctccaggtgaaagcagcctcagtgcctgtcaaggggtccttggggcaagggactgctccagtactccctgggaagacggggcctacagtcacccaggtgaaagctgaaaagcaggaagactctgagagcagtgaggaggaatcagacagtgaggaagcagctgcatctccagcacaggtgaaaacctcagtaaagaaaacccaggccaaagccaacccagctgccgccagagcaccttcagcaaaagggacaatttcagcccctggaaaagttgtcactgcagctgctcaagccaagcagaggtctccatccaaggtgaagccaccagtgagaaacccccagaacagtaccgtcttggcgaggggcccagcatctgtgccatctgtggggaaggccgtggctacagcagctcaggcccagacagggccagaggaggactcagggagcagtgaggaggagtcagacagtgaggaggaggcggagacgctggctcaggtgaagccttcagggaagacccaccagatcagagctgccttggctcctgccaaggagtcccccaggaaaggggctgccccaacacctcctgggaagacagggccttcggctgcccaggcagggaagcaggatgactcagggagcagcagcgaggaatcagacagtgatggggaggcaccggcagctgtgacctctgcccaggtgattaaaccccctctgatttttgtcgaccctaatcgtagtccagctggcccagctgctacacccgcacaagcccaggctgcaagcaccccgaggaaggcccgagcctcggagagcacagccaggagctcctcctccgagagcgaggatgaggacgtgatccccgctacacagtgcttgactcctggcatcagaaccaatgtggtgaccatgcccactgcccacccaagaatagcccccaaagccagcatggctggggccagcagcagcaaggagtccagtcggatatcagatggcaagaaacaggagggaccagccactcaggtgtcaaagaagaacccagcttccctcccactgacccaggctgccctgaaggtcctcgcccagaaagccagtgaggctcagcctcctgttgccaggacccagccttcaagtggggttgacagtgctgtgggaacactccctgcaacaagtccccagagcacctccgtccaggccaaagggaccaacaagctcagaaaacctaagcttcctgaggtccagcaggccaccaaagcccctgagagctcagatgacagtgaggacagcagcgacagttcttcagggagtgaggaagatggtgaagggccccagggggccaagtcagcccacacgctggtaggtcccaccccctccaggacagagaccctggtggaggagaccgcagcagagtccagcgaggatgatgtggtggcgccatcccagtctctcctctcaggttatatgacccctggactaaccccagccaattcccaggcctcaaaagccactcccaagctagactccagcccctcagtttcctctactctggccgccaaagatgacccagatggcaagcaggaggcaaagccccaacaggcagcaggcatgttgtcccctaaaacaggtggaaaagaggctgcttcaggcaccacacctcagaagtcccggaagcccaagaaaggggctgggaacccccaagcctcaaccctggcgctgcaaagcaacatcacccagtgcctcctgggccaaccctggcccctgaatgaggcccaggtgcaggcctcagtggtgaaggtcctgactgagctgctggaacaggaaagaaagaaggtggtggacaccaccaaggagagcagcaggaagggctgggagagccgcaagcggaagctatcgggagaccagccagctgccaggacccccaggagcaagaagaagaagaagctgggggccggggaaggtggggaggcctctgtttccccagaaaagacctccacgacttccaaggggaaagcaaagagagacaaagcaagtggtgatgtcaaggagaagaaagggaaggggtctcttggctcccaaggggccaaggacgagccagaagaggagcttcagaaggggatggggacggttgaaggtggagatcaaagcaacccaaagagcaagaaggagaagaagaaatccgacaagagaaaaaaagacaaagaaaaaaaagaaaagaagaagaaagcaaaaaaggcctcaaccaaagattctgagtcaccgtcccagaagaaaaagaagaaaaagaagaagacagcagagcagactgtatgacgagcaccagcaccaggcacagggatttcctagccgagcagtggccatccccatgcctctgacctccaccgacctctgcccaccatgggttggaactaaactgttaccttccctcgctccacagaagaagacagccagcttcaggggtccctgtgctggccaagccagtgagcctgcggggaggctggtccaaggagaaagtggaccagctcccatgacctcaccccactcccccaacacaggacgcttcatatagatgtgtacagtatatgtatttttttaagtgacctcctctccttccacagaccccacatgcccaaaggcctcgggacttcccaccaccttgctccacagatccagctaggcctgacctgtgcctcatcccgtgccgctcggtctctggctgatcccgaggctttgtcttcctctcgtcagttcttttggttgtgttttttgttttttttttaataactcaaaaaaaaaataaaagacttggaggaagggt

SEQ ID NO: 194559 - DNA, 4467 bp, Homo sapiens
  Payload ID: 18442
  Gene Name: Treacher Collins-Franceschetti syndrome 1
  Uniprot ID: Q13428
  ENST ID: ENST00000504761
  CDS Start-End: 1-4467
atggccgaggccaggaagcggcgggagctacttcccctgatctaccaccatctgctgcgggctggctatgtgcgtgcggcgcgggaagtgaaggagcagagcggccagaagtgtttcctggctcagcccgtaacccttctggacatctatacacactggcaacaaacctcagagcttggtcggaagcggaaggcagaggaagatgcggcactgcaagctaagaaaacccgtgtgtcagaccccatcagcacctcggagagctcggaagaggaggaagaagcagaagccgaaaccgccaaagccaccccaagactagcatctaccaactcctcagtcctgggggcggacttgccatcaagcatgaaagaaaaagccaaggcagagacagagaaagctggcaagactgggaattccatgccacaccctgccactgggaagacggtggccaaccttctttctgggaagtctcccaggaagtcagcagagccctcagcaaatactacgttggtctcagaaactgaggaggagggcagcgtcccggcctttggagctgctgccaagcctgggatggtgtcagcgggccaggccgacagctccagcgaggacacctccagctccagtgatgagacagacgtggaggggaaaccctcagtaaaaccagcccaggtcaaagcctcatcagtttctactaaggagtctccagcaagaaaggcggccccagcccctgggaaggtgggggatgtgacaccccaggtcaaaggaggggccctgcccccagccaagagggccaagaagccagaagaggagtcagagagtagtgaggagggatctgaaagtgaggaggaggcccctgcagggacacgaagccaggtaaaggcctctgaaaaaattctccaggtcagagctgcctcagcccctgccaaggggacccctgggaaaggggctaccccagcaccccctgggaaggcaggggctgtagcctcccagaccaaggcagggaagccagaggaggactcagagagcagcagcgaggagtcatctgacagtgaggaggagacgccagctgccaaggccctgcttcaggcgaaggcctcaggaaaaacctctcaggtcggagctgcctcagcccctgccaaggagtcccccaggaaaggagctgccccagcgccccctgggaagacagggcctgcagttgccaaggcccaggcggggaagcgggaggaggactcgcagagcagcagcgaggaatcggacagtgaggaggaggcgcctgctcaggcgaagccttcagggaaggccccccaggtcagagccgcctcggcccctgccaaggagtcccccaggaaaggggctgccccagcacctcctaggaaaacagggcctgcagccgcccaggtccaggtggggaagcaggaggaggactcaagaagcagcagcgaggagtcagacagtgacagagaggcactggcagccatgaatgcagctcaggtgaagcccttggggaaaagcccccaggtgaaacctgcctctaccatgggcatggggcccttggggaaaggcgccggcccagtgccacccgggaaggtggggcctgcaaccccctcagcccaggtggggaagtgggaggaggactcagagagcagtagtgaggagtcatcagacagcagtgatggagaggtgcccacagctgtggccccggctcaggaaaagtccttggggaacatcctccaggccaaacccacctccagtcctgccaaggggccccctcagaaggcagggcctgtagccgtccaggtcaaggctgaaaagcccatggacaactcggagagcagcgaggagtcatcggacagtgcggacagtgaggaggcaccagcagccatgactgcagctcaggcaaaaccagctctgaaaattcctcagaccaaggcctgcccaaagaaaaccaataccactgcatctgccaaggtcgcccctgtgcgagtgggcacccaagccccccggaaagcaggaactgcgacttctccagcaggctcatccccagctgtggctgggggcacccagagaccagcagaggattcttcaagcagtgaggaatcagatagtgaggaagagaagacaggtcttgcagtaaccgtgggacaggcaaagtctgtggggaaaggcctccaggtgaaagcagcctcagtgcctgtcaaggggtccttggggcaagggactgctccagtactccctgggaagacggggcctacagtcacccaggtgaaagctgaaaagcaggaagactctgagagcagtgaggaggaatcagacagtgaggaagcagctgcatctccagcacaggtgaaaacctcagtaaagaaaacccaggccaaagccaacccagctgccgccagagcaccttcagcaaaagggacaatttcagcccctggaaaagttgtcactgcagctgctcaagccaagcagaggtctccatccaaggtgaagccaccagtgagaaacccccagaacagtaccgtcttggcgaggggcccagcatctgtgccatctgtggggaaggccgtggctacagcagctcaggcccagacagggccagaggaggactcagggagcagtgaggaggagtcagacagtgaggaggaggcggagacgctggctcaggtgaagccttcagggaagacccaccagatcagagctgccttggctcctgccaaggagtcccccaggaaaggggctgccccaacacctcctgggaagacagggccttcggctgcccaggcagggaagcaggatgactcagggagcagcagcgaggaatcagacagtgatggggaggcaccggcagctgtgacctctgcccaggtgattaaaccccctctgatttttgtcgaccctaatcgtagtccagctggcccagctgctacacccgcacaagcccaggctgcaagcaccccgaggaaggcccgagcctcggagagcacagccaggagctcctcctccgagagcgaggatgaggacgtgatccccgctacacagtgcttgactcctggcatcagaaccaatgtggtgaccatgcccactgcccacccaagaatagcccccaaagccagcatggctggggccagcagcagcaaggagtccagtcggatatcagatggcaagaaacaggagggaccagccactcaggtgtcaaagaagaacccagcttccctcccactgacccaggctgccctgaaggtcctcgcccagaaagccagtgaggctcagcctcctgttgccaggacccagccttcaagtggggttgacagtgctgtgggaacactccctgcaacaagtccccagagcacctccgtccaggccaaagggaccaacaagctcagaaaacctaagcttcctgaggtccagcaggccaccaaagcccctgagagctcagatgacagtgaggacagcagcgacagttcttcagggagtgaggaagatggtgaagggccccagggggccaagtcagcccacacgctgggtcccaccccctccaggacagagaccctggtggaggagaccgcagcagagtccagcgaggatgatgtggtggcgccatcccagtctctcctctcaggttatatgacccctggactaaccccagccaattcccaggcctcaaaagccactcccaagctagactccagcccctcagtttcctctactctggccgccaaagatgacccagatggcaagcaggaggcaaagccccaacaggcagcaggcatgttgtcccctaaaacaggtggaaaagaggctgcttcaggcaccacacctcagaagtcccggaagcccaagaaaggggctgggaacccccaagcctcaaccctggcgctgcaaagcaacatcacccagtgcctcctgggccaaccctggcccctgaatgaggcccaggtgcaggcctcagtggtgaaggtcctgactgagctgctggaacaggaaagaaagaaggtggtggacaccaccaaggagagcagcaggaagggctgggagagccgcaagcggaagctatcgggagaccagccagctgccaggacccccaggagcaagaagaagaagaagctgggggccggggaaggtggggaggcctctgtttccccagaaaagacctccacgacttccaaggggaaagcaaagagagacaaagcaagtggtgatgtcaaggagaagaaagggaaggggtctcttggctcccaaggggccaaggacgagccagaagaggagcttcagaaggggatggggacggttgaaggtggagatcaaagcaacccaaagagcaagaaggagaagaagaaatccgacaagagaaaaaaagacaaagaaaaaaaagaaaagaagaagaaagcaaaaaaggcctcaaccaaagattctgagtcaccgtcccagaagaaaaagaagaaaaagaagaagacagcagagcagactgtatga

SEQ ID NO: 194560 - DNA, 701 bp, Homo sapiens
  Payload ID: 18442
  Gene Name: Treacher Collins-Franceschetti syndrome 1
  ENST ID: ENST00000513538
  CDS Start-End: 1-203
agcaggatgactcagggagcagcagcgaggaatcagacagtgatggggaggcaccggcagctgtgacctctgcccaggacagtaactccaaacctgccagaagcaagaccctggccccagcacccccagagaggaacacggaggggtcctcggagagcagtgaggaagagctgccactgacccaggaccaggagtcttcttgaatcccatgagctctgcccaggaccctctctcaagcacctgtggcataccttcatgtgctccactgcacccagagcttaagccacagtcctgctcaggctacacctccaagggtgggaccaggcccaccttatcttcctgtactccagaggcccaagtcagccatgctggtgtggtccaagcttctgtgtgaaccctggcccttccatcagacagcattaccctttgtcctcctctagccccaagctcccagaagcttctgccaggcacctcagagcaccagctcccctgtcccagggcctaaccacagatcctggagttctgcaacctccagaccagagcggtctcatgaaccacctccccttgaatatcacataccacattgttatcaattcatcagtaaggtcagatgctgtttgcacacctccagcaatagggtgctcactgcctctcactttccaatggcacagattacaaaagtaaagaacaaccaccaccaa

SEQ ID NO: 194561 - DNA, 661 bp, Homo sapiens
  Payload ID: 18442
  Gene Name: Treacher Collins-Franceschetti syndrome 1
  ENST ID: ENST00000515516
  CDS Start-End: 1-567
ctgatctaccaccatctgctgcgggctggctatgtgcgtgcggcgcgggaagtgaaggagcagagcggccagaagtgtttcctggctcagcccgtaacccttctggacatctatacacactggcaacaaacctcagagcttggtcggaagcggaaggcagaggaagatgcggcactgcaagctaagaaaacccgtgtgtcagaccccatcagcacctcggagagctcggaagaggaggaagaagcagaagccgaaaccgccaaagccaccccaagactagcatctaccaactcctcagtcctgggggcggacttgccatcaagcatgaaagaaaaagccaaggacgagccagaagaggagcttcagaaggggatggggacggttgaaggtggagatcaaagcaacccaaagagcaagaaggagaagaagaaatccgacaagagaaaaaaagacaaagaaaaaaaagaaaagaagaagaaagcaaaaaaggcctcaaccaaagattctgagtcaccgtcccagaagaaaaagaagaaaaagaagaagacagcagagcagactgtatgacgagcaccagcaccaggcacagggatttcctagccgagcagtggccatccccatgcctctgacctccaccgacctctgcccaccatgggttgga

SEQ ID NO: 194562 - DNA, 869 bp, Homo sapiens
  Payload ID: 18442
  Gene Name: Treacher Collins-Franceschetti syndrome 1
  ENST ID: ENST00000506767
  CDS Start-End: 1-445
gggcccagcatctgtgccatctgtggggaaggccgtggctacagcagctcaggcccagacagggccagaggaggactcagggagcagtgaggaggagtcagacagtgaggaggaggcggagacgctggctcaggtgaagccttcagggaagacccaccagatcagagctgccttggctcctgccaaggagtcccccaggaaaggggctgccccaacacctcctgggaagacagggccttcggctgcccaggcagggaagcaggatgactcagggagcagcagcgaggaatcagacagtgatggggaggcaccggcagctgtgacctctgcccagtccagctggcccagctgctacacccgcacaagcccaggctgcaagcaccccgaggaaggcccgagcctcggagagcacagccaggagctcctcctccgagagcgaggatgaggacgtgatccccgctacacagtgcttgactcctggcatcagaaccaatgtggtgaccatgcccactgcccacccaagaatagcccccaaagccagcatggctggggccagcagcagcaaggagtccagtcggatatcagatggcaagaaacaggagggaccagccactcaggtgtcaaagaagaacccagcttccctcccactgacccaggctgccctgaaggtcctcgcccagaaagccagtgaggctcagcctcctgttgccaggacccagccttcaagtggggtgagcttggggagccaggggaagcaagcccacggagcgtagaaggtgcaggcgtggccctgcatcgcggcaccagcactcatctgccccatgacctctgcacttggtttgcctccctcggcctcagtggcctaatct

SEQ ID NO: 194563 - DNA, 4646 bp, Homo sapiens
  Payload ID: 18442
  Gene Name: Treacher Collins-Franceschetti syndrome 1
  ENST ID: ENST00000513346
  CDS Start-End: 1-4467
atggccgaggccaggaagcggcgggagctacttcccctgatctaccaccatctgctgcgggctggctatgtgcgtgcggcgcgggaagtgaaggagcagagcggccagaagtgtttcctggctcagcccgtaacccttctggacatctatacacactggcaacaaacctcagagcttggtcggaagcggaaggcagaggaagatgcggcactgcaagctaagaaaacccgtgtgtcagaccccatcagcacctcggagagctcggaagaggaggaagaagcagaagccgaaaccgccaaagccaccccaagactagcatctaccaactcctcagtcctgggggcggacttgccatcaagcatgaaagaaaaagccaaggcagagacagagaaagctggcaagactgggaattccatgccacaccctgccactgggaagacggtggccaaccttctttctgggaagtctcccaggaagtcagcagagccctcagcaaatactacgttggtctcagaaactgaggaggagggcagcgtcccggcctttggagctgctgccaagcctgggatggtgtcagcgggccaggccgacagctccagcgaggacacctccagctccagtgatgagacagacgtggaggggaaaccctcagtaaaaccagcccaggtcaaagcctcatcagtttctactaaggagtctccagcaagaaaggcggccccagcccctgggaaggtgggggatgtgacaccccaggtcaaaggaggggccctgcccccagccaagagggccaagaagccagaagaggagtcagagagtagtgaggagggatctgaaagtgaggaggaggcccctgcagggacacgaagccaggtaaaggcctctgaaaaaattctccaggtcagagctgcctcagcccctgccaaggggacccctgggaaaggggctaccccagcaccccctgggaaggcaggggctgtagcctcccagaccaaggcagggaagccagaggaggactcagagagcagcagcgaggagtcatctgacagtgaggaggagacgccagctgccaaggccctgcttcaggcgaaggcctcaggaaaaacctctcaggtcggagctgcctcagcccctgccaaggagtcccccaggaaaggagctgccccagcgccccctgggaagacagggcctgcagttgccaaggcccaggcggggaagcgggaggaggactcgcagagcagcagcgaggaatcggacagtgaggaggaggcgcctgctcaggcgaagccttcagggaaggccccccaggtcagagccgcctcggcccctgccaaggagtcccccaggaaaggggctgccccagcacctcctaggaaaacagggcctgcagccgcccaggtccaggtggggaagcaggaggaggactcaagaagcagcagcgaggagtcagacagtgacagagaggcactggcagccatgaatgcagctcaggtgaagcccttggggaaaagcccccaggtgaaacctgcctctaccatgggcatggggcccttggggaaaggcgccggcccagtgccacccgggaaggtggggcctgcaaccccctcagcccaggtggggaagtgggaggaggactcagagagcagtagtgaggagtcatcagacagcagtgatggagaggtgcccacagctgtggccccggctcaggaaaagtccttggggaacatcctccaggccaaacccacctccagtcctgccaaggggccccctcagaaggcagggcctgtagccgtccaggtcaaggctgaaaagcccatggacaactcggagagcagcgaggagtcatcggacagtgcggacagtgaggaggcaccagcagccatgactgcagctcaggcaaaaccagctctgaaaattcctcagaccaaggcctgcccaaagaaaaccaataccactgcatctgccaaggtcgcccctgtgcgagtgggcacccaagccccccggaaagcaggaactgcgacttctccagcaggctcatccccagctgtggctgggggcacccagagaccagcagaggattcttcaagcagtgaggaatcagatagtgaggaagagaagacaggtcttgcagtaaccgtgggacaggcaaagtctgtggggaaaggcctccaggtgaaagcagcctcagtgcctgtcaaggggtccttggggcaagggactgctccagtactccctgggaagacggggcctacagtcacccaggtgaaagctgaaaagcaggaagactctgagagcagtgaggaggaatcagacagtgaggaagcagctgcatctccagcacaggtgaaaacctcagtaaagaaaacccaggccaaagccaacccagctgccgccagagcaccttcagcaaaagggacaatttcagcccctggaaaagttgtcactgcagctgctcaagccaagcagaggtctccatccaaggtgaagccaccagtgagaaacccccagaacagtaccgtcttggcgaggggcccagcatctgtgccatctgtggggaaggccgtggctacagcagctcaggcccagacagggccagaggaggactcagggagcagtgaggaggagtcagacagtgaggaggaggcggagacgctggctcaggtgaagccttcagggaagacccaccagatcagagctgccttggctcctgccaaggagtcccccaggaaaggggctgccccaacacctcctgggaagacagggccttcggctgcccaggcagggaagcaggatgactcagggagcagcagcgaggaatcagacagtgatggggaggcaccggcagctgtgacctctgcccagaaggacagtaactccaaacctgccagaagcaagaccctggccccagcacccccagagaggaacacggaggggtcctcggagagcagtgaggaagagctgccactgacccaggtgattaaaccccctctgatttttgtcgaccctaatcgtagtccagctggcccagctgctacacccgcacaagcccaggctgcaagcaccccgaggaaggcccgagcctcggagagcacagccaggagctcctcctccgagagcgaggatgaggacgtgatccccgctacacagtgcttgactcctggcatcagaaccaatgtggtgaccatgcccactgcccacccaagaatagcccccaaagccagcatggctggggccagcagcagcaaggagtccagtcggatatcagatggcaagaaacaggagggaccagccactcaggttgacagtgctgtgggaacactccctgcaacaagtccccagagcacctccgtccaggccaaagggaccaacaagctcagaaaacctaagcttcctgaggtccagcaggccaccaaagcccctgagagctcagatgacagtgaggacagcagcgacagttcttcagggagtgaggaagatggtgaagggccccagggggccaagtcagcccacacgctggtaggtcccaccccctccaggacagagaccctggtggaggagaccgcagcagagtccagcgaggatgatgtggtggcgccatcccagtctctcctctcaggttatatgacccctggactaaccccagccaattcccaggcctcaaaagccactcccaagctagactccagcccctcagtttcctctactctggccgccaaagatgacccagatggcaagcaggaggcaaagccccaacaggcagcaggcatgttgtcccctaaaacaggtggaaaagaggctgcttcaggcaccacacctcagaagtcccggaagcccaagaaaggggctgggaacccccaagcctcaaccctggcgctgcaaagcaacatcacccagtgcctcctgggccaaccctggcccctgaatgaggcccaggtgcaggcctcagtggtgaaggtcctgactgagctgctggaacaggaaagaaagaaggtggtggacaccaccaaggagagcagcaggaagggctgggagagccgcaagcggaagctatcgggagaccagccagctgccaggacccccaggagcaagaagaagaagaagctgggggccggggaaggtggggaggcctctgtttccccagaaaagacctccacgacttccaaggggaaagcaaagagagacaaagcaagtggtgatgtcaaggagaagaaagggaaggggtctcttggctcccaaggggccaaggacgagccagaagaggagcttcagaaggggatggggacggttgaaggtggagatcaaagcaacccaaagagcaagaaggagaagaagaaatccgacaagagaaaaaaagacaaagaaaaaaaagaaaagaagaagaaagcaaaaaaggcctcaaccaaagattctgagtcaccgtcccagaagaaaaagaagaaaaagaagaagacagcagagcagactgtatgacgagcaccagcaccaggcacagggatttcctagccgagcagtggccatccccatgcctctgacctccaccgacctctgcccaccatgggttggaactaaactgttaccttccctcgctccacagaagaagacagccagcttcaggggtccctgtgctggccaagccagtgagcctgcgg

SEQ ID NO: 194564 - DNA, 551 bp, Homo sapiens
  Payload ID: 18443
  Gene Name: trefoil factor 1
  Uniprot ID: P04155
  ENST ID: ENST00000291527
  CDS Start-End: 100-354
taacgctctttaagcaaacagagcctgccctataaaatccggggctcgggcggcctctcatccctgactcggggtcgcctttggagcagagaggaggcaatggccaccatggagaacaaggtgatctgcgccctggtcctggtgtccatgctggccctcggcaccctggccgaggcccagacagagacgtgtacagtggccccccgtgaaagacagaattgtggttttcctggtgtcacgccctcccagtgtgcaaataagggctgctgtttcgacgacaccgttcgtggggtcccctggtgcttctatcctaataccatcgacgtccctccagaagaggagtgtgaattttagacacttctgcagggatctgcctgcatcctgacgcggtgccgtccccagcacggtgattagtcccagagctcggctgccacctccaccggacacctcagacacgcttctgcagctgtgcctcggctcacaacacagattgactgctctgactttgactactcaaaattggcctaaaaattaaaagagatcgatattaa

SEQ ID NO: 194565 - DNA, 737 bp, Homo sapiens
  Payload ID: 18444
  Gene Name: trefoil factor 2
  Uniprot ID: Q03403
  ENST ID: ENST00000291526
  CDS Start-End: 172-561
acagctgcctcttgcctcctcttcgcctccacggtggaagggctggggccacggggcagagaagaaaggttatctctgcttgttggacaaacagaggggagattataaaacatacccggcagtggacaccatgcattctgcaagccaccctggggtgcagctgagctagacatgggacggcgagacgcccagctcctggcagcgctcctcgtcctggggctatgtgccctggcggggagtgagaaaccctccccctgccagtgctccaggctgagcccccataacaggacgaactgcggcttccctggaatcaccagtgaccagtgttttgacaatggatgctgtttcgactccagtgtcactggggtcccctggtgtttccaccccctcccaaagcaagagtcggatcagtgcgtcatggaggtctcagaccgaagaaactgtggctacccgggcatcagccccgaggaatgcgcctctcggaagtgctgcttctccaacttcatctttgaagtgccctggtgcttcttcccgaagtctgtggaagactgccattactaagagaggctggttccagaggatgcatctggctcaccgggtgttccgaaaccaaagaagaaacttcgccttatcagcttcatacttcatgaaatcctgggttttcttaaccatcttttcctcattttcaatggtttaacatataatttctttaaataaaacccttaaaatctgctaaa

SEQ ID NO: 194566 - DNA, 407 bp, Homo sapiens
  Payload ID: 18445
  Gene Name: trefoil factor 3 (intestinal)
  ENST ID: ENST00000291525
  CDS Start-End: 1-225
atgctggggctggtcctggccttgctgtcctccagctctgctgaggagtacgtgggcctgtctgcaaaccagtgtgccgtgccagccaaggacagggtggactgcggctacccccatgtcacccccaaggagtgcaacaaccggggctgctgctttgactccaggatccctggagtgccttggtgtttcaagcccctgaggaagcaggcagaatgcaccttctgaggcacctccagctgcccccggccgggggatgcgaggctcggagcacccttgcccggctgtgattgctgccaggcactgttcatctcagcttttctgtccctttgctcccggcaagcgcttctgctgaaagttcatatctggagcctgatgtcttaacgaataaaggtcccatgctccacccg

SEQ ID NO: 194567 - DNA, 452 bp, Homo sapiens
  Payload ID: 18445
  Gene Name: trefoil factor 3 (intestinal)
  ENST ID: ENST00000398431
  CDS Start-End: 1-376
ggccttgctgtcctccagctctgctgaggagtacgtgggcctgtcccagcaagggctctggcagctgacagggctttgtctgggacagctgcaaaccagtgtgccgtgccagccaaggacagggtggactgcggctacccccatgtcacccccaaggagtgcaacaaccggggctgctgctttgactccaggatccctggagtgccttggtgtttcaagcccctgcaggaagcagaatgcaccttctgaggcacctccagctgcccccggccgggggatgcgaggctcggagcacccttgcccggctgtgattgctgccaggcactgttcatctcagcttttctgtccctttgctcccggcaagcgcttctgctgaaagttcatatctggagcctgatgtcttaacgaataaaggtcccatgctccacccgaggacagttcttcgtgcctga

SEQ ID NO: 194568 - DNA, 1109 bp, Homo sapiens
  Payload ID: 18445
  Gene Name: trefoil factor 3 (intestinal)
  ENST ID: ENST00000518498
  CDS Start-End: 236-520
cgctccccagtagaggacccggaaccagaactggaatccgcccttaccgcttgctgccaaaacagtgggggctgaactgacctctcccctttgggagagaaaaactgtctgggagcttgacaaaggcatgcaggagagaacaggagcagccacagccaggagggagagccttccccaagcaaacaatccagagcagctgtgcaaacaacggtgcataaatgaggcctcctggaccatgaagcgagtcctgagctgcgtcccggagcccacggtggtcatggctgccagagcgctctgcatgctggggctggtcctggccttgctgtcctccagctctgctgaggagtacgtgggcctgtctgcaaaccagtgtgccgtgccagccaaggacagggtggactgcggctacccccatgtcacccccaaggagtgcaacaaccggggctgctgctttgactccaggatccctggagtgccttggtgtttcaagcccctgcaggaagcagaatgcaccttctgaggcacctccagctgcccccggccgggggatgcgaggctcggagcacccttgcccggctgtgattgctgccaggcactgttcatctcagcttttctgtccctttgctcccggcaagcgcttctgctgaaagttcatatctggagcctgatgtcttaacgaataaaggtcccatgctccacccgaggacagttcttcgtgcctgagactttctgaggttgtgctttatttctgctgcgtcgtgggagagggcgggagggtgtcaggggagagtctgcccaggcctcaagggcaggaaaagactccctaaggagctgcagtgcatgcaaggatattttgaatccagactggcacccacgtcacaggaaagcctaggaacactgtaagtgccgcttcctcgggaaagcagaaaaaatacatttcaggtagaagttttcaaaaatcacaagtctttcttggtgaagacagcaagccaataaaactgtcttccaaagtggtcctttatttcacaaccactctcgctactgttcaatacttgtactattcctgggttttgtttctttgtacagtaaacattatgaacaaacaggca

SEQ ID NO: 194569 - DNA, 2771 bp, Homo sapiens
  Payload ID: 18446
  Gene Name: trehalase (brush-border membrane glycoprotein)
  Uniprot ID: O43280
  ENST ID: ENST00000264029
  CDS Start-End: 47-1798
gccgaaggtgcctgggcttgctcattcagtcacagtcacagccaccatgccagggaggacctgggagctgtgcctgctactgctgctggggctgggactggggtcccaggaggccctacccccaccctgtgagagtgagatttactgccacggggagctcctaaaccaagttcaaatggccaagctctaccaggatgacaagcagtttgtggacatgccactgtctatagctccagaacaagtcctgcagaccttcactgagctgtccagggaccacaatcacagcatccccagggagcagctgcaggcgtttgtccacgaacacttccaggccaaggggcaggagctgcagccctggacccctgcagactggaaagacagcccccagttcctgcagaagatttcagatgccaaactgcgtgcctgggcagggcagctgcatcagctctggaagaagctggggaagaagatgaagccagaggttctcagccaccctgagcggttctctctcatctactcagaacatcccttcattgtgcctggcggtcgctttgttgagttctactactgggactcctactgggtcatggagggtctgctcctctcagagatggctgagacggtgaagggcatgctgcagaacttcttggacctggtgaaaacctatgggcatgtccccaatggtgggcgcgtgtactacctgcagcggagccagcccccactcttgaccctcatgatggattgctacttgactcacaccaatgacaccgcctttctacaggaaaacattgaaacactagccttggaattggacttttggaccaagaacaggactgtctctgtgagcttggagggaaagaactacctcctgaatcgctattatgtcccttatgggggacccaggcctgagtcctacagcaaagatgtggagttggctgacaccttgccagaaggagaccgggaggctctgtgggctgagctcaaggctggggctgagtctggctgggacttctcttcacgctggctcattggaggcccaaaccccaactcgcttagcggcatccgaacaagcaaactggtgcctgttgacctgaatgccttcctatgccaagcagaggagctgatgagcaacttctattccaggctggggaacgactcccaggccacgaagtacagaatcctgcggtcgcagcgcttggccgccctgaacacagtcctgtgggatgagcagaccggagcctggttcgattacgaccttgagaagaagaagaaaaaccgggagttttacccatccaacctcactccactctgggccgggtgtttctctgaccctggcgtggcggacaaggctctgaaatacctggaggacaaccggatcctgacttaccagtatgggatcccgacctctctccagaagacaggccagcagtgggatttccccaatgcctgggcccccctgcaggacctggtcatcagaggcctggccaaggcacctttacgtcgggcccaggaagtggctttccagctggctcagaattggatccgaaccaattttgatgtctactcgcagaagtcagccatgtatgagaagtatgacgtcagcaacggtggacagcccggtgggggaggagaatatgaagttcaggagggatttggctggacgaatggcgtggtcctgatgctgctggaccgctatggtgaccggctgacctcaggggccaagctggctttcctggagccccactgcctggcggccacccttctgcccagcctcctgctcagcctcctgccatggtgacagccctcctctcctcacctggccccagctcctgccccattaaacctctgcaccagttcctgccttcccctgcctcttcatgccctcctacctcccagcctgtcctcagagcgaagtggagggcagggtcacgacctggaggtcatgggtaggggcctagctccctcctggaaccttgaatagggtggaaatcctgctctggagggaagacctatccccaagtgcctcagcgccaagccccacaccggccttccactcacttccgtagtccaaaggctttattgttctgctgaaatgcttacaaatactgaaaacccccagcctgggcccaggcaaccaagggctcaatgctgggaaggagagcaggggaggtgggcttagtgttaaggcgtgaagggcgaggccagacagctggaggcctggtcctccactctccatttccatcacccttcggaggctgaaggaagggcggcggcaccacagggcccttcccctctgctgcatcatctcctgctcaggctttctctctaggagcattggaggaatcctctttccctgtcggaaactcaacactgtacagaactccaaccataacccttctagcttcctctcccaactgcatcgctcctcctctgttccatagatcccccggcttcatcccttctggctctaagcaaggcaccagtggaagggagagggctggactggggggctggcagcctgtgcatcagggctgaagacacaggcagggggaaggaaaaaggtattcagtcccttccccccagcatgagatgcccaggggcctgggctggagagatgatggcacgtaccctcagatggcccacagctgaagcagtgggctgggccacagagctgcagcaattagtatgtaaccatggcaatgaagcagtcactatggtaaccatggtgatgagtctgcaactaggggatggagctgggacctcaaggttga

SEQ ID NO: 194570 - DNA, 1718 bp, Homo sapiens
  Payload ID: 18446
  Gene Name: trehalase (brush-border membrane glycoprotein)
  Uniprot ID: O43280
  ENST ID: ENST00000397925
  CDS Start-End: 40-1698
gtgcctgggcttgctcattcagtcacagtcacagccaccatgccagggaggacctgggagctgtgcctgctactgctgctggggctgggactggggtcccaggaggccctacccccaccctgtgagagtgagatttactgccacggggagctcctaaaccaagttcaaatggccaagctctaccaggatgacaagcagtttgtggacatgccactgtctatagctccagaacaagtcctgcagaccttcactgagctgtccagggaccacaatcacagcatccccagggagcagctgcaggcgtttgtccacgaacacttccaggccaaggggcaggagctgcagccctggacccctgcagactggaaagacagcccccagttcctgcagaagatttcagatgccaaactgcgtgcctgggcagggcagctgcatcagctctggaagaagctggggaagaagatgaagccagaggttctcagccaccctgagcggttctctctcatctactcagaacatcccttcattgtgcctggcggtcgctttgttgagttctactactgctatgggcatgtccccaatggtgggcgcgtgtactacctgcagcggagccagcccccactcttgaccctcatgatggattgctacttgactcacaccaatgacaccgcctttctacaggaaaacattgaaacactagccttggaattggacttttggaccaagaacaggactgtctctgtgagcttggagggaaagaactacctcctgaatcgctattatgtcccttatgggggacccaggcctgagtcctacagcaaagatgtggagttggctgacaccttgccagaaggagaccgggaggctctgtgggctgagctcaaggctggggctgagtctggctgggacttctcttcacgctggctcattggaggcccaaaccccaactcgcttagcggcatccgaacaagcaaactggtgcctgttgacctgaatgccttcctatgccaagcagaggagctgatgagcaacttctattccaggctggggaacgactcccaggccacgaagtacagaatcctgcggtcgcagcgcttggccgccctgaacacagtcctgtgggatgagcagaccggagcctggttcgattacgaccttgagaagaagaagaaaaaccgggagttttacccatccaacctcactccactctgggccgggtgtttctctgaccctggcgtggcggacaaggctctgaaatacctggaggacaaccggatcctgacttaccagtatgggatcccgacctctctccagaagacaggccagcagtgggatttccccaatgcctgggcccccctgcaggacctggtcatcagaggcctggccaaggcacctttacgtcgggcccaggaagtggctttccagctggctcagaattggatccgaaccaattttgatgtctactcgcagaagtcagccatgtatgagaagtatgacgtcagcaacggtggacagcccggtgggggaggagaatatgaagttcaggagggatttggctggacgaatggcgtggtcctgatgctgctggaccgctatggtgaccggctgacctcaggggccaagctggctttcctggagccccactgcctggcggccacccttctgcccagcctcctgctcagcctcctgccatggtgacagccctcctctcctcacct

SEQ ID NO: 194571 - DNA, 1723 bp, Homo sapiens
  Payload ID: 18446
  Gene Name: trehalase (brush-border membrane glycoprotein)
  ENST ID: ENST00000613915
  CDS Start-End: 24-137
attcagtcacagtcacagccaccatgccagggaggacctgggagctgtgcctgctactgctgctggggctgggactggggtcccaggaggccctacccccaccctgtgagagaacaagtcctgcagaccttcactgagctgtccagggaccacaatcacagcatccccagggagcagctgcaggcgtttgtccacgaacacttccaggccaaggggcaggagctgcagccctggacccctgcagactggaaagacagcccccagttcctgcagaagatttcagatgccaaactgcgtgcctgggcagggcagctgcatcagctctggaagaagctggggaagaaggtatcagcgtcctgggcctgcccaaggcctgaccaagggaactgaagagaggaatgtgcctggggcccacagtgtcttcggagcacagatcagggactcctactgggtcatggagggtctgctcctctcagagatggctgagacggtgaagggcatgctgcagaacttcttggacctggtgaaaacctatgggcatgtccccaatggtgggcgcgtgtactacctgcagcggagccagcccccactcttgaccctcatgatggattgctacttgactcacaccaatgacaccgcctttctacaggaaaacattgaaacactagccttggaattggacttttggaccaagaacaggactgtctctgtgagcttggagggaaagaactacctcctgaatcgctattatgtcccttatgggggacccaggcctgagtcctacagcaaagatgtggagttggctgacaccttgccagaaggagaccgggaggctctgtgggctgagctcaaggctggggctgagtctggctgggacttctcttcacgctggctcattggaggcccaaaccccaactcgcttagcggcatccgaacaagcaaactggtgcctgttgacctgaatgccttcctatgccaagcagaggagctgatgagcaacttctattccaggctggggaacgactcccaggccacgaagtacagaatcctgcggtcgcagcgcttggccgccctgaacacagtcctgtgggatgagcagaccggagcctggttcgattacgaccttgagaagaagaagaaaaaccgggagttttacccatccaacctcactccactctgggccgggtgtttctctgaccctggcgtggcggacaaggctctgaaatacctggaggacaaccggatcctgacttaccagtatgggatcccgacctctctccagaagacaggccagcagtgggatttccccaatgcctgggcccccctgcaggacctggtcatcagaggcctggccaaggcacctttacgtcgggcccaggaagtggctttccagctggctcagaattggatccgaaccaattttgatgtctactcgcagaagtcagccatgtatgagaagtatgacgtcagcaacggtggacagcccggtgggggaggagaatatgaagttcaggagggatttggctggacgaatggcgtggtcctgatgctgctggaccgctatggtgaccggctgacctcaggggccaagctggctttcctggagccccactgcctggcggccacccttctgcccagcctcctgctcagcctcctgccatggtgacagccctcctctcctcacctggccccagctcctgccccattaaacctctgcaccagt

SEQ ID NO: 194572 - DNA, 4770 bp, Homo sapiens
  Payload ID: 18447
  Gene Name: triadin
  Uniprot ID: Q13061
  ENST ID: ENST00000334268
  CDS Start-End: 319-2508
ctctagagtgccaaaaaagaaaaaaaaaagtgctgaagagtcctagggagatgaggctatttttgtttgaagctgatacttctagctgagccacaagtgctgcttggaaagggcttaggttgtttccagggggagaactctgcagaggagaggcaaagttcaacaggacaacaaagaagcagcagaaacagccaggaaaacgaagagcccccaggttttgacacagaaccctccaccagagttctcaaatccccaaatactctgcaaagtgcaacttgacgggaacttttcaactgacttttacttttgacgaccaccatgactgagatcactgctgaaggaaatgcatctacaaccacaactgtgatagacagcaaaaatggatctgtgcccaaatcccccggaaaagtgctgaagaggacagtcacagaagacatagtgacgacgttcagctcccctgcagcctggcttctggtcattgccctgataatcacgtggtcagctgttgccatcgttatgtttgatttagtggattacaaaaacttttcagcaagctctattgccaagattggctcagatcctttaaaactggtacgtgatgctatggaggaaaccacggactggatctatggcttcttttctttgttatctgacatcatctcatctgaagatgaagaagatgatgatggtgacgaagatactgataaaggagaaatagatgagcctcccttgagaaaaaaagaaatacacaaagataagactgaaaaacaagagaaacctgaaaggaaaatacaaactaaagttacacacaaagaaaaagaaaaaggaaaagaaaaagtaagagaaaaagaaaaacctgaaaagaaagcaactcacaaggaaaaaattgagaaaaaagaaaaaccagaaacaaagacactggcgaaagaacagaagaaagctaagactgcagaaaagagtgaagaaaagactaaaaaggaagtgaaaggtggaaaacaggagaaagtgaagcaaacagctgcaaaagtaaaagaagtacagaaaacaccatcaaaacccaaagaaaaggaggacaaagagaaagcagctgtgtcaaagcatgaacagaaagatcagtatgcattctgtcgatatatgattgacatatttgtccatggggatttaaaaccaggacaaagcccagccattccacctcccttaccgacagaacaagcttccagacccactccggcatcacctgcccttgaagaaaaagaaggggaaaagaagaaggctgagaagaaagttacttctgaaacaaaaaagaaagaaaaagaagatatcaaaaagaaaagtgagaaggaaactgccattgatgtggaaaaaaaagagccgggaaaagcttctgaaaccaaacaagggactgtaaaaattgcagcacaagcagcagctaagaaggatgaaaagaaggaagattccaagaaaacaaaaaaacctgcagaagtagaacaacccaagggaaaaaaacaggaaaagaaagaaaaacatgtggaaccagcaaagtcaccaaagaaagaacactcagttccaagtgacaaacaagtaaaagcaaaaactgaacgagccaaagaggagattggtgcggtttcaattaaaaaagctgtacctggaaagaaggaagagaaaacaaccaagacagtggagcaagaaattagaaaagaaaaatctgggaagacttcttcaattctgaaagataaagaacctattaaagggaaagaagagaaagttccagcttccctaaaggaaaaagaacctgaaactaaaaaagatgaaaagatgtccaaagcaggcaaagaagtcaagcctaaacctccacaactacaaggaaaaaaggaagagaagccagagccccaaattaaaaaagaagcaaaaccagctatatctgaaaaagtgcaaatacacaaacaagacatagtgaaaccagaaaagactgtttctcatggtaaaccagaagaaaaagttctcaagcaggtaaaagctgtcacaatagaaaaaacagccaagcccaaaccaacaaaaaaagctgaacatcgagaaagagaacctccatctataaaaacagacaaaccaaaaccaactccaaaaggaacatcagaagtcacagaatcaggaaagaagaaaactgaaatatctgaaaaagaaagtaaagaaaaagcagacatgaagcatcttagagaagaaaaagtctcaacaagaaaagaaagtcttcaattacacaatgtgacaaaagcagaaaaacctgcaagagtatcaaaagatgttgaagatgtaccagcttcaaagaaagctaaagaaggaactgaagatgtgtctcccacaaagcagaaaagtcccatcagtttcttccagtgtgtctacttggatgggtacaatggctatggatttcagtttcctttcactcctgcagaccgccctggagagagctctggtcaagcaaattctccaggacagaagcaacaaggacagtaaacacacatgtatgacccttacaagtgctttaagattttaaaaatgtgatgttttgtccacagtagttcaggcaattaagaatatgcaacccagagaatttctgtgaaaacattttgctctttggcctggtgtggacggaaagggtggccaaatggattgagtgatgagcagacatgtttaagggtctaagtctcaagaatctgttatgtgtgtttgctgcggtgggagggggtgcttgtatttatcttatttccagtcactataaggttgtacacaaactaatttaaagtttacttaataatggtatctttaaaataattgacacaattgcaaaatgaattcctggcttcagttagctattatttttttaatgacaacatagactgtgctctaagtttaaaagatggggaagcttatataaaagtgacccttttgcatcatatgggtatctaaacttaatttacccaataagttgatgcttaatgattttattttatttttgtctatttctattttagttgtggctttgctctaagaatgggtaatagttgtactacagactgctataaatttcttgtgatactcttttagagctcaaaatatctctgagctttagacatggtaaggtggagagtaaatgcttgataaatctttaagatatgtcttgaatgataattaggacattcagtccagtggaaatacaccattcaattagtcaggtctggtgaatcgtttgtttaaaatattagcaaatgagatgtggaattctgaaatttctccagactgtgtcttaataaaaatgtcacctgggtgaaattttagatcaatcactaaatttgggtgacaaatataaaaatattttcatttcactttaatacattctttctgtgaagtaaaatgtttttctttctcataatggcaaaatatgaatgccatcaaagtttaaggaattcattttagccttaaatgccttcgtgagatgtcttacttgtattttaggtaactggtcatcagtgccaatgacatggataacaatttttaatctactcgacagtgcatccctgggaatgactgttatgtttttgtcatattcctggtaatataaatactcgtgttctttactacattgtttttatcaactctaaaagtcatgcctctgtgacctttatcatgtttacaattgcaactgaacttatgacaaattaactcaggaaataaattgagttatcctttctagcattgtaattaccatcagcaaggcctgagatagccagagccaatactagccaagtgatttattttcaaggattgccactaactacggttctttaggaccaagatataaaacagtcactaaaaatcattaggctaggtatcagtaatacattcattactaataatgcatttttggagacttttgtgaaagaagttggtctctgccaaaagctggtggaccacattcacaccacgaaagccagtgtcacatgaaccagattaatgactctctttatggggtatgtgggacatcctggaagtgtataatttcaggaatgaccagacaataccatcttgcaaagccccttcaggtgacaatctaaacttgtgggtaggagagtgcataaagtttattgctcaactgctcctccagcctgctgaatttactgagtaaagaaatagcaaatatgatagatgttttagatttcatagaacagaatggtttgtccattaattctttcattcaatgactgtttattgaatacctactcttttagggcgctgtgttaggtgctgtattgtacaagaaaaatataataaattagattcccagcgctattctgacatagtgaatgaccttgaaaaatttactaaacatactatgtttgtttctccatgagtaaaatagggatatagggacaaacagtctaatatctcatagaaataccatggagacaaataaaatattttaatataaatatgatattaaagtaaatttctgaagtaatacttttgggtatggcactagtttttcctctgactattttactgtttctttcactctcaatataaaaactatttgataagataaaacgatatattttattgtaattagaatttagacaaatcagctataatgtaaaaatgttaataataattacgttttatctgattaaagttacaatgatcatagcactttaaaaatattatctgaactgtcatttgtttatatattaccgtctaataaaatagttatagatcttccaa

SEQ ID NO: 194573 - DNA, 766 bp, Homo sapiens
  Payload ID: 18447
  Gene Name: triadin
  ENST ID: ENST00000361029
  CDS Start-End: 1-455
ttacacacaaagaaaaagaaaaaggaaaagaaaaagtaagagaaaaagaaaaacctgaaaagaaagcaactcacaaggaaaaaattgagaaaaaagaaaaaccagaaacaaagacactggcgaaagaacagaagaaagctaagactgcagaaaagagtgaagaaaagactaaaaaggaagtgaaaggtggaaaacaggagaaagtgaagcaaacagctgcaaaagtaaaagaagtacagaaaacaccatcaaaacccaaagaaaaggaggacaaagagaaagcagctgtgtcaaagcatgaacagaaagggttcccaggtcctgggatcagaaactccagctattactgccagtacatcaaagggcaaatcaatgcatggaatgacctgaggactagcctccttcccattccctacctctcctgtgggaaaatgtgctccaatttcaacaactaaaatacatctaaatttttggaactttatgagttttggcctgcccttatttaggtattaatgaaaaagattatatttttatatcttcttcaataactatatttattttttaaagacctaacagaatttcataataaaatggattcctctaaaaatgctgttactactctaaaaagaacgagatttacaaaaatccttagaggtgtatctgtttagtaacaagctttgttatttcatatgtttgatatgcataatttggagcaattaagaatgtaacatgttgcttaaattcaataaactctcttggtcctaaa

SEQ ID NO: 194574 - DNA, 776 bp, Homo sapiens
  Payload ID: 18447
  Gene Name: triadin
  ENST ID: ENST00000422596
  CDS Start-End: 1-134
aaatacacaaagataagactgaaaaacaagagaaacctgaaaggaaaatacaaactaaagattggtcagccaattcttcaacaatcagaacattgaagctcactcagttgaaacctatttatatttgtacttaggaaactaatgtctccttactgttctctttccttttttcggttcttaattcctttgatcacagaagttggacacagctcttgagtacggattgactaagcgaaccatgactgaactggctctgtgtttctatctgctgaaggttaaacagaaactcaactggttccacaccatttgggtccctgctgtttttttcttgcagactgtgctattaatttaataacagtgctgctggagtggcggtagtaatgtagatggcaccatttgcattttggacctggctatattagaattctgatgtcaaagaccgagcagtgggctgtagagtaggtttattaaactagcaagtcttccataattaagacagtgaatttggctgaagtctaaaataaatttctcaaagactgagctggagattatcaacctgaatatatttcttgagtagaccaaatatgttttgtaaaagtaactatttcttaagaaagtgaaagtagagcttcagttgctccacactgagctggaaatcagagagagcttatgttttccacagtttttctgtgtgaatatgaacaaaagatttcactttattgcttagtttcccgtctgtaaatggggtagactaatgcctgctctttattctcaaa

SEQ ID NO: 194575 - DNA, 1294 bp, Homo sapiens
  Payload ID: 18447
  Gene Name: triadin
  Uniprot ID: Q13061
  ENST ID: ENST00000542443
  CDS Start-End: 198-701
gtttccagggggagaactctgcagaggagaggcaaagttcaacaggacaacaaagaagcagcagaaacagccaggaaaacgaagagcccccaggttttgacacagaaccctccaccagagttctcaaatccccaaatactctgcaaagtgcaacttgacgggaacttttcaactgacttttacttttgacgaccaccatgactgagatcactgctgaaggaaatgcatctacaaccacaactgtgatagacagcaaaaatggatctgtgcccaaatcccccggaaaagtgctgaagaggacagtcacagaagacatagtgacgacgttcagctcccctgcagcctggcttctggtcattgccctgataatcacgtggtcagctgttgccatcgttatgtttgatttagtggattacaaaaacttttcagcaagctctattgccaagattggctcagatcctttaaaactggtacgtgatgctatggaggaaaccacggactggatctatggcttcttttctttgttatctgacatcatctcatctgaagatgaagaagatgatgatggtgacgaagatactgataaaggagaaatagatgagcctcccttgagaaaaaaagaaatacacaaagataagactgaaaaacaagagaaacctgaaaggaaaatacaaactaaagaagttggacacagctcttgagtacggattgactaagcgaaccatgactgaactggctctgtgtttctatctgctgaaggttaaacagaaactcaactggttccacaccatttgggtccctgctgtttttttcttgcagactgtgctattaatttaataacagtgctgctggagtggcggtagtaatgtagatggcaccatttgcattttggacctggctatattagaattctgatgtcaaagaccgagcagtgggctgtagagtaggtttattaaactagcaagtcttccataattaagacagtgaatttggctgaagtctaaaataaatttctcaaagactgagctggagattatcaacctgaatatatttcttgagtagaccaaatatgttttgtaaaagtaactatttcttaagaaagtgaaagtagagcttcagttgctccacactgagctggaaatcagagagagcttatgttttccacagtttttctgtgtgaatatgaacaaaagatttcactttattgcttagtttcccgtctgtaaatggggtagactaatgcctgctctttattctcaaatagttcagtgaaaataaatgttttgctttacaa

SEQ ID NO: 194576 - DNA, 1179 bp, Homo sapiens
  Payload ID: 18447
  Gene Name: triadin
  ENST ID: ENST00000546248
  CDS Start-End: 319-1179
ctctagagtgccaaaaaagaaaaaaaaaagtgctgaagagtcctagggagatgaggctatttttgtttgaagctgatacttctagctgagccacaagtgctgcttggaaagggcttaggttgtttccagggggagaactctgcagaggagaggcaaagttcaacaggacaacaaagaagcagcagaaacagccaggaaaacgaagagcccccaggttttgacacagaaccctccaccagagttctcaaatccccaaatactctgcaaagtgcaacttgacgggaacttttcaactgacttttacttttgacgaccaccatgactgagatcactgctgaaggaaatgcatctacaaccacaactgtgatagacagcaaaaatggatctgtgcccaaatcccccggaaaagtgctgaagaggacagtcacagaagacatagtgacgacgttcagctcccctgcagcctggcttctggtcattgccctgataatcacgtggtcagctgttgccatcgttatgtttgatttagtggattacaaaaacttttcagcaagctctattgccaagattggctcagatcctttaaaactggtacgtgatgctatggaggaaaccacggactggatctatggcttcttttctttgttatctgacatcatctcatctgaagatgaagaagatgatgatggtgacgaagatactgataaaggagaaatagatgagcctcccttgagaaaaaaagaaatacacaaagataagactgaaaaacaagagaaacctgaaaggaaaatacaaactaaagttacacacaaagaaaaagaaaaaggaaaagaaaaagtaagagaaaaagaaaaacctgaaaagaaagcaactcacaaggaaaaaattgagaaaaaagaaaaaccagaaacaaagacactggcgaaagaacagaagaaagctaagactgcagaaaagagtgaagaaaagactaaaaaggaagtgaaaggtggaaaacaggagaaagtgaagcaaacagctgcaaaagtaaaagaagtacagaaaacaccatcaaaacccaaagaaaaggaggacaaagagaaagcagctgtgtcaaagcatgaacagaaaggtaaacattcagagcaggaggctgccggaggttctaagagaatattgggcaagaagcacatgcagtga

SEQ ID NO: 194577 - DNA, 1661 bp, Homo sapiens
  Payload ID: 18447
  Gene Name: triadin
  Uniprot ID: Q13061
  ENST ID: ENST00000628709
  CDS Start-End: 135-1028
gaaacagccaggaaaacgaagagcccccaggttttgacacagaaccctccaccagagttctcaaatccccaaatactctgcaaagtgcaacttgacgggaacttttcaactgacttttacttttgacgaccaccatgactgagatcactgctgaaggaaatgcatctacaaccacaactgtgatagacagcaaaaatggatctgtgcccaaatcccccggaaaagtgctgaagaggacagtcacagaagacatagtgacgacgttcagctcccctgcagcctggcttctggtcattgccctgataatcacgtggtcagctgttgccatcgttatgtttgatttagtggattacaaaaacttttcagcaagctctattgccaagattggctcagatcctttaaaactggtacgtgatgctatggaggaaaccacggactggatctatggcttcttttctttgttatctgacatcatctcatctgaagatgaagaagatgatgatggtgacgaagatactgataaaggagaaatagatgagcctcccttgagaaaaaaagaaatacacaaagataagactgaaaaacaagagaaacctgaaaggaaaatacaaactaaagttacacacaaagaaaaagaaaaaggaaaagaaaaagtaagagaaaaagaaaaacctgaaaagaaagcaactcacaaggaaaaaattgagaaaaaagaaaaaccagaaacaaagacactggcgaaagaacagaagaaagctaagactgcagaaaagagtgaagaaaagactaaaaaggaagtgaaaggtggaaaacaggagaaagtgaagcaaacagctgcaaaagtaaaagaagtacagaaaacaccatcaaaacccaaagaaaaggaggacaaagagaaagcagctgtgtcaaagcatgaacagaaaggacaaagcccagccattccacctcccttaccgacagaacaagcttccagacccactccggcatcacctgcccttgaaggcaagtacttttttttttcttaaagatctctattgtagataaaatagaatgtagaggaacagcaacaacaaaaatagtcacaaagaaacagcaaaatccaatattttcttaaatacttttagtatgtctaaactatacttttcctaaaattgcaatttgcttcttttagaaaaccaaaaatgtccccttaagattctatattggtgaccctcagcttccagaaggatgcccactctagcactttgggaatcaagcaaaaaaatatagggacaaatagataaggctatgccttgcaactctgggagttttaccacaacttgatcaatttagtctctgaagaggctggtgccagatttgctgggtttgaatctgagctccaccttttcctagctttgtaaatttggaaagttatttaaattaactcttcatgagttttgccatctctaagatgatataagcagagcactgatctcctagcgttattgtgaggattgaaatatatatatacacacacactcacacacacacaaatactgttttatgtatatgtatagtttataagtactatatacaactggtggttaatactactaataattcttgaaaatatgatgtctcaagatcagctttgtaataaattttgctggaacgttaaa

SEQ ID NO: 194578 - DNA, 3635 bp, Homo sapiens
  Payload ID: 18448
  Gene Name: tribbles pseudokinase 1
  Uniprot ID: Q96RU8
  ENST ID: ENST00000311922
  CDS Start-End: 583-1701
aaggaggagtgcactggccgggatcggtgcagcgctcacactcactcacagtcactctctctgagcgcgtctcgctcgctctcatacacgcccggagcccaggagcgctcaggatcccgagcgccgcgaaaaagttcccccggcttttgctggagactcatcgctttgggaagtgcatttgcttcgtggctccgccgagcctgctgaatcctgtcctcgcggctcgggaccccgggatcgctgaccgctgccgccgccgcctctgcctcccggactatcggcagcctcggcaacaatagtggcggccgcccccagcgaggctccgggagcccttgcctgcgggggtccggggactcgagccggcctccgcctcccggacgcacagccagcgtggtccccgcgtgcaacgcgagcgccggggagtggctcctgctttgcccctcgtgggggccgagccaagaccagtctgcaaactccatcccgccggctggaagaagtcgcggagccggcaccaaacccgcagcgtcttcccgcgcggatcccgggacttaaaaagccggggccaccccggcccaggacgggatgcgggtcggtccggtgcgctctgccatgagcggcgcctcgcagccccgcggcccggccctgctcttcccagccacccgaggcgtcccggccaaacgcctgctggacgccgacgacgcggcggctgtggcggccaagtgcccgcgcctctccgagtgctccagccccccggactacctcagcccccccggctcgccctgcagcccgcagcccccgcctgccgctccgggggccggcggaggctccgggagcgcgccggggcccagccgcatcgccgactacctgctgctgcccctagccgagcgcgagcatgtgtcccgggcgctgtgcatccacactggacgcgagctgcgctgcaaggtgtttcccattaaacactaccaggacaaaatcaggccttacatccagctgccatcgcacagcaacattactggcattgtggaagtgatccttggggaaaccaaggcctatgtcttctttgagaaggactttggggacatgcactcctatgtgcgaagccggaagaggctgcgggaagaggaagccgcccggctcttcaagcagattgtctccgccgtcgcccactgccaccagtcagccatcgtgctgggggacctgaagcttaggaagttcgtcttctccacggaggagagaacccagcttagactagaaagtctagaagacacacacataatgaagggggaagatgatgctttgtcagacaaacatggctgcccagcctacgtgagccctgagatcctcaacaccactgggacctactccggaaaggctgcggacgtttggagcctgggggtgatgctctacacccttctggttggacgataccccttccatgactcagaccccagtgcccttttctccaaaattcggcgtggacagttctgcattcctgagcacatttcccccaaagccaggtgcctcattcgcagcctcttgagacgggagccctccgagagactcactgcccccgagatcctactgcacccctggtttgagtccgtcttggaacccgggtacatcgactcagaaataggaacttcagaccagattgttccagagtaccaggaggacagtgacattagttccttcttctgctaatccccaaaacctcagaaacctcataattcttaacacctggcatttccatttctaaagatggacaggccctttggcgtggtaccaaccagataatgactgcatcaggatgaaagctgctgaactcggcatggcgcctcctcttctctgttgggatgagtgactttattgatttgagcagcatatgctgtgattggctgccctgcaaatttgtttcccttaaggaaccctcaccaactatctctgctggatttgggagttccgcatcttttgtggagggcagagtatggacatcttacacccggtggtcaagtgtgtaataaacttgagcattcgaatgggagaaaaagcaaatcgcacaatgacatattttgagtaataaccgtatttttcacagggtgacaaattgggccaataaatctgccatctttgaactcatctttggtggctagactgctacggcagcttctctgatgggaaagttccttttttggcttaacactcaccctttcttcacactcacatttaccaatgactctgctccgtttttggagcagactgttttaagttgctcaggagcctgatggaaccatgaaccgagactcttctctgtttcctgccaagacctcatctgcactaatgccttctccctgaccttgacacttccccctttagctataaaagcacttaccagccgaacgtggaacagtatcacaaaagattccatctcccaacgatttcagaactctgagctcagagagactccagattttaaaaaataatttgagtgcttggaaactattagctttttaagttccttccaaatatgttagtacctaccctttactttttccccaagaccatctcagggtggagcattctgtctaagagaagaaagataaggaggctcccacccacctctcccaagagcagacattaaacatctttgtgctttgaagagagtgaattttggatagtcttgtgattctcagactaacttccagaattatactttaacccctcccagatatggtccgcctttggcattgtgtgtacatctgcagttttgcatggtgggttgttaatatttcaaatgtgtggtttatgaatacgtctgtataatcggcttctggagtgaaacagcaaaccccaaatcttcaaagttggaaggaactttaaaaatcatccggtccaatctctttcctctttctgccacctcccaaggcagaaatcccctcttcagcttcttttgtaggtgggaatccagcctctgttagatatgtccagagatggaaactcactcccctacaaaagatggagcttaatggagaaattgcaactttcattaaaaaacaaattcagatgaaatatcagtaactgtcttggacagtgctgaaatcaggtggttaaacgggtaaacaaaatatactgtattttgagaaatggcacaaaaacaggcagtcatctttaagggctatgcctaggcaaactactaacatgcattgtgagaatgccgtgtatacctcacgtactgtgtactttgtacatatattttaccttttatacctatgttcgattttgttttgttttgttttgttctggctttgaggcttgttttgttgtctgtgtctgtctgaataacctgcgtgtctaaaaccacgtgaaatgtgaatgattattggcaatattaccttgacagaatcatgggactttgagaagagggaggacagaggcctctgtcgcactaacgctctcgtggttgctcgactgttgtatctgtgatacattatccgactaaggactctgggctggcagggccttctgccgggaaagctagaaacactaggttcttcctgtacatacgtgtatatatgtgaacagtgagatggccgtttctgacttgtagagaaattttaataaacctggtttcgtaaata

SEQ ID NO: 194579 - DNA, 1409 bp, Homo sapiens
  Payload ID: 18448
  Gene Name: tribbles pseudokinase 1
  ENST ID: ENST00000519576
  CDS Start-End: 264-689
accagtcagccatcgtgctgggggacctgaagcttaggaagttcgtcttctccacggaggagaggtgagcggccgccacagcttctcctgtggccttttggaaccaaagcggaggtgcaggtcatgtagttaggtgctgtgtgttggtgcaaaacaaagtcaagggctcatatgtcccagatttagtatttagagcttctgttcctgaggagtcacagccaagaacccagcttagactagaaagtctagaagacacacacataatgaagggggaagatgatgctttgtcagacaaacatggctgcccagcctacgtgagccctgagatcctcaacaccactgggacctactccggaaaggctgcggacgtttggagcctgggggtgatgctctacacccttctggttggacgataccccttccatgactcagaccccagtgcccttttctccaaaattcggcgtggacagttctgcattcctgagcacatttcccccaaagccaggtgcctcattcgcagcctcttgagacgggagccctccgagagactcactgcccccgagatcctactgcacccctggtttgagtccgtcttggaacccgggtacatcgactcagaaataggaacttcagaccagattgttccagagtaccaggaggacagtgacattagttccttcttctgctaatccccaaaacctcagaaacctcataattcttaacacctggcatttccatttctaaagatggacaggccctttggcgtggtaccaaccagataatgactgcatcaggatgaaagctgctgaactcggcatggcgcctcctcttctctgttgggatgagtgactttattgatttgagcagcatatgctgtgattggctgccctgcaaatttgtttcccttaaggaaccctcaccaactatctctgctggatttgggagttccgcatcttttgtggagggcagagtatggacatcttacacccggtggtcaagtgtgtaataaacttgagcattcgaatgggagaaaaagcaaatcgcacaatgacatattttgagtaataaccgtatttttcacagggtgacaaattgggccaataaatctgccatctttgaactcatctttggtggctagactgctacggcagcttctctgatgggaaagttccttttttggcttaacactcaccctttcttcacactcacatttaccaatgactctgctccgtttttggagcagactgttttaagttgctcaggagcctgatggaaccatgaaccgagactcttctctgtttcctgccaagacctcatctgcactaatgccttctccctgaccttgacacttccccctttagctataaaagcacttaccagccgaacgtggaacagtatcacaaaagatt

SEQ ID NO: 194580 - DNA, 1332 bp, Homo sapiens
  Payload ID: 18448
  Gene Name: tribbles pseudokinase 1
  Uniprot ID: Q96RU8
  ENST ID: ENST00000520847
  CDS Start-End: 255-875
ctactgcccaacccgaatgaaatttcagacgcatgatcaagcccagtttaatagggaggaaaaaaaaaccttttcttctccatgactggggctaagagctgttctgggacaagcatgtgtttcccattaaacactaccaggacaaaatcaggccttacatccagctgccatcgcacagcaacattactggcattgtggaagtgatccttggggaaaccaaggcctatgtcttctttgagaaggactttggggacatgcactcctatgtgcgaagccggaagaggctgcgggaagaggaagccgcccggctcttcaagcagattgtctccgccgtcgcccactgccaccagtcagccatcgtgctgggggacctgaagcttaggaagttcgtcttctccacggaggagagaacccagcttagactagaaagtctagaagacacacacataatgaagggggaagatgatgctttgtcagacaaacatggctgcccagcctacgtgagccctgagatcctcaacaccactgggacctactccggaaaggctgcggacgtttggagcctgggggtgatgctctacacccttctggttggacgataccccttccatgactcagaccccagtgcccttttctccaaaattcggcgtggacagttctgcattcctgagcacatttcccccaaagccaggtgcctcattcgcagcctcttgagacgggagccctccgagagactcactgcccccgagatcctactgcacccctggtttgagtccgtcttggaacccgggtacatcgactcagaaataggaacttcagaccagattgttccagagtaccaggaggacagtgacattagttccttcttctgctaatccccaaaacctcagaaacctcataattcttaacacctggcatttccatttctaaagatggacaggccctttggcgtggtaccaaccagataatgactgcatcaggatgaaagctgctgaactcggcatggcgcctcctcttctctgttgggatgagtgactttattgatttgagcagcatatgctgtgattggctgccctgcaaatttgtttcccttaaggaaccctcaccaactatctctgctggatttgggagttccgcatcttttgtggagggcagagtatggacatcttacacccggtggtcaagtgtgtaataaacttgagcattcgaatgggagaaaaagcaaatcgcacaatgacatattttgagtaataaccgtatttttcacagggtgacaaattgggccaataaatctgccatctttgaactcatctttggtggctagactgctac

SEQ ID NO: 194581 - DNA, 4391 bp, Homo sapiens
  Payload ID: 18449
  Gene Name: tribbles pseudokinase 2
  Uniprot ID: Q92519
  ENST ID: ENST00000155926
  CDS Start-End: 1420-2451
ggggggggcggaggctccgtggaaatgtgtcggtgacattgaatggggagaccgagcgcgagcgaggcgcgcgcgcgcacacgcgcactcacggccccgctcgctccgagatccccggccacgtaagtaactattaataccgcctcgccgggggatgcgggcgtgctgagcgcggggattggcctcgggcaccgtcggccgtcccctttaatttttaaatacacggtcccctcttttctctggggggggcaagcaagaaatcaaagaaggaggagacaagccgtcaattttctccaaaacaaaccccaccgggcaatttggtctcggggtagggggagacggggtgattgcaaattattccaggacgagatccagttctccagcgggaaaggggcaaaggaacgccgcgcgttggaagggccagggacgcagctccccttgcagcgcccgcaggacccccgcaagctcgtgccggcgaaatcggagaccgccgatctgtcctcgttctctcctgcacgtctggctgcattcggaggaagacctggggcgcgagcgagcggcgacagcatgagcctgtgctgacctccgcgcggcgggccgagcccagggctttgtcgcggtacctgcgcccagcccgcgccgcaactctgtgcccagcttttgcaatcttttgttggcagcgctgaccgcaccaagttaaatgctcccttgcaatttttcttttttttgtttgtttgtttaatttttggagagctcgcgatcttggaaaagcctcagacgccatctacagttaaaacgtaggtaactgccctctcccgcaccccccccttacacgccccccaccctttccaccaaaaaaagggggtgcagcgcggattctggctgccgtgcgtcgccagccggtagacccgtgcttgtttcctttctctttttgtttggcttctaacgcgttgggactgagtcgccgccgtgagctccccgaagactgcacaaactaccgcgggctcctccgccccgtctgcgattcggaagccggcctgggggtcgcgtcgggagccctggcgctgcagctccgcaccttagcagcccgggtactcatccagatccacgccggggacacacacacagagtaactaaaagtgcggcgattctgcacatcgccgactgctttggggtaacaaaaagacccgagttgcctgccgaccgaggacccccgggagccgggctcggagcagacgaggtatccggcggcgcccatttgggggcttctaactctttctccacgcagcccctcttctgtcccctcccctctcgctcccttttaaaatcagtggcaccgaggcgcctgcagccgcactcgccagcgactcatctctccagcgggtttttttttgtttgtcgtgtgcgatcctcacactcatgaacatacacaggtctacccccatcacaatagcgagatatgggagatcgcggaacaaaacccaggatttcgaagagttgtcgtctataaggtccgcggagcccagccagagtttcagcccgaacctcggctccccgagcccgcccgagactccgaacttgtcgcattgcgtttcttgtatcgggaaatacttattgttggaacctctggagggagaccacgtttttcgtgccgtgcatctgcacagcggagaggagctggtgtgcaaggtgtttgatatcagctgctaccaggaatccctggcaccgtgcttttgcctgtctgctcatagtaacatcaaccaaatcactgaaattatcctgggtgagaccaaagcctatgtgttctttgagcgaagctatggggacatgcattccttcgtccgcacctgcaagaagctgagagaggaggaggcagccagactgttctaccagattgcctcggcagtggcccactgccatgacggggggctggtgctgcgggacctcaagctgcggaaattcatctttaaggacgaagagaggactcgggtcaagctggaaagcctggaagacgcctacattctgcggggagatgatgattccctctccgacaagcatggctgcccggcttacgtaagcccagagatcttgaacaccagtggcagctactcgggcaaagcagccgacgtgtggagcctgggggtgatgctgtacaccatgttggtggggcggtaccctttccatgacattgaacccagctccctcttcagcaagatccggcgtggccagttcaacattccagagactctgtcgcccaaggccaagtgcctcatccgaagcattctgcgtcgggagccctcagagcggctgacctcgcaggaaattctggaccatccttggttttctacagattttagcgtctcgaattcagcatatggtgctaaggaagtgtctgaccagctggtgccggacgtcaacatggaagagaacttggaccctttctttaactgagctcatgccccacggagacttagcaggttccaggagtgagcgagggcagcggaaaggagttcttccgggggacacgaattgcctggctgagtagcaagaaagacacactcttaagtttcttggttcagagcaggaaaaccttcaaggagctgactgaccacgtagcatgggggcaagaggcgtgggatggggattggggtgagatggatgggagcccgctggagcttgtcttccctaacatagcctgggagaccaccccttgccacttgggccacttccgcctaccccacttttcattttgttccaaaatagttgcagatcctgacagaatcaaaactctctgcctcaaacacacatcctggcatcgcactgttagcatttaacttcttgttaggattcagggaaggaacagttggccaagaattttttttcttttaaacaagccaaccacctagctggtaattaatgaggttcacttaaaaaaaaaattcggtgcacacagactgacatgaaacctgggtgctacagtaaaagaaaacaaaagtccagtttgtgtctcttaatcgctcacttcaactcatttcttctaaataaactatttaatatcctggtcaggaaatgacatgttaatgctttgctccctgaagggggaaaaaatctgtcctttaacaagctattctgttttgtgtcaattggttcgtggcaggaagctattagaagtcaaacgtccagatgcattactgctatcttagtttaaagggggaaagaaaagggaagaagaaaggaaaagagaaatccaactcctttttcatgttttgcttttgaacaatgagggtttgtgtgacaggcattcctctttgctgagatgatagcaatggcctgagattttagcaagctcctggagtctgatgcttttgcagtactctgatcgcaactaaacatttgtctttgttttattagaaactagtgaaacaaagcaggttgtcccacatgtataaaatacagggcagctatttagttttctttacagagaatgatccttttaaggcttgtaaggccctctggtttggacaaaaaccctcagtagagacaagcgggaaggataattagctgaaagctatgatgatataaataaaaacagctctctatcccaatacgcacctttgtattttcaagaactcttctatttattaaggaaaatgtcacattgtgatgtattaagccagtacttcaattacgggttgacttgggatgacatattacatgctgtagttaacatttataattctttttccttgtttgagtatttctgtctctgaaataaccttttacttggcttttctagatagctttatttgatttcgagtggcaaaatgttttttattacggcttttctattgctgtatgatacagaactcttttggcataaatatttgtgttcccagtacctcacttgttcggatttgactgcctgtatatgttttgtgaaatggtcctgtttttgggtaggtgacacgtggactctagtatgtaaatgttacttgaatctgtgcttcataatagtgtgtggcatgtatgtgcagactcttggatgctttatgcctgcgcagcaggagccctgtcctcacgttcccaggagggcggcttcacccttcgtaaccaggagacaaggcggccatggatttgcccttgattctattttgctaatggaagatagaaaggagagaaggttttttttttttttaacattctgaagatggtgctgtgtcaagaaggaccttttttttcccctctcccctattttttaagtaccttggaggaggagaggttggtgacatgcatggtggggatctatggcctctggtgctttgtcctgtatttggtttaatgtttttgtcctaatctcttcaatcaataaaattgtgcgtatttaactaaaa

SEQ ID NO: 194582 - DNA, 2778 bp, Homo sapiens
  Payload ID: 18449
  Gene Name: tribbles pseudokinase 2
  ENST ID: ENST00000381465
  CDS Start-End: 215-838
ggagaccgagcgcgagcgaggcgcgcgcgcgcacacgcgcactcacggccccgctcgctccgagatccccggccacgtgtttgatatcagctgctaccaggaatccctggcaccgtgcttttgcctgtctgctcatagtaacatcaaccaaatcactgaaattatcctgggtgagaccaaagcctatgtgttctttgagcgaagctatggggacatgcattccttcgtccgcacctgcaagaagctgagagaggaggaggcagccagactgttctaccagattgcctcggcagtggcccactgccatgacggggggctggtgctgcgggacctcaagctgcggaaattcatctttaaggacgaagagaggactcgggtcaagctggaaagcctggaagacgcctacattctgcggggagatgatgattccctctccgacaagcatggctgcccggcttacgtaagcccagagatcttgaacaccagtggcagctactcgggcaaagcagccgacgtgtggagcctgggggtgatgctgtacaccatgttggtggggcggtaccctttccatgacattgaacccagctccctcttcagcaagatccggcgtggccagttcaacattccagagactctgtcgcccaaggccaagtgcctcatccgaagcattctgcgtcgggagccctcagagcggctgacctcgcaggaaattctggaccatccttggttttctacagattttagcgtctcgaattcagcatatggtgctaaggaagtgtctgaccagctggtgccggacgtcaacatggaagagaacttggaccctttctttaactgagctcatgccccacggagacttagcaggttccaggagtgagcgagggcagcggaaaggagttcttccgggggacacgaattgcctggctgagtagcaagaaagacacactcttaagtttcttggttcagagcaggaaaaccttcaaggagctgactgaccacgtagcatgggggcaagaggcgtgggatggggattggggtgagatggatgggagcccgctggagcttgtcttccctaacatagcctgggagaccaccccttgccacttgggccacttccgcctaccccacttttcattttgttccaaaatagttgcagatcctgacagaatcaaaactctctgcctcaaacacacatcctggcatcgcactgttagcatttaacttcttgttaggattcagggaaggaacagttggccaagaattttttttcttttaaacaagccaaccacctagctggtaattaatgaggttcacttaaaaaaaaaattcggtgcacacagactgacatgaaacctgggtgctacagtaaaagaaaacaaaagtccagtttgtgtctcttaatcgctcacttcaactcatttcttctaaataaactatttaatatcctggtcaggaaatgacatgttaatgctttgctccctgaagggggaaaaaatctgtcctttaacaagctattctgttttgtgtcaattggttcgtggcaggaagctattagaagtcaaacgtccagatgcattactgctatcttagtttaaagggggaaagaaaagggaagaagaaaggaaaagagaaatccaactcctttttcatgttttgcttttgaacaatgagggtttgtgtgacaggcattcctctttgctgagatgatagcaatggcctgagattttagcaagctcctggagtctgatgcttttgcagtactctgatcgcaactaaacatttgtctttgttttattagaaactagtgaaacaaagcaggttgtcccacatgtataaaatacagggcagctatttagttttctttacagagaatgatccttttaaggcttgtaaggccctctggtttggacaaaaaccctcagtagagacaagcgggaaggataattagctgaaagctatgatgatataaataaaaacagctctctatcccaatacgcacctttgtattttcaagaactcttctatttattaaggaaaatgtcacattgtgatgtattaagccagtacttcaattacgggttgacttgggatgacatattacatgctgtagttaacatttataattctttttccttgtttgagtatttctgtctctgaaataaccttttacttggcttttctagatagctttatttgatttcgagtggcaaaatgttttttattacggcttttctattgctgtatgatacagaactcttttggcataaatatttgtgttcccagtacctcacttgttcggatttgactgcctgtatatgttttgtgaaatggtcctgtttttgggtaggtgacacgtggactctagtatgtaaatgttacttgaatctgtgcttcataatagtgtgtggcatgtatgtgcagactcttggatgctttatgcctgcgcagcaggagccctgtcctcacgttcccaggagggcggcttcacccttcgtaaccaggagacaaggcggccatggatttgcccttgattctattttgctaatggaagatagaaaggagagaaggttttttttttttttaacattctgaagatggtgctgtgtcaagaaggaccttttttttcccctctcccctattttttaagtaccttggaggaggagaggttggtgacatgcatggtggggatctatggcctctggtgctttgtcctgtatttggtttaatgtttttgtcctaatctcttcaatcaataaaattgtgcgtatttaactaaaa

SEQ ID NO: 194583 - DNA, 830 bp, Homo sapiens
  Payload ID: 18449
  Gene Name: tribbles pseudokinase 2
  ENST ID: ENST00000405331
  CDS Start-End: 71-829
agccgcactcgccagcgactcatctctccagcgggtttttttttgtttgtcgtgtgcgatcctcacactcatgaacatacacaggtctacccccatcacaatagcgagatatgggagatcgcggaacaaaacccaggatttcgaagagttgtcgtctataaggtccgcggagcccagccagagtttcagcccgaacctcggctccccgagcccgcccgagactccgaacttgtcgcattgcgtttcttgtatcgggaaatacttattgttggaacctctggagggagaccacgtttttcgtgccgtgcatctgcacagcggagaggagctggtgtgcaaggtgtttgatatcagctgctaccaggaatccctggcaccgtgcttttgcctgtctgctcatagtaacatcaaccaaatcactgaaattatcctgggtgagaccaaagcctatgtgttctttgagcgaagctatggggacatgcattccttcgtccgcacctgcaagaagctgagagaggaggaggcagccagactgttctaccagattgcctcggcagtggcccactgccatgacggggggctggtgctgcgggacctcaagctgcggaaattcatctttaaggacgaagagagatgcctctgcccctggagcctggagatgtttcccctggttttgccttcgataccctctgtgatcttggattggtccttcgtctgtttccaccctccccctaccagcctcatatttctccttctgttaccttctgtatgctgtattggctctaaggtcttttcaattaataataaattggtgtatgtgcttctttgaa

SEQ ID NO: 194584 - DNA, 2499 bp, Homo sapiens
  Payload ID: 18450
  Gene Name: tribbles pseudokinase 3
  Uniprot ID: Q96RU7
  ENST ID: ENST00000217233
  CDS Start-End: 554-1630
ggagcttgcagtgagccgagatcgcgccaccgccctccagcctgggcgacagagcaagactctgtctcaaaaaaaaaaaaaaaaagagcaaattttttttccaaggtgatagggagagtccgtggctgatgtctgcactgaccagacgcccctagggggccagcgagggcgggtcccaggtgcagcggatgcagaggagagaggcccgggcgcggcgcgggggatggtgcgatcccgggcccgagggcatcagacggcggctgattagctccggtttgcatcacccggaccgggggattagctccggtttgcatcacccggaccgggggattagctccggtttgcatcacccggaccgggggccgggcgcgcacgagactcgcagcggaagtggaggcggctccgcgcgcgtccgctgctaggacccgggcagggctggagctgggctgggatcccgagctcggcagcagcgcagcgggccggcccacctgctggtgccctggaggctctgagccccggcggcgcccgggcccacgcggaacgacggggcgagatgcgagccacccctctggctgctcctgcgggttccctgtccaggaagaagcggttggagttggatgacaacttagataccgagcgtcccgtccagaaacgagctcgaagtgggccccagcccagactgcccccctgcctgttgcccctgagcccacctactgctccagatcgtgcaactgctgtggccactgcctcccgtcttgggccctatgtcctcctggagcccgaggagggcgggcgggcctaccaggccctgcactgccctacaggcactgagtatacctgcaaggtgtaccccgtccaggaagccctggccgtgctggagccctatgcgcggctgcccccgcacaagcatgtggctcggcccactgaggtcctggctggtacccagctcctctacgcctttttcactcggacccatggggacatgcacagcctggtgcgaagccgccaccgtatccctgagcctgaggctgccgtgctcttccgccagatggccaccgccctggcgcactgtcaccagcacggtctggtcctgcgtgatctcaagctgtgtcgctttgtcttcgctgaccgtgagaggaagaagctggtgctggagaacctggaggactcctgcgtgctgactgggccagatgattccctgtgggacaagcacgcgtgcccagcctacgtgggacctgagatactcagctcacgggcctcatactcgggcaaggcagccgatgtctggagcctgggcgtggcgctcttcaccatgctggccggccactaccccttccaggactcggagcctgtcctgctcttcggcaagatccgccgcggggcctacgccttgcctgcaggcctctcggcccctgcccgctgtctggttcgctgcctccttcgtcgggagccagctgaacggctcacagccacaggcatcctcctgcacccctggctgcgacaggacccgatgcccttagccccaacccgatcccatctctgggaggctgcccaggtggtccctgatggactggggctggacgaagccagggaagaggagggagacagagaagtggttctgtatggctaggaccaccctactacacgctcagctgccaacagtggattgagtttgggggtagctccaagccttctcctgcctctgaactgagccaaaccttcagtgccttccagaagggagaaaggcagaagcctgtgtggagtgtgctgtgtacacatctgctttgttccacacacatgcagttcctgcttgggtgcttatcaggtgccaagccctgttctcggtgctgggagtacagcagtgagcaaaggagacaatattccctgctcacagagatgacaaactggcatccttgagctgacaacacttttccatgaccataggtcactgtctacactgggtacactttgtaccagtgtcggcctccactgatgctggtgctcaggcacctctgtccaaggacaatccctttcacaaacaaaccagctgcctttgtatcttgtaccttttcagagaaagggaggtatccctgtgccaaaggctccaggcctctcccctgcaactcaggacccaagcccagctcactctgggaactgtgttcccagcatctctgtcctcttgattaagagattctccttccaggcctaagcctgggatttgggccagagataagaatccaaactatgaggctagttcttgtctaactcaagactgttctggaatgagggtccaggcctgtcaaccatggggcttctgacctgagcaccaaggttgagggacaggattaggcagggtctgtcctgtggccacctggaaagtcccaggtgggactcttctggggacacttggggtccacaatcccaggtccatactctaggttttggataccatgagtatgtatgtttacctgtgcctaataaaggagaattatgaaataa

SEQ ID NO: 194585 - DNA, 1070 bp, Homo sapiens
  Payload ID: 18450
  Gene Name: tribbles pseudokinase 3
  ENST ID: ENST00000449710
  CDS Start-End: 256-1070
ggaagcctctgggcgtctgcgtgttgccgcgtgttacacgcacgcacgccccttacacaccttttcacagaccccgccgtcggggcgcggccaggtcagatcccttttgatccgggcctgggctgagtgctccccccgggcttcaggtgacgcggccccgcggagcgtggggtcgcccgagttgggctggggaagccagggacggaggtgtccggccgtcacccctagaggagggcgtgcgggggtctgttttgcatgcgagccacccctctggctgctcctgcgggttccctgtccaggaagaagcggttggagttggatgacaacttagataccgagcgtcccgtccagaaacgagctcgaagtgggccccagcccagactgcccccctgcctgttgcccctgagcccacctactgctccagatcgtgcaactgctgtggccactgcctcccgtcttgggccctatgtcctcctggagcccgaggagggcgggcgggcctaccaggccctgcactgccctacaggcactgagtatacctgcaaggtgtaccccgtccaggaagccctggccgtgctggagccctatgcgcggctgcccccgcacaagcatgtggctcggcccactgaggtcctggctggtacccagctcctctacgcctttttcactcggacccatggggacatgcacagcctggtgcgaagccgccaccgtatccctgagcctgaggctgccgtgctcttccgccagatggccaccgccctggcgcactgtcaccagcacggtctggtcctgcgtgatctcaagctgtgtcgctttgtcttcgctgaccgtgagaggaagaagctggtgctggagaacctggaggactcctgcgtgctgactgggccagatgattccctgtgggacaagcacgcgtgcccagcctacgtgggacctgagatactcagctcacgggcctcatactcgggcaaggcagccgatgtctggagcctgggcgtggcgctcttcaccatgctggccggccactaccccttccaggactcggagcctgtcctgctcttcggcaa

SEQ ID NO: 194586 - DNA, 1533 bp, Homo sapiens
  Payload ID: 18450
  Gene Name: tribbles pseudokinase 3
  ENST ID: ENST00000422053
  CDS Start-End: 318-1475
cttacacaccttttcacagaccccgccgtcggggcgcggccaggtcagatcccttttgatccgggcctgggctgagtgctccccccgggcttcaggtgacgcggccccgcggagcgtggggtcgcccgagttgggctggggaagccagggacggaggtgtccggccgtcacccctagaggagggcgtgcgggggtctgttttgcggcacaaagcatgtgcacagccaggtatcatcctgcgtgactcagaacagccttgagatgtaaggagtgtcatcccagcctcgaacctggggagctttctaagactcccaaggatggtacttatgcatcttgctgtgaagaataacaggatgagtgctaataatgaccatttcctgacacctacctggcaacagatgcgagccacccctctggctgctcctgcgggttccctgtccaggaagaagcggttggagttggatgacaacttagataccgagcgtcccgtccagaaacgagctcgaagtgggccccagcccagactgcccccctgcctgttgcccctgagcccacctactgctccagatcgtgcaactgctgtggccactgcctcccgtcttgggccctatgtcctcctggagcccgaggagggcgggcgggcctaccaggccctgcactgccctacaggcactgagtatacctgcaaggtgtaccccgtccaggaagccctggccgtgctggagccctatgcgcggctgcccccgcacaagcatgtggctcggcccactgaggtcctggctggtacccagctcctctacgcctttttcactcggacccatggggacatgcacagcctggtgcgaagccgccaccgtatccctgagcctgaggctgccgtgctcttccgccagatggccaccgccctggcgcactgtcaccagcacggtctggtcctgcgtgatctcaagctgtgtcgctttgtcttcgctgaccgtgagaggaagaagctggtgctggagaacctggaggactcctgcgtgctgactgggccagatgattccctgtgggacaagcacgcgtgcccagcctacgtgggacctgagatactcagctcacgggcctcatactcgggcaaggcagccgatgtctggagcctgggcgtggcgctcttcaccatgctggccggccactaccccttccaggactcggagcctgtcctgctcttcggcaagatccgccgcggggcctacgccttgcctgcaggcctctcggcccctgcccgctgtctggttcgctgcctccttcgtcgggagccagctgaacggctcacagccacaggcatcctcctgcacccctggctgcgacaggacccgatgcccttagccccaacccgatcccatctctgggaggctgcccaggtggtccctgatggactggggctggacgaagccagggaagaggagggagacagagaagtggttctgtatggctaggaccaccctactacacgctcagctgccaacagtggattgagtttgggggtagctccaa

SEQ ID NO: 194587 - DNA, 877 bp, Homo sapiens
  Payload ID: 18450
  Gene Name: tribbles pseudokinase 3
  ENST ID: ENST00000615226
  CDS Start-End: 487-877
ggaggccaggaatgagggagtaagtgagccattgactcaatgaatgaatgaatgagcgagtgagtgaaggaaggaagggataagaaatttgaagcccccgcaaagggaggtgacttgtccacaatctcacaggctcagtggcttcagccagacttggaacgcaaccagaagttctaaggcatcatgtcacttttgtgggggaaattcacgctcattctccaccgtgttcttggggaacatgcagcatgttcttttgcctcttccctcaccccagaacaggggttactggacagcggcatcaacttcacctgggaactggatagaaatgcagattcagaccttctgaatgagctactttgggagtagggcccagcaatgtatgttgaaacaggcctccagatgatctcaatgcttgctcaagtttgagaaccactgaaccgcagtatgactctccgtgtcacctggctaactctgcctcactttcagatgcgagccacccctctggctgctcctgcgggttccctgtccaggaagaagcggttggagttggatgacaacttagataccgagcgtcccgtccagaaacgagctcgaagtgggccccagcccagactgcccccctgcctgttgcccctgagcccacctactgctccagatcgtgcaactgctgtggccactgcctcccgtcttgggccctatgtcctcctggagcccgaggagggcgggcgggcctaccaggccctgcactgccctacaggcactgagtatacctgcaaggtgtaccccgtccaggaagccctggccgtgctggagccctatgcgcggctgcccccgcacaagcatgtggctcggcccactgaggtcctggctggtaccc

SEQ ID NO: 194588 - DNA, 6900 bp, Homo sapiens
  Payload ID: 18451
  Gene Name: trichohyalin
  Uniprot ID: Q07283
  ENST ID: ENST00000368804
  CDS Start-End: 1-5832
atgtctccacttctgagaagcatctgtgacatcactgaaattttcaatcagtatgtctctcatgattgtgatggagcagcattaactaagaaagacctgaagaacctccttgaaagggaatttggagctgtgcttcggagaccacatgaccctaagacggtagatctgatcctggaacttctggatcttgacagtaatgggcgtgtcgatttcaacgaattcctcctatttattttcaaagtggctcaagcttgttactatgctctcggccaggccacgggactggatgaggagaagcgagcccggtgtgacggaaaggagagcctgttacaagatcgcaggcaagaagaagaccaaaggagattcgagccccgggacagacaactggaagaagaacctgggcaacgacgcaggcagaagaggcaggaacaggagagggagctagctgagggagaggagcaaagtgagaaacaagagcgacttgaacagcgcgacaggcagcgccgcgacgaggagctgtggcggcaaaggcaagaatggcaagaacgggaagagcgccgtgcagaggaagagcagctgcagagttgcaaaggtcacgaaactgaggagtttccagacgaagagcaactgcgaaggcgggagctgctggagctgaggaggaagggccgcgaggagaaacagcagcaaaggcgagagcggcaagacagagtgttccaggaggaagaagagaaagagtggaggaagcgcgagacagtgctccggaaggaagaagagaagttgcaggaagaggagccgcagcggcaaagagagctccaggaggaagaagagcagctacggaagctggagcggcaagagctgaggagggagcgccaggaggaagagcagcagcagcaaaggctgaggcgcgagcagcaactaaggcgcaagcaggaggaggagaggcgcgagcagcaggaggagaggcgcgagcagcaggagaggcgcgagcagcaggaggagaggcgcgagcagcagctgaggcgcgagcaggaggagaggcgcgagcagcagctgaggcgcgagcaggaggaggagaggcgcgagcagcagctgaggcgcgagcaggaggaggagaggcgcgagcagcagctgaggcgcgagcagcagctgaggcgcgagcagcagctgaggcgcgagcagcagctgaggcgcgagcagcagctgaggcgcgagcagcagctgaggcgcgagcagcagctgaggcgcgagcagcagctgaggcgcgagcagcagctgaggcgcgagcaggaggaggagaggcacgagcagaagcacgagcaggagaggcgcgagcagcggctgaagcgcgagcaggaggagaggcgcgattggctgaagcgcgaggaggagacggagaggcacgagcaggagaggcgcaagcagcagctgaagcgcgaccaggaggaggagaggcgcgaacgttggctgaagctcgaggaggaggagaggcgcgagcagcaggagaggcgcgagcagcaactaaggcgggagcaagaggagaggcgcgagcagcggctgaagcgccaggaggaggaagagaggctccagcagcggttgaggagcgagcaacaactaagacgcgagcaggaggagaggcgcgagcagctgctgaagcgcgaggaggagaagaggctcgagcaggagaggcgagagcagcggctgaagcgcgagcaggaggagaggcgcgatcagctgctgaagcgcgaggaggagaggcgccagcagcggctgaagcgcgagcaggaagagaggctcgagcagcgactgaagcgcgaggaggtggagagactcgagcaggaggagaggcgcgagcagcggctgaagcgcgaggagccggaggaagagaggcgccagcagctgctgaagagcgaggagcaggaggagaggcgccagcagcaactaaggcgcgagcagcaggaaaggcgcgagcagcggctgaagcgcgaggaggaggaagagaggctcgagcagcggctgaagcgcgagcatgaggaagagaggcgcgagcaggagctagctgaggaggagcaggaacaggcccgggagcggattaagagccgcatcccgaagtggcagtggcagctagaaagcgaggccgacgcacggcaaagcaaagtctactcgaggccccgcaagcaggaagggcagaggcgccgccaagagcaggaggaaaagaggcggcgccgggagagtgagctgcaatggcaggaggaggaacgggctcaccggcagcagcaggaagaggagcagcgccgggacttcacatggcagtggcaggcggaggaaaagagcgagaggggccgtcagaggctgtcggccaggcccccattgcgggagcagcgggagaggcagctgagggccgaggagcgccagcagcgggaacaacggtttctcccggaggaggaggagaaggagcagcggcgccgccagcgacgcgagagggagaaagagctgcagttcctggaggaagaggagcagctccagcggcgggagcgtgcccaacagctccaggaggaggaggacggcctccaggaggatcaggagaggaggcgaagccaggagcagcgccgcgaccaaaaatggaggtggcaactagaagaagaaaggaagagacgccgccacacgctgtacgccaagccagccctacaagagcagctgaggaaggaacagcagctgctgcaggaggaggaggaggagctacagagagaggagcgcgagaagagaaggcgccaagaacaggagagacaataccgcgaggaagagcagctgcagcaggaggaagagcagctgctgagagaggaacgggagaaaagaagacgccaggagcgggaaaggcaatatcggaaggataagaagctgcagcagaaggaagagcagctgctgggagaggaaccggagaagagaaggcgccaggagcgggagaaaaaataccgcgaggaagaggagttgcagcaggaggaagagcagctgctgagagaggaacgggagaagagaaggcgccaggagtgggagaggcagtaccgcaaaaaagacgagctgcagcaggaagaagagcagctgctgagagaggaacgggagaaaagaagactccaggagcgggagaggcaatatcgggaggaagaggagctgcagcaggaggaagagcagctgctgggagaggaacgggagacgagaaggcgccaggagctggagaggcaatatcggaaggaagaggagctgcagcaggaggaagagcagctgctgagagaggaaccggagaagagaaggcgccaggagcgggagaggcaatgtcgggaggaagaggagctgcagcaggaggaagagcagctgctgagagaggaacgggagaagagaaggcgccaggagctggagaggcaatatcgggaggaagaggaggtgcagcaggaggaagagcagctgctgagagaggaaccggagaagagaaggcgccaggagctggagaggcaataccgcgaggaagaggagctgcagcaggaggaagagcagctgctgagagaggaacaggagaaaaggcgccaggagcgggagaggcagtatcgggaggaggaagagcttcagcgccagaaaaggaagcagcgataccgggatgaggatcagcgcagtgatctgaaatggcagtgggaaccagaaaaagaaaatgcagttcgtgataacaaggtttactgcaaaggcagagagaatgaacagttccggcagttggaagattcccagctgcgcgacagacaatcccagcaagatctgcagcacctgctgggtgaacagcaagagcgagatcgtgagcaagagaggaggcgctggcagcagcgcgacaggcatttcccagaggaagaacagctggagcgagaagagcaaaaggaagccaaaaggcgcgacaggaagtcccaagaggaaaagcagttgctgagagaggaaagagaagagaagagacgccgtcaagagacagacagaaaattccgcgaggaggaacagctgctccaggaaagggaggaacagccgctgcgccgccaagagcgtgacagaaaattccgcgaagaggaactgcgccatcaggaacaagggagaaaattcctcgaggaggaacagcggctgcgccgccaggaacgggagagaaaattccttaaggaggaacagcagctgcgctgccaggagcgcgagcaacagctgcgtcaggaccgcgacagaaaattccgcgaggaggaacagcagctgagccgccaagagcgtgacagaaaattccgtgaagaggaacagcaggtgcgccgccaggaacgagagagaaaattcctggaggaggaacagcagctgcgccaggagcgtcacagaaaattccgcgaagaggaacagctgctccaggaaagggaagaacagcagctgcaccgccaagagcgtgacagaaaattcctggaggaggaacaacagctgcgccgccaagagcgtgacagaaaattccgcgaacaggaactgcgcagtcaggaaccagagagaaaattcctcgaggaggaacagcagctgcaccgccagcaacggcagagaaaattcctccaggaggaacagcagctgcgccgccaggagcgcgggcaacagcggcgtcaggaccgtgacagaaaattccgcgaggaggaacagctgcgccaggagagggaggaacagcagctgagccgccaagagcgtgacagaaaattccgtttagaggaacagaaagtgcgccgccaggaacaagagagaaaattcatggaggacgaacagcagctgcgccgccaggagggccaacaacagctgcgccaggagcgcgacagaaaattccgcgaagacgaacagctgctccaggaaagggaagaacagcagctgcaccgccaagagcgtgacagaaaattcctcgaggaggaaccgcagctgcgccgccaggagcgcgaacaacagctgcgtcacgaccgcgacagaaaattccgtgaagaggaacagctgctccaggaaggggaggaacagcagctgcgccgccaagagcgtgacagaaaattccgcgaagaggaacagcagctccgccgtcaggaacgagagagaaaattcctccaggaggaacagcagctgcgccgccaggaactggagagaaaattccgtgaggaggaacagctgcgccaagaaacggagcaagagcagctgcgccgccaagaacgctacagaaaaatcctagaggaagagcagctccgtccggaaagggaagaacagcagctgcgccgccaggagcgcgacagaaaattccgcgaggaggaacagctccgccaggagagggaggaacagcagctgcgcagccaagagtctgacagaaaattccgcgaggaggaacagctacgccaggagagggaagaacagcagctgcgcccccaacagcgtgacggaaagtatcgctgggaagaagagcagctccaacttgaggaacaagagcagaggctgcggcaggagcgagaccggcagtaccgggcggaggagcagtttgccacgcaggagaagagtcgtcgtgaggaacaagaactatggcaagaagaggagcagaaacgtcgccaggaacgggaaaggaaattacgggaagaacacatccgccgccagcagaaggaggaacagaggcaccgccaagtcggggagataaaatcccaagaagggaagggccatgggcggcttctggagcccggcactcatcagtttgccagtgtcccagtgcgctccagccctctctatgagtacatccaagagcagagatctcaataccgcccttaagtgatgttgccaatatcttgacacctgccaaagcttcgagcacgggaaaatgagaaacactgggtaccaagtgataactcagatgtttctggttgtgggaaaactctctgatattagaatgtcttttcttccaaaatcttaaactacgctcattttacgcactttgtacttctgctttttattcttcctcaagtagttctttactgcaagatgtctttcttttgctctttgatgcagatgtggtgtgcatttaaaaaaaatataaatcatttaatttgtttaagaaattttgtttgaggaacatgttcatttattgctttcagaagtaacaagagtaataggatgatttgagattctaaacaatgggtcggtttgtttaatgactgacccatcttgtggaaagtgcagatacttttaatgttcaagttgctatttcttcttgaacctaaattgatcattgcctccaaacagcatttcatcttttgtggcatagttagcacaaattccaggtaactaaatttttataacccttgaatagtgcagggggagtgacctctgcataaaaacttcctgtaaaatcagcccattactggaagaaatatctgttaagaataggtttagctttgaagatttagaatttaaattagattttttttaaactcaactccacttaaacacataatctcatgaagaaataatgaggtgtttctcaacttcagagttcaaattttaaaactgtgtctgttgtagtctatagtgttcattctacttccccaagttttgatgagtttcagaatattatgaacctttgttaattttagcttgttagaaggaagctgctcagaatcccataaacatctgtcttactctagggccaataagagatcacatagagcatgttgggggtgtaaaagggaaaaatgtgtgaacataggggcaaatttctagaggccctttgacaagacccatttgcccacaatcatttgaggcctattgataataccttagatatattcttgttgaaataattggactgtgaaaaattaataataaatgtttggcaagtaa

SEQ ID NO: 194589 - DNA, 6995 bp, Homo sapiens
  Payload ID: 18451
  Gene Name: trichohyalin
  Uniprot ID: Q07283
  ENST ID: ENST00000614923
  CDS Start-End: 96-5927
gttacccagtacacttgcctgtggtgtcagcaagcactgtcgacttcttcctctggtgaagtgggtttacttgaacttgaaggaaagaaaaaaaaatgtctccacttctgagaagcatctgtgacatcactgaaattttcaatcagtatgtctctcatgattgtgatggagcagcattaactaagaaagacctgaagaacctccttgaaagggaatttggagctgtgcttcggagaccacatgaccctaagacggtagatctgatcctggaacttctggatcttgacagtaatgggcgtgtcgatttcaacgaattcctcctatttattttcaaagtggctcaagcttgttactatgctctcggccaggccacgggactggatgaggagaagcgagcccggtgtgacggaaaggagagcctgttacaagatcgcaggcaagaagaagaccaaaggagattcgagccccgggacagacaactggaagaagaacctgggcaacgacgcaggcagaagaggcaggaacaggagagggagctagctgagggagaggagcaaagtgagaaacaagagcgacttgaacagcgcgacaggcagcgccgcgacgaggagctgtggcggcaaaggcaagaatggcaagaacgggaagagcgccgtgcagaggaagagcagctgcagagttgcaaaggtcacgaaactgaggagtttccagacgaagagcaactgcgaaggcgggagctgctggagctgaggaggaagggccgcgaggagaaacagcagcaaaggcgagagcggcaagacagagtgttccaggaggaagaagagaaagagtggaggaagcgcgagacagtgctccggaaggaagaagagaagttgcaggaagaggagccgcagcggcaaagagagctccaggaggaagaagagcagctacggaagctggagcggcaagagctgaggagggagcgccaggaggaagagcagcagcagcaaaggctgaggcgcgagcagcaactaaggcgcaagcaggaggaggagaggcgcgagcagcaggaggagaggcgcgagcagcaggagaggcgcgagcagcaggaggagaggcgcgagcagcagctgaggcgcgagcaggaggagaggcgcgagcagcagctgaggcgcgagcaggaggaggagaggcgcgagcagcagctgaggcgcgagcaggaggaggagaggcgcgagcagcagctgaggcgcgagcagcagctgaggcgcgagcagcagctgaggcgcgagcagcagctgaggcgcgagcagcagctgaggcgcgagcagcagctgaggcgcgagcagcagctgaggcgcgagcagcagctgaggcgcgagcagcagctgaggcgcgagcaggaggaggagaggcacgagcagaagcacgagcaggagaggcgcgagcagcggctgaagcgcgagcaggaggagaggcgcgattggctgaagcgcgaggaggagacggagaggcacgagcaggagaggcgcaagcagcagctgaagcgcgaccaggaggaggagaggcgcgaacgttggctgaagctcgaggaggaggagaggcgcgagcagcaggagaggcgcgagcagcaactaaggcgggagcaagaggagaggcgcgagcagcggctgaagcgccaggaggaggaagagaggctccagcagcggttgaggagcgagcaacaactaagacgcgagcaggaggagaggcgcgagcagctgctgaagcgcgaggaggagaagaggctcgagcaggagaggcgagagcagcggctgaagcgcgagcaggaggagaggcgcgatcagctgctgaagcgcgaggaggagaggcgccagcagcggctgaagcgcgagcaggaagagaggctcgagcagcgactgaagcgcgaggaggtggagagactcgagcaggaggagaggcgcgagcagcggctgaagcgcgaggagccggaggaagagaggcgccagcagctgctgaagagcgaggagcaggaggagaggcgccagcagcaactaaggcgcgagcagcaggaaaggcgcgagcagcggctgaagcgcgaggaggaggaagagaggctcgagcagcggctgaagcgcgagcatgaggaagagaggcgcgagcaggagctagctgaggaggagcaggaacaggcccgggagcggattaagagccgcatcccgaagtggcagtggcagctagaaagcgaggccgacgcacggcaaagcaaagtctactcgaggccccgcaagcaggaagggcagaggcgccgccaagagcaggaggaaaagaggcggcgccgggagagtgagctgcaatggcaggaggaggaacgggctcaccggcagcagcaggaagaggagcagcgccgggacttcacatggcagtggcaggcggaggaaaagagcgagaggggccgtcagaggctgtcggccaggcccccattgcgggagcagcgggagaggcagctgagggccgaggagcgccagcagcgggaacaacggtttctcccggaggaggaggagaaggagcagcggcgccgccagcgacgcgagagggagaaagagctgcagttcctggaggaagaggagcagctccagcggcgggagcgtgcccaacagctccaggaggaggaggacggcctccaggaggatcaggagaggaggcgaagccaggagcagcgccgcgaccaaaaatggaggtggcaactagaagaagaaaggaagagacgccgccacacgctgtacgccaagccagccctacaagagcagctgaggaaggaacagcagctgctgcaggaggaggaggaggagctacagagagaggagcgcgagaagagaaggcgccaagaacaggagagacaataccgcgaggaagagcagctgcagcaggaggaagagcagctgctgagagaggaacgggagaaaagaagacgccaggagcgggaaaggcaatatcggaaggataagaagctgcagcagaaggaagagcagctgctgggagaggaaccggagaagagaaggcgccaggagcgggagaaaaaataccgcgaggaagaggagttgcagcaggaggaagagcagctgctgagagaggaacgggagaagagaaggcgccaggagtgggagaggcagtaccgcaaaaaagacgagctgcagcaggaagaagagcagctgctgagagaggaacgggagaaaagaagactccaggagcgggagaggcaatatcgggaggaagaggagctgcagcaggaggaagagcagctgctgggagaggaacgggagacgagaaggcgccaggagctggagaggcaatatcggaaggaagaggagctgcagcaggaggaagagcagctgctgagagaggaaccggagaagagaaggcgccaggagcgggagaggcaatgtcgggaggaagaggagctgcagcaggaggaagagcagctgctgagagaggaacgggagaagagaaggcgccaggagctggagaggcaatatcgggaggaagaggaggtgcagcaggaggaagagcagctgctgagagaggaaccggagaagagaaggcgccaggagctggagaggcaataccgcgaggaagaggagctgcagcaggaggaagagcagctgctgagagaggaacaggagaaaaggcgccaggagcgggagaggcagtatcgggaggaggaagagcttcagcgccagaaaaggaagcagcgataccgggatgaggatcagcgcagtgatctgaaatggcagtgggaaccagaaaaagaaaatgcagttcgtgataacaaggtttactgcaaaggcagagagaatgaacagttccggcagttggaagattcccagctgcgcgacagacaatcccagcaagatctgcagcacctgctgggtgaacagcaagagcgagatcgtgagcaagagaggaggcgctggcagcagcgcgacaggcatttcccagaggaagaacagctggagcgagaagagcaaaaggaagccaaaaggcgcgacaggaagtcccaagaggaaaagcagttgctgagagaggaaagagaagagaagagacgccgtcaagagacagacagaaaattccgcgaggaggaacagctgctccaggaaagggaggaacagccgctgcgccgccaagagcgtgacagaaaattccgcgaagaggaactgcgccatcaggaacaagggagaaaattcctcgaggaggaacagcggctgcgccgccaggaacgggagagaaaattccttaaggaggaacagcagctgcgctgccaggagcgcgagcaacagctgcgtcaggaccgcgacagaaaattccgcgaggaggaacagcagctgagccgccaagagcgtgacagaaaattccgtgaagaggaacagcaggtgcgccgccaggaacgagagagaaaattcctggaggaggaacagcagctgcgccaggagcgtcacagaaaattccgcgaagaggaacagctgctccaggaaagggaagaacagcagctgcaccgccaagagcgtgacagaaaattcctggaggaggaacaacagctgcgccgccaagagcgtgacagaaaattccgcgaacaggaactgcgcagtcaggaaccagagagaaaattcctcgaggaggaacagcagctgcaccgccagcaacggcagagaaaattcctccaggaggaacagcagctgcgccgccaggagcgcgggcaacagcggcgtcaggaccgtgacagaaaattccgcgaggaggaacagctgcgccaggagagggaggaacagcagctgagccgccaagagcgtgacagaaaattccgtttagaggaacagaaagtgcgccgccaggaacaagagagaaaattcatggaggacgaacagcagctgcgccgccaggagggccaacaacagctgcgccaggagcgcgacagaaaattccgcgaagacgaacagctgctccaggaaagggaagaacagcagctgcaccgccaagagcgtgacagaaaattcctcgaggaggaaccgcagctgcgccgccaggagcgcgaacaacagctgcgtcacgaccgcgacagaaaattccgtgaagaggaacagctgctccaggaaggggaggaacagcagctgcgccgccaagagcgtgacagaaaattccgcgaagaggaacagcagctccgccgtcaggaacgagagagaaaattcctccaggaggaacagcagctgcgccgccaggaactggagagaaaattccgtgaggaggaacagctgcgccaagaaacggagcaagagcagctgcgccgccaagaacgctacagaaaaatcctagaggaagagcagctccgtccggaaagggaagaacagcagctgcgccgccaggagcgcgacagaaaattccgcgaggaggaacagctccgccaggagagggaggaacagcagctgcgcagccaagagtctgacagaaaattccgcgaggaggaacagctacgccaggagagggaagaacagcagctgcgcccccaacagcgtgacggaaagtatcgctgggaagaagagcagctccaacttgaggaacaagagcagaggctgcggcaggagcgagaccggcagtaccgggcggaggagcagtttgccacgcaggagaagagtcgtcgtgaggaacaagaactatggcaagaagaggagcagaaacgtcgccaggaacgggaaaggaaattacgggaagaacacatccgccgccagcagaaggaggaacagaggcaccgccaagtcggggagataaaatcccaagaagggaagggccatgggcggcttctggagcccggcactcatcagtttgccagtgtcccagtgcgctccagccctctctatgagtacatccaagagcagagatctcaataccgcccttaagtgatgttgccaatatcttgacacctgccaaagcttcgagcacgggaaaatgagaaacactgggtaccaagtgataactcagatgtttctggttgtgggaaaactctctgatattagaatgtcttttcttccaaaatcttaaactacgctcattttacgcactttgtacttctgctttttattcttcctcaagtagttctttactgcaagatgtctttcttttgctctttgatgcagatgtggtgtgcatttaaaaaaaatataaatcatttaatttgtttaagaaattttgtttgaggaacatgttcatttattgctttcagaagtaacaagagtaataggatgatttgagattctaaacaatgggtcggtttgtttaatgactgacccatcttgtggaaagtgcagatacttttaatgttcaagttgctatttcttcttgaacctaaattgatcattgcctccaaacagcatttcatcttttgtggcatagttagcacaaattccaggtaactaaatttttataacccttgaatagtgcagggggagtgacctctgcataaaaacttcctgtaaaatcagcccattactggaagaaatatctgttaagaataggtttagctttgaagatttagaatttaaattagattttttttaaactcaactccacttaaacacataatctcatgaagaaataatgaggtgtttctcaacttcagagttcaaattttaaaactgtgtctgttgtagtctatagtgttcattctacttccccaagttttgatgagtttcagaatattatgaacctttgttaattttagcttgttagaaggaagctgctcagaatcccataaacatctgtcttactctagggccaataagagatcacatagagcatgttgggggtgtaaaagggaaaaatgtgtgaacataggggcaaatttctagaggccctttgacaagacccatttgcccacaatcatttgaggcctattgataataccttagatatattcttgttgaaataattggactgtgaaaaattaataataaatgtttggcaagtaa

SEQ ID NO: 194590 - DNA, 3603 bp, Homo sapiens
  Payload ID: 18452
  Gene Name: trichohyalin-like 1
  Uniprot ID: Q5QJ38
  ENST ID: ENST00000368806
  CDS Start-End: 66-2780
acagcccgctgccccacgttctacctgctctcgcttgtgaactagcctctcctgagtttgtaaagatgcctcagctcctgagaaatgtcctctgtgtaattgagacattccacaaatatgccagtgaggacagtaacggggcaacactgactggcagagagctgaaacaactcatccagggcgagtttggggacttttttcagccctgtgtccttcatgctgtggaaaaaaattcaaatcttctgaatattgacagtaatggcatcatcagttttgatgaatttgttcttgcaatcttcaacttgttgaacctctgttatcttgacataaaatcattactaagttctgaactaagacaggtgactaaaccagagaaggagaagctagatgatgtggatgttcaggcaaccaccggagatggtcagtggacagtgggaacttcaccaactcaagaaaagaggatgcttccttcaggaatggcatcatcatctcagctcatccctgaagaaagtggagcagttggaaataacagagtggacccatggagagaagccaagactcacaactttccaggagaagcatctgaacacaatgatcctaagaacaaacacctggaaggagatgaacaaagtcaggaagtggctcaagatatacaaacaacagaagacaatgaaggccaacttaagacaaataagccaatggcaggatcaaaaaagaccagcagtcccacagagaggaagggacaagataaggagatctcccaggaaggagatgaaccagccagagagcaaagtgtttccaagataagagaccagtttggagaacaggaaggaaacttggcaacccaaagttcaccaccaaaagaagcaacacaaagaccatgtgaagatcaggaagttagaacagaaaaggaaaaacactctaatatacaagaaccacccctacaaagagaagatgagcccagttcacagcatgctgacctgccagaacaagctgctgccaggtcaccatctcagacacagaaatcaactgattccaaggatgtctgtagaatgtttgacactcaagaaccaggaaaggatgctgaccagacaccagctaaaacaaagaatttgggtgaacctgaggattatggcagaacatctgagacccaagaaaaagaatgtgaaacaaaggacctgccagtccaatatggtagcagaaatggttcagaaacatctgacatgagagatgaaaggaaagagaggagaggtcctgaggcccatggaacagcagggcagaaagaacgtgacagaaaaactcggccactagtcctggaaacccaaacacaggatgggaagtatcaggaactccaaggattatcaaaatcaaaagatgctgaaaaaggttctgagacacaatatctaagctcagaaggaggagatcagactcaccctgaacttgaaggaacagcagtctcaggagaagaggcagaacacaccaaagaaggcacagcagaagcatttgtgaacagcaaaaacgcacctgcagcagaaaggacactgggggcaagagaaagaacacaagatttagcaccacttgagaagcagtctgtaggagaaaatactagggtcaccaagactcatgaccaaccagttgaggaggaggatggttaccagggggaggaccctgagtcaccattcacacagagtgatgaggggtcttctgaaactcccaacagcctggcttcagaggaaggcaatagcagctcagagacaggtgaactgcctgtgcaaggggactcccagagtcaaggggaccaacatggagagtctgtgcaaggaggtcacaataataacccagatacccagaggcagggaacacctggtgagaaaaacagagctctggaggcagtggtaccagcagtcagaggagaggatgtacagctcacagaggaccaggaacagcctgccagaggagaacacaagaatcaaggcccagggaccaaaggcccaggtgcagctgtggagcccaatggacacccagaagcacaggaatccacagcaggagatgaaaatagaaagtccctggaaatagagatcacaggtgccctggatgaagacttcactgaccagctttccctaatgcagctccctggaaagggagatagcagaaatgaattaaaggtccaaggcccaagtagcaaagaagagaaaggaagagcaacagaggcccagaatactctgttagaaagtctagatgaggacaattcagcctccctcaagatacaacttgaaacaaaggaacctgtaacatcagaggaggaagatgaaagtccccaagagctggcaggagaaggtggtgaccaaaaaagtccagccaagaaagagcacaattcttcagtcccctggtcaagtcttgaaaagcagatgcagagagaccaagagccctgttctgtggagaggggtgcagtctattccagtccactataccagtacctacaggagaagatactgcagcaaacaaatgtaacccaagaggagcatcaaaagcaagttcagatagcccaggcatcaggcccagagctttgcagtgtatccctcaccagtgagatctcagattgttctgtctttttcaactacagccaagcatcacaaccatataccaggggacttccacttgatgagagtcctgctggtgcacaggaaacaccagctccccaggccttggaagataagcaaggtcaccctcagagagagaggctggtactacaaagggaggcaagcaccacaaagcaatgaatcattatcatctcaacatgcccccaatttctctcccaatcaccctcaatactcacgtgtacacattcagatgcagattaacaatcttttaaattctcttcctaaatttctacaaaaacaaataataaaatattcagcagtgggggacaccactaaagaaacatctgagcaaacaaatacagtcagtaaaactcctaccaaacaatgctacttccaaatgccaaaatgggctttgtcatgagacagtttatctcaatgtacctgtcattaaaaatggaaaaattccttccatatctttagcaggtgccagtttttccaactgattcattgaatttaaaatagagcagtaggaaattataagactctgcaataatatctcataatcataaaatattaattcatatatatagattactctgcttcatgacatttcctagaagtatttcaagttcatcctaaaattttatccttcaaaataattttagacaatgccataacttaattatgattttctagcacttgattaaagtaaatttatgactctgctcatgttcaggtgcagctgaatctatcgccatggattcattctttcaattactcatccaacaaatttttattaaatcccactccttacacaaacttttcatagcttttggctcaaataaacaatcaagaataattatgagagaaaacacaaatctaaagtatgtttgattttataagaagctcttgtaaccaaccatccagtgagtctactaagtgtttacctatatggtttgatgagggtattaaattaaaattgataattaaacaacctgatgat

SEQ ID NO: 194591 - DNA, 3151 bp, Homo sapiens
  Payload ID: 18453
  Gene Name: trichoplein, keratin filament binding
  Uniprot ID: Q9BT92
  ENST ID: ENST00000312777
  CDS Start-End: 215-1711
gggcgcgagctcagggcgcctccggggtcctcactgcgctccccacgcgctgtgaccccatttgttgcacgtgcatgttcaggtcgagagagggatgcgacgtgttcggggagcagcccaccttgtgggtggccaatccgggacgggaatcttaaacttttaactcttggtgcaaagactgatccactggcggctttacgggagcgggaaaaaaatggcgctcccgacgctgccgtcctactggtgcagccagcagcgcctgaatcagcagctagcacgacagcgagagcaggaggcccggcttcggcagcagtgggagcagaacagccgttacttcaggatgtctgacatctgcagctccaaacaggcagaatggagctctaaaacctcctaccagcggagcatgcatgcctatcagcgggagaagatgaaggaggagaagaggaggagtctggaggcccgacgggaaaagctcaggcagctcatgcaggaggagcaggacctgctggccagagaactggaggagctgaggctgagcatgaacttgcaggaaagaagaatccgggagcagcacgggaagctgaaatcagccaaagaagagcagaggaaactgattgctgaacaacttttgtacgaacactggaaaaagaacaacccgaaacttcgagagatggagctggaccttcaccagaagcatgtcgtaaactcttgggaaatgcagaaagaagaaaaaaaacagcaagaagccaccgcagagcaagagaacaaacggtatgaaaatgaatatgaaagggcccgaagggaggcgctagaaaggatgaaagctgaagaggagaggaggcagctggaggacaagctccaggccgaggcactgctgcaacagatggaggagctgaagctgaaggaggtggaggcgaccaaactaaagaaggagcaggagaatctgttgaagcagcggtgggagctagagaggctggaggaagagcgaaagcagatggaagccttccggcagaaggcagagctggggcgtttcttgagacatcagtataacgctcaactcagcagacgcacacagcagatccaagaggagctggaggcagacaggcggatcctgcaggccctcctcgagaaggaggacgagagccagcgcctccacctggccaggcgggagcaggtcatggccgatgtggcctggatgaagcaggccattgaggagcagctgcagctggagcgggcgcgggaggcagagctgcagatgctgctgagggaggaggccaaggagatgtgggaaaagagagaggcagagtgggcccgagagcgcagcgcacgggacagactgatgagcgaggttctgacagggagacaacagcaaatacaagagaagattgagcagaaccgacgggcacaagaggaatccctgaaacacagggagcaacttattcgaaatcttgaggaggtgagagagttggctcgtcgcgagaaagaggagagtgaaaagctgaaatcggccaggaagcaggagctggaagcccaggttgcagagcgccggctgcaggcatgggaagcagaccagcaggaggaggaggaagaggaggaggcccggcgggtcgagcagctctcagatgccctgctgcagcaggaggcggagactatggctgagcagggctaccggcctaagccttacggacatccaaaaattgcttggaactgacttcatgggtaccataagtacagagaacaagggatgctgaggcttctgatcccagccgccaggcagttttacagggctctgttaacagtaagtgcccggggcactgtcagatggctcagcagtgcctgctcaggttcatcattgaaacatcccagtgtttggccagacattaaggtgtcgtgagagtccctttcatgcctttcttacccaagcaagggtctttgatgggcacgtgtttacagcgctgctgcatagtcttgtaatatattaacagtcacatcaactgaaggtcaatactaagagccacaggttgtacctgtgatggggcgtgtggtttcctgttgtctcacctttaattgtcaacctccagtgttgactctagaaatatgaggaaagcttttcagtttttaaaattgccatttaaatttagtctattaaaaacaaacctagaggtcttggtgcagttgatttcagagtttattaatttagtggtcccaaaagtattacatcttttatattctggaagaaaagaactgtgaacaaattagaaccccggaacactctgacgtccatggacgcattccagaaaagtggcaagagatgagtctttcctcctccaggaagcattttggtagaatttccatagagcattgtctgtgagtgactgatcccaacatgtatgttactaagccccaaaacgaacttcaaactgggtgtggtggcacgtgcctttagtcccagctacccgggaggctgcggcaagaggattgcttgagcccaggagttcgagtccaacctgggcaaaagagtgagaccccatctctaaaaccaaaaaggtaccttagaaggtcacctggttggctaaccttttaaaggcaggggcgtgacacgtaggacacattgggaatgtcttggctactacatgtagccttctgggatatatgtgcccagagggagaagcactgagcctgaagaaactagatgagtctcagaaccacagaccggccagaaatctctcccaccattatatcagcgtgatacaggtctacattcatttctacaaacaggaacaagttccttgcagcaataatattattttatgacttgtatttttactatacccttcctctgaggtttagttttcatcacattatgttcaagattccatatctccgtaaattacagctaattacagggcattgttccatggttattaaaaatcagagtttattaaaaatcctgagtcttaagggctgtcttacctttcacttccactgtcctgtagaaacagatcaagctgcaaaccacgtccttcatctgttgttcattttcttgcaactctttgactctgatcccctgagcagcacgttcatcacgcatgctctctgttgcgttccccatttcagatgtccagtaatggtgaaataaaatcctgcttcg

SEQ ID NO: 194592 - DNA, 3090 bp, Homo sapiens
  Payload ID: 18453
  Gene Name: trichoplein, keratin filament binding
  Uniprot ID: Q9BT92
  ENST ID: ENST00000405876
  CDS Start-End: 148-1644
gggctcgttgccggtgcaaacagggaggaaacagccggcgttgctgtagcgcgtctgggaattacaccgggggactggccggcccgcttcgtgcctgcgggaagtcgggccgggggactcttcggaaactccgagcctcagagaaatatggcgctcccgacgctgccgtcctactggtgcagccagcagcgcctgaatcagcagctagcacgacagcgagagcaggaggcccggcttcggcagcagtgggagcagaacagccgttacttcaggatgtctgacatctgcagctccaaacaggcagaatggagctctaaaacctcctaccagcggagcatgcatgcctatcagcgggagaagatgaaggaggagaagaggaggagtctggaggcccgacgggaaaagctcaggcagctcatgcaggaggagcaggacctgctggccagagaactggaggagctgaggctgagcatgaacttgcaggaaagaagaatccgggagcagcacgggaagctgaaatcagccaaagaagagcagaggaaactgattgctgaacaacttttgtacgaacactggaaaaagaacaacccgaaacttcgagagatggagctggaccttcaccagaagcatgtcgtaaactcttgggaaatgcagaaagaagaaaaaaaacagcaagaagccaccgcagagcaagagaacaaacggtatgaaaatgaatatgaaagggcccgaagggaggcgctagaaaggatgaaagctgaagaggagaggaggcagctggaggacaagctccaggccgaggcactgctgcaacagatggaggagctgaagctgaaggaggtggaggcgaccaaactaaagaaggagcaggagaatctgttgaagcagcggtgggagctagagaggctggaggaagagcgaaagcagatggaagccttccggcagaaggcagagctggggcgtttcttgagacatcagtataacgctcaactcagcagacgcacacagcagatccaagaggagctggaggcagacaggcggatcctgcaggccctcctcgagaaggaggacgagagccagcgcctccacctggccaggcgggagcaggtcatggccgatgtggcctggatgaagcaggccattgaggagcagctgcagctggagcgggcgcgggaggcagagctgcagatgctgctgagggaggaggccaaggagatgtgggaaaagagagaggcagagtgggcccgagagcgcagcgcacgggacagactgatgagcgaggttctgacagggagacaacagcaaatacaagagaagattgagcagaaccgacgggcacaagaggaatccctgaaacacagggagcaacttattcgaaatcttgaggaggtgagagagttggctcgtcgcgagaaagaggagagtgaaaagctgaaatcggccaggaagcaggagctggaagcccaggttgcagagcgccggctgcaggcatgggaagcagaccagcaggaggaggaggaagaggaggaggcccggcgggtcgagcagctctcagatgccctgctgcagcaggaggcggagactatggctgagcagggctaccggcctaagccttacggacatccaaaaattgcttggaactgacttcatgggtaccataagtacagagaacaagggatgctgaggcttctgatcccagccgccaggcagttttacagggctctgttaacagtaagtgcccggggcactgtcagatggctcagcagtgcctgctcaggttcatcattgaaacatcccagtgtttggccagacattaaggtgtcgtgagagtccctttcatgcctttcttacccaagcaagggtctttgatgggcacgtgtttacagcgctgctgcatagtcttgtaatatattaacagtcacatcaactgaaggtcaatactaagagccacaggttgtacctgtgatggggcgtgtggtttcctgttgtctcacctttaattgtcaacctccagtgttgactctagaaatatgaggaaagcttttcagtttttaaaattgccatttaaatttagtctattaaaaacaaacctagaggtcttggtgcagttgatttcagagtttattaatttagtggtcccaaaagtattacatcttttatattctggaagaaaagaactgtgaacaaattagaaccccggaacactctgacgtccatggacgcattccagaaaagtggcaagagatgagtctttcctcctccaggaagcattttggtagaatttccatagagcattgtctgtgagtgactgatcccaacatgtatgttactaagccccaaaacgaacttcaaactgggtgtggtggcacgtgcctttagtcccagctacccgggaggctgcggcaagaggattgcttgagcccaggagttcgagtccaacctgggcaaaagagtgagaccccatctctaaaaccaaaaaggtaccttagaaggtcacctggttggctaaccttttaaaggcaggggcgtgacacgtaggacacattgggaatgtcttggctactacatgtagccttctgggatatatgtgcccagagggagaagcactgagcctgaagaaactagatgagtctcagaaccacagaccggccagaaatctctcccaccattatatcagcgtgatacaggtctacattcatttctacaaacaggaacaagttccttgcagcaataatattattttatgacttgtatttttactatacccttcctctgaggtttagttttcatcacattatgttcaagattccatatctccgtaaattacagctaattacagggcattgttccatggttattaaaaatcagagtttattaaaaatcctgagtcttaagggctgtcttacctttcacttccactgtcctgtagaaacagatcaagctgcaaaccacgtccttcatctgttgttcattttcttgcaactctttgactctgatcccctgagcagcacgttcatcacgcatgctctctgttgcgttccccatttcagatgtccagtaatggtgaaataaaatcctgcttcgacagca

SEQ ID NO: 194593 - DNA, 2077 bp, Homo sapiens
  Payload ID: 18453
  Gene Name: trichoplein, keratin filament binding
  Uniprot ID: Q9BT92
  ENST ID: ENST00000544838
  CDS Start-End: 154-1650
gtcgtcgggctcgttgccggtgcaaacagggaggaaacagccggcgttgctgtagcgcgtctgggaattacaccgggggactggccggcccgcttcgtgcctgcgggaagtcgggccgggggactcttcggaaactccgagcctcagagaaatatggcgctcccgacgctgccgtcctactggtgcagccagcagcgcctgaatcagcagctagcacgacagcgagagcaggaggcccggcttcggcagcagtgggagcagaacagccgttacttcaggatgtctgacatctgcagctccaaacaggcagaatggagctctaaaacctcctaccagcggagcatgcatgcctatcagcgggagaagatgaaggaggagaagaggaggagtctggaggcccgacgggaaaagctcaggcagctcatgcaggaggagcaggacctgctggccagagaactggaggagctgaggctgagcatgaacttgcaggaaagaagaatccgggagcagcacgggaagctgaaatcagccaaagaagagcagaggaaactgattgctgaacaacttttgtacgaacactggaaaaagaacaacccgaaacttcgagagatggagctggaccttcaccagaagcatgtcgtaaactcttgggaaatgcagaaagaagaaaaaaaacagcaagaagccaccgcagagcaagagaacaaacggtatgaaaatgaatatgaaagggcccgaagggaggcgctagaaaggatgaaagctgaagaggagaggaggcagctggaggacaagctccaggccgaggcactgctgcaacagatggaggagctgaagctgaaggaggtggaggcgaccaaactaaagaaggagcaggagaatctgttgaagcagcggtgggagctagagaggctggaggaagagcgaaagcagatggaagccttccggcagaaggcagagctggggcgtttcttgagacatcagtataacgctcaactcagcagacgcacacagcagatccaagaggagctggaggcagacaggcggatcctgcaggccctcctcgagaaggaggacgagagccagcgcctccacctggccaggcgggagcaggtcatggccgatgtggcctggatgaagcaggccattgaggagcagctgcagctggagcgggcgcgggaggcagagctgcagatgctgctgagggaggaggccaaggagatgtgggaaaagagagaggcagagtgggcccgagagcgcagcgcacgggacagactgatgagcgaggttctgacagggagacaacagcaaatacaagagaagattgagcagaaccgacgggcacaagaggaatccctgaaacacagggagcaacttattcgaaatcttgaggaggtgagagagttggctcgtcgcgagaaagaggagagtgaaaagctgaaatcggccaggaagcaggagctggaagcccaggttgcagagcgccggctgcaggcatgggaagcagaccagcaggaggaggaggaagaggaggaggcccggcgggtcgagcagctctcagatgccctgctgcagcaggaggcggagactatggctgagcagggctaccggcctaagccttacggacatccaaaaattgcttggaactgacttcatgggtaccataagtacagagaacaagggatgctgaggcttctgatcccagccgccaggcagttttacagggctctgttaacaaaatctgaagagttctgcgtctgaatttgaaattggactttataaagcctagaaaacagaggaggcggtgccctgcccttgtcagttgttgttctctttggtggtgatggtaaccagctgcttggcagccttggcgatgtcgtacgcacactggatgacctgctgcgtgaccagctgaacgtctgtggtggtttccaaatctgtgtcttcgtctgatgccacgctgtcatagtcgggctgatcgttgtcttgactctcaacgctgtgctggttattgatggttttcagtatgagctccacattgtctatcaataaaagcaaacaactttacttcaggctt

SEQ ID NO: 194594 - DNA, 973 bp, Homo sapiens
  Payload ID: 18453
  Gene Name: trichoplein, keratin filament binding
  ENST ID: ENST00000536408
  CDS Start-End: 452-973
gggatgcgacgtgttcggggagcagcccaccttgtgggtggccaatccgggacgggaatcttaaacttttaactcttggtgcaaagactgatccactggcggctttacgggagcgggaaaaaagtatgtgaagcttgccacggtctcgagaccgaggtcacacgttagcagcctgccggctacatttggaccatagacgcagagtgtttgcccccaaaactggaggacctccagaatgagattcttggcgtgcaccaggccttttcgctcattcagccggcgttcctacccaggcactgcatcgaccctacacttgaggacagcttttgggtcaggggaattggtgcctggagtgagactgctctctgctttcaaggctccagctgtatccctacattgctcaggcaattcctctctctaggtctcagcttcttcatctgcaagatgaaagatggcgctcccgacgctgccgtcctactggtgcagccagcagcgcctgaatcagcagctagcacgacagcgagagcaggaggcccggcttcggcagcagtgggagcagaacagccgttacttcaggatgtctgacatctgcagctccaaacaggcagaatggagctctaaaacctcctaccagcggagcatgcatgcctatcagcgggagaagatgaaggaggagaagaggaggagtctggaggcccgacgggaaaagctcaggcagctcatgcaggaggagcaggacctgctggccagagaactggaggagctgaggctgagcatgaacttgcaggaaagaagaatccgggagcagcacgggaagctgaaatcagccaaagaagagcagaggaaactgattgctgaacaacttttgtacgaacactggaaaaagaacaacccgaaacttcgagagatggagctggaccttcaccagaagcatgtcgtaaactcttgggaaatgcagaaagaagaaaaaaaa

SEQ ID NO: 194595 - DNA, 5480 bp, Homo sapiens
  Payload ID: 18454
  Gene Name: trichorhinophalangeal syndrome I
  Uniprot ID: Q9UHF7
  ENST ID: ENST00000220888
  CDS Start-End: 161-4006
ggggagggaaaggggggggaggcaggaaagacctttttctctcccccccgcaataatccaagatcaactctgcaaacaacagaagacggttcatggctttggccgccgcgccaccatctttcgggctgccgagggtgttcttgacgattaatcaacagatatggtccggaaaaagaacccccctctgagaaacgttgcaagtgaaggcgagggccagatcctggagcctataggtacagaaagcaaggtatctggaaagaacaaagaattttctgcagatcagatgtcagaaaatacggatcagagtgatgctgcagaactaaatcataaggaggaacatagcttgcatgttcaagatccatcttctagcagtaagaaggacttgaaaagcgcagttctgagtgagaaggctggcttcaattatgaaagccccagtaagggaggaaactttccctcctttccgcatgatgaggtgacagacagaaatatgttggctttctcatctccagctgctgggggagtctgtgagcccttgaagtctccgcaaagagcagaggcagatgaccctcaagatatggcctgcaccccctcaggggactcactggagacaaaggaagatcagaagatgtcaccaaaggctacagaggaaacagggcaagcacagagtggtcaagccaattgtcaaggtttgagcccagtttcagtggcctcaaaaaacccacaagtgccttcagatgggggtgtaagactgaataaatccaaaactgacttactggtgaatgacaacccagacccggcacctctgtctccagagcttcaggactttaaatgcaatatctgtggatatggttactacggcaacgaccccacagatctgattaagcacttccgaaagtatcacttaggactgcataaccgcaccaggcaagatgctgagctggacagcaaaatcttggcccttcataacatggtgcagttcagccattccaaagacttccagaaggtcaaccgttctgtgttttctggtgtgctgcaggacatcaattcttcaaggcctgttttactaaatgggacctatgatgtgcaggtgacttcaggtggaacattcattggcattggacggaaaacaccagattgccaagggaacaccaagtatttccgctgtaaattctgcaatttcacttatatgggcaactcatccaccgaattagaacaacattttcttcagactcacccaaacaaaataaaagcttctctcccctcctctgaggttgcaaaaccttcagagaaaaactctaacaagtccatccctgcacttcaatccagtgattctggagacttgggaaaatggcaggacaagataacagtcaaagcaggagatgacactcctgttgggtactcagtgcccataaagcccctcgattcctctagacaaaatggtacagaggccaccagttactactggtgtaaattttgtagtttcagctgtgagtcatctagctcacttaaactgctagaacattatggcaagcagcacggagcagtgcagtcaggcggccttaatccagagttaaatgataagctttccaggggctctgtcattaatcagaatgatctagccaaaagttcagaaggagagacaatgaccaagacagacaagagctcgagtggggctaaaaagaaggacttctccagcaagggagccgaggataatatggtaacgagctataattgtcagttctgtgacttccgatattccaaaagccatggccctgatgtaattgtagtggggccacttctccgtcattatcaacagctccataacattcacaagtgtaccattaaacactgtccattctgtcccagaggactttgcagcccagaaaagcaccttggagaaattacttatccgtttgcttgtagaaaaagtaattgttcccactgtgcactcttgcttctgcacttgtctcctggggcggctggaagctcgcgagtcaaacatcagtgccatcagtgttcattcaccacccctgacgtagatgtactcctctttcactatgaaagtgtgcatgagtcccaagcatcggatgtcaaacaagaagcaaatcacctgcaaggatcggatgggcagcagtctgtcaaggaaagcaaagaacactcatgtaccaaatgtgattttattacccaagtggaagaagagatttcccgacactacaggagagcacacagctgctacaaatgccgtcagtgcagttttacagctgccgatactcagtcactactggagcacttcaacactgttcactgccaggaacaggacatcactacagccaacggcgaagaggacggtcatgccatatccaccatcaaagaggagcccaaaattgacttcagggtctacaatctgctaactccagactctaaaatgggagagccagtttctgagagtgtggtgaagagagagaagctggaagagaaggacgggctcaaagagaaagtttggaccgagagttccagtgatgaccttcgcaatgtgacttggagaggggcagacatcctgcgggggagtccgtcatacacccaagcaagcctggggctgctgacgcctgtgtctggcacccaagagcagacaaagactctaagggatagtcccaatgtggaggccgcccatctggcgcgacctatttatggcttggctgtggaaaccaagggattcctgcagggggcgccagctggcggagagaagtctggggccctcccccagcagtatcctgcatcgggagaaaacaagtccaaggatgaatcccagtccctgttacggaggcgtagaggctccggtgttttttgtgccaattgcctgaccacaaagacctctctctggcgaaagaatgcaaatggcggatatgtatgcaacgcgtgtggcctctaccagaagcttcactcgactcccaggcctttaaacatcattaaacaaaacaacggtgagcagattattaggaggagaacaagaaagcgccttaacccagaggcacttcaggctgagcagctcaacaaacagcagaggggcagcaatgaggagcaagtcaatggaagcccgttagagaggaggtcagaagatcatctaactgaaagtcaccagagagaaattccactccccagcctaagtaaatacgaagcccagggttcattgactaaaagccattctgctcagcagccagtcctggtcagccaaactctggatattcacaaaaggatgcaacctttgcacattcagataaaaagtcctcaggaaagtactggagatccaggaaatagttcatccgtatctgaagggaaaggaagttctgagagaggcagtcctatagaaaagtacatgagacctgcgaaacacccaaattattcaccaccaggcagccctattgaaaagtaccagtacccactttttggacttccctttgtacataatgacttccagagtgaagctgattggctgcggttctggagtaaatataagctctccgttcctgggaatccgcactacttgagtcacgtgcctggcctaccaaatccttgccaaaactatgtgccttatcccaccttcaatctgcctcctcatttttcagctgttggatcagacaatgacattcctctagatttggcgatcaagcattccagacctgggccaactgcaaacggtgcctccaaggagaaaacgaaggcaccaccaaatgtaaaaaatgaaggtcccttgaatgtagtaaaaacagagaaagttgatagaagtactcaagatgaactttcaacaaaatgtgtgcactgtggcattgtctttctggatgaagtgatgtatgctttgcatatgagttgccatggtgacagtggacctttccagtgcagcatatgccagcatctttgcacggacaaatatgacttcacaacacatatccagaggggcctgcataggaacaatgcacaagtggaaaaaaatggaaaacctaaagagtaaaaccttagcacttagcacaattaaatagaaataggttttcttgatgggaattcaatagcttgtaatgtcttatgaagacctattaaaaaaatacttcatagagcctgccttatccaacatgaaattcccttcttttgttattctttcttttgatgagtaggttaccaagattaaaaagtgagataaatggtcaatgagaaagaatggaagatggtaaacaatcactttttaaaacctgttaagtcaaaaccatcttggctaatatgtactggggaaataatccataagagatatcaccagactagaattaatatatttataaagaaagagaccaaaactgtctagaatttgaaagggtttacatattattatactaaagcagtactggactggccattggaccatttgttccaaaacccataaattgttgcctaaatttataatgatcatgaaaccctaggcagaggaggagaaattgaaggtccagggcaatgaaagaaaaatggcgccctctcaatttagtcttctctcattggccatgtttcagattttgacctagaaatgcgagctgtggttaggcttggttagagtgcagcaagcaacatgacagatggtggcacgctgtttttacccagccctgcctgtacatacacatgcacaccctctctgatatttttgtcctttagatgttcaaatactcagtagtccttttgtttgcggtttagattcattttgtccacacatgtacccattttaaaaaacaatgtcctcgatgcttctgtagtgatttcattttagccaggtatttctttcttgtgtgtgatgaaccagtatggatttgcttttctaagcctcctgttggttactaatctcacttggcacattataactaaaggaatcccctcaattcaaaagcatagatggatacaaatgtcagaccgtgggtttaatttgtttagaacacatggcatttcttcacaaggtaacctgctgtatttatttattttcttttggttaaatataatttccaaactttgtggtcaggcagcgtctaaggttacgttaccacagactgacagttggtatatgtaccagccaatcccttcattaaatgtatacagatttagttaagtagcattaaataggattcttagaagtatgtcctcatagaacttttaatacttaaggctttgtaaaaactatccatgaagggaaagctcctcagcataactgctcagggaaatagggctaaataactgaacattaaataattggttaaaggtgctgttagtcgagcctcaatgcttgctacaaggatgtatgtacaaggactgactttaataatttgcattatattgtcccaaccagtagtttattttttgccacggagatgtagaagatattacaagctactggatgcactgtcagattaacttatttcattaaagaagttgggagaacaaataggaaaaaa

SEQ ID NO: 194596 - DNA, 581 bp, Homo sapiens
  Payload ID: 18454
  Gene Name: trichorhinophalangeal syndrome I
  ENST ID: ENST00000395713
  CDS Start-End: 231-581
accattctgcactacttctgctccaagaatccaccactatcttggttcctgagagattaaggatgatgttttctgttgtataatgaacagcagtattatttgaacaaagatgtacagatcagctctcaaaatgtcttctgtgtcttctgagcgtcttctaagacaattgcattagcctcctgctagttgactaatagaattaataattgtaaaaagcactctaaagccacatgccttatgaagtcaatgctgggtatgattttacaaatatggtccggaaaaagaacccccctctgagaaacgttgcaagtgaaggcgagggccagatcctggagcctataggtacagaaagcaaggtatctggaaagaacaaagaattttctgcagatcagatgtcagaaaatacggatcagagtgatgctgcagaactaaatcataaggaggaacatagcttgcatgttcaagatccatcttctagcagtaagaaggacttgaaaagcgcagttctgagtgagaaggctggcttcaattatgaaagccccagtaagggaggaaactttccctcctttccgcatgatgag

SEQ ID NO: 194597 - DNA, 9990 bp, Homo sapiens
  Payload ID: 18454
  Gene Name: trichorhinophalangeal syndrome I
  Uniprot ID: Q9UHF7
  ENST ID: ENST00000395715
  CDS Start-End: 579-4463
aatagtgttggtgtcttgaaactgacgtaatgcgcggagactgaggtcctgacaagcgataacatttctgataaagacccgatcttactgcaatctctagcgtcctcttttttggtgctgctggtttctccagacctcgcgtcctctcgattgctctctcgccttcctatttcttttttttttttttaaacaaaaaacaacaccccctcccctctcccacccggcaccgggcacatccttgctctatttcctttctctttctctctctctctctctctctctcttttttaataagggtgggggagggaaaggggggggaggcaggaaagacctttttctctcccccccgcaataatccaagatcaactctgcaaacaacagaagacggttcatggctttggccgccgcgccaccatctttcgggctgccgagggtgttcttgacgattaatcaacagatgtacagatcagctctcaaaatgtcttctgtgtcttctgagcgtcttctaagacaattgcattagcctcctgctagttgactaatagaattaataattgtaaaaagcactctaaagccacatgccttatgaagtcaatgctgggtatgattttacaaatatggtccggaaaaagaacccccctctgagaaacgttgcaagtgaaggcgagggccagatcctggagcctataggtacagaaagcaaggtatctggaaagaacaaagaattttctgcagatcagatgtcagaaaatacggatcagagtgatgctgcagaactaaatcataaggaggaacatagcttgcatgttcaagatccatcttctagcagtaagaaggacttgaaaagcgcagttctgagtgagaaggctggcttcaattatgaaagccccagtaagggaggaaactttccctcctttccgcatgatgaggtgacagacagaaatatgttggctttctcatctccagctgctgggggagtctgtgagcccttgaagtctccgcaaagagcagaggcagatgaccctcaagatatggcctgcaccccctcaggggactcactggagacaaaggaagatcagaagatgtcaccaaaggctacagaggaaacagggcaagcacagagtggtcaagccaattgtcaaggtttgagcccagtttcagtggcctcaaaaaacccacaagtgccttcagatgggggtgtaagactgaataaatccaaaactgacttactggtgaatgacaacccagacccggcacctctgtctccagagcttcaggactttaaatgcaatatctgtggatatggttactacggcaacgaccccacagatctgattaagcacttccgaaagtatcacttaggactgcataaccgcaccaggcaagatgctgagctggacagcaaaatcttggcccttcataacatggtgcagttcagccattccaaagacttccagaaggtcaaccgttctgtgttttctggtgtgctgcaggacatcaattcttcaaggcctgttttactaaatgggacctatgatgtgcaggtgacttcaggtggaacattcattggcattggacggaaaacaccagattgccaagggaacaccaagtatttccgctgtaaattctgcaatttcacttatatgggcaactcatccaccgaattagaacaacattttcttcagactcacccaaacaaaataaaagcttctctcccctcctctgaggttgcaaaaccttcagagaaaaactctaacaagtccatccctgcacttcaatccagtgattctggagacttgggaaaatggcaggacaagataacagtcaaagcaggagatgacactcctgttgggtactcagtgcccataaagcccctcgattcctctagacaaaatggtacagaggccaccagttactactggtgtaaattttgtagtttcagctgtgagtcatctagctcacttaaactgctagaacattatggcaagcagcacggagcagtgcagtcaggcggccttaatccagagttaaatgataagctttccaggggctctgtcattaatcagaatgatctagccaaaagttcagaaggagagacaatgaccaagacagacaagagctcgagtggggctaaaaagaaggacttctccagcaagggagccgaggataatatggtaacgagctataattgtcagttctgtgacttccgatattccaaaagccatggccctgatgtaattgtagtggggccacttctccgtcattatcaacagctccataacattcacaagtgtaccattaaacactgtccattctgtcccagaggactttgcagcccagaaaagcaccttggagaaattacttatccgtttgcttgtagaaaaagtaattgttcccactgtgcactcttgcttctgcacttgtctcctggggcggctggaagctcgcgagtcaaacatcagtgccatcagtgttcattcaccacccctgacgtagatgtactcctctttcactatgaaagtgtgcatgagtcccaagcatcggatgtcaaacaagaagcaaatcacctgcaaggatcggatgggcagcagtctgtcaaggaaagcaaagaacactcatgtaccaaatgtgattttattacccaagtggaagaagagatttcccgacactacaggagagcacacagctgctacaaatgccgtcagtgcagttttacagctgccgatactcagtcactactggagcacttcaacactgttcactgccaggaacaggacatcactacagccaacggcgaagaggacggtcatgccatatccaccatcaaagaggagcccaaaattgacttcagggtctacaatctgctaactccagactctaaaatgggagagccagtttctgagagtgtggtgaagagagagaagctggaagagaaggacgggctcaaagagaaagtttggaccgagagttccagtgatgaccttcgcaatgtgacttggagaggggcagacatcctgcgggggagtccgtcatacacccaagcaagcctggggctgctgacgcctgtgtctggcacccaagagcagacaaagactctaagggatagtcccaatgtggaggccgcccatctggcgcgacctatttatggcttggctgtggaaaccaagggattcctgcagggggcgccagctggcggagagaagtctggggccctcccccagcagtatcctgcatcgggagaaaacaagtccaaggatgaatcccagtccctgttacggaggcgtagaggctccggtgttttttgtgccaattgcctgaccacaaagacctctctctggcgaaagaatgcaaatggcggatatgtatgcaacgcgtgtggcctctaccagaagcttcactcgactcccaggcctttaaacatcattaaacaaaacaacggtgagcagattattaggaggagaacaagaaagcgccttaacccagaggcacttcaggctgagcagctcaacaaacagcagaggggcagcaatgaggagcaagtcaatggaagcccgttagagaggaggtcagaagatcatctaactgaaagtcaccagagagaaattccactccccagcctaagtaaatacgaagcccagggttcattgactaaaagccattctgctcagcagccagtcctggtcagccaaactctggatattcacaaaaggatgcaacctttgcacattcagataaaaagtcctcaggaaagtactggagatccaggaaatagttcatccgtatctgaagggaaaggaagttctgagagaggcagtcctatagaaaagtacatgagacctgcgaaacacccaaattattcaccaccaggcagccctattgaaaagtaccagtacccactttttggacttccctttgtacataatgacttccagagtgaagctgattggctgcggttctggagtaaatataagctctccgttcctgggaatccgcactacttgagtcacgtgcctggcctaccaaatccttgccaaaactatgtgccttatcccaccttcaatctgcctcctcatttttcagctgttggatcagacaatgacattcctctagatttggcgatcaagcattccagacctgggccaactgcaaacggtgcctccaaggagaaaacgaaggcaccaccaaatgtaaaaaatgaaggtcccttgaatgtagtaaaaacagagaaagttgatagaagtactcaagatgaactttcaacaaaatgtgtgcactgtggcattgtctttctggatgaagtgatgtatgctttgcatatgagttgccatggtgacagtggacctttccagtgcagcatatgccagcatctttgcacggacaaatatgacttcacaacacatatccagaggggcctgcataggaacaatgcacaagtggaaaaaaatggaaaacctaaagagtaaaaccttagcacttagcacaattaaatagaaataggttttcttgatgggaattcaatagcttgtaatgtcttatgaagacctattaaaaaaatacttcatagagcctgccttatccaacatgaaattcccttcttttgttattctttcttttgatgagtaggttaccaagattaaaaagtgagataaatggtcaatgagaaagaatggaagatggtaaacaatcactttttaaaacctgttaagtcaaaaccatcttggctaatatgtactggggaaataatccataagagatatcaccagactagaattaatatatttataaagaaagagaccaaaactgtctagaatttgaaagggtttacatattattatactaaagcagtactggactggccattggaccatttgttccaaaacccataaattgttgcctaaatttataatgatcatgaaaccctaggcagaggaggagaaattgaaggtccagggcaatgaaagaaaaatggcgccctctcaatttagtcttctctcattggccatgtttcagattttgacctagaaatgcgagctgtggttaggcttggttagagtgcagcaagcaacatgacagatggtggcacgctgtttttacccagccctgcctgtacatacacatgcacaccctctctgatatttttgtcctttagatgttcaaatactcagtagtccttttgtttgcggtttagattcattttgtccacacatgtacccattttaaaaaacaatgtcctcgatgcttctgtagtgatttcattttagccaggtatttctttcttgtgtgtgatgaaccagtatggatttgcttttctaagcctcctgttggttactaatctcacttggcacattataactaaaggaatcccctcaattcaaaagcatagatggatacaaatgtcagaccgtgggtttaatttgtttagaacacatggcatttcttcacaaggtaacctgctgtatttatttattttcttttggttaaatataatttccaaactttgtggtcaggcagcgtctaaggttacgttaccacagactgacagttggtatatgtaccagccaatcccttcattaaatgtatacagatttagttaagtagcattaaataggattcttagaagtatgtcctcatagaacttttaatacttaaggctttgtaaaaactatccatgaagggaaagctcctcagcataactgctcagggaaatagggctaaataactgaacattaaataattggttaaaggtgctgttagtcgagcctcaatgcttgctacaaggatgtatgtacaaggactgactttaataatttgcattatattgtcccaaccagtagtttattttttgccacggagatgtagaagatattacaagctactggatgcactgtcagattaacttatttcattaaagaagttgggagaacaaataggaaaaaaaaaacttatttttctagtaaatattaatgtattacatttcaaataatggtgcctgacatattgaataattattttctacagtgtacgtatgcaacaaagatattccatcatgcattagagtcagttctggctctgcctagctgtttacatttgcaaatgtagcaaacaaggtaatgaagcaactatttctattgcagtagatatccttttgtgtgtgtgtgtgtgcattaaagttgtaaacggtaacatgaaacaaatgaaagttcttgctataatggtatggaaaacaagaaggaaatgaaaatatttttatgcctacttaggaaaaaaagggtagcacttattcattccaagtacttttttttttttaatttttaagctcttaactcacattgttatgcttaagatgataaacatatatcctctttttattgctttgtctatgtttcatatgaaacatttcagaaattattttgataagtgttgctggaatctgcaacgctgatttttttttgcattctgtagtcgcatttgcactccatttttacattaattcgcagttgctttgtatcattgttttgtttgggttttgtttctttttcacagtgccgggtcttcgtttcttaaagttggatggcaggtagagttcaaccagttcgtgactgttgtagcgaatgaagttaaaaaaatgtctttctgatgttgtgttgtcattttcatttttgcatttttttgtttgcatattaaaaaaagagaaaagagaaagcaagagacagaaatcaggactaagtcctctgcttcagtttcattgttaacgggccttattctgatctcacctgtcgcgtagctctaatattcacataaactgaaataaagaagtggaatgaggagctttgacattcaaattatgtgatgtaatttatcttccttaggaattttgatggatgcatctcaaaatgtatagccagacttgagaggtgacaattaaagatctaaaaaagagaggagattcccccaaacaacaatatttaattttcttagtaaaaagaataacagaatgcatcgtggcaatccttaagcaacattatctatgtggactgcttaaatcagcaaaacaccagaagtttggttaacttgggcaatatgacaagtattactttttgggcaaaactactcattaagcaatttctctagtgtgtcggacacaaataggttctttatttttggcatgtatgcctttttattttcattcaattttttttttttctcagacagacatagtagtaacgactagcattggaaaatacatatcactattcttggaatatttatggtcagtctactttttagtagaatatttttggatagcgttgacacgatagatcttattccatacttctttattattgataattttattttcattttttgctttcattattatacatattttggtggagaagaggttgggcttttttgaaagagacaaaaatttattataacactaaacactccttttttgacatattaaagcctttattccatctctcaagatatattataaaatttatttttttaatttaagatttctgaattattttatcttaaattgtgattttaaacgagctattatggtacggaactttttttaatgaggaatttcatgatgatttaggaattttctctcttggaaaaggcttcccctgtgatgaaaatgatgtgccagctaaaattgtgtgccatttaaaaactgaaaatattttaaaattatttgtctatattctaaattgagctttggatcaaactttaggccaggaccagctcatgcgttctcattcttccttttctcactctttctctcatcactcacctctgtattcattctgttgtttgggatagaaaaatcataaagagccaacccatctcagaacgttgtggattgagagagacactacatgactccaagtatatgagaaaaggacagagctctaattgataactctgtagttcaaaaggaaaagagtatgcccaattctctctacatgacatattgagattttttttaatcaacttttaagatagtgatgttctgttctaaactgttctgttttagtgaaggtagatttttataaaacaagcatggggattcttttctaaggtaatattaatgagaagggaaaaaagtatctttaacagctctttgttgaagcctgtggtagcacattatgtttataattgcacatgtgcacataatctattatgatccaatgcaaatacagctccaaaaatattaaatgtatatatattttaaaatgcctgaggaaatacatttttcttaataaactgaagagtctcagtatggctattaaaataattattagcctcctgttgtgtggctgcaaaacatcacaaagtgaccggtcttgagacctgtgaactgctgccctgtttagtaaataaaattaatgcatttctagagggggaatatctgccatccagtggtggaaatgtggagtaaagaagctggtggtctgcttctgtgctgtatgccagccttttgccttaagttgagaggaggtcaactttagctactgtctttggtttgagagccatggcaaaaaaaaaaaaagaaaaaaagatcaagtcgtctttggtgagccagtaaggtgaaagcttgctgactgtccaaggcacaagagaaaattgaggaattgaaatgcaacctgagtatcaaactaaatattctaatcaaaggtaggtactgttaggtggaattctatcagcaggcaactgcaaatgagaagaagatagaaggacgcccgtcgggactttggagggcattgttattttcccaaagaaagacggccaagggcagaggcatggattctttgcagagcacttccttttggtttttcagtactgtttcatagacagtgggctcacatgttcctgatagtgctgcagttgcttagaaagcatcccagttaattgcagtaattagaacttctggaatatgctagggcagaagtatgtcaagtatgtcacatgaagaaaatgtgaaattcaagagtaatccacacgtgagaaactagacaatgtacattcatgtgttctcttgaaaggaaagggagagctgtaagcttcactctgtcctacaccggagaaaagcaggaataactttaccgtggaaataatgtttagcttttatcagagaaaattgtccttctagagcatagagtcccaaaactcaattctggttttcccctgttttttttttttttttttttcccaacatataaactgcagcatatcactttttctttttgtgcctcaggttcctcagctgtaaaattgaaaaatatatgtattaataatattattaataataataatggtaatgtagtacttgtttgtaaagcactttgagatccttggttgaaaggcaccataggagtgccaagtattattatgtggccaagggggttatttaaactgtcagttcccaaaggccaggaaaggttggggtcatttttcttaaagacgagctgtaaatatcaactaggcagccaatagtgttgactatgaagatgcaaaactattactaggctgataaaatcatagtttcttaatggctaccaataaggcaaatatcacaataataaacgccaaattccttagggcggactatttgacaaccacatggaaaactttgggggaggcatgaggggggaacatctcaaaatgccaatgtaaaatttaacttacagcaatattcaccagcagaaaatgtctttcatatggaatgatttcatgttgctaagaaaaagaattcaatttgtagtcctgatttgaatactagaatgttggctataatagttctgttcttacaacacatgaaattttttcgttttattttattttgttttcatagtgcatgttcatttctactcacaaacatgttcttggtgtatttcttatgcaaacaatcttcaggcagcaaagatgtctgttacatctaaacttgaataataaagttttaccaccagttacaca

SEQ ID NO: 194598 - DNA, 569 bp, Homo sapiens
  Payload ID: 18454
  Gene Name: trichorhinophalangeal syndrome I
  ENST ID: ENST00000451156
  CDS Start-End: 543-569
acatgcattttctttcttcctttttgagcgtgtgatttctttctttctttcttctcttctgctccctttttcccccttcctctcctccttttggtgggtctgaggcatctgagctttggaaaccagcgacttcaaactgcagtagcccctggagtcagcagggtcaagttcagccgccggggaggaggaaaaacaaatccccatttgccaaaaaaagaagtttcaggccggtgccccctccccctcgcagccccactccccctcgctgtctctttctggctgattttaattctctcctaccgggcgcagcggaggagctggaggtggttggacccgaggggccgccgccgccgccgccactgcaagttttctgggggctcgtgacaagcggggcgcagactaggcaccagcatgcagagtaatgtacagatcagctctcaaaatgtcttctgtgtcttctgagcgtcttctaagacaattgcattagcctcctgctagttgactaatagaattaataattgtaaaaagcactctaaagccacatgccttatgaagtcaatgctgggtat

SEQ ID NO: 194599 - DNA, 581 bp, Homo sapiens
  Payload ID: 18454
  Gene Name: trichorhinophalangeal syndrome I
  ENST ID: ENST00000422939
  CDS Start-End: 397-581
agtaagagaaaaatacactggagttttcatggcgtttctaggaaacaagaacaaaacaaggttcttaggaaagattttgaaaccccattcaaagaggacttctaaagaaaatgtcactacaaagagtaatttctctagcacagaaatatcttcaacgttttgtgatttcctgacgatgaaacttcaagtggcttcctgctttctccaagtggtccagcctcatcaactgggattcaagattctgtcttattaaccttggcaaccacgtcttccatatgtacagatcagctctcaaaatgtcttctgtgtcttctgagcgtcttctaagacaattgcattagcctcctgctagttgactaatagaattaataattgtaaaaagcactctaaagccacatgccttatgaagtcaatgctgggtatgattttacaaatatggtccggaaaaagaacccccctctgagaaacgttgcaagtgaaggcgagggccagatcctggagcctataggtacagaaagcaaggtatctggaaagaacaaagaattttctgcagatcagatgtcagaaaatacggatcagag

SEQ ID NO: 194600 - DNA, 813 bp, Homo sapiens
  Payload ID: 18454
  Gene Name: trichorhinophalangeal syndrome I
  ENST ID: ENST00000518018
  CDS Start-End: 1-813
caagagcactgtcacccctctgattctgcctaagaggcgtagaggctccggtgttttttgtgccaattgcctgaccacaaagacctctctctggcgaaagaatgcaaatggcggatatgtatgcaacgcgtgtggcctctaccagaagcttcactcgactcccaggcctttaaacatcattaaacaaaacaacggtgagcagattattaggaggagaacaagaaagcgccttaacccagaggcacttcaggctgagcagctcaacaaacagcagaggggcagcaatgaggagcaagtcaatggaagcccgttagagaggaggtcagaagatcatctaactgaaagtcaccagagagaaattccactccccagcctaagtaaatacgaagcccagggttcattgactaaaagccattctgctcagcagccagtcctggtcagccaaactctggatattcacaaaaggatgcaacctttgcacattcagataaaaagtcctcaggaaagtactggagatccaggaaatagttcatccgtatctgaagggaaaggaagttctgagagaggcagtcctatagaaaagtacatgagacctgcgaaacacccaaattattcaccaccaggcagccctattgaaaagtaccagtacccactttttggacttccctttgtacataatgacttccagagtgaagctgattggctgcggttctggagtaaatataagctctccgttcctgggaatccgcactacttgagtcacgtgcctggcctaccaaatccttgccaaaactatgtgccttatcccacctt

SEQ ID NO: 194601 - DNA, 4083 bp, Homo sapiens
  Payload ID: 18454
  Gene Name: trichorhinophalangeal syndrome I
  Uniprot ID: Q9UHF7
  ENST ID: ENST00000520276
  CDS Start-End: 125-3982
aattctctcctaccgggcgcagcggaggagctggaggtggttggacccgaggggccgccgccgccgccgccactgcaagttttctgggggctcgtgacaagcggggcgcagactaggcaccagcatgcagagtaatatggtccggaaaaagaacccccctctgagaaacgttgcaagtgaaggcgagggccagatcctggagcctataggtacagaaagcaaggtatctggaaagaacaaagaattttctgcagatcagatgtcagaaaatacggatcagagtgatgctgcagaactaaatcataaggaggaacatagcttgcatgttcaagatccatcttctagcagtaagaaggacttgaaaagcgcagttctgagtgagaaggctggcttcaattatgaaagccccagtaagggaggaaactttccctcctttccgcatgatgaggtgacagacagaaatatgttggctttctcatctccagctgctgggggagtctgtgagcccttgaagtctccgcaaagagcagaggcagatgaccctcaagatatggcctgcaccccctcaggggactcactggagacaaaggaagatcagaagatgtcaccaaaggctacagaggaaacagggcaagcacagagtggtcaagccaattgtcaaggtttgagcccagtttcagtggcctcaaaaaacccacaagtgccttcagatgggggtgtaagactgaataaatccaaaactgacttactggtgaatgacaacccagacccggcacctctgtctccagagcttcaggactttaaatgcaatatctgtggatatggttactacggcaacgaccccacagatctgattaagcacttccgaaagtatcacttaggactgcataaccgcaccaggcaagatgctgagctggacagcaaaatcttggcccttcataacatggtgcagttcagccattccaaagacttccagaaggtcaaccgttctgtgttttctggtgtgctgcaggacatcaattcttcaaggcctgttttactaaatgggacctatgatgtgcaggtgacttcaggtggaacattcattggcattggacggaaaacaccagattgccaagggaacaccaagtatttccgctgtaaattctgcaatttcacttatatgggcaactcatccaccgaattagaacaacattttcttcagactcacccaaacaaaataaaagcttctctcccctcctctgaggttgcaaaaccttcagagaaaaactctaacaagtccatccctgcacttcaatccagtgattctggagacttgggaaaatggcaggacaagataacagtcaaagcaggagatgacactcctgttgggtactcagtgcccataaagcccctcgattcctctagacaaaatggtacagaggccaccagttactactggtgtaaattttgtagtttcagctgtgagtcatctagctcacttaaactgctagaacattatggcaagcagcacggagcagtgcagtcaggcggccttaatccagagttaaatgataagctttccaggggctctgtcattaatcagaatgatctagccaaaagttcagaaggagagacaatgaccaagacagacaagagctcgagtggggctaaaaagaaggacttctccagcaagggagccgaggataatatggtaacgagctataattgtcagttctgtgacttccgatattccaaaagccatggccctgatgtaattgtagtggggccacttctccgtcattatcaacagctccataacattcacaagtgtaccattaaacactgtccattctgtcccagaggactttgcagcccagaaaagcaccttggagaaattacttatccgtttgcttgtagaaaaagtaattgttcccactgtgcactcttgcttctgcacttgtctcctggggcggctggaagctcgcgagtcaaacatcagtgccatcagtgttcattcaccacccctgacgtagatgtactcctctttcactatgaaagtgtgcatgagtcccaagcatcggatgtcaaacaagaagcaaatcacctgcaaggatcggatgggcagcagtctgtcaaggaaagcaaagaacactcatgtaccaaatgtgattttattacccaagtggaagaagagatttcccgacactacaggagagcacacagctgctacaaatgccgtcagtgcagttttacagctgccgatactcagtcactactggagcacttcaacactgttcactgccaggaacaggacatcactacagccaacggcgaagaggacggtcatgccatatccaccatcaaagaggagcccaaaattgacttcagggtctacaatctgctaactccagactctaaaatgggagagccagtttctgagagtgtggtgaagagagagaagctggaagagaaggacgggctcaaagagaaagtttggaccgagagttccagtgatgaccttcgcaatgtgacttggagaggggcagacatcctgcgggggagtccgtcatacacccaagcaagcctggggctgctgacgcctgtgtctggcacccaagagcagacaaagactctaagggatagtcccaatgtggaggccgcccatctggcgcgacctatttatggcttggctgtggaaaccaagggattcctgcagggggcgccagctggcggagagaagtctggggccctcccccagcagtatcctgcatcgggagaaaacaagtccaaggatgaatcccagtccctgttacggaggcgtagaggctccggtgttttttgtgccaattgcctgaccacaaagacctctctctggcgaaagaatgcaaatggcggatatgtatgcaacgcgtgtggcctctaccagaagcttcactcgactcccaggcctttaaacatcattaaacaaaacaacggtgagcagattattaggaggagaacaagaaagcgccttaacccagaggcacttcaggctgagcagctcaacaaacagcagaggggcagcaatgaggagcaagtcaatggaagcccgttagagaggaggtcagaagatcatctaactgaaagtcaccagagagaaattccactccccagcctaagtaaatacgaagcccagggttcattgactaaaagccattctgctcagcagccagtcctggtcagccaaactctggatattcacaaaaggatgcaacctttgcacattcagataaaaagtcctcaggaaagtactggagatccaggaaatagttcatccgtatctgaagggaaaggaagttctgagagaggcagtcctatagaaaagtacatgagacctgcgaaacacccaaattattcaccaccaggcagccctattgaaaagtaccagtacccactttttggacttccctttgtacataatgacttccagagtgaagctgattggctgcggttctggagtaaatataagctctccgttcctgggaatccgcactacttgagtcacgtgcctggcctaccaaatccttgccaaaactatgtgccttatcccaccttcaatctgcctcctcatttttcagctgttggatcagacaatgacattcctctagatttggcgatcaagcattccagacctgggccaactgcaaacggtgcctccaaggagaaaacgaaggcaccaccaaatgtaaaaaatgaaggtcccttgaatgtagtaaaaacagagaaagttgatagaagtactcaagatgaactttcaacaaaatgtgtgcactgtggcattgtctttctggatgaagtgatgtatgctttgcatatgagttgccatggtgacagtggacctttccagtgcagcatatgccagcatctttgcacggacaaatatgacttcacaacacatatccagaggggcctgcataggaacaatgcacaagtggaaaaaaatggaaaacctaaagagtaaaaccttagcacttagcacaattaaatagaaataggttttcttgatgggaattcaatagcttgtaatgtcttatgaagacctattaaaaaaatacttcatag

SEQ ID NO: 194602 - DNA, 3329 bp, Homo sapiens
  Payload ID: 18454
  Gene Name: trichorhinophalangeal syndrome I
  ENST ID: ENST00000519076
  CDS Start-End: 13-3120
atctttgcagatatggtccggaaaaagaacccccctctgagaaacgttgcaagtgaaggcgagggccagatcctggagcctataggtacagaaagcaaggtatctggaaagaacaaagaattttctgcagatcagatgtcagaaaatacggatcagagtgatgctgcagaactaaatcataaggaggaacatagcttgcatgttcaagatccatcttctagcactgctgggggagtctgtgagcccttgaagtctccgcaaagagcagaggcagatgaccctcaagatatggcctgcaccccctcaggggactcactggagacaaaggaagatcagaagatgtcaccaaaggctacagaggaaacagggcaagcacagagtggtcaagccaattgtcaaggtttgagcccagtttcagtggcctcaaaaaacccacaagtgccttcagatgggggtgtaagactgaataaatccaaaactgacttactggtgaatgacaacccagacccggcacctctgtctccagagcttcaggactttaaatgcaatatctgtggatatggttactacggcaacgaccccacagatctgattaagcacttccgaaagtatcacttaggactgcataaccgcaccaggcaagatgctgagctggacagcaaaatcttggcccttcataacatggtgcagttcagccattccaaagacttccagaaggtcaaccgttctgtgttttctggtgtgctgcaggacatcaattcttcaaggcctgttttactaaatgggacctatgatgtgcaggtgacttcaggtggaacattcattggcattggacggaaaacaccagattgccaagggaacaccaagtatttccgctgtaaattctgcaatttcacttatatgggcaactcatccaccgaattagaacaacattttcttcagactcacccaaacaaaataaaagcttctctcccctcctctgaggttgcaaaaccttcagagaaaaactctaacaagtccatccctgcacttcaatccagtgattctggagacttgggaaaatggcaggacaagataacagtcaaagcaggagatgacactcctgttgggtactcagtgcccataaagcccctcgattcctctagacaaaatgatgtactcctctttcactatgaaagtgtgcatgagtcccaagcatcggatgtcaaacaagaagcaaatcacctgcaaggatcggatgggcagcagtctgtcaaggaaagcaaagaacactcatgtaccaaatgtgattttattacccaagtggaagaagagatttcccgacactacaggagagcacacagctgctacaaatgccgtcagtgcagttttacagctgccgatactcagtcactactggagcacttcaacactgttcactgccaggaacaggacatcactacagccaacggcgaagaggacggtcatgccatatccaccatcaaagaggagcccaaaattgacttcagggtctacaatctgctaactccagactctaaaatgggagagccagtttctgagagtgtggtgaagagagagaagctggaagagaaggacgggctcaaagagaaagtttggaccgagagttccagtgatgaccttcgcaatgtgacttggagaggggcagacatcctgcgggggagtccgtcatacacccaagcaagcctggggctgctgacgcctgtgtctggcacccaagagcagacaaagactctaagggatagtcccaatgtggaggccgcccatctggcgcgacctatttatggcttggctgtggaaaccaagggattcctgcagggggcgccagctggcggagagaagtctggggccctcccccagcagtatcctgcatcgggagaaaacaagtccaaggatgaatcccagtccctgttacggaggcgtagaggctccggtgttttttgtgccaattgcctgaccacaaagacctctctctggcgaaagaatgcaaatggcggatatgtatgcaacgcgtgtggcctctaccagaagcttcactcgactcccaggcctttaaacatcattaaacaaaacaacggtgagcagattattaggaggagaacaagaaagcgccttaacccagaggcacttcaggctgagcagctcaacaaacagcagaggggcagcaatgaggagcaagtcaatggaagcccgttagagaggaggtcagaagatcatctaactgaaagtcaccagagagaaattccactccccagcctaagtaaatacgaagcccagggttcattgactaaaagccattctgctcagcagccagtcctggtcagccaaactctggatattcacaaaaggatgcaacctttgcacattcagataaaaagtcctcaggaaagtactggagatccaggaaatagttcatccgtatctgaagggaaaggaagttctgagagaggcagtcctatagaaaagtacatgagacctgcgaaacacccaaattattcaccaccaggcagccctattgaaaagtaccagtacccactttttggacttccctttgtacataatgacttccagagtgaagctgattggctgcggttctggagtaaatataagctctccgttcctgggaatccgcactacttgagtcacgtgcctggcctaccaaatccttgccaaaactatgtgccttatcccaccttcaatctgcctcctcatttttcagctgttggatcagacaatgacattcctctagatttggcgatcaagcattccagacctgggccaactgcaaacggtgcctccaaggagaaaacgaaggcaccaccaaatgtaaaaaatgaaggtcccttgaatgtagtaaaaacagagaaagttgatagaagtactcaagatgaactttcaacaaaatgtgtgcactgtggcattgtctttctggatgaagtgatgtatgctttgcatatgagttgccatggtgacagtggacctttccagtgcagcatatgccagcatctttgcacggacaaatatgacttcacaacacatatccagaggggcctgcataggaacaatgcacaagtggaaaaaaatggaaaacctaaagagtaaaaccttagcacttagcacaattaaatagaaataggttttcttgatgggaattcaatagcttgtaatgtcttatgaagacctattaaaaaaatacttcatagagcctgccttatccaacatgaaattcccttcttttgttattctttcttttgatgagtaggttaccaagattaaaaagtgagataaatggtcaatgagaaagaatggaa

SEQ ID NO: 194603 - DNA, 3116 bp, Homo sapiens
  Payload ID: 18454
  Gene Name: trichorhinophalangeal syndrome I
  ENST ID: ENST00000519674
  CDS Start-End: 362-3070
agcgtcctcttttttggtgctgctggtttctccagacctcgcgtcctctcgattgctctctcgccttcctatttcttttttttttttttaaacaaaaaacaacaccccctcccctctcccacccggcaccgggcacatccttgctctatttcctttctctttctctctctctctctctctctctcttttttaataagggtgggggagggaaaggggggggaggcaggaaagacctttttctctcccccccgcaataatccaagatcaactctgcaaacaacagaagacggttcatggctttggccgccgcgccaccatctttcgggctgccgagggtgttcttgacgattaatcaacagatatggtccggaaaaagaacccccctctgagaaacgttgcaagtgaaggcgagggccagatcctggagcctataggtacagaaagcaaggtatctggaaagaacaaagaattttctgcagatcagatgtcagaaaatacggatcagagtgatgctgcagaactaaatcataaggaggaacatagcttgcatgttcaagatccatcttctagcagtaagaaggacttgaaaagcgcagttctgagtgagaaggctggcttcaattatgaaagccccagtaagggaggaaactttccctcctttccgcatgatgaggtgacagacagaaatatgttggctttctcatctccagctgctgggggagtctgtgagcccttgaagtctccgcaaagagcagaggcagatgaccctcaagatatggcctgcaccccctcaggggactcactggagacaaaggaagatcagaagatgtcaccaaaggctacagaggaaacagggcaagcacagagtggtcaagccaattgtcaaggtttgagcccagtttcagtggcctcaaaaaacccacaagtgccttcagatgggggtgtaagactgaataaatccaaaactgacttactggtgaatgacaacccagacccggcacctctgtctccagagcttcaggactttaaatgcaatatctgtggatatggttactacggcaacgaccccacagatctgattaagcacttccgaaagtatcacttaggactgcataaccgcaccaggcaagatgctgagctggacagcaaaatcttggcccttcataacatggtgcagttcagccattccaaagacttccagaaggtcaaccgttctgtgttttctggtgtgctgcaggacatcaattcttcaaggcctgttttactaaatgggacctatgatgtgcaggtgacttcaggtggaacattcattggcattggacggaaaacaccagattgccaagggaacaccaagtatttccgctgtaaattctgcaatttcacttatatgggcaactcatccaccgaattagaacaacattttcttcagactcacccaaacaaaataaaagcttctctcccctcctctgaggttgcaaaaccttcagagaaaaactctaacaagtccatccctgcacttcaatccagtgattctggagacttgggaaaatggcaggacaagataacagtcaaagcaggagatgacactcctgttgggtactcagtgcccataaagcccctcgattcctctagacaaaatggtacagaggccaccagttactactggtgtaaattttgtagtttcagctgtgagtcatctagctcacttaaactgctagaacattatggcaagcagcacggagcagtgcagtcaggcggccttaatccagagttaaatgataagctttccaggggctctgtcattaatcagaatgatctagccaaaagttcagaaggagagacaatgaccaagacagacaagagctcgagtggggctaaaaagaaggacttctccagcaagggagccgaggataatatggtaacgagctataattgtcagttctgtgacttccgatattccaaaagccatggccctgatgtaattgtagtggggccacttctccgtcattatcaacagctccataacattcacaagtgtaccattaaacactgtccattctgtcccagaggactttgcagcccagaaaagcaccttggagaaattacttatccgtttgcttgtagaaaaagtaattgttcccactgtgcactcttgcttctgcacttgtctcctggggcggctggaagctcgcgagtcaaacatcagtgccatcagtgttcattcaccacccctgacgtagatgtactcctctttcactatgaaagtgtgcatgagtcccaagcatcggatgtcaaacaagaagcaaatcacctgcaaggatcggatgggcagcagtctgtcaaggaaagcaaagaacactcatgtaccaaatgtgattttattacccaagtggaagaagagatttcccgacactacaggagagcacacagctgctacaaatgccgtcagtgcagttttacagctgccgatactcagtcactactggagcacttcaacactgttcactgccaggaacaggacatcactacagccaacggcgaagaggacggtcatgccatatccaccatcaaagaggagcccaaaattgacttcagggtctacaatctgctaactccagactctaaaatgggagagccagtttctgagagtgtggtgaagagagagaagctggaagagaaggacgggctcaaagagaaagtttggaccgagagttccagtgatgaccttcgcaatgtgacttggagaggggcagacatcctgcgggggagtccgtcatacacccaagcaagcctggggctgctgacgcctgtgtctggcacccaagagcagacaaagactctaagggatagtcccaatgtggaggccgcccatctggcgcgacctatttatggcttggctgtggaaaccaagggattcctgcagggggcgccagctggcggagagaagtctggggccctcccccagcagtatcctgcatcgggagaaaacaagtccaaggatgaatcccagtccctgttacgggtttttgaatctgcttggatgactcccgaagagcagtttagtctttgagaaaaccagatctccattgcttccatgaagatcttattaatattta

SEQ ID NO: 194604 - DNA, 584 bp, Homo sapiens
  Payload ID: 18454
  Gene Name: trichorhinophalangeal syndrome I
  ENST ID: ENST00000519815
  CDS Start-End: 261-584
gagaagggaaagtaacaacagaaaaggtaaaaggactttgagagttctttaaattgtttctgttagcatctctgagtgtctggggaacgtcggtttggcggccacgcactgccccccacctgccccccactaccccaagatgtacagatcagctctcaaaatgtcttctgtgtcttctgagcgtcttctaagacaattgcattagcctcctgctagttgactaatagaattaataattgtaaaaagcactctaaagccacatgccttatgaagtcaatgctgggtatgattttacaaatatggtccggaaaaagaacccccctctgagaaacgttgcaagtgaaggcgagggccagatcctggagcctataggtacagaaagcaaggtatctggaaagaacaaagaattttctgcagatcagatgtcagaaaatacggatcagagtgatgctgcagaactaaatcataaggaggaacatagcttgcatgttcaagatccatcttctagcagtaagaaggacttgaaaagcgcagttctgagtgagaaggctggcttcaattatgaaagccccagtaagggagga

SEQ ID NO: 194605 - DNA, 2171 bp, Homo sapiens
  Payload ID: 18454
  Gene Name: trichorhinophalangeal syndrome I
  ENST ID: ENST00000517323
  CDS Start-End: 99-2171
ggagctggaggtggttggacccgaggggccgccgccgccgccgccactgcaagttttctgggggctcgtgacaagcggggcgcagactaggcaccagcatgcagagtaatatggtccggaaaaagaacccccctctgagaaacgttgcaagtgaaggcgagggccagatcctggagcctataggtacagaaagcaaggtatctggaaagaacaaagaattttctgcagatcagatgtcagaaaatacggatcagagtgatgctgcagaactaaatcataaggaggaacatagcttgcatgttcaagatccatcttctagcagtaagaaggacttgaaaagcgcagttctgagtgagaaggctggcttcaattatgaaagccccagtaagggaggaaactttccctcctttccgcatgatgaggtgacagacagaaatatgttggctttctcatctccagctgctgggggagtctgtgagcccttgaagtctccgcaaagagcagaggcagatgaccctcaagatatggcctgcaccccctcaggggactcactggagacaaaggaagatcagaagatgtcaccaaaggctacagaggaaacagggcaagcacagagtggtcaagccaattgtcaaggtttgagcccagtttcagtggcctcaaaaaacccacaagtgccttcagatgggggtgtaagactgaataaatccaaaactgacttactggtgaatgacaacccagacccggcacctctgtctccagagcttcaggactttaaatgcaatatctgtggatatggttactacggcaacgaccccacagatctgattaagcacttccgaaagtatcacttaggactgcataaccgcaccaggcaagatgctgagctggacagcaaaatcttggcccttcataacatggtgcagttcagccattccaaagacttccagaaggtcaaccgttctgtgttttctggtgtgctgcaggacatcaattcttcaaggcctgttttactaaatgggacctatgatgtgcaggtgacttcaggtggaacattcattggcattggacggaaaacaccagattgccaagggaacaccaagtatttccgctgtaaattctgcaatttcacttatatgggcaactcatccaccgaattagaacaacattttcttcagactcacccaaacaaaataaaagcttctctcccctcctctgaggttgcaaaaccttcagagaaaaactctaacaagtccatccctgcacttcaatccagtgattctggagacttgggaaaatggcaggacaagataacagtcaaagcaggagatgacactcctgttgggtactcagtgcccataaagcccctcgattcctctagacaaaatgatgtactcctctttcactatgaaagtgtgcatgagtcccaagcatcggatgtcaaacaagaagcaaatcacctgcaaggatcggatgggcagcagtctgtcaaggaaagcaaagaacactcatgtaccaaatgtgattttattacccaagtggaagaagagatttcccgacactacaggagagcacacagctgctacaaatgccgtcagtgcagttttacagctgccgatactcagtcactactggagcacttcaacactgttcactgccaggaacaggacatcactacagccaacggcgaagaggacggtcatgccatatccaccatcaaagaggagcccaaaattgacttcagggtctacaatctgctaactccagactctaaaatgggagagccagtttctgagagtgtggtgaagagagagaagctggaagagaaggacgggctcaaagagaaagtttggaccgagagttccagtgatgaccttcgcaatgtgacttggagaggggcagacatcctgcgggggagtccgtcatacacccaagcaagcctggggctgctgacgcctgtgtctggcacccaagagcagacaaagactctaagggatagtcccaatgtggaggccgcccatctggcgcgacctatttatggcttggctgtggaaaccaagggattcctgcagggggcgccagctggcggagagaagtctggggccctcccccagcagtatcctgcatcgggagaaaacaagtccaaggatgaatcccagtccctgttacgg

SEQ ID NO: 194606 - DNA, 1690 bp, Homo sapiens
  Payload ID: 18455
  Gene Name: triggering receptor expressed on myeloid cells 1
  Uniprot ID: Q9NP99
  ENST ID: ENST00000244709
  CDS Start-End: 65-769
attgtggtgccttgtagctgtcccgggagccctcagcagcagttggagctggtgcacaggaaggatgaggaagaccaggctctgggggctgctgtggatgctctttgtctcagaactccgagctgcaactaaattaactgaggaaaagtatgaactgaaagaggggcagaccctggatgtgaaatgtgactacacgctagagaagtttgccagcagccagaaagcttggcagataataagggacggagagatgcccaagaccctggcatgcacagagaggccttcaaagaattcccatccagtccaagtggggaggatcatactagaagactaccatgatcatggtttactgcgcgtccgaatggtcaaccttcaagtggaagattctggactgtatcagtgtgtgatctaccagcctcccaaggagcctcacatgctgttcgatcgcatccgcttggtggtgaccaagggtttttcagggacccctggctccaatgagaattctacccagaatgtgtataagattcctcctaccaccactaaggccttgtgcccactctataccagccccagaactgtgacccaagctccacccaagtcaactgccgatgtctccactcctgactctgaaatcaaccttacaaatgtgacagatatcatcagggttccggtgttcaacattgtcattctcctggctggtggattcctgagtaagagcctggtcttctctgtcctgtttgctgtcacgctgaggtcatttgtaccctaggcccacgaacccacgagaatgtcctctgacttccagccacatccatctggcagttgtgccaagggaggagggaggaggtaaaaggcagggagttaataacatgaattaaatctgtaatcaccggctatttctaaagtcagcgtctcaccttcctgcccactgccctcgttcctctaataatcttgggtgggcatttgtgcctcagaaaagaagttacagccccaaacatgcttggtccttcattccaccagccacttggggttggcatgaaatacagacagctcaatgcttttcaccgtaattctcttgtgggggctgtgacatgcagaaggcacacctgatacttctcctgctcagttttgccctggaccatacaattttggcctgacctggacagagctcccactacagaagcatcctgctcgccccatgctgggacttcctctttctagcatcagacacttgggtttcatgcttatgtgtggttctttccaacactcccagaaaagggtgttgaagattgtggaacctggagaaataagacatcgtggtgagaaagtgcatccttctcagagaaaagagttaaactgagtatcttcttctggggaaatactggcaggccgagatgggatccataggagagcaacaacagaccatgtcagacatcctgtgtgcatttatcgctggatcctgaaaatagccccgtgaaggcagaaatgtatgtgactagaacgaggccacatgaataagccactgcccactggcaggagtgaaaactgaagcgctccttacctgaaggaccccaaaaccatatagaatagaataaccaggagttccgcctgtgtctaaatgcctcttttcctgtatcacacaagggtcagggatggtggagtaaaagctctccccctgggaggcttctgg

SEQ ID NO: 194607 - DNA, 1043 bp, Homo sapiens
  Payload ID: 18455
  Gene Name: triggering receptor expressed on myeloid cells 1
  Uniprot ID: Q9NP99
  ENST ID: ENST00000334475
  CDS Start-End: 28-480
agcagttggagctggtgcacaggaaggatgaggaagaccaggctctgggggctgctgtggatgctctttgtctcagaactccgagctgcaactaaattaactgaggaaaagtatgaactgaaagaggggcagaccctggatgtgaaatgtgactacacgctagagaagtttgccagcagccagaaagcttggcagataataagggacggagagatgcccaagaccctggcatgcacagagaggccttcaaagaattcccatccagtccaagtggggaggatcatactagaagactaccatgatcatggtttactgcgcgtccgaatggtcaaccttcaagtggaagattctggactgtatcagtgtgtgatctaccagcctcccaaggagcctcacatgctgttcgatcgcatccgcttggtggtgaccaaggggttccggtgttcaacattgtcattctcctggctggtggattcctgagtaagagcctggtcttctctgtcctgtttgctgtcacgctgaggtcatttgtaccctaggcccacgaacccacgagaatgtcctctgacttccagccacatccatctggcagttgtgccaagggaggagggaggaggtaaaaggcagggagttaataacatgaattaaatctgtaatcaccggctatttctaaagtcagcgtctcaccttcctgcccactgccctcgttcctctaataatcttgggtgggcatttgtgcctcagaaaagaagttacagccccaaacatgcttggtccttcattccaccagccacttggggttggcatgaaatacagacagctcaatgcttttcaccgtaattctcttgtgggggctgtgacatgcagaaggcacacctgatacttctcctgctcagttttgccctggaccatacaattttggcctgacctggacagagctcccactacagaagcatcctgctcgccccatgctgggacttcctctttctagcatcagacacttgggtttcatgcttatgtgtggttctttccaacactcccag

SEQ ID NO: 194608 - DNA, 2048 bp, Homo sapiens
  Payload ID: 18455
  Gene Name: triggering receptor expressed on myeloid cells 1
  Uniprot ID: Q9NP99
  ENST ID: ENST00000591620
  CDS Start-End: 28-705
agcagttggagctggtgcacaggaaggatgaggaagaccaggctctgggggctgctgtggatgctctttgtctcagaactccgagctgcaactaaattaactgaggaaaagtatgaactgaaagaggggcagaccctggatgtgaaatgtgactacacgctagagaagtttgccagcagccagaaagcttggcagataataagggacggagagatgcccaagaccctggcatgcacagagaggccttcaaagaattcccatccagtccaagtggggaggatcatactagaagactaccatgatcatggtttactgcgcgtccgaatggtcaaccttcaagtggaagattctggactgtatcagtgtgtgatctaccagcctcccaaggagcctcacatgctgttcgatcgcatccgcttggtggtgaccaagggtttttcagggacccctggctccaatgagaattctacccagaatgtgtataagattcctcctaccaccactaaggccttgtgcccactctataccagccccagaactgtgacccaagctccacccaagtcaactgccgatgtctccactcctgactctgaaatcaaccttacaaatgtgacagatatcatcaggtatagtttccaggtccctgggcccctggtttggacactgagccctttgtttcccagtctgtgtgctgagaggatgtgaaagtgagggaaaggggagggtggggcaggagaagacttgagtcacattagtctgggtagaaatgtccaggggaagaaggaagtggtgatggagaataggggaggctctcagccaggctgtccttctccccagttcaccttctttgtttccttgcaacctgagtattaaagagagggaaatggcatcttccccaagttccagtggagctcatccaaccccaggggcctgatgggcagtgggaaagcactctgagtgaggggccctggatctagtgttggcctgactaactgaatgtgactttgggtgagtcaggaaccctctctggctttagcttctttgacaattcagtaggcatggtagaaacccaaagctggaagacattgtccacctaataactctcagcaggagctggagctggggctaaatgcagtattggtttttgccttattgttttttaaataacattgttgcatgtgcccaattatagataaatagaatcagaatttttgcagatgaggtccctctcagtatttttaataagatgtttaggagatttctaatgtgtaggcaaacttaagaaccactaacttagcaatttcacacctctttacagttattaaatgttgatttatattagaatgtgtttatcattaaatactgaattatcaggatggaaatacttttccacatcaccactagtctaacatgtcttttttctcatattctcttctagtctttattcatgtttatacatattttaatatggcagtaagtctaattatacatgtttttattcttttccttgctgaaattattctttgatgctgctacctaaatttcataaatataatttcaatgagtgcatatttttctatcaattgggaaagccataacttacataaccattggcctgttcttagacattgatatagtgttgataactctgagataaacatattcttgcagatatatttttcttcttttaaataattaactcgaaatttccatgagataatttaaacactgatatcattttgtatacaaatagcatctaccaatggtcttccaaaagattggaaacaatttgcagtgtgatccattaagcataaataaagcagtgtcatggcaggcttacagacacggatttagtcttttaaatcattaaatagtgtgagttaaatcacattcctgctaaaacaaatgtgaactggtgcctgctctaatttctctatgagtgtagactccacctccatatgggtagtggcagtgcctttttccccattatgttgtttggggaacaaagtgctcattaaacttctgtggaataaatcaaacgaatgatc

SEQ ID NO: 194609 - DNA, 772 bp, Homo sapiens
  Payload ID: 18455
  Gene Name: triggering receptor expressed on myeloid cells 1
  ENST ID: ENST00000589614
  CDS Start-End: 11-763
cacaggaaggatgaggaagaccaggctctgggggctgctgtggatgctctttgtctcagaactccgagctgcaactaaattaactgaggaaaagtatgaactgaaagaggggcagaccctggatgtgaaatgtgactacacgctagagaagtttgccagcagccagaaagcttggcagataataagggacggagagatgcccaagaccctggcatgcacagagaggccttcaaagaattcccatccagtccaagtggggaggatcatactagaagactaccatgatcatggtttactgcgcgtccgaatggtcaaccttcaagtggaagattctggactgtatcagtgtgtgatctaccagcctcccaaggagcctcacatgctgttcgatcgcatccgcttggtggtgaccaagggtttttcagggacccctggctccaatgagaattctacccagaatgtgtataagattcctcctaccaccactaaggccttgtgcccactctataccagccccagaactgtgacccaagctccacccaagtcaactgccgatgtctccactcctgactctgaaatcaaccttacaaatgtgacagatatcatcagggaaaagagcatgacatttggcatcagaaggctggatgtggaatcccatcctctcccaccactgcacactgggcactttcggataagtcagttcttctcccaggctggaactcaatccttgcattcatgttataaaggaaaacctacgccctgaaagatggca

SEQ ID NO: 194610 - DNA, 860 bp, Homo sapiens
  Payload ID: 18456
  Gene Name: triggering receptor expressed on myeloid cells 2
  Uniprot ID: Q9NZC2
  ENST ID: ENST00000338469
  CDS Start-End: 105-764
gggcagcgcctgacatgcctgatcctctcttttctgcagttcaagggaaagacgagatcttgcacaaggcactctgcttctgcccttggctggggaagggtggcatggagcctctccggctgctcatcttactctttgtcacagagctgtccggagcccacaacaccacagtgttccagggcgtggcgggccagtccctgcaggtgtcttgcccctatgactccatgaagcactgggggaggcgcaaggcctggtgccgccagctgggagagaagggcccatgccagcgtgtggtcagcacgcacaacttgtggctgctgtccttcctgaggaggtggaatgggagcacagccatcacagacgataccctgggtggcactctcaccattacgctgcggaatctacaaccccatgatgcgggtctctaccagtgccagagcctccatggcagtgaggctgacaccctcaggaaggtcctggtggaggtgctggcagaccccctggatcaccgggatgctggagatctctggttccccggggagtctgagagcttcgaggatgcccatgtggagcacagcatctccagggctgagagacacgtgaaggaagatgatgggaggaaaagcccaggagaagtcccaccagggaccagcccagcctgcatacttgccacttggccaccaggactccttgttctgctctggcaagagactactctgcctgaacactgcttctcctggaccctggaagcagggactggttgagggagtggggaggtggtaagaacacctgacaacttctgaatattggacattttaaacacttacaaataaatccaagactgtcatatttagctggat

SEQ ID NO: 194611 - DNA, 1044 bp, Homo sapiens
  Payload ID: 18456
  Gene Name: triggering receptor expressed on myeloid cells 2
  Uniprot ID: Q9NZC2
  ENST ID: ENST00000373113
  CDS Start-End: 95-787
tgacatgcctgatcctctcttttctgcagttcaagggaaagacgagatcttgcacaaggcactctgcttctgcccttggctggggaagggtggcatggagcctctccggctgctcatcttactctttgtcacagagctgtccggagcccacaacaccacagtgttccagggcgtggcgggccagtccctgcaggtgtcttgcccctatgactccatgaagcactgggggaggcgcaaggcctggtgccgccagctgggagagaagggcccatgccagcgtgtggtcagcacgcacaacttgtggctgctgtccttcctgaggaggtggaatgggagcacagccatcacagacgataccctgggtggcactctcaccattacgctgcggaatctacaaccccatgatgcgggtctctaccagtgccagagcctccatggcagtgaggctgacaccctcaggaaggtcctggtggaggtgctggcagaccccctggatcaccgggatgctggagatctctggttccccggggagtctgagagcttcgaggatgcccatgtggagcacagcatctccaggagcctcttggaaggagaaatccccttcccacccacttccatccttctcctcctggcctgcatctttctcatcaagattctagcagccagcgccctctgggctgcagcctggcatggacagaagccagggacacatccacccagtgaactggactgtggccatgacccagggtatcagctccaaactctgccagggctgagagacacgtgaaggaagatgatgggaggaaaagcccaggagaagtcccaccagggaccagcccagcctgcatacttgccacttggccaccaggactccttgttctgctctggcaagagactactctgcctgaacactgcttctcctggaccctggaagcagggactggttgagggagtggggaggtggtaagaacacctgacaacttctgaatattggacattttaaacacttacaaataaatccaagactgtcatatttagctggat

SEQ ID NO: 194612 - DNA, 1012 bp, Homo sapiens
  Payload ID: 18456
  Gene Name: triggering receptor expressed on myeloid cells 2
  Uniprot ID: Q9NZC2
  ENST ID: ENST00000373122
  CDS Start-End: 22-690
ccttggctggggaagggtggcatggagcctctccggctgctcatcttactctttgtcacagagctgtccggagcccacaacaccacagtgttccagggcgtggcgggccagtccctgcaggtgtcttgcccctatgactccatgaagcactgggggaggcgcaaggcctggtgccgccagctgggagagaagggcccatgccagcgtgtggtcagcacgcacaacttgtggctgctgtccttcctgaggaggtggaatgggagcacagccatcacagacgataccctgggtggcactctcaccattacgctgcggaatctacaaccccatgatgcgggtctctaccagtgccagagcctccatggcagtgaggctgacaccctcaggaaggtcctggtggaggtgctggcagaccccctggatcaccgggatgctggagatctctggttccccggggagtctgagagcttcgaggatgcccatgtggagcacagcatctccaggccatctcaaggctcccatctgccttcttgtctctccaaggagcctcttggaaggagaaatccccttcccacccacttccatccttctcctcctggcctgcatctttctcatcaagattctagcagccagcgccctctgggctgcagcctggcatggacagaagccagggacacatccacccagtgaactggactgtggccatgacccagggtatcagctccaaactctgccagggctgagagacacgtgaaggaagatgatgggaggaaaagcccaggagaagtcccaccagggaccagcccagcctgcatacttgccacttggccaccaggactccttgttctgctctggcaagagactactctgcctgaacactgcttctcctggaccctggaagcagggactggttgagggagtggggaggtggtaagaacacctgacaacttctgaatattggacattttaaacacttacaaataaatccaagactgtcatatttagctggata

SEQ ID NO: 194613 - DNA, 1194 bp, Homo sapiens
  Payload ID: 18457
  Gene Name: triggering receptor expressed on myeloid cells-like 1
  Uniprot ID: Q86YW5
  ENST ID: ENST00000373127
  CDS Start-End: 50-649
tgcatcagtgcccaggcaagcccaggagttgacatttctctgcccagccatgggcctcaccctgctcttgctgctgctcctgggactagaaggtcagggcatagttggcagcctccctgaggtgctgcaggcacccgtgggaagctccattctggtgcagtgccactacaggctccaggatgtcaaagctcagaaggtgtggtgccggttcttgccggaggggtgccagcccctggtgtcctcagctgtggatcgcagagctccagcgggcaggcgtacgtttctcacagacctgggtgggggcctgctgcaggtggaaatggttaccctgcaggaagaggatgctggcgagtatggctgcatggtggatggggccagggggccccagattttgcacagagtctctctgaacatactgcccccagaggaagaagaagagacccataagattggcagtctggctgagaacgcattctcagaccctgcaggcagtgccaaccctttggaacccagccaggatgagaagagcatccccttgatctggggtgctgtgctcctggtaggtctgctggtggcagcggtggtgctgtttgctgtgatggccaagaggaaacaagaatccctcctcagtggtccaccacgtcagtgactctggaccggctgctgaattgcctttggatgtaccacacattaggcttgactcaccaccttcatttgacaataccacctacaccagcctacctcttgattccccatcaggaaaaccttcactcccagctccatcctcattgccccctctacctcctaaggtcctggtctgctccaagcctgtgacatatgccacagtaatcttcccgggagggaacaagggtggagggacctcgtgtgggccagcccagaatccacctaacaatcagactccatccagctaagctgctcatcacactttaaactcatgaggaccatccctaggggttctgtgcatccatccagccagctcatgccctaggatccttaggatatctgagcaaccagggactttaagatctaatccaatgtcctaactttactagggaaagtgacgctcagacatgactgagatgtcttggggaagacctccctgcacccaactcccccactggttcttctaccattacacactgggctaaataaaccctaataatgatgtgcaaa

SEQ ID NO: 194614 - DNA, 647 bp, Homo sapiens
  Payload ID: 18457
  Gene Name: triggering receptor expressed on myeloid cells-like 1
  Uniprot ID: Q86YW5
  ENST ID: ENST00000437044
  CDS Start-End: 45-647
cagtgcccaggcaagcccaggagttgacatttctctgcccagccatgggcctcaccctgctcttgctgctgctcctgggactagaagaggaagaagaagagacccataagattggcagtctggctgagaacgcattctcagaccctgcaggcagtgccaaccctttggaacccagccaggatgagaagagcatccccttgatctggggtgctgtgctcctggtaggtctgctggtggcagcggtggtgctgtttgctgtgatggccaagaggaaacaagggaacaggcttggtgtctgtggccgattcctgagcagcagagtttcaggcatgaatccctcctcagtggtccaccacgtcagtgactctggaccggctgctgaattgcctttggatgtaccacacattaggcttgactcaccaccttcatttgacaataccacctacaccagcctacctcttgattccccatcaggaaaaccttcactcccagctccatcctcattgccccctctacctcctaaggtcctggtctgctccaagcctgtgacatatgccacagtaatcttcccgggagggaacaagggtggagggacctcgtgtgggccagcccagaatccacctaacaatcagactccatccagctaa

SEQ ID NO: 194615 - DNA, 981 bp, Homo sapiens
  Payload ID: 18457
  Gene Name: triggering receptor expressed on myeloid cells-like 1
  Uniprot ID: Q86YW5
  ENST ID: ENST00000426005
  CDS Start-End: 45-980
cagtgcccaggcaagcccaggagttgacatttctctgcccagccatgggcctcaccctgctcttgctgctgctcctgggactagaaggtcagggcatagttggcagcctccctgaggtgctgcaggcacccgtgggaagctccattctggtgcagtgccactacaggctccaggatgtcaaagctcagaaggtgtggtgccggttcttgccggaggggtgccagcccctggtgtcctcagctgtggatcgcagagctccagcgggcaggcgtacgtttctcacagacctgggtgggggcctgctgcaggtggaaatggttaccctgcaggaagaggatgctggcgagtatggctgcatggtggatggggccagggggccccagattttgcacagagtctctctgaacatactgcccccagaggaagaagaagagacccataagattggcagtctggctgagaacgcattctcagaccctgcaggcagtgccaaccctttggaacccagccaggatgagaagagcatccccttgatctggggtgctgtgctcctggtaggtctgctggtggcagcggtggtgctgtttgctgtgatggccaagaggaaacaagggaacaggcttggtgtctgtggccgattcctgagcagcagagtttcaggcatgaatccctcctcagtggtccaccacgtcagtgactctggaccggctgctgaattgcctttggatgtaccacacattaggcttgactcaccaccttcatttgacaataccacctacaccagcctacctcttgattccccatcaggaaaaccttcactcccagctccatcctcattgccccctctacctcctaaggtcctggtctgctccaagcctgtgacatatgccacagtaatcttcccgggagggaacaagggtggagggacctcgtgtgggccagcccagaatccacctaacaatcagactccatccagctaag

SEQ ID NO: 194616 - DNA, 3302 bp, Homo sapiens
  Payload ID: 18458
  Gene Name: triggering receptor expressed on myeloid cells-like 2
  Uniprot ID: Q5T2D2
  ENST ID: ENST00000483722
  CDS Start-End: 187-1152
ataggctcaatgaatccctgcggttggctgggggcagtgggtcccacactgcctcacttccctaaatgggcagcttcacttttagaaccccgggtccttccctggcaggcccaggtggcacatcctgtgtcgggtgggccctcaccttggatctccaggcctgacactgcccagctggatggaaccatggccccagccttcctgctgctgctgctgctgtggccacagggttgcgtctcaggcccctctgctgacagtgtatacacaaaagtgaggctccttgaaggggagactctgtctgtgcagtgctcctataagggctacaaaaaccgcgtggagggcaaggtttggtgcaaaatcaggaagaagaagtgtgagcctggctttgcccgagtctgggtgaaagggccccgctacttgctgcaggacgatgcccaggccaaggtggtcaacatcaccatggtggccctcaagctccaggactcaggccgatactggtgcatgcgcaacacctctgggatcctgtaccccttgatgggcttccagctggatgtgtctccagctccccaaactgagaggaacattcctttcacacatctggacaacatcctcaagagtggaactgtcacaactggccaagcccctacctcaggccctgatgccccttttaccactggtgtgatggtgttcaccccaggactcatcaccttgcctaggctcttagcctccaccagacctgcctccaagacaggctacagcttcactgctaccagcaccaccagccagggacccaggaggaccatggggtcccagacagtgaccgcgtctcccagcaatgccagggactcctctgctggcccagaatccatctccactaagtctggggacctcagcaccagatcgcccaccacagggctctgcctcaccagcagatctctcctcaacagactaccctccatgccctccatcaggcaccaggatgtttactccactgtgcttggggtggtgctgaccctcctggtgctgatgctgatcatggtctatgggttttggaagaagagacacatggcaagctacagcatgtgcagcgatccttctacacgtgacccacctggaagaccagagccctatgtggaagtctacttgatctgaggccacttaagcatggggtggggagcttctcccagagtggccccagggggttagaggaggggtgaagattggggccagtatcgatcttatgaagctggaggacttgtgcagtgctggactcacccaggacttcccaaacccagaggctgccatcctaagcagccccacagcccagtgttctccttgggggcaggaacctggggaggggcccagagcaaagggcatcagggagaaagtcccgaggaaatgtgaccagtggtttctgctcggagctgcagaccccagggctcttggtggaggcaggggaaccctgagagtgctgtttacagagaacctcagctcccgtctgcctcagaaaccctattgggctgagctgccctccccaccagggccactgtgtcctctgcttccctccgttctgcttcagcttcccctaaggttagggaagaaagaatcgggctcacgaatgccagaggcagtgatgtcccatcctggaggagaggaaacagtgactaaaagctggggacccacagaggggttggcagcttctcttgtcgggacaggtgtcctttgctgggcctctggatggccctgccctgactggggctgctcctccctcctgtcctgggaccgcgcagagcccacgctctcactgctgcctcctgctggccgctgcctccttagaaagctgtgaccaggcagctaagagcctctgggctgcagggtcagcctctcccaagactgaagtgcagaggctggacttggggctctctcccccagcttctacacctgggctccaagtctgagttcccacaggggacccagcagcctccaggaagtccataccctggggtggctgagaccttggctctgtatggaggctgctcaccccacagacactggtggggagaccatggctcagaggaagggtggagcaaccctcctcctacccctcaggatagagagagaagacacacttgggacacagtgaagacagtaacttggaactgaccacggcctggaggactggcccaggcagggggacagggaaaatggagcccaagtagcctctggccagggacccaatgtcccgaggaatctgcctcccacccactgactcagggctcagactcagcctctattgtccagagcactggcttggcgtccagcaatgaaggctggagaatgcagcctggattcccctacacacacacacacacacacacacacacacacacacacacacacacacacacaggtgtctactgacctggagtgactggaatagcacctggggataaatgtgacaactgtgcattgaaccctgggtcagggacgttccaatggccaagagagtgacacagccaggaccctggtggacagccagaggggccacttcaggatggatgtggggagagtggaagaggcagggagtaatcctgggggacagcagggaggaggcacttcttccctatgtccaggagagggcaatagagggaagactgaggctgaagaattgacggctctggacccaggacagacagacagacagacagacagacagacagacagacacgcacacacacccatctctgtctagcaagcagcctcctaagatagctgttctccctatcatgacggtgtagccaccatcctgttgtatactaggagagaacttaacccacctgggggaaaatagctccccaagagctggcaccagtaccactgatggccctgcttcctctgagtgagatgcccaggaggaggagccctagggaagaagtcagggacagggaccaggataccactctgtcactgtgtgaccctcagcaagtcactaacccttggcctcatttttcctgtcttgtgaaagaggacaataattcctacttctcaagattgttttcaagataaaataacattagcattgtacaatgatgcaaatgcctcattaccattattccttaagttgttttccagctctaatgttgtttccaacattacatttaagaccttaggattctgtttcttgcttttgtcatatctcttcccaagtgtcatcactatatggatgttgagggcccccgatgacagtccctttggtaaggtcctcttttgaggaggggagggtacagggtggactcatctca

SEQ ID NO: 194617 - DNA, 2070 bp, Homo sapiens
  Payload ID: 18459
  Gene Name: triggering receptor expressed on myeloid cells-like 4
  Uniprot ID: Q6UXN2
  ENST ID: ENST00000341495
  CDS Start-End: 105-707
gacactgggaacctggggcagaatcagacccagcgtctgactcctcctgagagggctcccttttttctcctctcctccgctgtcagaaacagatctgggctggaatggcctggggtggggtccacacctgctgcttccacctgtgctgctgctgctcctggcctcagggtgctgtgcctgaagaacttcacaaacacccaggacagaccctcctcctgcaatgccagtactcacccaagagagggccctatcagcccaaatcctggtgtcagcagacatctccaagtcggtgtaccttacttgtcaccagctccaagccctggacagcagttcagaagtctcattacacaatctgggacaagcccaatgctggcttcttcaacatcaccatgattcagctgacacagaatgactcgggattctactggtgtggaatctacaacgcttccgaaaacatcatcactgttcttagaaatatcagcctggtggtgtctccagccccaaccacgtctcctatgtggactcttccctggctcccaacaagcacagttctgatcacttctccagaggggacctctggccatccctccatcaatggctctgagaccaggaaatcaagagcccctgcctgccttggctcaggtggccccagattcctggtcttggtgctatgtggactcctcctggccaagggcctgatgttgtgagtcctgttagtgctcctgatctgcaggtgccacaggacagcagtgacgaggtttctgattgtcccagcacagccttgtcccaggacccttgggtgcatgagccacaacatggatcctggatgaatcccagttcttcccctgcccagctattgggagctggcctaagtattgctccccacctccttgtgaggaaaggctagcgctaagcctattggagagaactttcagcccctgaactccccggtggtgacccctcacccctgcactgagcccccttagatctactgcccctgccctgactttcgccattgggaagacctggggtgggggtttctgcatccgggtcaatgcccagctcagcatcttcagctgtgcccaggctcctctccagcactctgtcgttctctgagccccacctcagcaggtctccaggatccctcacatttcccctgtttgttgcctgtggtctgccctagagtcctatgaatttcctcttgtgcttaattaaattcaacctctgaactgaaatgtgtcaggggcagctgagcaagacagcagttgtatcccctcaccttcctcccgtcccaccccagatatcctaaatgagagagaaatgacttaaaaataaatgataaaattgaaactaagaaaggctgtaatcagcagactggaagctgaggaagatctagaagtaaaagaaaaaattagatgcgttaaaatgacatgagcaggcgactcagtggcccaaaacaggacccagaacattcatccgtaaatggaatctgataatctggggcccaaattctgtttacttaacatgtgagaagattcacagcctaaaagagaaaatcaagttgaactaacaataaatgatggtgggtgaaagataaatgttttagggaacagaagaggagcacatatttatgaagcaagaataggtacagtcattttccaactaacatctagtgagactgggattcaccactcagaatgggggtccaccatgagcaacagatttgaggtaccagtgcatagcagctgaatgccagccctgtaaaagaccaccataaagagagctccatgttcttttgctcttttggggatgggacatcaaacaaaagtctcttcgtgtatatctcagctcctgccacatgatcatcacctatctgtgagaggcatcgcttttgctttgtttatttatttttttaatcctcattccctatgtccacttgccttcctctccgaggcaactactctaatgcatttggtatgtaactttaaatttgaatgtattcttgtaaaacatccagtatttttttttctgtgactatgttttcacttacataaaagaaattgtgataga

SEQ ID NO: 194618 - DNA, 768 bp, Homo sapiens
  Payload ID: 18459
  Gene Name: triggering receptor expressed on myeloid cells-like 4
  Uniprot ID: Q6UXN2
  ENST ID: ENST00000448827
  CDS Start-End: 90-692
gggcagaatcagacccagcgtctgactcctcctgagagggctcccttttttctcctctcctccgctgtcagaaacagatctgggctggaatggcctggggtggggtccacacctgctgcttccacctgtgctgctgctgctcctggcctcagggtgctgtgcctgaagaacttcacaaacacccaggacagaccctcctcctgcaatgccagtactcacccaagagagggccctatcagcccaaatcctggtgtcagcagacatctccaagtcggtgtaccttacttgtcaccagctccaagccctggacagcagttcagaagtctcattacacaatctgggacaagcccaatgctggcttcttcaacatcaccatgattcagctgacacagaatgactcgggattctactggtgtggaatctacaacgcttccgaaaacatcatcactgttcttagaaatatcagcctggtggtgtctccagccccaaccacgtctcctatgtggactcttccctggctcccaacaagcacagttctgatcacttctccagaggggacctctggccatccctccatcaatggctctgagaccaggaaatcaagagcccctgcctgccttggctcaggtggccccagattcctggtcttggtgctatgtggactcctcctggccaagggcctgatgttgtgagtcctgttagtgctcctgatctgcaggtgccacagcagtgacgaggtttctgattgtcccagcacagccttgtccc

SEQ ID NO: 194619 - DNA, 2304 bp, Homo sapiens
  Payload ID: 18459
  Gene Name: triggering receptor expressed on myeloid cells-like 4
  ENST ID: ENST00000461240
  CDS Start-End: 1-215
atgactcgggattctactggtgtggaatctacaacgcttccgaaaacatcatcactgttcttagaaatatcagcctggtggtgtctccagccccaaccacgtctcctatgtggactcttccctggctcccaacaagcacagttctgatcacttctccagaggggacctctggccatccctccatcaatggctctgagaccaggaatggcagctaagagcaaaatgaagaacaagagaaaatacattcatggtcattgaaaaataacattctagactagcagtccccaacctttatggcaccagagactggcttcgcagaagacaatttttccatggacttggaggaaatcaagagcccctgcctgccttggctcaggtggccccagattcctggtcttggtgctatgtggactcctcctggccaagggcctgatgttgtgagtcctgttagtgctcctgatctgcaggtgccacaggacagcagtgacgaggtttctgattgtcccagcacagccttgtcccaggacccttgggtgcatgagccacaacatggatcctggatgaatcccagttcttcccctgcccagctattgggagctggcctaagtattgctccccacctccttgtgaggaaaggctagcgctaagcctattggagagaactttcagcccctgaactccccggtggtgacccctcacccctgcactgagcccccttagatctactgcccctgccctgactttcgccattgggaagacctggggtgggggtttctgcatccgggtcaatgcccagctcagcatcttcagctgtgcccaggctcctctccagcactctgtcgttctctgagccccacctcagcaggtctccaggatccctcacatttcccctgtttgttgcctgtggtctgccctagagtcctatgaatttcctcttgtgcttaattaaattcaacctctgaactgaaatgtgtcaggggcagctgagcaagacagcagttgtatcccctcaccttcctcccgtcccaccccagatatcctaaatgagagagaaatgacttaaaaataaatgataaaattgaaactaagaaaggctgtaatcagcagactggaagctgaggaagatctagaagtaaaagaaaaaattagatgcgttaaaatgacatgagcaggcgactcagtggcccaaaacaggacccagaacattcatccgtaaatggaatctgataatctggggcccaaattctgtttacttaacatgtgagaagattcacagcctaaaagagaaaatcaagttgaactaacaataaatgatggtgggtgaaagataaatgttttagggaacagaagaggagcacatatttatgaagcaagaataggtacagtcattttccaactaacatctagtgagactgggattcaccactcagaatgggggtccaccatgagcaacagatttgaggtaccagtgcatagcagctgaatgccagccctgtaaaagaccaccataaagagagctccatgttcttttgctcttttggggatgggacatcaaacaaaagtctcttcgtgtatatctcagctcctgccacatgatcatcacctatctgtgagaggcatcgcttttgctttgtttatttatttttttaatcctcattccctatgtccacttgccttcctctccgaggcaactactctaatgcatttggtatgtaactttaaatttgaatgtattcttgtaaaacatccagtatttttttttctgtgactatgttttcacttacataaaagaaattgtgatagacctttttcatatgcttgtcttactccttgctgggcacatatacacagcccacttcttttcagtgcttattccattgcgtacatatcccacagtgcatcattccgaacccagggtgcatgtgcttttttgccttcacttttctatatcataaatgatgctgtgatgaataccctccttcacgttctcttgtggaatcatgtgagacttcctttaggacttatacacaggtggcatcagctgggttgtgggatctcagacatctaattaatactgccagcttgtgttgcctgaaccaagaatctagacactagcgattatgtgttttctctgagtctatgtgaagtacacagcacaacctatggaatggtattgccaattaaaaaaaaaatggaaggcaagaataaacgtagctgagtgatgctacatggggctagatatatgattatctctacttttgtgtatgcttggaaattttcataattaaaatggtacctaaaatt

SEQ ID NO: 194620 - DNA, 1698 bp, Homo sapiens
  Payload ID: 18460
  Gene Name: TRIM39-RPP21 readthrough
  ENST ID: ENST00000623385
  CDS Start-End: 143-1654
agaaacgtatgtcaaacgaggatacagtgtctggaactattggttctaagatataagtggaatgagcctggatcaggagaagtatgctgagctagagttgaaggaagcttctctttctaacaagagaaagcagagttaaattatggcagagacaagtctgttagaggctggggcctctgcagcctctacagctgcggctttggagaacttacaggtggaggcgagctgctctgtgtgcctggagtatctgaaggaacctgtcatcattgagtgtgggcacaacttctgcaaagcttgcatcacccgctggtgggaggacctagagagggacttcccttgtcctgtctgtcgaaagacatcccgctaccgcagtctccgacctaatcggcaactaggcagtatggtggaaattgccaagcagctccaggccgtcaagcggaagatccgggatgagagcctctgcccccaacaccatgaggccctcagccttttctgttatgaggaccaggaggctgtatgcttgatatgtgcaatttcccacacccaccgggcccacaccgttgtgccactggacgatgctacacaggagtacaaggaaaaactgcagaagtgtctggagcccctggaacagaagctgcaggagatcactcgctgcaagtcctctgaggagaagaagcctggtgagctcaagagactagtggaaagtcgccgacagcagatcttgagggagtttgaagagcttcataggcggctggatgaagagcagcaggtgttgctttcacgactggaagaagaggaacaggacattctgcagcgactccgagaaaatgctgctcaccttggggacaagcgccgggacctggcccacttggctgccgaggtggagggcaagtgcttacagtcaggcttcgagatgcttaaggatgtcaaaagtaccctggaaaaatgtgaaaaggtgaagaccatggaggtgacttcagtatccatagagctggaaaagaacttcagcaattttccccgacagtactttgccctaaggaaaatccttaaacagctaattgcggatgtgaccctggaccctgagacagctcatcctaacctagtcctgtcagaggatcgtaagagcgtcaagttcgtggagacaagactccgggatctccctgacacaccaaggcgtttcaccttctacccttgcgtcctggctactgagggtttcacctcaggtcgacactactgggaggtggaggccgcccattgtgtccttgcccaggaccccgagaaccaggcgctggcgaggttttactgctacactgagaggaccattgcgaagcggctcgtcttgcggcgggatccctcggtgaagaggactctctgtcgaggctgctcttccctcctcgtcccgggcctcacctgcacccagcgccagagacgctgcaggggacagcgctggaccgtacagacctgcctaacatgccagcgcagccaacgcttcctcaatgatcccgggcatttactctggggagacaggcctgaggcccagctcgggagccaagcagattccaaaccactacaacccttgccaaacacagcccactccatttcagaccgccttcctgaggagaaaatgcagactcagggttccagtaaccagtgatggattcaccccatctcccaaataaagtttacttgttttacatt

SEQ ID NO: 194621 - DNA, 3391 bp, Homo sapiens
  Payload ID: 18461
  Gene Name: TRIM6-TRIM34 readthrough
  ENST ID: ENST00000354852
  CDS Start-End: 174-2702
ctgcctttctcggaacggaacggagcagagtcgtgcgtggttgagtttagataaaagccgagtgagcgcgctctgttccttaagattagtttaaggtgccttggattgctctgaagagctttgaccacctgatattgcttacatctggaacttcttggcttctcattccccagatgtgcgggtcagagaggattctacaggcaggaaacatcttagaaatcagggttgggcaggcaggagccaggagagtagctacaatgacttcaccagtactggtggacatacgagaagaggtgacctgccctatctgcctggagctcctaacagaacccctgagcatagactgtggccacagcttctgccaagcctgcatcacaccaaatggcagggaatcagtgattggtcaagaaggggaaagaagctgccctgtgtgccagaccagctaccagccagggaacctgcggcctaatcggcatctggccaacatagtgaggcggctcagagaggtagtgttgggccctgggaagcagctgaaagcagttctttgtgcagaccatggagaaaaactgcagctcttctgtcaggaggatgggaaggtcatttgctggctttgtgagcggtctcaggagcaccgtggtcaccacacgttcctcgtggaggaggttgcccaggagtaccaggagaagtttcaggagtctctaaagaagctgaagaacgaggagcaggaagctgagaagctaacagcttttatcagagagaagaaaacatcctggaagaatcagatggagcctgagagatgcaggatccagacagagtttaatcagctgcgaaatatcctagacagagtggagcaacgggagctgaaaaagctggaacaggaagagaagaaggggctacgaattatagaagaggctgagaatgatctggtccaccagacccagtcgctgcgagagctcatctcggatctggagcgtcgatgtcaggggtcaacaatggagctgctgcaggatgtgagtgatgtcacagaaaggagtgagttctggaccctgaggaagccagaagctctccctacaaagctgagaagtatgttccgagccccagatctgaaaaggatgctgcgagtgtgtagagagctgacagatgtccaaagctactgggccatccaggggtctttaaccagaagagagaggagagcctcaggagttaggaccagaagaagccagggaagcagtgcaatggcttcaaaaatcttgcttaacgtacaagaggaggtgacctgtcccatctgcctggagctgttgacagaacccttgagtctagactgtggccacagcctctgccgagcctgcatcactgtgagcaacaaggaggcagtgaccagcatgggaggaaaaagcagctgtcctgtgtgtggtatcagttactcatttgaacatctacaggctaatcagcatctggccaacatagtggagagactcaaggaggtcaagttgagcccagacaatgggaagaagagagatctctgtgatcatcatggagagaaactcctactcttctgtaaggaggataggaaagtcatttgctggctttgtgagcggtctcaggagcaccgtggtcaccacacagtcctcacggaggaagtattcaaggaatgtcaggagaaactccaggcagtcctcaagaggctgaagaaggaagaggaggaagctgagaagctggaagctgacatcagagaagagaaaacttcctggaagtatcaggtacaaactgagagacaaaggatacaaacagaatttgatcagcttagaagcatcctaaataatgaggagcagagagagctgcaaagattggaagaagaagaaaagaagacgctggataagtttgcagaggctgaggatgagctagttcagcagaagcagttggtgagagagctcatctcagatgtggagtgtcggagtcagtggtcaacaatggagctgctgcaggacatgagtggaatcatgaaatggagtgagatctggaggctgaaaaagccaaaaatggtttccaagaaactgaagactgtattccatgctccagatctgagtaggatgctgcaaatgtttagagaactgacagctgtccggtgctactgggtggatgtcacactgaattcagtcaacctaaatttgaatcttgtcctttcagaagatcagagacaagtgatatctgtgccaatttggccttttcagtgttataattatggtgtcttgggatcccaatatttctcctctgggaaacattactgggaagtggacgtgtccaagaaaactgcctggatcctgggggtatactgtagaacatattcccgccatatgaagtatgttgttagaagatgtgcaaatcgtcaaaatctttacaccaaatacagacctctatttggctactgggttatagggttacagaataaatgtaagtatggtgtctttgaagagtctttgtcctctgatcccgaggttttgactctctccatggctgtgcctccctgccgtgttggggttttcctcgactatgaagcaggcattgtctcatttttcaatgtcacaagccatggctccctcatttacaagttctctaaatgttgcttttctcagcctgtttatccatatttcaatccttggaactgtccagctcccatgactctatgcccaccaagctcttgaattttctcatttcttcacctacaaccctttgtcttgacttatctcctgcaactgactcatctgcaacattcacaccattgcttccttgtggtttcccttctttagaacttttactcatccttgagatgtatggtgtatttggcttgagttatgagagatgcttatttattcatttactctttttcatattttcagagaaagttacctaatccctcctaaagacacagcagtatgggtataacatccttgccttcccatttatccatgtttcactttatcactgatatgaagaggcccaaagcctgttagccaccatccatgctacctaggtagtccataggaaccacccccatgaccaccaccaacatcaactaaaggttcttggagggtatgtcagtgtgttgctcaggataccccaggtacatcaaggaatcaaggagaggaaaatatgagcaatatgtgtattcagagtgaagattttatgtccagagtatttgagctcaaaccttgcctgttgttttctaatcatgatgaatactttctcagtttctttttcctgaaatataaattgggatttaagactgtacctaactattaagatcactgtgtaaaactaagtgtctctaaatgtaatgcatcgatttagtgtctggaacataataaatatttgctctcatgattgctaaaaa

SEQ ID NO: 194622 - DNA, 3782 bp, Homo sapiens
  Payload ID: 18462
  Gene Name: trimethylguanosine synthase 1
  Uniprot ID: Q96RS0
  ENST ID: ENST00000260129
  CDS Start-End: 478-3039
tgggagaccggacgcgcgcggcctccgccgctcccagtcccgccagacccgatgccgggctggagaagcgcgggggccgacgcacctcggataggcgggggcaggggcaggggcagctctcctttaccctagagcggcgacagaagctcttcgggggatcagtggccaagggggcggacagatttgcacggcggattcctccgaagcaacccgtgtgaaagaagccaagcggcggctgcagcccgggccgcgatgggggtgacaccgcccgtggtcccgccccttcccgtggcccctcggagccacttccggcggcagcgtccgggctagttcccggcgcgagcggccgcgggccagtttctatctcctcatccagggcttgcgggcgaggcctgttttaagtctccagtaaccgagcggaggcccggcaggcgcgacccgggctgcgtacgtcagagctgcctccgaagtggtaaaatgtgctgcgagaagtggagccgcgtggcggaaatgtttctcttcattgaggagcgggaggattgtaagatactgtgcctttgctccagggcatttgtggaggatcgaaaattgtacaatttgggattaaaaggctattacatcagagacagtggcaacaattcaggagaccaggcgacagaagaagaggaaggtggttattcctgtggtactgcagaatcacatgacagcaaaggcataggcctggatgaaagtgaacttgattctgaggctgaactcatgagaagtatgggattgccacttcaatttggtaggataactgcacataaggattttgaggtatctatgaatactagaaataaagttaaaataaaaaagaaaaaacatcaaaagaaatacttagatgaaattgtgcaagaatcttggagaaaagaatatgaagaagacgacattttggcttcagatgatccatcttcaattgaacagtatgagaacaccagaacatatgaacttcaaagcaaaaaagatactgagacagaaaatcctccagttgaaaacacattatctccaaagctagaaattacagagaaatgggaaaagtattggaatgaatatggaggaggactattgtggcaaagttggcaagaaaaacatccgggtcaagcactatcttctgaaccttggaactttcctgatacaaaggaagaatgggagcaacattatagtcaactttattggtattatttggaacaatttcagtattgggaagctcagggttggacttttgatgcctcgcaaagctgtgatacagatacttacacatctaaaacagaagctgatgacaagaacgatgaaaaatgcatgaaagttgacttagtatcttttccatcttcacctattatggttgataatgatagctctggtacaagtgataaggatcatagtgaaatacttgatggaattagtaacataaaactgaattcagaggaagtaacacagagccaattagattcctgtacaagtcatgatggtcatcaacagctaagtgaagttagtagcaaaagagagtgccctgcttccggccaaagtgaaccacgtaatggaggaaccaatgaggaaagcaactcatcggggaatacaaacacagacccaccagctgaggattcacagaagtcttcaggagcaaacacaagcaaagacagaccacatgccagtggtactgatggagatgaaagtgaggaagacccacctgagcataagccaagcaaactgaagaggagccatgaactggacattgatgaaaacccagcttcagactttgatgacagtggttcccttctaggattcaagtatggctcaggacaaaaatatggtggaatcccaaatttcagtcatcggcaggtcaggtatttagagaagaatgtgaagcttaagtctaagtacctagacatgcgcagacaaataaagatgaaaaacaaacacatcttctttaccaaagagtcagaaaaaccatttttcaagaaaagcaaaattctgagtaaggtagaaaaattcctcacatgggttaataaaccaatggatgaagaagcatcacaggaatcatcttctcatgacaatgtgcacgacgcttccacaagtagtgattcagaggaacaagacatgtctgttaaaaaaggtgatgacctactggagactaataatccagaacctgaaaagtgtcagagcgtatcttcagctggtgaacttgaaacagaaaactatgaaagagacagcttgctagcaactgttccagatgagcaggattgtgttactcaagaagtgccagactcccgccaggcagaaactgaagctgaagtgaaaaagaagaagaacaagaagaagaacaaaaaggtgaatggtctgcctcctgaaatagctgctgttcctgagctggcaaaatactgggcccagaggtacaggctcttctcccgttttgatgatgggattaagttggacagagagggctggttttcagttacacccgagaagattgctgaacacattgctggccgtgttagtcagtccttcaagtgtgacgttgtagtagacgcattctgtggagttggaggaaataccattcagtttgccttaacaggaatgagagtgattgccattgatatcgatcctgttaagattgcccttgctcgcaataatgcagaagtttatgggatagcagataagatagagttcatctgtggagatttcttgctgctggcttcttttttaaaggctgatgttgtgttcctcagcccaccttggggagggccagactatgccactgcagagacctttgacattagaacaatgatgtctcctgatggctttgaaattttcagactttctaagaagatcactaataatattgtttattttcttccaagaaatgctgatattgaccaggtggcatccttagctgggcctggagggcaagtggaaatagaacagaacttccttaacaacaaattgaagacaatcactgcatattttggtgacctaattcgaagaccagcctctgaaacctaactatgcagcagtgcgaggacaaaagatcatggagtggtcaaaatattcagatgagacatttggcatgtcttcctttattcactgatattttctacccatggtcttatatcaccgtatgaaatggaaacttacaggacttaaatatcagtgaaatattttgagatctttgaataattcctttagaggaattatacaaaattaatatatatgagtcctttgtaatttatttttttttgagacaggatctcacttttaccgcccaggctggagtgcagtgccatgatcacagctcactgcaggttcagccttctgagttcaagcaatccttctgtctcagtctcctcagtagctggggctttaggtgggcactgccacaccgtactaatttttgtattttttgtagagacgaggtcccaccatgttgcccaggctggtgtcaaactcctgggctcagtcagtccccccatctcaccctccccaagtgctggaattacaggcgtgagctactgtgcccagccttacggacatccttttgaattatctttttcactcatagaatatgaatacatttatttagactttttctagaactttcctgttttcatgtctttgcttcatctggaattggcttaacacccttttataaagtttgtgtttgtaaaatttccattgtgacatcaatacgcaatatattttgtaatataggagtttctatttttttattaaaatggcaatgaaagcaa

SEQ ID NO: 194623 - DNA, 3159 bp, Homo sapiens
  Payload ID: 18462
  Gene Name: trimethylguanosine synthase 1
  ENST ID: ENST00000523948
  CDS Start-End: 150-311
agttcccggcgcgagcggccgcgggccagtttctatctcctcatccagggcttgcgggcgaggcctgttttaagtctccagtaaccgagcggaggcccggcaggcgcgacccgggctgcgtacgtcagagctgcctccgaagtggtaaaatgtgctgcgagaagtggagccgcgtggcggaaatgtttctcttcattgaggagcgggaggattgtaagatactgtgcctttgctccagggcatttgtggagagaccaggcgacagaagaagaggaaggtggttattcctgtggtactgcagaatcacatgacagcaaaggcataggcctggatgaaagtgaacttgattctgaggctgaactcatgagaagtatgggattgccacttcaatttggtaggataactgcacataaggattttgaggtatctatgaatactagaaataaagttaaaataaaaaagaaaaaacatcaaaagaaatacttagatgaaattgtgcaagaatcttggagaaaagaatatgaagaagacgacattttggcttcagatgatccatcttcaattgaacagtatgagaacaccagaacatatgaacttcaaagcaaaaaagatactgagacagaaaatcctccagttgaaaacacattatctccaaagctagaaattacagagaaatgggaaaagtattggaatgaatatggaggaggactattgtggcaaagttggcaagaaaaacatccgggtcaagcactatcttctgaaccttggaactttcctgatacaaaggaagaatgggagcaacattatagtcaactttattggtattatttggaacaatttcagtattgggaagctcagggttggacttttgatgcctcgcaaagctgtgatacagatacttacacatctaaaacagaagctgatgacaagaacgatgaaaaatgcatgaaagttgacttagtatcttttccatcttcacctattatggttgataatgatagctctggtacaagtgataaggatcatagtgaaatacttgatggaattagtaacataaaactgaattcagaggaagtaacacagagccaattagattcctgtacaagtcatgatggtcatcaacagctaagtgaagttagtagcaaaagagagtgccctgcttccggccaaagtgaaccacgtaatggaggaaccaatgaggaaagcaactcatcggggaatacaaacacagacccaccagctgaggattcacagaagtcttcaggagcaaacacaagcaaagacagaccacatgccagtggtactgatggagatgaaagtgaggaagacccacctgagcataagccaagcaaactgaagaggagccatgaactggacattgatgaaaacccagcttcagactttgatgacagtggttcccttctaggattcaagtatggctcaggacaaaaatatggtggaatcccaaatttcagtcatcggcaggtcaggtatttagagaagaatgtgaagcttaagtctaagtacctagacatgcgcagacaaataaagatgaaaaacaaacacatcttctttaccaaagagtcagaaaaaccatttttcaagaaaagcaaaattctgagtaaggtagaaaaattcctcacatgggttaataaaccaatggatgaagaagcatcacaggaatcatcttctcatgacaatgtgcacgacgcttccacaagtagtgattcagaggaacaagacatgtctgttaaaaaaggtgatgacctactggagactaataatccagaacctgaaaagtgtcagagcgtatcttcagctggtgaacttgaaacagaaaactatgaaagagacagcttgctagcaactgttccagatgagcaggattgtgttactcaagaagtgccagactcccgccaggcagaaactgaagctgaagtgaaaaagaagaagaacaagaagaagaacaaaaaggtgaatggtctgcctcctgaaatagctgctgttcctgagctggcaaaatactgggcccagaggtacaggctcttctcccgttttgatgatgggattaagttggacagagagggctggttttcagttacacccgagaagattgctgaacacattgctggccgtgttagtcagtccttcaagtgtgacgttgtagtagacgcattctgtggagttggaggaaataccattcagtttgccttaacaggaatgagagactttctaagaagatcactaataatattgtttattttcttccaagaaatgctgatattgaccaggtggcatccttagctgggcctggagggcaagtggaaatagaacagaacttccttaacaacaaattgaagacaatcactgcatattttggtgacctaattcgaagaccagcctctgaaacctaactatgcagcagtgcgaggacaaaagatcatggagtggtcaaaatattcagatgagacatttggcatgtcttcctttattcactgatattttctacccatggtcttatatcaccgtatgaaatggaaacttacaggacttaaatatcagtgaaatattttgagatctttgaataattcctttagaggaattatacaaaattaatatatatgagtcctttgtaatttatttttttttgagacaggatctcacttttaccgcccaggctggagtgcagtgccatgatcacagctcactgcaggttcagccttctgagttcaagcaatccttctgtctcagtctcctcagtagctggggctttaggtgggcactgccacaccgtactaatttttgtattttttgtagagacgaggtcccaccatgttgcccaggctggtgtcaaactcctgggctcagtcagtccccccatctcaccctccccaagtgctggaattacaggcgtgagctactgtgcccagccttacggacatccttttgaattatctttttcactcatagaatatgaatacatttatttagactttttctagaactttcctgttttcatgtctttgcttcatctggaattggcttaacacccttttataaagtttgtgtttgtaaaatttccattgtgacatcaatacgcaatatattttgtaatataggagtttctatttttttattaaaatggcaatgaaagcaaga

SEQ ID NO: 194624 - DNA, 2832 bp, Homo sapiens
  Payload ID: 18463
  Gene Name: trimethyllysine hydroxylase, epsilon
  Uniprot ID: Q9NVH6
  ENST ID: ENST00000334398
  CDS Start-End: 147-1412
ccgagcgggctgggggaggggagcgtggggccgacagttttgggggtgaaaaggcaaaaggcgggtgaaaggctgcctcccgagactctccttgcttggaattctgcccactctgcggagttagcagtcacgacctccagcacaggatgtggtaccacagattgtcccacctacacagcaggcttcaggacttgctgaagggaggagtcatatatccggcccttccacagcccaacttcaaaagcttacttcctttagctgtccattggcaccatacagcctccaagtctctgacttgtgcttggcagcaacatgaagatcattttgagctgaaatatgctaataccgtgatgcgctttgattacgtctggcttcgagaccactgccgctcagcatcgtgctacaactctaagactcaccagcgcagcctggatactgccagtgtggatttatgtatcaagccaaagaccattcgtctggatgagaccacactctttttcacttggccagatggtcatgtgactaaatatgatttgaattggctggtgaaaaacagctatgaagggcagaaacaaaaagtcatccagcctagaatactatggaatgctgaaatctaccagcaagcccaagttccatcggtagattgccagagcttcttagaaaccaacgagggactgaagaagtttctgcaaaactttctgctctatggaattgcattcgtagaaaatgtccctcccactcaagagcacacagagaagttggcagaaaggatcagcttaatcagagaaaccatttatgggaggatgtggtatttcacttcagacttctccagaggtgacactgcgtacaccaagctagctctggatcggcacactgacactacctattttcaagagccctgtggcattcaagtgtttcattgtcttaaacatgaaggaactggtggcaggacactgctagtagatggattctatgcagcagaacaggtacttcaaaaggcacctgaggaatttgaactcctcagtaaagtgccattgaagcatgaatatattgaagatgttggagaatgtcacaaccacatgattgggattgggccagtcttaaatatctacccatggaataaagagctgtatttgatcaggtacaacaactatgaccgggctgtcatcaataccgttccttatgatgtcgtccatcgctggtatacagcacaccggactctaacgatagagttgaggagacctgagaatgagttttgggtcaaactaaagcctggcagggtcctatttatagacaactggcgtgtcctacatggcagggaatgcttcactggctaccgccaactgtgtggctgctatttaacaagagatgatgtattaaacactgctcgcctcttggggcttcaggcttaaaattgacagcatctggattatgaatacacctggcaccctggctaccagaatttcatatgggcagaataatattgtgtcaaactctacttcagattgtctccttatcccatcccacaaaacagaatctgtccgtttctctagtaagggagacttgttggagaggcgggactctgagttatctaatgtcagacatctagtggggcagctctcttcctcatgttataacatggatccacttgtttgatttaaaccttttaatataattttggtcagtctccttcagaaatataatctccatattgataggaaagcaataattgccatgaggtaacgatttttttcccaagtagatcagttagaaagaaatgcattctagaaataacaaaaatcctgataaagcaacaatttgcaaaatgtttggtcttaggacaccttaacactcttaaaagttattgaaggccccaaggagttcttgggtgtgggttctatctattgatactaattattttaggtattaagactgagaaatatttaaagctcaagaagaacacagaagcacacatccctcagctatgagagagatgacataaccatatgtcatgtagcctctggaaaagtcctctgtatcctcatgagataacgagagggggaaaaaaagctactactgcctttgtaacttccacttagcctactacagggctatgcacatcttagtttccaaaagtctgcttaatttcaaaagaaaaatgcctaattgaatgtaactcatcttggtgttattatacaaaataatttttaatctgcagacccacgaaaagggtctcagggactcctccaggggtcttcagaccatactttgagaacccatgggctagcgactaccttgagacagtcctttacctaggcctgtggattaaagggtttagctgaaaccctagattcttctctgtagtctaatagaactccaaacattgtaagaattgcttggtagcataagctcagggataaggtgggaattgagttcaaatatagtgttttatcttccacacaaatcatctctataggagttaaattaggaagtcacaacagcgcctgttgaacaaactcatcagtgtggtaatcctatgagggataattgcagaaaggttttagagacttgtgaggttccatatgataattctttacacctccccccccaagagaaagtacacagggctattctgtaatattgttcagggaaatcagcatgatagatgctgtgcctccagagagttctctggagattactacccaaatgtgtattttggcaatttggtggtatttaggatgtaatatgttttcctccatttctgctaattttctctctctctctctcataacatactatacatgctaattgccaagatttgaatgagtcaaa

SEQ ID NO: 194625 - DNA, 1248 bp, Homo sapiens
  Payload ID: 18463
  Gene Name: trimethyllysine hydroxylase, epsilon
  Uniprot ID: Q9NVH6
  ENST ID: ENST00000369439
  CDS Start-End: 88-1218
ggcgggtgaaaggctgcctcccgagactctccttgcttggaattctgcccactctgcggagttagcagtcacgacctccagcacaggatgtggtaccacagattgtcccacctacacagcaggcttcaggacttgctgaagggaggagtcatatatccggcccttccacagcccaacttcaaaagcttacttcctttagctgtccattggcaccatacagcctccaagtctctgacttgtgcttggcagcaacatgaagatcattttgagctgaaatatgctaataccgtgatgcgctttgattacgtctggcttcgagaccactgccgctcagcatcgtgctacaactctaagactcaccagcgcagcctggatactgccagtgtggatttatgtatcaagccaaagaccattcgtctggatgagaccacactctttttcacttggccagatggtcatgtgactaaatatgatttgaattggctggtgaaaaacagctatgaagggcagaaacaaaaagtcatccagcctagaatactatggaatgctgaaatctaccagcaagcccaagttccatcggtagattgccagagcttcttagaaaccaacgagggactgaagaagtttctgcaaaactttctgctctatggaattgcattcgtagaaaatgtccctcccactcaagagcacacagagaagttggcagaaaggatcagcttaatcagagaaaccatttatgggaggatgtggtatttcacttcagacttctccagaggtgacactgcgtacaccaagctagctctggatcggcacactgacactacctattttcaagagccctgtggcattcaagtgtttcattgtcttaaacatgaaggaactggtggcaggacactgctagtagatggattctatgcagcagaacaggtacttcaaaaggcacctgaggaatttgaactcctcagtaaagtgccattgaagcatgaatatattgaagatgttggagaatgtcacaaccacatgattgggattgggccagtcttaaatatctacccatggaataaagagctgtatttgatcagattattcaaagaaaaacaaaacacggtcaacaggcagtggaactcctcactccaatgtgatattcctgagagaatattgacttatcgtcacttcgtctctgggacaagtattgaacataggggaagccttatataaaattgttcaataaacaaaagatgtctttaa

SEQ ID NO: 194626 - DNA, 1220 bp, Homo sapiens
  Payload ID: 18464
  Gene Name: trinucleotide repeat containing 18
  ENST ID: ENST00000328270
  CDS Start-End: 1-1220
ataccgcgtggtggtggagggtgagcggggcaaccggccccacatctactgtctggagcagttgctgcaggaggcgatcatcgatgtgaggccagcctccactcgcttcttgccacaagggaccaggattgcagcctactggagccagcagtaccgctgtctctacccaggcactgtggtccgagggttactggacctggaggacgatggggacttgatcaccgtggagtttgacgacggagacacgggcaggatccccctctcacatatccgcctcctgccccctgactataagatacagtgtgctgagccgtccccggcccttctggtgccaagtgccaagcgccgcagccggaagaccagcaaagacactggggagggcaaagatggtggcacggctgggtcggaggagccaggagccaaggcccgtgggcgtgggcggaaacccagcgccaaggccaagggtgacagagccgctaccctggaggaggggaacccaacagacgaggtccccagtacccccttagccctggagccgagcagcaccccaggttccaagaagagccccccagagcctgtggacaagcgagccaaggcccccaaggcgcgcccggcaccgccgcagcccagtcccgcaccacccgccttcaccagctgcccagcacccgagccatttgcagagctgccagctcctgccacctccctggccccagcacccctcatcaccatgcctgccacacgccccaagcccaagaaggcgcgggcagccgaggagtcgggtgccaagggccctcggaggccgggggaggaggccgagctgcttgtcaaactggaccacgagggtgtcacgtcacccaaaagcaagaaggctaaagaggccctgctgctccgggaggatccgggggcggggggctggcaggagcccaagagcctcctgagcctgggcagctatccccccgcggccggcagcagcgagcccaaggcaccctggcccaaggccaccgacggggacctcgcccaggagcccgggccggggctcacgttcgaggactctgggaaccccaagagcccagacaaggcccaggctgagcaggacggggccgaagagtccgagagcagcagcagcagcagtagtggcagcagtagcagcagcagcagcagcagcagcagcggctcggagacagaaggggaggaggaaggcgacaagaacggggacgggg

SEQ ID NO: 194627 - DNA, 1459 bp, Homo sapiens
  Payload ID: 18464
  Gene Name: trinucleotide repeat containing 18
  ENST ID: ENST00000399434
  CDS Start-End: 160-552
cgctgagtccgcagcgcggggcgaaagagcgggcttctcttgttttaattaaaatcttatcactgcagttgctcttcgaggcagcattggaaggatttctgcccctccaagcttcctttccagggcgaggccttcttgggcagctttgtggccagcgggatggggccctcggcctcgtcccatgggagcccagtgccactgccctctgacctgtctttccgctccccaacccctagcaacctgcccatggtgcagctgtgggccgcccacgcccatgaaggcttctcccacctgcccagtgggctgtacccatcctacctccacctgaaccacctggagccccccagcagtgggagccccctcctcagccagctgggtcagcccagcattttcgatacccagaaaggtcaggggccaggaggaggtaagactggagtccggggttgggggtggcacaggggccttctgagaggcttctggggcctttggcagcatccaggtagcccccagctctgtccaggatgctggctttttttttttttttttttttgagacagggtctcactatgttgcccaggctggagtgcagtggtgcgatcataggtcactgcagcctcaaactcccaaatgatgcacctgactcagccccccaagtagctgggactgcagacacaccccaccacagccagctgactttttaacttttctgtagaggtggagtcttgctgtgttgcccaggatggtttcaaactcctggcctcaagcaatcctcctacctcggctttccaaagtgctgggattacagatgtgagccattgtggcctaagatgcttttttgagacctgagtccctaagaccccccacaggctccttgggcccacccacagccctgggtgccttctggtcacactgtcctcttaggggccctgctaggccttccgggcaactttgaaaacaaaccctggtctctccttttacagatgaggaaactgaggcttgggaagggtagatttaaacttggttgtaggtatttccagagcctgcgctctctagggctgggacgcccatttcttcttgccctggggggtgccttgccttggtgtgaaacctcggggctccctgcaccgaaaccgtttaatttccaagaaaaaacactgggtcgagtgcggctcaagcctgtaatcccagcactttgggtggccgagacgggtggatcacctgaggtcaagagttcaagaccagcctgacgaacatggtgaaaccccacctgtattaaaaatacaataattagccgtgcgtggtggggtgcgcctgtaatcccagctaccggagaggctgaggcaggagaatcgcttgaacccaggaggtggaggttgcagtgagccaaggttgcgccactgtactccagcctgggtgaggagagcgagactctttctgaaaaaaaaaaccaaaaccaaaa

SEQ ID NO: 194628 - DNA, 10572 bp, Homo sapiens
  Payload ID: 18464
  Gene Name: trinucleotide repeat containing 18
  ENST ID: ENST00000399537
  CDS Start-End: 350-9256
ggccgcgggatggcgggcagcaggggcgcctagctgcgccgggagccggggccgccgccggagtcgttgtcgccggagcctggagccgtgaacccagccgcgccagacgccgtgtgcgccgcctcgcgcagctccgcctggccgcccggaggggccccaccgccggccgcctgtgcgccccgggccgcgggcccgccgccgagcgcaagccccgctggccgccgccatgcacgccgcggagcccccgccgcccgaggactctgggactacgccgaggccgaacttttaggtcccactgagctaggcctgcgggccgggtggggggctgatcgcggcactcccgcggaggatggatggccgagacttcgggccccagcggtccgtgcacggtcccccgccgccgctgctgtccggcctggccatggacagccaccgcgtgggcgcggccactgccggacgcttgcccgcctcgggcttgcccggcccgctgccgcccgggaagtacatggccggcctgaatctccatccgcacccgggcgaggccttcttgggcagctttgtggccagcgggatggggccctcggcctcgtcccatgggagcccagtgccactgccctctgacctgtctttccgctccccaacccctagcaacctgcccatggtgcagctgtgggccgcccacgcccatgaaggcttctcccacctgcccagtgggctgtacccatcctacctccacctgaaccacctggagccccccagcagtgggagccccctcctcagccagctgggtcagcccagcattttcgatacccagaaaggtcaggggccaggaggagacggtttctacctgcccaccgcgggggctccgggctccctgcactctcacgcgccctcggcccggacccctggcggcggccactcctcgggcgccccggccaaaggctcgtcgtcgcgggacggtccagccaaggagcgggcgggccgcggcggggagccgcctccgcttttcggcaagaaggacccgcgcgcccggggcgaggaggcctcggggccacggggcgtggtggacctgacccaggaggcgcgcgccgagggccgccaggaccgggggcccccgcgcctggctgagcgcctgtcgcccttcctggctgagtccaagaccaagaatgcggcgctgcagccgtcggtactgaccatgtgcaacggcggcgccggggacgtggggctgcccgcgctggtggccgaagcggggcgcgggggtgccaaggaggctgcccggcaggacgagggcgcgcggctgctgcggcgcacggagaccctgctccctgggccgcgcccctgcccctcaccgctgcccccgccgcccgcgccccccaaggggcctcctgcaccccccgcggccacccccgccggcgtctacaccgtcttccgcgagcagggccgtgagcaccgcgtggtggcgcccaccttcgtgccttccgtggaggccttcgacgagcgcccggggcccatccagatcgcatcccaggcgcgcgatgcccgggcccgcgagcgcgaggctggcaggccaggggtcctgcaggcgccccccggctccccgcggcctctggaccggcccgagggcctgcgcgagaagaactcggtcatccgctcgctcaagcggccgccccccgcggatgcccccacggtgcgggccacacgcgcctccccggacccccgcgcctacgtgcctgccaaggagctgctcaagcccgaggcggacccgaggccctgcgagcgtgcgccccgcggcccagccggtcctgcagcccaacaggccgccaagctcttcggcctggagcccgggcgccccccgcccaccggccctgagcataaatggaaacccttcgagctgggcaacttcgccgccacgcagatggccgtgctggccgcgcagcaccaccacagccgcgccgaagaggaggccgccgtggtcgctgcctcctcctccaagaaggcctacctggaccctggggctgtgctgccccgctcggcggccacctgcggccggccggtcgctgacatgcactctgcggcccacgggtctggagaggcctcggccatgcagagccttataaagtacagtggcagctttgcccgggacgccgtggccgtgcgccctggtggctgtggcaagaagagcccctttggaggtttgggcaccatgaaacccgagcctgcgcccacctctgcgggtgcctcccgagcccaggcccgtctcccacactccggaggccctgcagcgggcggcggccggcagctgaagcgggaccccgagaggcccgagagcgccaaagctttcgggcgcgagggctctggtgcccagggtgaggcagaagtgcgacacccgcctgtgggcattgcagtggctgtggcccggcagaaggacagtggcggcagtggccggctggggcctgggctggtagaccaggagcgctctctgtcgctgagtaacgtcaaagggcacggccgagcagatgaggactgtgtggacgaccgggccagacaccgggaggaacggctgctcggggcacggctggaccgggatcaggagaagctgctcagagagagtaaggagctggctgacctggcccgcctgcaccctaccagctgtgctcctaacggcctgaaccccaacctcatggtgacggggggcccggcgctggcgggctcaggtcgctggtctgccgaccccgcagcccatctggccacgcacccctggttgccccgctcgggcaacgcatccatgtggctcgctggacacccctacggcttgggtcccccatctctgcaccagggcatggcccctgcgttcccacctggcctggggggctccctcccgtcagcctaccagtttgtcagggacccccaatcgggccagctggtggtcattcccagtgatcaccttcctcactttgcggagctgatggagcgggccaccgtaccgcccctctggcccgccctgtacccgccgggccgcagccccctgcaccacgcccagcagctgcagctcttctcacagcagcacttcctgcggcagcaggagttcctgtacctgcagcagcaggcggcccaggccttggaactgcagaggagcgcccagctcgtgcaggagcggttgaaggcgcaggagcaccgggcggagatggaagagaaggggagcaagcggggcctggaggctgcgggcaaggctggcctggccaccgccggccccgggctgctgccgcggaagccccctggcctggccgccggccccgcgggcacctacggcaaggccgtgagcccgccaccatcaccccgcgcatcccctgtggctgccctgaaggccaaggtcatccagaagctggaggacgtgtccaagccacccgcctacgcctaccccgccacccccagctcccaccccaccagcccgccgcccgcctccccaccgcccaccccgggtatcacccgcaaggaggaggctcccgagaatgtggtcgagaagaaagacttggagttggagaaggaagcccccagccccttccaggccctgttctcagatatcccgcccaggtacccgttccaagccctgccaccgcactacgggaggccctaccctttcctgctgcagcccacggccgccgccgacgcggacggcttggcccctgatgtgccgctcccggctgatgggcccgagcgcctggcactctcacccgaagacaagcccatccgcttgtccccctccaagatcacagagccgctgcgggagggcccggaggaagaaccgctggctgagcgggaggtgaaggcagaggtggaggacatggacgagggccccacagagctgccgcctctggagtcgccgctgccactgcccgccgcggaagccatggctacccccagccctgcagggggttgtggaggtggcctgttggaggcccaggcgctgagtgccaccgggcagagctgcgcagagccctctgagtgtccagactttgtggaggggcctgaaccacgggtggattccccgggccggacagaaccctgcaccgccgccctggacctgggggtgcagctgacacccgagacactggtggaggccaaggaggagccggtggaggtgcctgtggcggtgcccgtggtggaggcagtgcccgaggaaggcctggcgcaggtggcaccgagcgagtcccagcccaccctagaaatgtcagactgtgacgtgcccgccggggagggacagtgcccgagcctggagccccaagaggccgtgcctgtactcggcagcacctgcttcctggaagaggcaagctctgaccagttcctgcccagtctggaggacccactggctggcatgaacgccctggcggcagctgcggagctgccccaggccaggcctctgccctccccgggtgctgctggagcccaggccttggagaagctggaagcagccgagagccttgtcttggagcagagcttcctgcatggcatcaccctgctaagtgagatcgcagagctggagctggagaggaggagccaagagatgggaggtgcggagcgggccctggtggcgcggccctccctggagagtctgctggcagctggcagccacatgctgagggaggtgctggatgggcccgtggtggacccactcaagaacctgcggctcccgcgggagctgaagcccaacaagaagtacagctggatgcgcaagaaggaggagcggatgtatgccatgaagtcctccctggaggacatggacgccctggagctggacttccggatgcggctggccgaggtgcagcgccagtacaaggagaagcagcgtgagctggtgaagctgcagcgccgccgggactccgaggacaggcgcgaggaaccccatagaagcttggcacgcagaggccctggcaggccgcggaaacggacccacgccccgagcgccctgtcgcccccccgcaagagagggaagagcggccacagtagcggaaagctgagcagcaagtctctgctgacatcagatgattatgagctgggagcagggataagaaagagacacaaggggtctgaggaggaacatgatgccctcatcggaatggggaaagccagggggaggaaccagacttgggatgaacatgaggcctcgtcggacttcatcagtcagctaaagattaagaagaagaagatggccagcgaccaggagcagttggcaagcaagctcgacaaggccctctccctcaccaagcaggacaagttgaagtcgcccttcaagttttcggacagtgctggggggaaatcgaaaactagcgggggctgcggcaggtacttgactccttacgacagcctgctggggaagaacaggaaggcgctggccaagggcctcggcctgtctctgaaatcctccagagaaggtaaacacaaaagggcagccaaaaccaggaagatggaggtggggttcaaggccagaggccagcccaagtcggcccattccccgtttgcctcggaagtgagcagctactcttacaatacggactcagaggaagacgaagaattcctgaaggacgagtggcccgcccaaggcccctccagctccaaactgacgccttccctcctgtgtagcatggtggcaaagaacagcaaggcagctggtggccccaagctgaccaagaggggcctggcggccccccggactctgaaacccaagccggccaccagcaggaagcagccgttttgtctgctgcttcgagaggccgaggcgcgttcctccttcagcgactcttcggaggaatcgtttgaccaagatgagagctcggaggaggaggacgaggaggaggagctcgaggaggaggacgaggccagcggtggtggctacaggctgggtgcccgggagcgggccctgtcaccgggcctggaggagagtgggctgggcctgctggcacgcttcgccgccagcgccctccccagccccacggtgggtccatccctgtctgtggtacagctggaggccaagcagaaggcccggaagaaagaggagcggcagagcctgctgggcacagagttcgagtacaccgactcagagagcgaggtcaaggtgcgcaagcggtcgcctgcggggctgctgcggcccaagaaggggctgggggagccgggaccctccctggccgcacccacgcctggcgcccgcggtcccgaccccagcagcccagacaaggccaagctggcggtggagaaggggcgcaaggcccggaagctgcggggccccaaggagcctggcttcgaggcggggcccgaggccagcgacgacgacctgtggacgcggcgccgcagcgagcgcatcttcctgcacgacgcctcggctgctgcacctgcgcccgtcagcaccgcgcccgccaccaagaccagccgctgcgccaagggcggccccctgagcccgcgcaaggacgccgggcgtgcaaaggacaggaaggaccccaggaagaagaagaaagggaaagaggctgggccaggagctgggctgccgccgccccgagctcctgccttgccctctgaggccagggctcctcacgccagctccctgaccgctgccaaaaggagcaaagccaaggccaaagggaaggaggtgaagaaggagaaccgcggcaaggggggtgccgtgagcaagctgatggagagcatggcagccgaggaggactttgaacccaaccaagactcgagcttctctgaggacgagcacctgccgcgtggcggggctgtggagcggccgctgaccccggcccctcgctcctgcatcatcgacaaggatgagctgaaggacggcctgcgtgtgctcatccccatggatgacaagctgctgtacgccgggcacgtgcagaccgtgcactcgccagacatataccgcgtggtggtggagggtgagcggggcaaccggccccacatctactgtctggagcagttgctgcaggaggcgatcatcgatgtgaggccagcctccactcgcttcttgccacaagggaccaggattgcagcctactggagccagcagtaccgctgtctctacccaggcactgtggtccgagggttactggacctggaggacgatggggacttgatcaccgtggagtttgacgacggagacacgggcaggatccccctctcacatatccgcctcctgccccctgactataagatacagtgtgctgagccgtccccggcccttctggtgccaagtgccaagcgccgcagccggaagaccagcaaagacactggggagggcaaagatggtggcacggctgggtcggaggagccaggagccaaggcccgtgggcgtgggcggaaacccagcgccaaggccaagggtggtagagccgctaccctggaggaggggaacccaacagacgaggtccccagtacccccttagccctggagccgagcagcaccccaggttccaagaagagccccccagagcctgtggacaagcgagccaaggcccccaaggcgcgcccggcaccgccgcagcccagtcccgcaccacccgccttcaccagctgcccagcacccgagccatttgcagagctgccagctcctgccacctccctggccccagcacccctcatcaccatgcctgccacacgccccaagcccaagaaggcgcgggcagccgaggagtcgggtgccaagggccctcggaggccgggggaggaggccgagctgcttgtcaaactggaccacgagggtgtcacgtcacccaaaagcaagaaggctaaagaggccctgctgctccgggaggatccgggggcggggggctggcaggagcccaagagcctcctgagcctgggcagctatccccccgcggccggcagcagcgagcccaaggcaccctggcccaaggccaccgacggggacctcgcccaggagcccgggccggggctcacgttcgaggactctgggaaccccaagagcccagacaaggcccaggctgagcaggacggggccgaagagtccgagagcagcagcagcagcagtagtggcagcagtagcagcagcagcagcagcagcagcagcggctcggagacagaaggggaggaggaaggcgacaagaacggggacgggggctgcggcaccgggggccgtaactgcagcgctgccagctccagggcggcctcaccggcctcctcctcctcctcctcatcctcctcctcctcctcctcctcctcctcatcctcctcttcctcctcctcctcttcctcctcctcctcttcctcttcgtcttcctcctcttcctcctcctcctcttcctcgtcctcatcctcctcctcctcctcctcttcctcctcttcttcctccaccacagacgaggactcttcctgcagctcggacgatgaggcagcccccgcccccacggctggcccttccgcgcaggcggcgctccccaccaaggccaccaagcaggccggcaaggcgcggccctcggcccactccccaggcaagaagacgcccgcgccccagccccaggcgcctcctccgcagcccacacagcctctgcagcccaaggctcaggccggggccaagagccgacccaagaagagagagggcgtccacctccccaccaccaaggagctggccaagcggcagcgcctgccgtccgtggagaaccggcccaagatcgccgccttcctgccagcccggcagctctggaagtggttcggcaagcccacccagcggcgtggcatgaagggcaaggcccgcaagctcttctacaaggccatcgtgcgcggcaaggagatgatccgtatcggggactgtgccgtgttcctctctgccggccgccccaacctgccctacatcggccgcatccagagcatgtgggagtcgtggggcaacaacatggtggtccgcgtcaagtggttctaccaccccgaggagaccagcccgggcaagcagttccaccagggccagcactgggaccagaagtccagccgcagcctcccggcggccctgcgggtctccagccagaggaaggacttcatggagcgcgcgctataccagtcctcgcatgtggacgaaaatgacgtgcagacggtgtcgcacaagtgcctggtggtgggcctggagcagtatgagcagatgctgaagaccaagaagtaccaggacagcgagggcctgtactacctcgcgggcacctacgagcccaccacgggcatgatcttctccacggacggcgtgcccgtgctctgctgagcccgccgggccctgcgggccacctgtgccccgagggcggccagggacccatctccatcactgccatggcgcggagaccacgtgcgttgtgtgcatgcgagcgctcctgcaggcgtgtgcatggggccaggtgtgcacgtggatgcccgggtgagtgtgtgtgcatgcacgtgtgtgcacgcatgtgcacatgcctccagccccaccttccaacccctcagtgcccccaggacaggggcccctcttagctatcagggtatggccggaccggcccttcctgcccagcacgttgcaagcacttggccaggccggccctccaggctgctgctgcgtgggggcccgggtgcccccaggtccatgcagactggggattcggtggggaggggcgcttctaaggaaccaaactgacgctcactctgggcttcccaagcacccttagcatggagcccaccccaaggcctcccaccgtgcatgggacagggcagcccgatgccagctggcctacctgactgtgccaggggccctgcccccaccctctcaggatggcctagacttggggaacagagccgggtggggttgcagcccggagtgtctgtcaaaggcaccaggtggagagggcccggcacaggcccaccctggtccaaaccctcacactacagaaaaccccaatggtgctgaaactgtcgcccggccacgcctggcccctccccacccaggagggaggtggcacttcttaacctgtacagttttattgtaccaagagactcgccccgcccctgtatcataagcctttaaatggagtcaactttttaattatatatataaagataaatatatataaatatatatataaactttttaaaactgtgaaaaatagctatgaaattataaaaaaaaacattctgacgtgcagaatattattttttatttcctgttagattatagtgtctagcaccggcttcaccggcctcccagtccccagcacaccccccgcccaccccaccaagtgtactgtactcaccccccaggatagagaagtgtttgttagggagagaagagggagaggcaggagccggcccaagcccagggtccctgcttgggccccagaaagcacttaaccaggccccaagccttcaagggaaaccaaggcctcaaccagacaatcttgagggaaggaaaagccagactttgggtttgttttttgggggaattattggtttttttttttatgtttcttttggaattttgtttgttggcaaattctgtgtgatcttttttcataaaaaaaaagaaaagatttaattggaaaaataaaa

SEQ ID NO: 194629 - DNA, 10562 bp, Homo sapiens
  Payload ID: 18464
  Gene Name: trinucleotide repeat containing 18
  Uniprot ID: O15417
  ENST ID: ENST00000430969
  CDS Start-End: 350-9256
ggccgcgggatggcgggcagcaggggcgcctagctgcgccgggagccggggccgccgccggagtcgttgtcgccggagcctggagccgtgaacccagccgcgccagacgccgtgtgcgccgcctcgcgcagctccgcctggccgcccggaggggccccaccgccggccgcctgtgcgccccgggccgcgggcccgccgccgagcgcaagccccgctggccgccgccatgcacgccgcggagcccccgccgcccgaggactctgggactacgccgaggccgaacttttaggtcccactgagctaggcctgcgggccgggtggggggctgatcgcggcactcccgcggaggatggatggccgagacttcgggccccagcggtccgtgcacggtcccccgccgccgctgctgtccggcctggccatggacagccaccgcgtgggcgcggccactgccggacgcttgcccgcctcgggcttgcccggcccgctgccgcccgggaagtacatggccggcctgaatctccatccgcacccgggcgaggccttcttgggcagctttgtggccagcgggatggggccctcggcctcgtcccatgggagcccagtgccactgccctctgacctgtctttccgctccccaacccctagcaacctgcccatggtgcagctgtgggccgcccacgcccatgaaggcttctcccacctgcccagtgggctgtacccatcctacctccacctgaaccacctggagccccccagcagtgggagccccctcctcagccagctgggtcagcccagcattttcgatacccagaaaggtcaggggccaggaggagacggtttctacctgcccaccgcgggggctccgggctccctgcactctcacgcgccctcggcccggacccctggcggcggccactcctcgggcgccccggccaaaggctcgtcgtcgcgggacggtccagccaaggagcgggcgggccgcggcggggagccgcctccgcttttcggcaagaaggacccgcgcgcccggggcgaggaggcctcggggccacggggcgtggtggacctgacccaggaggcgcgcgccgagggccgccaggaccgggggcccccgcgcctggctgagcgcctgtcgcccttcctggctgagtccaagaccaagaatgcggcgctgcagccgtcggtactgaccatgtgcaacggcggcgccggggacgtggggctgcccgcgctggtggccgaagcggggcgcgggggtgccaaggaggctgcccggcaggacgagggcgcgcggctgctgcggcgcacggagaccctgctccctgggccgcgcccctgcccctcaccgctgcccccgccgcccgcgccccccaaggggcctcctgcaccccccgcggccacccccgccggcgtctacaccgtcttccgcgagcagggccgtgagcaccgcgtggtggcgcccaccttcgtgccttccgtggaggccttcgacgagcgcccggggcccatccagatcgcatcccaggcgcgcgatgcccgggcccgcgagcgcgaggctggcaggccaggggtcctgcaggcgccccccggctccccgcggcctctggaccggcccgagggcctgcgcgagaagaactcggtcatccgctcgctcaagcggccgccccccgcggatgcccccacggtgcgggccacacgcgcctccccggacccccgcgcctacgtgcctgccaaggagctgctcaagcccgaggcggacccgaggccctgcgagcgtgcgccccgcggcccagccggtcctgcagcccaacaggccgccaagctcttcggcctggagcccgggcgccccccgcccaccggccctgagcataaatggaaacccttcgagctgggcaacttcgccgccacgcagatggccgtgctggccgcgcagcaccaccacagccgcgccgaagaggaggccgccgtggtcgctgcctcctcctccaagaaggcctacctggaccctggggctgtgctgccccgctcggcggccacctgcggccggccggtcgctgacatgcactctgcggcccacgggtctggagaggcctcggccatgcagagccttataaagtacagtggcagctttgcccgggacgccgtggccgtgcgccctggtggctgtggcaagaagagcccctttggaggtttgggcaccatgaaacccgagcctgcgcccacctctgcgggtgcctcccgagcccaggcccgtctcccacactccggaggccctgcagcgggcggcggccggcagctgaagcgggaccccgagaggcccgagagcgccaaagctttcgggcgcgagggctctggtgcccagggtgaggcagaagtgcgacacccgcctgtgggcattgcagtggctgtggcccggcagaaggacagtggcggcagtggccggctggggcctgggctggtagaccaggagcgctctctgtcgctgagtaacgtcaaagggcacggccgagcagatgaggactgtgtggacgaccgggccagacaccgggaggaacggctgctcggggcacggctggaccgggatcaggagaagctgctcagagagagtaaggagctggctgacctggcccgcctgcaccctaccagctgtgctcctaacggcctgaaccccaacctcatggtgacggggggcccggcgctggcgggctcaggtcgctggtctgccgaccccgcagcccatctggccacgcacccctggttgccccgctcgggcaacgcatccatgtggctcgctggacacccctacggcttgggtcccccatctctgcaccagggcatggcccctgcgttcccacctggcctggggggctccctcccgtcagcctaccagtttgtcagggacccccaatcgggccagctggtggtcattcccagtgatcaccttcctcactttgcggagctgatggagcgggccaccgtaccgcccctctggcccgccctgtacccgccgggccgcagccccctgcaccacgcccagcagctgcagctcttctcacagcagcacttcctgcggcagcaggagttcctgtacctgcagcagcaggcggcccaggccttggaactgcagaggagcgcccagctcgtgcaggagcggttgaaggcgcaggagcaccgggcggagatggaagagaaggggagcaagcggggcctggaggctgcgggcaaggctggcctggccaccgccggccccgggctgctgccgcggaagccccctggcctggccgccggccccgcgggcacctacggcaaggccgtgagcccgccaccatcaccccgcgcatcccctgtggctgccctgaaggccaaggtcatccagaagctggaggacgtgtccaagccacccgcctacgcctaccccgccacccccagctcccaccccaccagcccgccgcccgcctccccaccgcccaccccgggtatcacccgcaaggaggaggctcccgagaatgtggtcgagaagaaagacttggagttggagaaggaagcccccagccccttccaggccctgttctcagatatcccgcccaggtacccgttccaagccctgccaccgcactacgggaggccctaccctttcctgctgcagcccacggccgccgccgacgcggacggcttggcccctgatgtgccgctcccggctgatgggcccgagcgcctggcactctcacccgaagacaagcccatccgcttgtccccctccaagatcacagagccgctgcgggagggcccggaggaagaaccgctggctgagcgggaggtgaaggcagaggtggaggacatggacgagggccccacagagctgccgcctctggagtcgccgctgccactgcccgccgcggaagccatggctacccccagccctgcagggggttgtggaggtggcctgttggaggcccaggcgctgagtgccaccgggcagagctgcgcagagccctctgagtgtccagactttgtggaggggcctgaaccacgggtggattccccgggccggacagaaccctgcaccgccgccctggacctgggggtgcagctgacacccgagacactggtggaggccaaggaggagccggtggaggtgcctgtggcggtgcccgtggtggaggcagtgcccgaggaaggcctggcgcaggtggcaccgagcgagtcccagcccaccctagaaatgtcagactgtgacgtgcccgccggggagggacagtgcccgagcctggagccccaagaggccgtgcctgtactcggcagcacctgcttcctggaagaggcaagctctgaccagttcctgcccagtctggaggacccactggctggcatgaacgccctggcggcagctgcggagctgccccaggccaggcctctgccctccccgggtgctgctggagcccaggccttggagaagctggaagcagccgagagccttgtcttggagcagagcttcctgcatggcatcaccctgctaagtgagatcgcagagctggagctggagaggaggagccaagagatgggaggtgcggagcgggccctggtggcgcggccctccctggagagtctgctggcagctggcagccacatgctgagggaggtgctggatgggcccgtggtggacccactcaagaacctgcggctcccgcgggagctgaagcccaacaagaagtacagctggatgcgcaagaaggaggagcggatgtatgccatgaagtcctccctggaggacatggacgccctggagctggacttccggatgcggctggccgaggtgcagcgccagtacaaggagaagcagcgtgagctggtgaagctgcagcgccgccgggactccgaggacaggcgcgaggaaccccatagaagcttggcacgcagaggccctggcaggccgcggaaacggacccacgccccgagcgccctgtcgcccccccgcaagagagggaagagcggccacagtagcggaaagctgagcagcaagtctctgctgacatcagatgattatgagctgggagcagggataagaaagagacacaaggggtctgaggaggaacatgatgccctcatcggaatggggaaagccagggggaggaaccagacttgggatgaacatgaggcctcgtcggacttcatcagtcagctaaagattaagaagaagaagatggccagcgaccaggagcagttggcaagcaagctcgacaaggccctctccctcaccaagcaggacaagttgaagtcgcccttcaagttttcggacagtgctggggggaaatcgaaaactagcgggggctgcggcaggtacttgactccttacgacagcctgctggggaagaacaggaaggcgctggccaagggcctcggcctgtctctgaaatcctccagagaaggtaaacacaaaagggcagccaaaaccaggaagatggaggtggggttcaaggccagaggccagcccaagtcggcccattccccgtttgcctcggaagtgagcagctactcttacaatacggactcagaggaagacgaagaattcctgaaggacgagtggcccgcccaaggcccctccagctccaaactgacgccttccctcctgtgtagcatggtggcaaagaacagcaaggcagctggtggccccaagctgaccaagaggggcctggcggccccccggactctgaaacccaagccggccaccagcaggaagcagccgttttgtctgctgcttcgagaggccgaggcgcgttcctccttcagcgactcttcggaggaatcgtttgaccaagatgagagctcggaggaggaggacgaggaggaggagctcgaggaggaggacgaggccagcggtggtggctacaggctgggtgcccgggagcgggccctgtcaccgggcctggaggagagtgggctgggcctgctggcacgcttcgccgccagcgccctccccagccccacggtgggtccatccctgtctgtggtacagctggaggccaagcagaaggcccggaagaaagaggagcggcagagcctgctgggcacagagttcgagtacaccgactcagagagcgaggtcaaggtgcgcaagcggtcgcctgcggggctgctgcggcccaagaaggggctgggggagccgggaccctccctggccgcacccacgcctggcgcccgcggtcccgaccccagcagcccagacaaggccaagctggcggtggagaaggggcgcaaggcccggaagctgcggggccccaaggagcctggcttcgaggcggggcccgaggccagcgacgacgacctgtggacgcggcgccgcagcgagcgcatcttcctgcacgacgcctcggctgctgcacctgcgcccgtcagcaccgcgcccgccaccaagaccagccgctgcgccaagggcggccccctgagcccgcgcaaggacgccgggcgtgcaaaggacaggaaggaccccaggaagaagaagaaagggaaagaggctgggccaggagctgggctgccgccgccccgagctcctgccttgccctctgaggccagggctcctcacgccagctccctgaccgctgccaaaaggagcaaagccaaggccaaagggaaggaggtgaagaaggagaaccgcggcaaggggggtgccgtgagcaagctgatggagagcatggcagccgaggaggactttgaacccaaccaagactcgagcttctctgaggacgagcacctgccgcgtggcggggctgtggagcggccgctgaccccggcccctcgctcctgcatcatcgacaaggatgagctgaaggacggcctgcgtgtgctcatccccatggatgacaagctgctgtacgccgggcacgtgcagaccgtgcactcgccagacatataccgcgtggtggtggagggtgagcggggcaaccggccccacatctactgtctggagcagttgctgcaggaggcgatcatcgatgtgaggccagcctccactcgcttcttgccacaagggaccaggattgcagcctactggagccagcagtaccgctgtctctacccaggcactgtggtccgagggttactggacctggaggacgatggggacttgatcaccgtggagtttgacgacggagacacgggcaggatccccctctcacatatccgcctcctgccccctgactataagatacagtgtgctgagccgtccccggcccttctggtgccaagtgccaagcgccgcagccggaagaccagcaaagacactggggagggcaaagatggtggcacggctgggtcggaggagccaggagccaaggcccgtgggcgtgggcggaaacccagcgccaaggccaagggtgacagagccgctaccctggaggaggggaacccaacagacgaggtccccagtacccccttagccctggagccgagcagcaccccaggttccaagaagagccccccagagcctgtggacaagcgagccaaggcccccaaggcgcgcccggcaccgccgcagcccagtcccgcaccacccgccttcaccagctgcccagcacccgagccatttgcagagctgccagctcctgccacctccctggccccagcacccctcatcaccatgcctgccacacgccccaagcccaagaaggcgcgggcagccgaggagtcgggtgccaagggccctcggaggccgggggaggaggccgagctgcttgtcaaactggaccacgagggtgtcacgtcacccaaaagcaagaaggctaaagaggccctgctgctccgggaggatccgggggcggggggctggcaggagcccaagagcctcctgagcctgggcagctatccccccgcggccggcagcagcgagcccaaggcaccctggcccaaggccaccgacggggacctcgcccaggagcccgggccggggctcacgttcgaggactctgggaaccccaagagcccagacaaggcccaggctgagcaggacggggccgaagagtccgagagcagcagcagcagcagtagtggcagcagtagcagcagcagcagcagcagcagcagcggctcggagacagaaggggaggaggaaggcgacaagaacggggacgggggctgcggcaccgggggccgtaactgcagcgctgccagctccagggcggcctcaccggcctcctcctcctcctcctcatcctcctcctcctcctcctcctcctcctcatcctcctcttcctcctcctcctcttcctcctcctcctcttcctcttcgtcttcctcctcttcctcctcctcctcttcctcgtcctcatcctcctcctcctcctcctcttcctcctcttcttcctccaccacagacgaggactcttcctgcagctcggacgatgaggcagcccccgcccccacggctggcccttccgcgcaggcggcgctccccaccaaggccaccaagcaggccggcaaggcgcggccctcggcccactccccaggcaagaagacgcccgcgccccagccccaggcgcctcctccgcagcccacacagcctctgcagcccaaggctcaggccggggccaagagccgacccaagaagagagagggcgtccacctccccaccaccaaggagctggccaagcggcagcgcctgccgtccgtggagaaccggcccaagatcgccgccttcctgccagcccggcagctctggaagtggttcggcaagcccacccagcggcgtggcatgaagggcaaggcccgcaagctcttctacaaggccatcgtgcgcggcaaggagatgatccgtatcggggactgtgccgtgttcctctctgccggccgccccaacctgccctacatcggccgcatccagagcatgtgggagtcgtggggcaacaacatggtggtccgcgtcaagtggttctaccaccccgaggagaccagcccgggcaagcagttccaccagggccagcactgggaccagaagtccagccgcagcctcccggcggccctgcgggtctccagccagaggaaggacttcatggagcgcgcgctataccagtcctcgcatgtggacgaaaatgacgtgcagacggtgtcgcacaagtgcctggtggtgggcctggagcagtatgagcagatgctgaagaccaagaagtaccaggacagcgagggcctgtactacctcgcgggcacctacgagcccaccacgggcatgatcttctccacggacggcgtgcccgtgctctgctgagcccgccgggccctgcgggccacctgtgccccgagggcggccagggacccatctccatcactgccatggcgcggagaccacgtgcgttgtgtgcatgcgagcgctcctgcaggcgtgtgcatggggccaggtgtgcacgtggatgcccgggtgagtgtgtgtgcatgcacgtgtgtgcacgcatgtgcacatgcctccagccccaccttccaacccctcagtgcccccaggacaggggcccctcttagctatcagggtatggccggaccggcccttcctgcccagcacgttgcaagcacttggccaggccggccctccaggctgctgctgcgtgggggcccgggtgcccccaggtccatgcagactggggattcggtggggaggggcgcttctaaggaaccaaactgacgctcactctgggcttcccaagcacccttagcatggagcccaccccaaggcctcccaccgtgcatgggacagggcagcccgatgccagctggcctacctgactgtgccaggggccctgcccccaccctctcaggatggcctagacttggggaacagagccgggtggggttgcagcccggagtgtctgtcaaaggcaccaggtggagagggcccggcacaggcccaccctggtccaaaccctcacactacagaaaaccccaatggtgctgaaactgtcgcccggccacgcctggcccctccccacccaggagggaggtggcacttcttaacctgtacagttttattgtaccaagagactcgccccgcccctgtatcataagcctttaaatggagtcaactttttaattatatatataaagataaatatatataaatatatatataaactttttaaaactgtgaaaaatagctatgaaattataaaaaaaaacattctgacgtgcagaatattattttttatttcctgttagattatagtgtctagcaccggcttcaccggcctcccagtccccagcacaccccccgcccaccccaccaagtgtactgtactcaccccccaggatagagaagtgtttgttagggagagaagagggagaggcaggagccggcccaagcccagggtccctgcttgggccccagaaagcacttaaccaggccccaagccttcaagggaaaccaaggcctcaaccagacaatcttgagggaaggaaaagccagactttgggtttgttttttgggggaattattggtttttttttttatgtttcttttggaattttgtttgttggcaaattctgtgtgatcttttttcataaaaaaaaagaaaagatttaattgg

SEQ ID NO: 194630 - DNA, 757 bp, Homo sapiens
  Payload ID: 18464
  Gene Name: trinucleotide repeat containing 18
  ENST ID: ENST00000440081
  CDS Start-End: 1-757
gccatgaagtcctccctggaggacatggacgccctggagctggacttccggatgcggctggccgaggtgcagcgccagtacaaggagaagcagcgtgagctggtgaagctgcagcgccgccgggactccgagctgagcagcaagtctctgctgacatcagatgattatgagctgggagcagggataagaaagagacacaaggggtctgaggaggaacatgatgccctcatcggaatggggaaagccagggggaggaaccagacttgggatgaacatgaggcctcgtcggacttcatcagtcagctaaagattaagaagaagaagatggccagcgaccaggagcagttggcaagcaagctcgacaaggccctctccctcaccaagcaggacaagttgaagtcgcccttcaagttttcggacagtgctggggggaaatcgaaaactagcgggggctgcggcaggtacttgactccttacgacagcctgctggggaagaacaggaaggcgctggccaagggcctcggcctgtctctgaaatcctccagagaaggtaaacacaaaagggcagccaaaaccaggaagatggaggtggggttcaaggccagaggccagcccaagtcggcccattccccgtttgcctcggaagtgagcagctactcttacaatacggactcagaggaagacgaagaattcctgaaggacgagtggcccgcccaaggcccctccagctccaaactgacgccttccctcctgtgta

SEQ ID NO: 194631 - DNA, 577 bp, Homo sapiens
  Payload ID: 18464
  Gene Name: trinucleotide repeat containing 18
  ENST ID: ENST00000455076
  CDS Start-End: 1-577
cggtggagaaggggcgcaaggcccggaagctgcggggccccaaggagcctggcttcgaggcggggcccgaggccagcgacgacgacctgtggacgcggcgccgcagcgagcgcatcttcctgcacgacgcctcggctgctgcacctgcgcccgtcagcaccgcgcccgccaccaagaccagccgctgcgccaagggcggccccctgagcccgcgcaaggacgccgggcgtgcaaaggacaggaaggaccccaggaaggttcctgctacagtatcaaaaggcagacactggaagaagaaagggaaagaggctgggccaggagctgggctgccgccgccccgagctcctgccttgccctctgaggccagggctcctcacgccagctccctgaccgctgccaaaaggagcaaagccaaggccaaagggaaggaggtgaagaaggagaaccgcggcaaggggggtgccgtgagcaagctgatggagagcatggcagccgaggaggactttgaacccaaccaagactcgagcttctctgaggacgagcacctgccgcgtggcggggctgtggagcggccgct

SEQ ID NO: 194632 - DNA, 577 bp, Homo sapiens
  Payload ID: 18464
  Gene Name: trinucleotide repeat containing 18
  ENST ID: ENST00000434361
  CDS Start-End: 281-577
gtgggcctccctcctccctggggccagcccccaggctctcctgccccaggtggggcagggctgaagcgggttgatctgggctggtggctactgcagtcttggtcctggttctggtcccagcatagcttggaggagactgcagcctcggactctcacctgcctcttttctgcgccgatgggagttccagaacggcggcggtggccacaggtctgatagcccagccgcagtgccaaggacgtgcagggcgaggccttcttgggcagctttgtggccagcgggatggggccctcggcctcgtcccatgggagcccagtgccactgccctctgacctgtctttccgctccccaacccctagcaacctgcccatggtgcagctgtgggccgcccacgcccatgaaggcttctcccacctgcccagtgggctgtacccatcctacctccacctgaaccacctggagccccccagcagtgggagccccctcctcagccagctgggtcagcccagcattttcgatacccagaaaggtcaggggccaggaggagacggtttctacctgcccaccgcgggggctccg

SEQ ID NO: 194633 - DNA, 925 bp, Homo sapiens
  Payload ID: 18464
  Gene Name: trinucleotide repeat containing 18
  ENST ID: ENST00000413081
  CDS Start-End: 1-925
gccgtggccgtgcgccctggtggctgtggcaagaagagcccctttggaggtttgggcaccatgaaacccgagcctgcgcccacctctgcgggtgcctcccgagcccaggcccgtctcccacactccggaggccctgcagcgggcggcggccggcagctgaagcgggaccccgagaggcccgagagcgccaaagctttcgggcgcgagggctctggtgcccagggtgaggcagaagtgcgacacccgcctgtgggcattgcagtggctgtggcccggcagaaggacagtggcggcagtggccggctggggcctgggctggtagaccaggagcgctctctgtcgctgagtaacgtcaaagggcacggccgagcagatgaggactgtgtggacgaccgggccagacaccgggaggaacggctgctcggggcacggctggaccgggatcaggagaagctgctcagagagagtaaggagctggctgacctggcccgcctgcaccctaccagctgtgctcctaacggcctgaaccccaacctcatggtgacggggggcccggcgctggcgggctcaggtcgctggtctgccgaccccgcagcccatctggccacgcacccctggttgccccgctcgggcaacgcatccatgtggctcgctggacacccctacggcttgggtcccccatctctgcaccagggcatggcccctgcgttcccacctggcctggggggctccctcccgtcagcctaccagtttgtcagggacccccaatcgggccagctggtggtcattcccagtgatcaccttcctcactttgcggagctgatggagcgggccaccgtaccgcccctctggcccgccctgtacccgccgggccgcagccccctgcaccacgcccagcagctgcagctcttctcacagcagcact

SEQ ID NO: 194634 - DNA, 8303 bp, Homo sapiens
  Payload ID: 18465
  Gene Name: trinucleotide repeat containing 6A
  Uniprot ID: Q8NDV7
  ENST ID: ENST00000315183
  CDS Start-End: 148-5889
ggcggcggcggcggcggcggcggcagcgggtcggtgtagaaaatggcgctggtgcagcggctcgggcctctccccgcggcgctgcggagggcttgaggctcgcgagcctccttcgccgcgccccacttgctcgtgcactttacacacatgagagaattggaagctaaagctaccaaagacgtagaaagaaatcttagcagggatttagtgcaagaagaagaacagttgatggaagaaaagaaaaagaaaaaagacgacaagaaaaagaaggaagctgctcaaaagaaggccactgaacaaaaaatcaaagtgccagaacagataaagcccagtgtaagccagcctcagcctgccaactctaataacggcacttccacagcaaccagcactaataataatgccaagcgagctacagccaacaatcagcagccacagcagcagcagcaacagcagcagccgcagcagcagcagccacagcagcagccacagccgcagccgcagcagcagcagccacagcagcagccacaggccttgcctcggtatcctcgtgaagtacctccacgatttcgccaccaggaacacaaacagcttctaaagaggggtcagcattttcctgttatagcagcaaaccttggatctgctgttaaggtgttaaacagccagtcagaaagcagtgctttaacaaatcaacagccacaaaataacggagaggtgcagaacagcaaaaaccagtcagatataaaccacagtacttcaggatcccattatgaaaattcccagcggggacctgtgtcttctacaagtgattctagcacaaactgtaagaatgctgttgtaagtgacttgtcggaaaaagaagcatggccctcagcccctggcagtgatccggagttggcttcagaatgtatggatgctgattctgcctccagttctgaatcagagagaaacatcactatcatggcttcagggaacacaggtggtgaaaaagatggccttcggaatagcactggacttggttcccaaaacaagtttgtagttggtagcagcagcaataatgtgggccatggaagtagtactgggccatggggtttttcccatggagccataataagcacatgtcaggtctctgtggatgctcctgaaagcaaatctgaaagtagcaacaatagaatgaatgcttggggcactgtaagttcttcatcaaatggagggttaaatccaagcactttgaattcagctagcaaccatggtgcctggccagtattagagaacaatggacttgccctaaaagggcctgtagggagtggtagttctggcattaatattcagtgcagtactataggccagatgcctaacaatcagagtattaactctaaagtgagtggtggttctacccatggtacctggggaagccttcaggaaacttgtgaatctgaagtaagtggtacacagaaggtttcattcagtggtcaacctcaaaatattaccactgaaatgactggaccaaataacactactaactttatgacctctagtttaccaaactccggttcagtgcagaataatgagctgcctagtagtaacacaggggcctggcgtgtgagcacaatgaatcatcctcagatgcaggctccatcaggtatgaatggcacttccctttctcaccttagcaatggagagtcaaaaagtggaggctcttatggtactacatggggtgcctatggttctaattactctggagacaaatgttcaggccctaatggccaagctaatggtgacactgtgaatgcaactctaatgcagcctggcgtaaatggtcctatgggcactaactttcaagttaacacaaacaaaggaggtggtgtgtgggaatctggtgcagcaaactcccagagtacatcatggggaagtggaaatggcgcaaattctggaggaagtcgaagaggatggggaacccctgcacaaaacactggcactaatttacccagcgttgagtggaacaaactgcctagcaatcagcattccaatgatagtgcaaatggcaatggtaagacgtttacaaatggatggaaatctactgaggaagaggatcagggttctgccacatctcagacaaatgagcaaagcagtgtgtgggccaaaacaggaggtacagtggagagcgatggtagtacagaaagcactggacgccttgaggaaaaaggaactggggaaagtcagagtagagacagaagaaaaattgatcagcacacattactccaaagcattgtaaacagaactgacttagatccacgtgtcctgtccaactctggttggggacagactcctattaagcagaatactgcctgggatacagaaacatcacctagaggggaacgaaagactgacaatgggacagaggcctggggaagctctgcaacacagacttttaactcaggggcatgtatagataagactagccctaatggtaatgatacctcatctgtatcagggtggggcgatcccaaacctgctctgaggtggggagattccaaaggctcaaactgccagggggggtgggaagatgattctgctgctacaggaatggtcaagagcaatcagtgggggaattgcaaagaggagaaggctgcatggaatgactcgcaaaagaataaacagggatggggtgatggacaaaaatcaagccaagggtggtctgtttctgccagtgataactggggagaaacttcaaggaataaccattggggtgaggccaataagaaatccagctcaggaggtagtgacagtgacaggtccgtttccggttggaacgaacttggtaaaactagttctttcacttggggaaacaacataaatccaaataattcatcaggatgggatgaatcttctaaacctactccttcccagggatggggagaccctccaaagtctaatcagtctctaggttggggagattcgtcaaagccagtcagctctccagactggaacaagcaacaagacattgttggatcttggggaatcccaccagctacaggcaaacctcctggtacaggctggctggggggacctataccagccccagcaaaagaagaagaacccacaggctgggaggaaccatccccagaatctatacgtcgcaaaatggagattgatgatggaacttcagcttggggagatccaagcaaatacaactacaaaaatgtgaacatgtggaacaaaaacgtcccaaatggcaacagccgttcagaccagcaagcacaggtacatcagctgctaacgcctgcaagtgccatctcaaacaaagaggcaagcagtggctctggctggggtgagccctggggggagccttctactccagccacaactgtggataatggtacttcagcatggggtaagcccatagacagtggtcccagctggggggaacccattgctgcggcatccagcacatccacgtggggctccagctctgttggtccacaagcattaagcaaatctgggccaaaatctatgcaagatggctggtgtggtgatgatatgccattgcctggaaatcgccccactggctgggaagaggaagaggatgtggagattggaatgtggaatagtaattcatctcaagagcttaactcatctttaaattggccaccatatacaaagaaaatgtcatcgaagggtctgagtggcaaaaaaaggagaagggaaaggggaatgatgaaaggtggaaacaaacaagaagaagcgtggataaatccatttgttaaacagttttcaaacatcagtttttcgagagactcaccagaggaaaatgtacaaagcaataagatggacctttctggaggaatgttacaagacaaacgaatggagatagataaacatagcctaaatattggtgattacaatcgaacggtcgggaaaggccctggttctcggcctcagatttccaaagagtcttccatggagcgcaatccttattttgataagaatggcaatcccagtatgtttggtgttggaaacacagcagcacaaccccggggcatgcagcagcctccagcacaacctcttagttcatctcagcctaatctccgtgctcaagtgcctcctccattactctcccctcaggttccagtttcattgctgaagtatgcaccaaacaacggtggcctgaatccactctttggccctcaacaggtagccatgctgaaccagctatcccagctaaaccagctttctcagatctcccagttacagcgattgttagcgcagcagcaaagggcgcagagtcagagaagcgtgccttctgggaaccggccgcagcaagaccagcagggtcgacctcttagtgtgcagcagcaaatgatgcaacaatctcgtcaacttgatccaaacctgttggtgaagcagcagactccaccatctcagcagcagccactccatcagccagccatgaagtctttccttgacaatgtcatgccccacactacacctgagctgcaaaaagggccatcaccaataaatgctttcagcaacttccctataggcttgaactcaaacttgaatgtaaatatggatatgaacagtattaaagagccacagtcaagactaaggaagtggacgacagtggacagcatttctgtgaacacatctttggatcaaaactccagcaaacatggtgctatttcaagtggtttcaggctggaagagtctccatttgttccctatgactttatgaacagcagtacttcaccagccagtcctccaggttcaataggagatggctggccacgtgccaaatcgcctaacggctctagcagtgttaattggccaccagaatttcgtcctggtgagccatggaaaggttatccaaacattgaccctgaaactgacccttacgtcactcctggcagtgtcataaacaatctttcaattaatactgtgcgggaagttgaccacctcagggacaggaacagtgggtcatcctcatccttgaacaccacgctgccttcaactagtgcctggtcatccattcgtgcctccaactacaacgttcccctcagcagtacagcacaaagcacttcagccagaaatagtgattccaaattgacatggtctcctggttcagttacaaacacctctctggctcatgagctgtggaaggtccctttgccacctaaaaacatcactgctccgtcccgcccacctccgggactgactggtcagaagccacccttgtctacgtgggataattctccccttcgtataggtggaggatggggaaattctgacgccagatataccccaggttccagctggggtgagagcagctcagggagaataacaaattggcttgttctaaaaaaccttacacctcagatcgatggctcaactctgcgcactctgtgcatgcagcacggcccgctgatcacattccacctgaacctccctcacggaaatgctctggtccgctacagttcaaaagaagaggtagtgaaggcacaaaagtctctgcacatgtgtgtactggggaacactactattcttgctgagtttgccagtgaagaggagatcagtcgtttctttgcacaaagccagtctctgaccccttctcccggctggcagtctctcgggtccagccagagccggctgggctccctcgactgttcccactcattctccagccggaccgatctcaatcactggaatggtgctgggctgtcgggaactaactgtggagaccttcacggcacttcactctgggggaccccgcattattccacaagcctgtggggtcccccaagcagcagcgacccccgaggaattagcagcccatctcccattaacgcttttctttctgttgaccacctgggtgggggtggagagtccatgtaacagtgtagatgcagactcaccgaccgggacctcagacgcgagggaaaggagcactaagtggggctcgccgcctgcagccaggggccgcctgtgggaacagctattctctgcacattttccactttgttttccccaaaacatatcagtttgaatacttgaatcatgcaggccaatattataatgtgaaaaggtatctactctatttacactcccaaatagcgccatacatgctaaaccgtagagaatgagctcgcttgtgtctattcatcatgtttagcctttggattctttttttttttttccttctattcctccccaacccccccccccgcccctttttttctctcttgcaaaaccattttttgggctgataacgtatgagcttttccctttgcactgaatgatgttctctccgtctcatcggcagtatggggggcagctgtcccagtgtcaatgtttactcaagggtgttcttaggaggcgtgcgctctctactatgccttgatgttgcctaccttattgtggtatcgtggagtttaaaagatcaagttaggatgctgacttaggattattaatgaaagtgttgcaccagttttttcatgttgtaaaactaaagaatttcgctctgcagtttgaaaaactgtggccacagctgtgacttgcagcccacctgccacccaggacgggccctgcactttgaataggctttccattttgttttggaggttctcactttgaaccttcttgtttacagatttttttgtttgttttttgagaaaaaaaaatgtttactcttccatcatttaaaaaaaatgtaaaagacaaaaaaaaaatggaggatgatttaaaagatgctttctatctctgggaaaaaggagcagcatttggccatgttcttttgtttttctattcctgtcccaaatcaaagagcatggttctcaggaaaaccagttccccagtttaaaaaaaaaaaaaaaaattccttgtagtttcttagaggaaaaaaagaaaaaccccaacttttagcactgatactacatattgctctgttaaagaattttctctgccaaaaaaaaagaaaaaacaaaaaaacgcttaaagctggagtttgacattctgctttcagatgctgtctttttattagtgagtgatgatggtttgctaataatcaataggtaataattttttgtaatcccatcaagtggctccatatgtttctgctctctcgtgactgtgttaatgtttaactgttgtaccttaaagccgaaatcagtaactatgcatactgtaaccaaggtattgggcttacagagttgtttgttgtataaagaaaattttaaatgttgttgcaaactaacgagttacaccattttaaactttctttcctcccccctttttttgcccacaaatggtattataatgcttgcttagtcaaagaagagagactaaacaagggtaaaaattttaacagtacagaatttgccatcatatcattgccttgattctaactgtttgtgtcctaagatgcaaaagaagtcagtggcttttaactgtttacaaatagaatgtgattgtaaaatgtacagtttggttgtgtttgaattatgaaatttcttcagatataataaaccatgactttttggctgctcaacattaattgtctcctttttgtgaatttatttgtaggctcttttttataatgaaagtttcaaagttgctatgtatgagggttctcatagagcaaccgattaaaaatctaagcaaatatttgaacattttatctgaactcatcacaatttcaccctgaaataatgtgagaacaatgggaaactgtagcttgctccttcccaccctctctgagcatctttgggatcttgttgctcaaaactcttctgtgacttcatcttccccaccatttgtgcccatctcaagcctcagcaagaaaccatgtggaacatgaagcttaatgacttgacagtgtactagtgttaaactctcatacctctgttacaaagcgagaaacgccacacccggactggccttttcttcccccttcacggccctcgcttctccctgcaggagctcgggggcgaaacctgtgtatggatttcagtgtatgacttcagatcatgctccaacttgccaggtgtgagctaatgttgtcggacaccttactataagcaaatgttattcagtgcgttcaatgtatattgacttccatactggtttttccaaaaaccaaaggtagctttgaaaaaccatgtctggaaatgtttggagcgttaagctgattgaccttctgaccttggggctttgagtagtatataattcataactgcgttaattgtattgttaaagtgtttgggagttttttgcgcttgttatgtggaaataaagtgtttgatttaaaattt

SEQ ID NO: 194635 - DNA, 8438 bp, Homo sapiens
  Payload ID: 18465
  Gene Name: trinucleotide repeat containing 6A
  Uniprot ID: Q8NDV7
  ENST ID: ENST00000395799
  CDS Start-End: 130-6018
ggcggcagcgggtcggtgtagaaaatggcgctggtgcagcggctcgggcctctccccgcggcgctgcggagggcttgaggctcgcgagcctccttcgccgcgccccacttgctcgtgcactttacacacatgagagaattggaagctaaagctaccaaagacgtagaaagaaatcttagcagggatttagtgcaagaagaagaacagttgatggaagaaaagaaaaagaaaaaagacgacaagaaaaagaaggaagctgctcaaaagaaggccactgaacaaaaaatcaaagtgccagaacagataaagcccagtgtaagccagcctcagcctgccaactctaataacggcacttccacagcaaccagcactaataataatgccaagcgagctacagccaacaatcagcagccacagcagcagcagcaacagcagcagccgcagcagcagcagccacagcagcagccacagccgcagccgcagcagcagcagccacagcagcagccacaggccttgcctcggtatcctcgtgaagtacctccacgatttcgccaccaggaacacaaacagcttctaaagaggggtcagcattttcctgttatagcagcaaaccttggatctgctgttaaggtgttaaacagccagtcagaaagcagtgctttaacaaatcaacagccacaaaataacggagaggtgcagaacagcaaaaaccagtcagatataaaccacagtacttcaggatcccattatgaaaattcccagcggggacctgtgtcttctacaagtgattctagcacaaactgtaagaatgctgttgtaagtgacttgtcggaaaaagaagcatggccctcagcccctggcagtgatccggagttggcttcagaatgtatggatgctgattctgcctccagttctgaatcagagagaaacatcactatcatggcttcagggaacacaggtggtgaaaaagatggccttcggaatagcactggacttggttcccaaaacaagtttgtagttggtagcagcagcaataatgtgggccatggaagtagtactgggccatggggtttttcccatggagccataataagcacatgtcaggtctctgtggatgctcctgaaagcaaatctgaaagtagcaacaatagaatgaatgcttggggcactgtaagttcttcatcaaatggagggttaaatccaagcactttgaattcagctagcaaccatggtgcctggccagtattagagaacaatggacttgccctaaaagggcctgtagggagtggtagttctggcattaatattcagtgcagtactataggccagatgcctaacaatcagagtattaactctaaagtgagtggtggttctacccatggtacctggggaagccttcaggaaacttgtgaatctgaagtaagtggtacacagaaggtttcattcagtggtcaacctcaaaatattaccactgaaatgactggaccaaataacactactaactttatgacctctagtttaccaaactccggttcagtgcagaataatgagctgcctagtagtaacacaggggcctggcgtgtgagcacaatgaatcatcctcagatgcaggctccatcaggtatgaatggcacttccctttctcaccttagcaatggagagtcaaaaagtggaggctcttatggtactacatggggtgcctatggttctaattactctggagacaaatgttcaggccctaatggccaagctaatggtgacactgtgaatgcaactctaatgcagcctggcgtaaatggtcctatgggcactaactttcaagttaacacaaacaaaggaggtggtgtgtgggaatctggtgcagcaaactcccagagtacatcatggggaagtggaaatggcgcaaattctggaggaagtcgaagaggatggggaacccctgcacaaaacactggcactaatttacccagcgttgagtggaacaaactgcctagcaatcagcattccaatgatagtgcaaatggcaatggtaagacgtttacaaatggatggaaatctactgaggaagaggatcagggttctgccacatctcagacaaatgagcaaagcagtgtgtgggccaaaacaggaggtacagtggagagcgatggtagtacagaaagcactggacgccttgaggaaaaaggaactggggaaagtcagagtagagacagaagaaaaattgatcagcacacattactccaaagcattgtaaacagaactgacttagatccacgtgtcctgtccaactctggttggggacagactcctattaagcagaatactgcctgggatacagaaacatcacctagaggggaacgaaagactgacaatgggacagaggcctggggaagctctgcaacacagacttttaactcaggggcatgtatagataagactagccctaatggtaatgatacctcatctgtatcagggtggggcgatcccaaacctgctctgaggtggggagattccaaaggctcaaactgccagggggggtgggaagatgattctgctgctacaggaatggtcaagagcaatcagtgggggaattgcaaagaggagaaggctgcatggaatgactcgcaaaagaataaacagggatggggtgatggacaaaaatcaagccaagggtggtctgtttctgccagtgataactggggagaaacttcaaggaataaccattggggtgaggccaataagaaatccagctcaggaggtagtgacagtgacaggtccgtttccggttggaacgaacttggtaaaactagttctttcacttggggaaacaacataaatccaaataattcatcaggatgggatgaatcttctaaacctactccttcccagggatggggagaccctccaaagtctaatcagtctctaggttggggagattcgtcaaagccagtcagctctccagactggaacaagcaacaagacattgttggatcttggggaatcccaccagctacaggcaaacctcctggtacaggctggctggggggacctataccagccccagcaaaagaagaagaacccacaggctgggaggaaccatccccagaatctatacgtcgcaaaatggagattgatgatggaacttcagcttggggagatccaagcaaatacaactacaaaaatgtgaacatgtggaacaaaaacgtcccaaatggcaacagccgttcagaccagcaagcacaggtacatcagctgctaacgcctgcaagtgccatctcaaacaaagaggcaagcagtggctctggctggggtgagccctggggggagccttctactccagccacaactgtggataatggtacttcagcatggggtaagcccatagacagtggtcccagctggggggaacccattgctgcggcatccagcacatccacgtggggctccagctctgttggtccacaagcattaagcaaatctgggccaaaatctatgcaagatggctggtgtggtgatgatatgccattgcctggaaatcgccccactggctgggaagaggaagaggatgtggagattggaatgtggaatagtaattcatctcaagagcttaactcatctttaaattggccaccatatacaaagaaaatgtcatcgaagggtctgagtggcaaaaaaaggagaagggaaaggggaatgatgaaaggtggaaacaaacaagaagaagcgtggataaatccatttgttaaacagttttcaaacatcagtttttcgagagactcaccagaggaaaatgtacaaagcaataagatggacctttctggaggaatgttacaagacaaacgaatggagatagataaacatagcctaaatattggtgattacaatcgaacggtcgggaaaggccctggttctcggcctcagatttccaaagagtcttccatggagcgcaatccttattttgataaggatggcattgtagcagatgaatcccaaaacatgcagtttatgtccagtcaaagcatgaagcttcccccttcaaatagtgcactacctaaccaggcccttggctccatagcagggctgggtatgcaaaacttgaattctgttagacagaatggcaatcccagtatgtttggtgttggaaacacagcagcacaaccccggggcatgcagcagcctccagcacaacctcttagttcatctcagcctaatctccgtgctcaagtgcctcctccattactctcccctcaggttccagtttcattgctgaagtatgcaccaaacaacggtggcctgaatccactctttggccctcaacaggtagccatgctgaaccagctatcccagctaaaccagctttctcagatctcccagttacagcgattgttagcgcagcagcaaagggcgcagagtcagagaagcgtgccttctgggaaccggccgcagcaagaccagcagggtcgacctcttagtgtgcagcagcaaatgatgcaacaatctcgtcaacttgatccaaacctgttggtgaagcagcagactccaccatctcagcagcagccactccatcagccagccatgaagtctttccttgacaatgtcatgccccacactacacctgagctgcaaaaagggccatcaccaataaatgctttcagcaacttccctataggcttgaactcaaacttgaatgtaaatatggatatgaacagtattaaagagccacagtcaagactaaggaagtggacgacagtggacagcatttctgtgaacacatctttggatcaaaactccagcaaacatggtgctatttcaagtggtttcaggctggaagagtctccatttgttccctatgactttatgaacagcagtacttcaccagccagtcctccaggttcaataggagatggctggccacgtgccaaatcgcctaacggctctagcagtgttaattggccaccagaatttcgtcctggtgagccatggaaaggttatccaaacattgaccctgaaactgacccttacgtcactcctggcagtgtcataaacaatctttcaattaatactgtgcgggaagttgaccacctcagggacaggaacagtgggtcatcctcatccttgaacaccacgctgccttcaactagtgcctggtcatccattcgtgcctccaactacaacgttcccctcagcagtacagcacaaagcacttcagccagaaatagtgattccaaattgacatggtctcctggttcagttacaaacacctctctggctcatgagctgtggaaggtccctttgccacctaaaaacatcactgctccgtcccgcccacctccgggactgactggtcagaagccacccttgtctacgtgggataattctccccttcgtataggtggaggatggggaaattctgacgccagatataccccaggttccagctggggtgagagcagctcagggagaataacaaattggcttgttctaaaaaaccttacacctcagatcgatggctcaactctgcgcactctgtgcatgcagcacggcccgctgatcacattccacctgaacctccctcacggaaatgctctggtccgctacagttcaaaagaagaggtagtgaaggcacaaaagtctctgcacatgtgtgtactggggaacactactattcttgctgagtttgccagtgaagaggagatcagtcgtttctttgcacaaagccagtctctgaccccttctcccggctggcagtctctcgggtccagccagagccggctgggctccctcgactgttcccactcattctccagccggaccgatctcaatcactggaatggtgctgggctgtcgggaactaactgtggagaccttcacggcacttcactctgggggaccccgcattattccacaagcctgtggggtcccccaagcagcagcgacccccgaggaattagcagcccatctcccattaacgcttttctttctgttgaccacctgggtgggggtggagagtccatgtaacagtgtagatgcagactcaccgaccgggacctcagacgcgagggaaaggagcactaagtggggctcgccgcctgcagccaggggccgcctgtgggaacagctattctctgcacattttccactttgttttccccaaaacatatcagtttgaatacttgaatcatgcaggccaatattataatgtgaaaaggtatctactctatttacactcccaaatagcgccatacatgctaaaccgtagagaatgagctcgcttgtgtctattcatcatgtttagcctttggattctttttttttttttccttctattcctccccaacccccccccccgcccctttttttctctcttgcaaaaccattttttgggctgataacgtatgagcttttccctttgcactgaatgatgttctctccgtctcatcggcagtatggggggcagctgtcccagtgtcaatgtttactcaagggtgttcttaggaggcgtgcgctctctactatgccttgatgttgcctaccttattgtggtatcgtggagtttaaaagatcaagttaggatgctgacttaggattattaatgaaagtgttgcaccagttttttcatgttgtaaaactaaagaatttcgctctgcagtttgaaaaactgtggccacagctgtgacttgcagcccacctgccacccaggacgggccctgcactttgaataggctttccattttgttttggaggttctcactttgaaccttcttgtttacagatttttttgtttgttttttgagaaaaaaaaatgtttactcttccatcatttaaaaaaaatgtaaaagacaaaaaaaaaatggaggatgatttaaaagatgctttctatctctgggaaaaaggagcagcatttggccatgttcttttgtttttctattcctgtcccaaatcaaagagcatggttctcaggaaaaccagttccccagtttaaaaaaaaaaaaaaaaattccttgtagtttcttagaggaaaaaaagaaaaaccccaacttttagcactgatactacatattgctctgttaaagaattttctctgccaaaaaaaaagaaaaaacaaaaaaacgcttaaagctggagtttgacattctgctttcagatgctgtctttttattagtgagtgatgatggtttgctaataatcaataggtaataattttttgtaatcccatcaagtggctccatatgtttctgctctctcgtgactgtgttaatgtttaactgttgtaccttaaagccgaaatcagtaactatgcatactgtaaccaaggtattgggcttacagagttgtttgttgtataaagaaaattttaaatgttgttgcaaactaacgagttacaccattttaaactttctttcctcccccctttttttgcccacaaatggtattataatgcttgcttagtcaaagaagagagactaaacaagggtaaaaattttaacagtacagaatttgccatcatatcattgccttgattctaactgtttgtgtcctaagatgcaaaagaagtcagtggcttttaactgtttacaaatagaatgtgattgtaaaatgtacagtttggttgtgtttgaattatgaaatttcttcagatataataaaccatgactttttggctgctcaacattaattgtctcctttttgtgaatttatttgtaggctcttttttataatgaaagtttcaaagttgctatgtatgagggttctcatagagcaaccgattaaaaatctaagcaaatatttgaacattttatctgaactcatcacaatttcaccctgaaataatgtgagaacaatgggaaactgtagcttgctccttcccaccctctctgagcatctttgggatcttgttgctcaaaactcttctgtgacttcatcttccccaccatttgtgcccatctcaagcctcagcaagaaaccatgtggaacatgaagcttaatgacttgacagtgtactagtgttaaactctcatacctctgttacaaagcgagaaacgccacacccggactggccttttcttcccccttcacggccctcgcttctccctgcaggagctcgggggcgaaacctgtgtatggatttcagtgtatgacttcagatcatgctccaacttgccaggtgtgagctaatgttgtcggacaccttactataagcaaatgttattcagtgcgttcaatgtatattgacttccatactggtttttccaaaaaccaaaggtagctttgaaaaaccatgtctggaaatgtttggagcgttaagctgattgaccttctgaccttggggctttgagtagtatataattcataactgcgttaattgtattgttaaagtgtttgggagttttttgcgcttgttatgtggaaataaagtgtttgatttaaaattttttaaa

SEQ ID NO: 194636 - DNA, 3700 bp, Homo sapiens
  Payload ID: 18465
  Gene Name: trinucleotide repeat containing 6A
  ENST ID: ENST00000450465
  CDS Start-End: 1-2721
caacaagacattgttggatcttggggaatcccaccagctacaggcaaacctcctggtacaggctggctggggggacctataccagccccagcaaaagaagaagaacccacaggctgggaggaaccatccccagaatctatacgtcgcaaaatggagattgatgatggaacttcagcttggggagatccaagcaaatacaactacaaaaatgtgaacatgtggaacaaaaacgtcccaaatggcaacagccgttcagaccagcaagcacaggtacatcagctgctaacgcctgcaagtgccatctcaaacaaagaggcaagcagtggctctgggccaaaatctatgcaagatggctggtgtggtgatgatatgccattgcctggaaatcgccccactggctgggaagaggaagaggatgtggagattggaatgtggaatagtaattcatctcaagagcttaactcatctttaaattggccaccatatacaaagaaaatgtcatcgaagggtctgagtggcaaaaaaaggagaagggaaaggggaatgatgaaaggtggaaacaaacaagaagaagcgtggataaatccatttgttaaacagttttcaaacatcagtttttcgagagactcaccagaggaaaatgtacaaagcaataagatggacctttctggaggaatgttacaagacaaacgaatggagatagataaacatagcctaaatattggtgattacaatcgaacggtcgggaaaggccctggttctcggcctcagatttccaaagagtcttccatggagcgcaatccttattttgataagaatggcaatcccagtatgtttggtgttggaaacacagcagcacaaccccggggcatgcagcagcctccagcacaacctcttagttcatctcagcctaatctccgtgctcaagtgcctcctccattactctcccctcaggttccagtttcattgctgaagtatgcaccaaacaacggtggcctgaatccactctttggccctcaacaggtagccatgctgaaccagctatcccagctaaaccagctttctcagatctcccagttacagcgattgttagcgcagcagcaaagggcgcagagtcagagaagcgtgccttctgggaaccggccgcagcaagaccagcagggtcgacctcttagtgtgcagcagcaaatgatgcaacaatctcgtcaacttgatccaaacctgttggtgaagcagcagactccaccatctcagcagcagccactccatcagccagccatgaagtctttccttgacaatgtcatgccccacactacacctgagctgcaaaaagggccatcaccaataaatgctttcagcaacttccctataggcttgaactcaaacttgaatgtaaatatggatatgaacagtattaaagagccacagtcaagactaaggaagtggacgacagtggacagcatttctgtgaacacatctttggatcaaaactccagcaaacatggtgctatttcaagtggtttcaggctggaagagtctccatttgttccctatgactttatgaacagcagtacttcaccagccagtcctccaggttcaataggagatggctggccacgtgccaaatcgcctaacggctctagcagtgttaattggccaccagaatttcgtcctggtgagccatggaaaggttatccaaacattgaccctgaaactgacccttacgtcactcctggcagtgtcataaacaatctttcaattaatactgtgcgggaagttgaccacctcagggacaggaacagtgggtcatcctcatccttgaacaccacgctgccttcaactagtgcctggtcatccattcgtgcctccaactacaacgttcccctcagcagtacagcacaaagcacttcagccagaaatagtgattccaaattgacatggtctcctggttcagttacaaacacctctctggctcatgagctgtggaaggtccctttgccacctaaaaacatcactgctccgtcccgcccacctccgggactgactggtcagaagccacccttgtctacgtgggataattctccccttcgtataggtggaggatggggaaattctgacgccagatataccccaggttccagctggggtgagagcagctcagggagaataacaaattggcttgttctaaaaaaccttacacctcagatcgatggctcaactctgcgcactctgtgcatgcagcacggcccgctgatcacattccacctgaacctccctcacggaaatgctctggtccgctacagttcaaaagaagaggtagtgaaggcacaaaagtctctgcacatgtgtgtactggggaacactactattcttgctgagtttgccagtgaagaggagatcagtcgtttctttgcacaaagccagtctctgaccccttctcccggctggcagtctctcgggtccagccagagccggctgggctccctcgactgttcccactcattctccagccggaccgatctcaatcactggaatggtgctgggctgtcgggaactaactgtggagaccttcacggcacttcactctgggggaccccgcattattccacaagcctgtggggtcccccaagcagcagcgacccccgaggaattagcagcccatctcccattaacgcttttctttctgttgaccacctgggtgggggtggagagtccatgtaacagtgtagatgcagactcaccgaccgggacctcagacgcgagggaaaggagcactaagtggggctcgccgcctgcagccaggggccgcctgtgggaacagctattctctgcacattttccactttgttttccccaaaacatatcagtttgaatacttgaatcatgcaggccaatattataatgtgaaaaggtatctactctatttacactcccaaatagcgccatacatgctaaaccgtagagaatgagctcgcttgtgtctattcatcatgtttagcctttggattctttttttttttttccttctattcctccccaacccccccccccgcccctttttttctctcttgcaaaaccattttttgggctgataacgtatgagcttttccctttgcactgaatgatgttctctccgtctcatcggcagtatggggggcagctgtcccagtgtcaatgtttactcaagggtgttcttaggaggcgtgcgctctctactatgccttgatgttgcctaccttattgtggtatcgtggagtttaaaagatcaagttaggatgctgacttaggattattaatgaaagtgttgcaccagttttttcatgttgtaaaactaaagaatttcgctctgcagtttgaaaaactgtggccacagctgtgacttgcagcccacctgccacccaggacgggccctgcactttgaataggctttccattttgttttggaggttctcactttgaaccttcttgtttacagatttttttgtttgttttttgagaaaaaaaaatgtttactcttccatcatttaaaaaaaatgtaaaagacaaaaaaaaaatggaggatgatttaaaagatgctttctatctctgggaaaaaggagcagcatttggccatgttcttttgtttttctattcctgtcccaaatcaaagagcatggttctcaggaaaaccagttccccagtttaaaaaaaaaaaaaaaaa

SEQ ID NO: 194637 - DNA, 587 bp, Homo sapiens
  Payload ID: 18465
  Gene Name: trinucleotide repeat containing 6A
  ENST ID: ENST00000569098
  CDS Start-End: 1-483
agtacagcacaaagcacttcagccagaaatagtgattccaaattgacatggtctcctggttcagttacaaacacctctctggctcatgagctgtggaaggtccctttgccacctaaaaacatcactgctccgtcccgcccacctccgggactgactggtcagaagccacccttgtctacgtgggataattctccccttcgtataggtggaggatggggaaattctgacgccagatataccccaggttccagctggggtgagagcagctcagggagaataacaaattggcttgttctaaaaaaccttacacctcagatcgatggctcaactctgcgcactctgtgcatgcagcacggcccgctgatcacattccacctgaacctccctcacggaaatgctctggtccgctacagttcaaaagaagaggtagtgaaggcacaaaagtctctgcacatttcagatcttttcctgctgaccctttgatttcaaatgtgcagaggggtgtctcggaacaaaagccagaactggaacccatatggaccttgacagagaccaggccttcagccctggcggaactttgcatgaat

SEQ ID NO: 194638 - DNA, 609 bp, Homo sapiens
  Payload ID: 18465
  Gene Name: trinucleotide repeat containing 6A
  ENST ID: ENST00000568750
  CDS Start-End: 1-609
atcaggatggcattgtagcagatgaatcccaaaacatgcagtttatgtccagtcaaagcatgaagcttcccccttcaaatagtgcactacctaaccaggcccttggctccatagcagggctgggtatgcaaaacttgaattctgttagacagaatggcaatcccagtatgtttggtgttggaaacacagcagcacaaccccggggcatgcagcagcctccagcacaacctcttagttcatctcagcctaatctccgtgctcaagtgcctcctccattactctcccctcaggtagccatgctgaaccagctatcccagctaaaccagctttctcagatctcccagttacagcgattgttagcgcagcagcaaagggcgcagagtcagagaagcgtgccttctgggaaccggccgcagcaagaccagcagggtcgacctcttagtgtgcagcagcaaatgatgcaacaatctcgtcaacttgatccaaacctgttggtgaagcagcagactccaccatctcagcagcagccactccatcagccagccatgaagtctttccttgacaatgtcatgccccacactacacctgagctgcaaaaagggccatcac

SEQ ID NO: 194639 - DNA, 610 bp, Homo sapiens
  Payload ID: 18465
  Gene Name: trinucleotide repeat containing 6A
  ENST ID: ENST00000569376
  CDS Start-End: 1-290
cccacactacacctgagctgcaaaaagggccatcaccaataaatgctttcagcaacttccctataggcttgaactcaaacttgaatgtaaatatggatatgaacagtattaaagagccacagtcaagactaaggaagtggacgacagtggacagcatttctgtgaacacatctttggatcaaaactccagcaaacatggttttgttacatctggacttactactgatgtagcccagatcggcgtgcttagactgacgtgtgcggatgagaaggaatgcagaagtgattgaggaaaagttaagcatgaagtcttgggcaaaatttcgtcctggtgagccatggaaaggttatccaaacattgaccctgaaactgacccttacgtcactcctggcagtgtcataaacaatctttcaattaatactgtgcgggaagttgaccacctcagggacaggaacagtgggtcatcctcatccttgaacaccacgctgccttcaactagtgcctggtcatccattcgtgcctccaactacaacgttcccctcagcagtacagcacaaagcacttcagccagaaatagtgattccaaattgacatggtctcctggttcag

SEQ ID NO: 194640 - DNA, 7956 bp, Homo sapiens
  Payload ID: 18465
  Gene Name: trinucleotide repeat containing 6A
  ENST ID: ENST00000491718
  CDS Start-End: 1-122
caaaccttggatctgctgttaaggtgttaaacagccagtcagaaagcagtgctttaacaaatcaacagccacaaaataacggagaggtgcagaacagcaaaaaccagtcagtgaataagtagcagatcctggactcacatcaagatctgtctgactccaaagatatgcttgtaaccaccatgctgtgctttggcaacatacaggatgtgattggtaatgaggaagaggacacaaatatataaaccacagtacttcaggatcccattatgaaaattcccagcggggacctgtgtcttctacaagtgattctagcacaaactgtaagaatgctgttgtaagtgacttgtcggaaaaagaagcatggccctcagcccctggcagtgatccggagttggcttcagaatgtatggatgctgattctgcctccagttctgaatcagagagaaacatcactatcatggcttcagggaacacaggtggtgaaaaagatggccttcggaatagcactggacttggttcccaaaacaagtttgtagttggtagcagcagcaataatgtgggccatggaagtagtactgggccatggggtttttcccatggagccataataagcacatgtcaggtctctgtggatgctcctgaaagcaaatctgaaagtagcaacaatagaatgaatgcttggggcactgtaagttcttcatcaaatggagggttaaatccaagcactttgaattcagctagcaaccatggtgcctggccagtattagagaacaatggacttgccctaaaagggcctgtagggagtggtagttctggcattaatattcagtgcagtactataggccagatgcctaacaatcagagtattaactctaaagtgagtggtggttctacccatggtacctggggaagccttcaggaaacttgtgaatctgaagtaagtggtacacagaaggtttcattcagtggtcaacctcaaaatattaccactgaaatgactggaccaaataacactactaactttatgacctctagtttaccaaactccggttcagtgcagaataatgagctgcctagtagtaacacaggggcctggcgtgtgagcacaatgaatcatcctcagatgcaggctccatcaggtatgaatggcacttccctttctcaccttagcaatggagagtcaaaaagtggaggctcttatggtactacatggggtgcctatggttctaattactctggagacaaatgttcaggccctaatggccaagctaatggtgacactgtgaatgcaactctaatgcagcctggcgtaaatggtcctatgggcactaactttcaagttaacacaaacaaaggaggtggtgtgtgggaatctggtgcagcaaactcccagagtacatcatggggaagtggaaatggcgcaaattctggaggaagtcgaagaggatggggaacccctgcacaaaacactggcactaatttacccagcgttgagtggaacaaactgcctagcaatcagcattccaatgatagtgcaaatggcaatggtaagacgtttacaaatggatggaaatctactgaggaagaggatcagggttctgccacatctcagacaaatgagcaaagcagtgtgtgggccaaaacaggaggtacagtggagagcgatggtagtacagaaagcactggacgccttgaggaaaaaggaactggggaaagtcagagtagagacagaagaaaaattgatcagcacacattactccaaagcattgtaaacagaactgacttagatccacgtgtcctgtccaactctggttggggacagactcctattaagcagaatactgcctgggatacagaaacatcacctagaggggaacgaaagactgacaatgggacagaggcctggggaagctctgcaacacagacttttaactcaggggcatgtatagataagactagccctaatggtaatgatacctcatctgtatcagggtggggcgatcccaaacctgctctgaggtggggagattccaaaggctcaaactgccagggggggtgggaagatgattctgctgctacaggaatggtcaagagcaatcagtgggggaattgcaaagaggagaaggctgcatggaatgactcgcaaaagaataaacagggatggggtgatggacaaaaatcaagccaagggtggtctgtttctgccagtgataactggggagaaacttcaaggaataaccattggggtgaggccaataagaaatccagctcaggaggtagtgacagtgacaggtccgtttccggttggaacgaacttggtaaaactagttctttcacttggggaaacaacataaatccaaataattcatcaggatgggatgaatcttctaaacctactccttcccagggatggggagaccctccaaagtctaatcagtctctaggttggggagattcgtcaaagccagtcagctctccagactggaacaagcaacaagacattgttggatcttggggaatcccaccagctacaggcaaacctcctggtacaggctggctggggggacctataccagccccagcaaaagaagaagaacccacaggctgggaggaaccatccccagaatctatacgtcgcaaaatggagattgatgatggaacttcagcttggggagatccaagcaaatacaactacaaaaatgtgaacatgtggaacaaaaacgtcccaaatggcaacagccgttcagaccagcaagcacaggtacatcagctgctaacgcctgcaagtgccatctcaaacaaagaggcaagcagtggctctggctggggtgagccctggggggagccttctactccagccacaactgtggataatggtacttcagcatggggtaagcccatagacagtggtcccagctggggggaacccattgctgcggcatccagcacatccacgtggggctccagctctgttggtccacaagcattaagcaaatctgggccaaaatctatgcaagatggctggtgtggtgatgatatgccattgcctggaaatcgccccactggctgggaagaggaagaggatgtggagattggaatgtggaatagtaattcatctcaagagcttaactcatctttaaattggccaccatatacaaagaaaatgtcatcgaagggtctgagtggcaaaaaaaggagaagggaaaggggaatgatgaaaggtggaaacaaacaagaagaagcgtggataaatccatttgttaaacagttttcaaacatcagtttttcgagagactcaccagaggaaaatgtacaaagcaataagatggacctttctggaggaatgttacaagacaaacgaatggagatagataaacatagcctaaatattggtgattacaatcgaacggtcgggaaaggccctggttctcggcctcagatttccaaagagtcttccatggagcgcaatccttattttgataaggatggcattgtagcagatgaatcccaaaacatgcagtttatgtccagtcaaagcatgaagcttcccccttcaaatagtgcactacctaaccaggcccttggctccatagcagggctgggtatgcaaaacttgaattctgttagacagaatggcaatcccagtatgtttggtgttggaaacacagcagcacaaccccggggcatgcagcagcctccagcacaacctcttagttcatctcagcctaatctccgtgctcaagtgcctcctccattactctcccctcaggttccagtttcattgctgaagtatgcaccaaacaacggtggcctgaatccactctttggccctcaacaggtagccatgctgaaccagctatcccagctaaaccagctttctcagatctcccagttacagcgattgttagcgcagcagcaaagggcgcagagtcagagaagcgtgccttctgggaaccggccgcagcaagaccagcagggtcgacctcttagtgtgcagcagcaaatgatgcaacaatctcgtcaacttgatccaaacctgttggtgaagcagcagactccaccatctcagcagcagccactccatcagccagccatgaagtctttccttgacaatgtcatgccccacactacacctgagctgcaaaaagggccatcaccaataaatgctttcagcaacttccctataggcttgaactcaaacttgaatgtaaatatggatatgaacagtattaaagagccacagtcaagactaaggaagtggacgacagtggacagcatttctgtgaacacatctttggatcaaaactccagcaaacatggtgctatttcaagtggtttcaggctggaagagtctccatttgttccctatgactttatgaacagcagtacttcaccagccagtcctccaggttcaataggagatggctggccacgtgccaaatcgcctaacggctctagcagtgttaattggccaccagaatttcgtcctggtgagccatggaaaggttatccaaacattgaccctgaaactgacccttacgtcactcctggcagtgtcataaacaatctttcaattaatactgtgcgggaagttgaccacctcagggacaggaacagtgggtcatcctcatccttgaacaccacgctgccttcaactagtgcctggtcatccattcgtgcctccaactacaacgttcccctcagcagtacagcacaaagcacttcagccagaaatagtgattccaaattgacatggtctcctggttcagttacaaacacctctctggctcatgagctgtggaaggtccctttgccacctaaaaacatcactgctccgtcccgcccacctccgggactgactggtcagaagccacccttgtctacgtgggataattctccccttcgtataggtggaggatggggaaattctgacgccagatataccccaggttccagctggggtgagagcagctcagggagaataacaaattggcttgttctaaaaaaccttacacctcagatcgatggctcaactctgcgcactctgtgcatgcagcacggcccgctgatcacattccacctgaacctccctcacggaaatgctctggtccgctacagttcaaaagaagaggtagtgaaggcacaaaagtctctgcacatgtgtgtactggggaacactactattcttgctgagtttgccagtgaagaggagatcagtcgtttctttgcacaaagccagtctctgaccccttctcccggctggcagtctctcgggtccagccagagccggctgggctccctcgactgttcccactcattctccagccggaccgatctcaatcactggaatggtgctgggctgtcgggaactaactgtggagaccttcacggcacttcactctgggggaccccgcattattccacaagcctgtggggtcccccaagcagcagcgacccccgaggaattagcagcccatctcccattaacgcttttctttctgttgaccacctgggtgggggtggagagtccatgtaacagtgtagatgcagactcaccgaccgggacctcagacgcgagggaaaggagcactaagtggggctcgccgcctgcagccaggggccgcctgtgggaacagctattctctgcacattttccactttgttttccccaaaacatatcagtttgaatacttgaatcatgcaggccaatattataatgtgaaaaggtatctactctatttacactcccaaatagcgccatacatgctaaaccgtagagaatgagctcgcttgtgtctattcatcatgtttagcctttggattctttttttttttttccttctattcctccccaacccccccccccgcccctttttttctctcttgcaaaaccattttttgggctgataacgtatgagcttttccctttgcactgaatgatgttctctccgtctcatcggcagtatggggggcagctgtcccagtgtcaatgtttactcaagggtgttcttaggaggcgtgcgctctctactatgccttgatgttgcctaccttattgtggtatcgtggagtttaaaagatcaagttaggatgctgacttaggattattaatgaaagtgttgcaccagttttttcatgttgtaaaactaaagaatttcgctctgcagtttgaaaaactgtggccacagctgtgacttgcagcccacctgccacccaggacgggccctgcactttgaataggctttccattttgttttggaggttctcactttgaaccttcttgtttacagatttttttgtttgttttttgagaaaaaaaaatgtttactcttccatcatttaaaaaaaatgtaaaagacaaaaaaaaaatggaggatgatttaaaagatgctttctatctctgggaaaaaggagcagcatttggccatgttcttttgtttttctattcctgtcccaaatcaaagagcatggttctcaggaaaaccagttccccagtttaaaaaaaaaaaaaaaaattccttgtagtttcttagaggaaaaaaagaaaaaccccaacttttagcactgatactacatattgctctgttaaagaattttctctgccaaaaaaaaagaaaaaacaaaaaaacgcttaaagctggagtttgacattctgctttcagatgctgtctttttattagtgagtgatgatggtttgctaataatcaataggtaataattttttgtaatcccatcaagtggctccatatgtttctgctctctcgtgactgtgttaatgtttaactgttgtaccttaaagccgaaatcagtaactatgcatactgtaaccaaggtattgggcttacagagttgtttgttgtataaagaaaattttaaatgttgttgcaaactaacgagttacaccattttaaactttctttcctcccccctttttttgcccacaaatggtattataatgcttgcttagtcaaagaagagagactaaacaagggtaaaaattttaacagtacagaatttgccatcatatcattgccttgattctaactgtttgtgtcctaagatgcaaaagaagtcagtggcttttaactgtttacaaatagaatgtgattgtaaaatgtacagtttggttgtgtttgaattatgaaatttcttcagatataataaaccatgactttttggctgctcaacattaattgtctcctttttgtgaatttatttgtaggctcttttttataatgaaagtttcaaagttgctatgtatgagggttctcatagagcaaccgattaaaaatctaagcaaatatttgaacattttatctgaactcatcacaatttcaccctgaaataatgtgagaacaatgggaaactgtagcttgctccttcccaccctctctgagcatctttgggatcttgttgctcaaaactcttctgtgacttcatcttccccaccatttgtgcccatctcaagcctcagcaagaaaccatgtggaacatgaagcttaatgacttgacagtgtactagtgttaaactctcatacctctgttacaaagcgagaaacgccacacccggactggccttttcttcccccttcacggccctcgcttctccctgcaggagctcgggggcgaaacctgtgtatggatttcagtgtatgacttcagatcatgctccaacttgccaggtgtgagctaatgttgtcggacaccttactataagcaaatgttattcagtgcgttcaatgtatattgacttccatactggtttttccaaaaaccaaaggtagctttgaaaaaccatgtctggaaatgtttggagcgttaagctgattgaccttctgaccttggggctttgagtagtatataattcataactgcgttaattgtattgttaaagtgtttgggagttttttgcgcttgttatgtggaaataaagtgtttgatttaaaattttttaaa

SEQ ID NO: 194641 - DNA, 15958 bp, Homo sapiens
  Payload ID: 18466
  Gene Name: trinucleotide repeat containing 6B
  Uniprot ID: Q9UPQ9
  ENST ID: ENST00000301923
  CDS Start-End: 303-3392
ttgtttattttgtttttagtttttggggtccccgtgctgctgcaaggcgaaacgggagggagtgacccctgcgcccctcagtcccccctacgacgtcgcctccatagtctgcggagaagcggagactgcgcgcctcgcctcacagcgaaacgccgcgcactcggagccggcacggctcggcgggttgtggttttttgcactgaatgtaacctagactcatcttcacgggcttgtgttgccccaggtactgtcaaaggcagtatttttgtgtttctgcagagttttgcacaaaatctgttcccatgcaaaccaatgagggagaagtatcggaagaaagcagttccaaggtggaacaggaggattttgtaatggaagggcatggcaagactccacctcctggtgaagaaagcaaacaagagaaggagcaagaaagggaagaacagttaatggaagacaagaaaaggaagaaagaggataaaaagaaaaaagaagccactcagaaggtcacggaacaaaaaaccaaagtgcccgaagtgacgaaaccaagtttaagccaaccaacggccgccagcccaattggcagctctccatcgccaccagtcaatggtggcaacaatgccaaaagggtggcagtgccgaacggacaaccgccaagcgccgcccgctacatgcctcgggaggtgccgccgcgattccgttgccagcaggaccacaaagtgttactaaaacgtgggcagccccctccaccgtcctgcatgctccttgggggtggggcagggcctcctccctgcacagcacctggagcaaacccaaacaacgcacaagtgacaggagcgctgctgcagagtgagagtgggactgcgccagtctggagcaaaagcacaccacctgctccagataatggtacttccgcttggggtgagccaaatgaaagcagtcctgggtggggcgagatggatgatacaggagcatcgaccacaggctgggggaacacgcccgccaacgctcccaatgccatgaagcctaattccaaatctatgcaagacggctggggggagagtgacgggccagtcacaggagctcgccatcccagctgggaagaggaggaggatggaggagtctggaacaccactggctctcagggcagtgcttcctcccacaactcagcaagctggggacaaggaggaaagaaacaaatgaagtgctcactcaaaggaggaaacaatgattcatggatgaatcctcttgccaaacagttttcaaatatgggattgctgagtcagactgaagataatccaagcagcaaaatggatttgtctgtaggaagcctttcagataaaaaatttgatgtggacaagcgagcgatgaatctcggggattttaatgatatcatgaggaaggatcgatctgggttccgtccacctaattccaaagacatgggaaccacagatagtgggccttattttgagaagggcggtagtcatggtttgtttggaaacagcacagcacaatcgagaggtctgcacacacccgtgcagccactaaattcttctcccagtctccgggcgcaagtgcctccccagtttatttccccccaggtttctgcctcaatgctcaagcagtttcccaacagtggcctgagtccaggtcttttcaatgtggggccccagttatctcctcaacaaattgccatgctgagccagcttccacaaattccccagtttcagttggcatgtcagcttctcttgcagcagcagcaacagcagcagttgttacagaaccagagaaagatttctcaagctgtacgccaacagcaagagcagcagctggctcgaatggtgagtgcactgcagcagcagcagcagcagcagcagaggcagccaggcatgaagcactcgccctctcatcctgttgggcccaagccgcatctggacaacatggtacccaacgcattgaatgtggggctcccagaccttcaaaccaaagggccaatacctggatatggttctggcttcagctctggcggcatggactatggcatggttggtgggaaggaggctggaaccgagtctcgctttaaacagtggacctccatgatggaggggctgccctctgtagccacacaggaagccaatatgcacaaaaatggcgctatagtggcccctggtaaaacccggggagggtcaccgtacaaccagtttgatatcatccctggtgacacactgggtggccatacgggtcctgctggtgatagctggttacctgccaaatctccaccaacaaataaaatcggaagtaaatccagcaatgccagttggcctccagaattccaaccaggagtgccatggaaaggtatccaaaacattgaccctgaatctgacccctatgtcaccccaggaagtgtgctggggggtacagccacatctcccattgtagatactgaccaccaactgctgcgggataacaccacagggtctaattcttccctcaacacctcgctgccttcacctggtgcctggccctacagtgcctctgacaactcctttaccaacgttcatagcacttcagcaaagttccctgattacaaatcaacatggtccccagatcccataggacacaaccccactcatctctccaacaagatgtggaaaaaccatatttcctccaggaacactacaccgctgccccgcccacctcctggtctgaccaaccccaaaccatcatctccctggagcagcacagcaccccgatcagtcagggggtgggggacacaggactcacggctcgcctcggcctctacctggagtgatggtggctcagttcgtcctagttactggctggttcttcacaatctcaccccacagattgatgggtcaaccttgagaacgatctgcatgcagcatggcccactgctgacattccatctgaatctaacccagggcactgccctgatccgatacagcaccaaacaggaggcggccaaggcccaaactgcactgcacatgtgtgtgttgggaaacactaccatccttgctgagtttgccactgatgatgaagtcagccgctttctggcacaagctcagccccctacacctgcagcaaccccaagtgcgccagctgcggggtggcagtcgctggagaccggccagaaccagtcagatcccgtgggacctgctctgaatctttttggtgggtccactgggctcgggcagtggagcagcagcgctggtggcagcagcggggccgatcttgctggcgcttcattgtgggggcccccaaactattcttctagcttatggggagtcccaacggtggaagatccccataggatgggcagccctgctcctttactacctggtgaccttctgggaggagggtcggattcaatctgaacttagaactttcaactctgacctcgtgaccttttttggaacagcagcagcactaacttgaccttttcgttttttttttcaacttgcaataaatacatttttaaaaggaaaaaagaaaacggagagaaaaaaaggtgggtcattgacagactgtctgagcacatagttgcctcccttataacttcagttttttcgtttggaatatgaatccaaaaagagaacatatcactcttgaaatacttgaatcatgaacgccaacctagaaagacaatgtgaagcaagtacacataccatttaaatttaaacacaaaaaaattaaaaaaattagtttctagtttttcacttttttcatgttatatggaagttgttgctaagaaacatatatactgaaaaaaaatagctttttaactttgtttgcactgggtgtgtttccgtccttaggtctaccatgtttgggagggagggaaattcaaaagaattgttgggggaggggggagggaagacttgacggagcctcactttaaaaacaaaaacacaaaaaacctaaaaaaaaaaaaaaggaaaaaatttgtgattggctggttgataaataccagtgtgttctggcacatgtaactgcccaggcatgctcgttctggtgtgtgtgtgcacgtgtgttcatgtgcattcgcgtgcatccttctctgtctctgtgtgtgtgcctgtgttcttcccttctcccctgccccaccctgacttctcagaaagctgcatcgctgacagtctgcaggctggctggccggcccatctgctttttattttatttttttaactatgagaacacacaggcccggagagccactgctactaaagcaactccattgggctgcattaagatgaacagagtgctttttaatgatgaaagcagggagctcctttccatttgcaacttagcctgaatgtggggtttctctggctgttcttttgacctagcagtagagtggagcactgccaagtccaaaaaactagagcaggaggtacctcttggagcaacggtgtgtttatttctgtttttttttttttttaagtgaatggccaccaggcacatctgagtatctgttaagtttcatgcaggccttttcgttagtttgaaatgggaacggaagataacttttgatgatgcgatgtctcaaaaacagagaaactttgttccctctttccttatgatcaggtttgagaaattcttcaaaaaattaggtgaagttgagttacatatttctgttggttggttctctttttcattttatgaaaacagaaaagaataagtggtgagcagcctcctgaaagcatctgcagctactccctctgctcctttctcgccgagcgttacctgtgccaggccgtggcgcgttacagcaccaggccatcactgacagaaacgtttacttaacgaatgttcttaaaccagtgtgtacttcaagcgtttccttttgtttctctgtgttgtgtatttcctgtgtatgtggttttgcttaggcaggtataacttagcgaagacttttaagtattgcacctttttttgatttttgacctcttccccccaccttgtaattttgcttttttaatttcggtatttaaatacttttttttttttttaagcatcaatgtagtagtactctgggccgaacaggggtcaacgtttaatctacagttatcaccaacatgtatgtacttatgtcggaatcaaaatgtatcaaactgcttattgtgaagagaattatagcagacctgaagggggcgaaaaaccagatagggtggggggatggatgccggtgacgtgctagcacttgtgtggacatcccagtctgcattatgctgtttaacataaagtgccgacattttgtaccagcaaatacctgcccattccaacccttggtgggagcagacctctactgtcctctgtaacttgctgctattgaggacaagggagtttttctttctttagcgtcttcagtgaaggatacaatacaacaatgcctaatgtatttgactttttagcttgtgtctgtgtgtaggtgggtgggtgggtgtgtataggaaaagcctaaaacaagttatttgcatttcagtggttttgtgagacaaagaatgggaaattctgtagcccttctggcttaccctgttgattataaacctagcctcaaaagagattgacaggcatgactcaagtgagtgttcacatatacaagcctgcatgagccctctgtgggtaggtggtcacacttggcatctgcagcattgacgtggccccgctgggtgccttgagcatgccctcttcctgctctgcaatttgaatcaccaccgtgccccttccaccactgttccccatgcaaaagctctgcttccagcagcccccactgaccgctctctgtgtggagcaaagtgctgtcgtgcggtgaccaccaggtgaagagcagcttgtattcagacatctagagaaggttaaatcttagtgtccctgggccaggagcatatcccaaggctcctgcgagccagtggcgaccctgtccactgccgctcttggttcactgctgtgtcctgccccaccctcctctcctcctgcctgttggttccttgacctgcactatgggttagttgagttccttacgatactacggtgaaagccgggtgctagagcccctcttgtttacaagacataatgagggatttgaaatatgtaaaaataaacatgagaagctaaaatgttcttccatcataagcttaaagggaaaaaaactaaaaactttaaaaaaaaaagaccaaaaagtgcgtatatatatacatataaatatatattttagatgaagactaactctgggagcatttaacagtgttttttgtttctgtttttaacatttgttttcctgctttaaaatttgcaagcattctcaggaattctagggtaggaagccagttttttgaagatggtttatttaaccatatcttatcctagagagatggctgtttctttcctgttaataaacttttacaagttcctgaaacttcagaaagtttaaacaatttttacttaaaaaaatgtaaaaagaaaagtctccaaacattattgtcatactggggatcacacattttaaaacacatagaaatattttttaaaaattatcaatttagcagcaacaggtaaattcattatcttaaaaatatgggagaaggattaagctttgtaagagctcgatcatggattcttttgaaattgtgtgtagtttaatgggagagtgtttggtgtatatagatgagaatgccatcactttgttcctttccatttgagactgaactgaaatctcccctagtaatttttatttttttaaaggaacccttctccttgtccccacaaccccagcaacaaaagaaaggaaggaaggaagaaacaacagcttaaaaaaaaaagtaatctgtaaaatagtacagttggattgctgagaatctatgtaaagagttaggaaatataggttaataatttttggaacaaattttaaatataggcattactagaggaaaattatctatggactgtcctattaatgaagaatgtctgtcttacctccgtttgttttgggaggaggagaaaatatagaagaatctaataaggaacaagtgattttacttttttagctcccagctactgttgtgctcgttttaattgctgttttgaagatctgctgcttaattatccccatcccttagccggagatgtggagtgtttcctttcagtttttggtgatgttgaattcttttgtattccctcctggggccaggggtcagaattcccaagcatgaccacagcttcttttaaacattaagcttcccagtgggaaggaaactccagctcgacaggtaaagggagtgggtggggttgctgcctgcaatttctctaaaaccgctttagtgccttcgtacatacacccagacatcctgagcaagggggacgcacatgtgtgtgtgtgtggtccagtcactccacagatgtaagatactcacccataaaggaaattggagtggttctggacaggccccaaaggcagtgggctgaatttaaaataaataaacaaacgtcaagcaagttaatatgcttatgtctcagtaatgtagaatgccaagttccttcctgtgtcgtgtgccctccattactgtgcattgattcctccaggtgtgtaattgtgacaactgcagtgatttggaaagtctctttgtcttgggcaaatagaaggggttcctgttgttctgctcttgtccttcgtctcctccccttttcccccagacctcccccttctttttgtcaacttgctgggagctttgctttattggttggcagtgacctaagaacaggatatggtgaggatgtcatggaagagaagagctctttccgtggtattctttggcaagagccatgtctactaagaggttagatgacttcagtatacttataaaattcagtgagagtgccttcttctcttctaccacactctggcatagatacaggcttgctggtcacctctcattacatagatttattttaaaaacattttgattatgttaatttgagctttcccttttttttttttaactactttttaaaacacttgattactagtggcttagaggtgtgtacatctcctgaacatcacaaacttggtttctacctaccacacgagtagccaaaagaaaagaagcactaatagagaaaggggtgtctcacaccagacagaggacctctgctgtcaattagatccagtatcatgacctaactttaagtgtggaaaagagttcagatctctgagacactgtgaagaaatggatggctcatgtaacatctctgatccctcagtccccaaccctggacgtgtttcatttacaacattcataggagttaacttagcagtgttgcaagttaaggttccaaaccaaattatttaatcagtgtccccccaataaatcacttatccatttattgctagttagttttatttatagcaacttgatttcctatgagtatggctcctgttgtaagaattttcccacctcttctgacatgaatgtagcataagttagcaatcggttcttccaaactcctgtgggttgaatatggtatagaaggtatgcaagaggaaaaagaaaggaaaagataaaactcctgcctgagaatttggaagcacctttattaacacatatatctcgcagaaactagaagctcataggctgttaactttttgcaactattcactcatttttaccacttttttttttgggtgagggggtgatttttgtaaggttaacagccagattccattttgacctcagatgctgtgtactttttaatttcattttttatattctgccatcttgactcttctctaaaacagaatgaaaatgtctgcatgctgagcaaaatgcttacgccaagcctgtttttctctgcagagtaaacaggatgttttcagcagacttggctctaatagccatctctaagattagggaacaattgagtctttatgtagaaaagatccattttttccccatcctcagagttaaaattcaacatttaaagctttatcggttattgttttagatttgagatttttgtttttaagtatctataagatctttagaagtgagataaatttttcgctggttaaaaaaaatcaaactttcctctgcagtgtttttgccaagttttgtcacacttcatgtgtatgcattaactatacttcttagtgttactgcaaaaaaaaaaaacaaaaacaaaacaaaaaaaagccttgttctttaattgtgtttttcctcctgtgagtggacaactaaagccgcgtgatgatgcggatgaaaatattctggtctgtgtgtatacaatgaattgtcagtcttcagacctcatggtcgttaagaaaatagggaactcacaaaccctgctgcgcactacatttacttctttatctgcaagtacagggagtccatacagtcaagaaacacacagatacacataatgctattgaggacattgtcattctgtaagaaaacagaatattatctagatttccagagttagtgcagaccctgtgataacagtctgtgggtttgtggccagcgccaaaggtgtgtgtattttcagaaatggtccctatttgtcagtgatagtgttttttttttcttaagtttgacaaagggggtggtaatatcacattctttagatttgaaataattatcagctccaagaatctgtgaacatagtaataacaataaaaattcaacatcgaccctccctaacctgctcaccatacctccccaccccatgcctctgaagaaagaggccatgaacctacgaggtggtaaagggggacacaggtcagggagtggagagctactcctccagcagctcagcacccacactgcccgcatgcgtgtggccaccgggaccagatcccgagtgattgtggcatacccctaatatttgagtagtttttaagctgtcagtctcttgtcataacctcctaccgccacccaaaaaagtaacgaaagttgcagtaactgccagtgtttgcctcaccaaatttaaatcgttcccttttcagttagctatatacctgaatttgtttttaacaagaaactgtacatggccaggaaaaatggtactaccttggccaaagggtctttgcaaaaagctcagtcttcagttcttcactgtgacaaatgcttatcttgttcatgggaggggaaagatcagataaataggcaagaagtactctgttttaaataaagaataaatagtgtccgtttaaagcactttgtgcctcaacttcatttttaaactgtaaatcattgctttggaaataaattcccaattataattgacccatatctagccaatatcaacaagttgggatggtttttgtttttttcttttttttcaaaaagggaaattcctctttactgctcacagtaagctgcaaaagaaagttgtcaaggtggcttatgatgctgttgtagcagagctgtgaaaggaagtgctttgctttctctcccgccttccggaatctggcgttccttccccttcggctactgaaaggtgtgtacaactcccagaggggtggctgtaaaagttgactggaggcaaagtggagtggccttattgccaggactagccctacagaagagctttacagagaggaggacagtacatcctatgtgtgttcgccaaaaatgggaaaggtgggtatttaggcaaaacaaaataaaaacctttggaaccctttaagaagttacataccttttaaaggtagtatagtttctcaccaagtgatgcattttagcatgacacttcttgccagaaattttgggataagttggaataaatgtgtttaaaacatcatccaccgccctttttaaattttgtctaaggaattacttaagtatagtatttctgaatgtgcctttgtgagtacagagaccgtccgttctaggaagaagctatccgttggatacaaacaaacagacggtcagctttagtcattagggaagtcaaagttcctcctggaagtcccaggagcagctgttgagatttcattagcatcaatattgcacagtgtagagttgagtggaagagattctgggacttgggagaggagacaggggaaggtacccaggcgacgcagacccacgttagtccaagagcgcaggtttacacatctgcattccctagttttctccgtctgtatgtttgtgctcatgtggctttggctgttttgttttttgtttttctgtaagcactggagaattggaatatggtgatacttgtgacacattcatgcatgtaaacaaggcattttccagcttctgccgtgtgcagagcgggcagcacgcttttaccctttgagtctgtgtcctgaggcggccattacattcccacatgggcgtcacatcacgttgctgttgatgcaaacagggtattacacacaaggaaaaggggttttgaagagttaagattgaagtgtttgagaaagaaaagagaaaaatctgaaatcatattttatttcttcagagctattatagttgaacacagaaatctgcagtgtctttatttgtttttatgttttaaacaatttcacctcttctccccactcctatcttctaaagaaatatcaagcaaatgctaagggccatttccatgattcctcagagctcccccaaagaggagaacagtccctcccactcgattccttcagcttcattcaggaagacacagggaggagagatgctgcttctgcgctttgctctcattcctctctcatggccttgaaatgtattattatgcaaatgtgaattttgatactgaatttaagaagaggttgttggatttttttttttttttttttttttttcaaaaaaaaaagtcccacatgtggtcatcgtcgcttctttatgttgtaaggtgaattgtaactatgcattctgcaaagggggtggggaggagagggcagaaaggggaagggagtagcgttgcatccttgttcttcagtttctgtgtccatggtgtccccgtgtcctggaggggaaggggagtgagagacgaatgtggtaaggtcagcacagtgagatagagacctctgagtcctcttgccactgttgctggcaggtctgatggccaggtaaattccagggggcctgcagttcctgtcaaccaatgtggttcaggattcttgatcctagccgtgcagtgttaatccagtgcagcaatggaactccacaggctccagtgttctctggaaaaagtactcatcctttcctgaattcagagcccttcaagctcaggaaaccacgcttcactcgtgctgacctgaaagttaatctttaggtcgattttgaaaaactccgcctcctctctcctttttaatatttctttcttcctttttaatcatgtttaagtgaacttactcttagttataaggaactgtcctgctttgtggggaagagggctgttgcttgtcaggcaaaaaagttttctcttcctacccaccatccctctctctgcttcccttgcatttggcaggctgtatgaagccaatgagctgcgaggtgttttgacaggggaggtctgcatgcagcctcttctttgtcctaacaattcctttgttgatcttgcctgtgatgaatcatagcgcctgcattgctctggtctaggcattatttgcaacacacagtatcgtaagcgagagattgttctgcctatattcagtgttttccatgcagcaattcttcttgttgacgttcacagtactgtaacgagtaacagacttgatcacagtctcctcgtgcctgtgcagggctgcacaggcatgatcttatcagggttccaatctgttagattgcctttaaacaaaaaaaacaacaaaaaaataaaatcctgacgtttcaactgtctcacacaaaataatacctcgaggtacatttccccctgcaatgtaaacccttaactcctctctcctttctgacatcagtggattatcctttttaaaatatgaacatgtaaatagcaggataactttaaaaaacattttctttgctgtgaaagtaaccctaaaatatgttttcttcttttgtatttttttggtttttgtttttaagccatcagaagtttcagatctttactctttcatgtttaagaagaaagagcagaggaggtcgggggagccggtttgcatttgtgttggaggggtgttatctccattgcctcccacacagtgacagcagaccagtatgtaaaccctgtcttggctgggcgcggtggctcacaccagtaatcccagcactttgggaggctgaggcaggcagatcatctgaggtcaggagtttaagaccagcctggccaacatggtgaaaccccgtctctactaaaaaattagccggacgcagtggcgcgcgcctgtggtcccagctgctcgggaggctaaggcaggagaattgcttgaacccgggagacggaggttgcggtgagccgagattgcaccactgcactccagtgtgggcaacagagcaagacttcgactcaaaaacataaaataaacaaaagacacacacacacacaaaaaccctgtcttaaatagctgccatctcttccagcaatctagtgccagggtaagaagtgtctgaatttctctcttccagcagatccatcccctgcagggactccagaatgttctccacacaatacctggagctctcaacctttcttggttcagacacacacatacacaccccttgagtaactcagtatcattttgtagttcacagaaggatgtagtccctggcattttggtttgcactgtagaatccatagccttgtcactttgttatgctctggaaatgtactgatttcttacttgggaggaaacttgtgtaaggagatgtgcaaaccaccctgaaagccatgtgcatcctcacctcttccattaccccctccatgagctcgaagcgacattaagtagagggaaatgcttttaacaaatgctgctcatgtggatctgtcagctattgcttgcctagatttgggcacccatgaagcagggttggaatggatcattttgaattgcttctttgcagacacccccttcgcccccatctttaagataaaccctttactagtcaagaagcccttttcagttggatctcactgatcttgtatagtgacgacttcctttgaaggaagaagcttgattataagtgcatgcatattatccacccaccttctgatttgggcactgttcaccttggaattttatttattttgtttatctggaggccctttttctatcagtctctgatccctcatgggttctgcctgcccttgtatctcttgtacaatgctcccaaagggctttgctgatctctgcacttctttcctgggacactccccccaccaccaccctttgcacacaccagtgaccaaagtgtatgcagtgatctcacagaagacatcaaaaatggtgcatgcaccgtgaatgtgctcacagagacacgtgcacaagattctgcacccttggccttaatctcagtatgacttaaggtgcaggaacatttttaacaggttttaaaaaaacaaaaaacccttctgggaggaaaaaaataaaaagcagatacaacagctcaactgttcccactcctaactctccactatgtgcttataacttcacattctatgccctccccgccacccacctcatccctgttctgcgtaaccaaaaaacagacaacaaaagcaacctgaggagaggtttctggactattttatctgtctccatttagatggagatataaatgctgctttgggttccataatcctagggggctatgtttacatagtaaaatacatcctaccaaatcaggaaacagtgaataatgggagtcacttcacagagacgcaggaggacctggggggcgtagcagaggaggataggtagagaagtaccattttaattatttgtgacttgtggcttccttcctcctctcctcctccctccacgtctctctttgccccctttagacagaaggtgcagaaaagggcatcaaaaagaggctggattttttaaaaggcagctttccaactttgcacacaaacaggtaacaggaaggtacagcaaaaatcctctcatctgaaacactgtcagcagaaacaaaacctgtaaaaatgactaatcagctgcacatattgatgctctctgcaagttacctttaagtgttttttttttcttatacttgaagttgcttttacgatattattttggtggctttcttttctctctttgatgggcaatagaggaagtagataatgggatttaaggacgcctgggggagaaaagggaggatgtggcattgtctttttttttttttttttttttttttttagcatagaggtttaatcaaactcccatatgttgaaattgctcctcatattactggttttacatggacacagaaactaggcactttagaggtgcacttgcatggcaggctgggcccccttttctatattttattttcctttttagtatagtggtacttaaaatcactggttcacttaaaaaaacaaacaataaaatgttaaactctactaatgtacaaataagctgaaaagttgcattttatgtgtattttttgccatagcaggtactgtatttctcatgctggatttcaaaaaaaaaaaaaaaagtatcaaaaacaaaaaaaactaaagggtggtgttttattggattgtgacaggttgagtaataaggaattaagtcgtcgtcatttcattaaaactgagagatgatgtaatgcatatataagagttttctgaagggttttttttgggcttttaaacagcttatttttgtttttgtttagtttttttattttattttattttggaaagatatgattgtattatgtgcaactcagttgcttacattataactacaaaatatttttgggttcctggaaaaaaaagaaaaaagactaataaatgtgtttggctgctaagc

SEQ ID NO: 194642 - DNA, 17933 bp, Homo sapiens
  Payload ID: 18466
  Gene Name: trinucleotide repeat containing 6B
  Uniprot ID: Q9UPQ9
  ENST ID: ENST00000335727
  CDS Start-End: 195-5366
gagagagcaagagggagagtgtgtgagagagagttagttcaagccaaaatggccgacagagtctctgctggtttctgaatatttaaaatacaaaaaaacagatagacaaaaagaattcattttttggaccttttttcatttccatttctaccttgtatgcctcaatttgctggatttaagcactgctgcactttatgagagagaaggagcaagaaagggaagaacagttaatggaagacaagaaaaggaagaaagaggataaaaagaaaaaagaagccactcagaaggtcacggaacaaaaaaccaaagtgcccgaagtgacgaaaccaagtttaagccaaccaacggccgccagcccaattggcagctctccatcgccaccagtcaatggtggcaacaatgccaaaagggtggcagtgccgaacggacaaccgccaagcgccgcccgctacatgcctcgggaggtgccgccgcgattccgttgccagcaggaccacaaagtgttactaaaacgtgggcagccccctccaccgtcctgcatgctccttgggggtggggcagggcctcctccctgcacagcacctggagcaaacccaaacaacgcacaagtgacaggagcgctgctgcagagtgagagtgggactgcgccagactcaacccttggaggtgctgctgcttcaaattatgcaaattccacttggggctcgggagcctcctccaacaacggcacctcccccaacccaattcacatctgggacaaggtgattgtagacgggtctgacatggaagagtggccttgtattgccagcaaagacactgaatcttcttccgaaaacaccaccgataacaacagtgcctcgaaccctggctctgagaagagcactctgccaggaagcaccactagtaacaaaggaaaagggagccagtgccagtctgcaagttctgggaacgaatgtaatcttggggtctggaaatctgaccctaaggctaaatctgttcaatcttccaactctactacagagaacaacaatggactaggaaattggaggaatgtgagtggtcaggatagaattggacctggctctggcttcagcaactttaacccaaatagcaacccatctgcctggccagcactggtccaagaaggaacttctaggaaaggggcattggaaacagataatagtaattccagtgcacaggttagcacagtaggtcagacatccagggaacagcagtcaaagatggaaaatgcgggtgttaattttgttgtctctggcagagaacaggctcaaattcataacactgatggaccaaaaaatggaaacactaactccttgaacttaagttcaccaaaccccatggagaataagggaatgccctttggaatgggcttggggaacacctccaggagcactgatgccccttcacaaagcactggagatcgaaagactgggagtgttggatcttggggtgcagctagggggccttctggaactgacacagtctctggacaaagcaattctggaaacaatgggaacaatggaaaagagagagaggactcctggaaaggagcttctgttcagaaatcaactgggtcaaaaaatgactcttgggacaacaataacaggtctacgggtgggtcctggaactttggcccccaggactctaatgacaacaaatggggtgaagggaacaaaatgacatctggggtctctcagggagaatggaaacagccgactgggtctgatgagttgaaaattggagaatggagtggtccaaaccaaccaaattctagcactggagcatgggacaatcaaaagggccaccccctccctgaaaaccaaggcaatgcccaggctccctgttggggaagatcttccagctccacaggaagtgaagttggaggtcaaagcactggaagcaaccacaaagcaggaagtagtgacagtcataactctggccgtcggtcgtacaggcccacacatcctgattgtcaggctgtcttgcagactcttttgagccgaactgatttggaccccagggtgctctcaaacactggctggggccaaactcaaattaagcaggacacagtgtgggacattgaagaggtgccaaggcctgaggggaaatctgacaaaggaactgaggggtgggagagcgctgccacacagaccaagaactcagggggctggggagatgcacccagccaaagcaatcaaatgaagtctggatggggggagctctcagcctctacagagtggaaagaccccaagaacacaggaggctggaatgactacaagaacaacaactcttccaactggggaggaggacgacctgatgaaaagacaccttcctcttggaatgagaatcccagcaaggatcaggggtggggaggtggacgccagcccaatcaaggatggtcttctggaaagaatggttggggggaggaagtcgatcagacaaaaaacagcaattgggaaagttctgcaagtaaacctgtgtctgggtggggtgaaggagggcagaatgaaatcgggacttggggtaatggtggcaatgcaagcctagcttcaaaaggtgggtgggaggattgcaaaagatccccagcatggaatgagacgggccgacagcccaattcctggaataaacaacaccaacagcagcagcccccacagcagccgccgccaccacaaccagaggcttctggttcgtggggaggcccacccccaccacctccaggcaacgttcgaccttccaattccagctggagcagcgggccacagcctgcaacacctaaggatgaggaacccagtggttgggaagagccatccccacagtcaattagtcggaaaatggacattgatgatggcacttcagcatggggagaccctaacagttataactacaagaatgtgaatctgtgggataagaattcccaagggggcccagcacctcgagaaccaaacctgcccaccccaatgaccagtaaatcggcatcagattccaaatctatgcaagacggctggggggagagtgacgggccagtcacaggagctcgccatcccagctgggaagaggaggaggatggaggagtctggaacaccactggctctcagggcagtgcttcctcccacaactcagcaagctggggacaaggaggaaagaaacaaatgaagtgctcactcaaaggaggaaacaatgattcatggatgaatcctcttgccaaacagttttcaaatatgggattgctgagtcagactgaagataatccaagcagcaaaatggatttgtctgtaggaagcctttcagataaaaaatttgatgtggacaagcgagcgatgaatctcggggattttaatgatatcatgaggaaggatcgatctgggttccgtccacctaattccaaagacatgggaaccacagatagtgggccttattttgagaagggcggtagtcatggtttgtttggaaacagcacagcacaatcgagaggtctgcacacacccgtgcagccactaaattcttctcccagtctccgggcgcaagtgcctccccagtttatttccccccaggtttctgcctcaatgctcaagcagtttcccaacagtggcctgagtccaggtcttttcaatgtggggccccagttatctcctcaacaaattgccatgctgagccagcttccacaaattccccagtttcagttggcatgtcagcttctcttgcagcagcagcaacagcagcagttgttacagaaccagagaaagatttctcaagctgtacgccaacagcaagagcagcagctggctcgaatggtgagtgcactgcagcagcagcagcagcagcagcagaggcagccaggcatgaagcactcgccctctcatcctgttgggcccaagccgcatctggacaacatggtacccaacgcattgaatgtggggctcccagaccttcaaaccaaagggccaatacctggatatggttctggcttcagctctggcggcatggactatggcatggttggtgggaaggaggctggaaccgagtctcgctttaaacagtggacctccatgatggaggggctgccctctgtagccacacaggaagccaatatgcacaaaaatggcgctatagtggcccctggtaaaacccggggagggtcaccgtacaaccagtttgatatcatccctggtgacacactgggtggccatacgggtcctgctggtgatagctggttacctgccaaatctccaccaacaaataaaatcggaagtaaatccagcaatgccagttggcctccagaattccaaccaggagtgccatggaaaggtatccaaaacattgaccctgaatctgacccctatgtcaccccaggaagtgtgctggggggtacagccacatctcccattgtagatactgaccaccaactgctgcgggataacaccacagggtctaattcttccctcaacacctcgctgccttcacctggtgcctggccctacagtgcctctgacaactcctttaccaacgttcatagcacttcagcaaagttccctgattacaaatcaacatggtccccagatcccataggacacaaccccactcatctctccaacaagatgtggaaaaaccatatttcctccaggaacactacaccgctgccccgcccacctcctggtctgaccaaccccaaaccatcatctccctggagcagcacagcaccccgatcagtcagggggtgggggacacaggactcacggctcgcctcggcctctacctggagtgatggtggctcagttcgtcctagttactggctggttcttcacaatctcaccccacagattgatgggtcaaccttgagaacgatctgcatgcagcatggcccactgctgacattccatctgaatctaacccagggcactgccctgatccgatacagcaccaaacaggaggcggccaaggcccaaactgcactgcacatgtgtgtgttgggaaacactaccatccttgctgagtttgccactgatgatgaagtcagccgctttctggcacaagctcagccccctacacctgcagcaaccccaagtgcgccagctgcggggtggcagtcgctggagaccggccagaaccagtcagatcccgtgggacctgctctgaatctttttggtgggtccactgggctcgggcagtggagcagcagcgctggtggcagcagcggggccgatcttgctggcgcttcattgtgggggcccccaaactattcttctagcttatggggagtcccaacggtggaagatccccataggatgggcagccctgctcctttactacctggtgaccttctgggaggagggtcggattcaatctgaacttagaactttcaactctgacctcgtgaccttttttggaacagcagcagcactaacttgaccttttcgttttttttttcaacttgcaataaatacatttttaaaaggaaaaaagaaaacggagagaaaaaaaggtgggtcattgacagactgtctgagcacatagttgcctcccttataacttcagttttttcgtttggaatatgaatccaaaaagagaacatatcactcttgaaatacttgaatcatgaacgccaacctagaaagacaatgtgaagcaagtacacataccatttaaatttaaacacaaaaaaattaaaaaaattagtttctagtttttcacttttttcatgttatatggaagttgttgctaagaaacatatatactgaaaaaaaatagctttttaactttgtttgcactgggtgtgtttccgtccttaggtctaccatgtttgggagggagggaaattcaaaagaattgttgggggaggggggagggaagacttgacggagcctcactttaaaaacaaaaacacaaaaaacctaaaaaaaaaaaaaaggaaaaaatttgtgattggctggttgataaataccagtgtgttctggcacatgtaactgcccaggcatgctcgttctggtgtgtgtgtgcacgtgtgttcatgtgcattcgcgtgcatccttctctgtctctgtgtgtgtgcctgtgttcttcccttctcccctgccccaccctgacttctcagaaagctgcatcgctgacagtctgcaggctggctggccggcccatctgctttttattttatttttttaactatgagaacacacaggcccggagagccactgctactaaagcaactccattgggctgcattaagatgaacagagtgctttttaatgatgaaagcagggagctcctttccatttgcaacttagcctgaatgtggggtttctctggctgttcttttgacctagcagtagagtggagcactgccaagtccaaaaaactagagcaggaggtacctcttggagcaacggtgtgtttatttctgtttttttttttttttaagtgaatggccaccaggcacatctgagtatctgttaagtttcatgcaggccttttcgttagtttgaaatgggaacggaagataacttttgatgatgcgatgtctcaaaaacagagaaactttgttccctctttccttatgatcaggtttgagaaattcttcaaaaaattaggtgaagttgagttacatatttctgttggttggttctctttttcattttatgaaaacagaaaagaataagtggtgagcagcctcctgaaagcatctgcagctactccctctgctcctttctcgccgagcgttacctgtgccaggccgtggcgcgttacagcaccaggccatcactgacagaaacgtttacttaacgaatgttcttaaaccagtgtgtacttcaagcgtttccttttgtttctctgtgttgtgtatttcctgtgtatgtggttttgcttaggcaggtataacttagcgaagacttttaagtattgcacctttttttgatttttgacctcttccccccaccttgtaattttgcttttttaatttcggtatttaaatacttttttttttttttaagcatcaatgtagtagtactctgggccgaacaggggtcaacgtttaatctacagttatcaccaacatgtatgtacttatgtcggaatcaaaatgtatcaaactgcttattgtgaagagaattatagcagacctgaagggggcgaaaaaccagatagggtggggggatggatgccggtgacgtgctagcacttgtgtggacatcccagtctgcattatgctgtttaacataaagtgccgacattttgtaccagcaaatacctgcccattccaacccttggtgggagcagacctctactgtcctctgtaacttgctgctattgaggacaagggagtttttctttctttagcgtcttcagtgaaggatacaatacaacaatgcctaatgtatttgactttttagcttgtgtctgtgtgtaggtgggtgggtgggtgtgtataggaaaagcctaaaacaagttatttgcatttcagtggttttgtgagacaaagaatgggaaattctgtagcccttctggcttaccctgttgattataaacctagcctcaaaagagattgacaggcatgactcaagtgagtgttcacatatacaagcctgcatgagccctctgtgggtaggtggtcacacttggcatctgcagcattgacgtggccccgctgggtgccttgagcatgccctcttcctgctctgcaatttgaatcaccaccgtgccccttccaccactgttccccatgcaaaagctctgcttccagcagcccccactgaccgctctctgtgtggagcaaagtgctgtcgtgcggtgaccaccaggtgaagagcagcttgtattcagacatctagagaaggttaaatcttagtgtccctgggccaggagcatatcccaaggctcctgcgagccagtggcgaccctgtccactgccgctcttggttcactgctgtgtcctgccccaccctcctctcctcctgcctgttggttccttgacctgcactatgggttagttgagttccttacgatactacggtgaaagccgggtgctagagcccctcttgtttacaagacataatgagggatttgaaatatgtaaaaataaacatgagaagctaaaatgttcttccatcataagcttaaagggaaaaaaactaaaaactttaaaaaaaaaagaccaaaaagtgcgtatatatatacatataaatatatattttagatgaagactaactctgggagcatttaacagtgttttttgtttctgtttttaacatttgttttcctgctttaaaatttgcaagcattctcaggaattctagggtaggaagccagttttttgaagatggtttatttaaccatatcttatcctagagagatggctgtttctttcctgttaataaacttttacaagttcctgaaacttcagaaagtttaaacaatttttacttaaaaaaatgtaaaaagaaaagtctccaaacattattgtcatactggggatcacacattttaaaacacatagaaatattttttaaaaattatcaatttagcagcaacaggtaaattcattatcttaaaaatatgggagaaggattaagctttgtaagagctcgatcatggattcttttgaaattgtgtgtagtttaatgggagagtgtttggtgtatatagatgagaatgccatcactttgttcctttccatttgagactgaactgaaatctcccctagtaatttttatttttttaaaggaacccttctccttgtccccacaaccccagcaacaaaagaaaggaaggaaggaagaaacaacagcttaaaaaaaaaagtaatctgtaaaatagtacagttggattgctgagaatctatgtaaagagttaggaaatataggttaataatttttggaacaaattttaaatataggcattactagaggaaaattatctatggactgtcctattaatgaagaatgtctgtcttacctccgtttgttttgggaggaggagaaaatatagaagaatctaataaggaacaagtgattttacttttttagctcccagctactgttgtgctcgttttaattgctgttttgaagatctgctgcttaattatccccatcccttagccggagatgtggagtgtttcctttcagtttttggtgatgttgaattcttttgtattccctcctggggccaggggtcagaattcccaagcatgaccacagcttcttttaaacattaagcttcccagtgggaaggaaactccagctcgacaggtaaagggagtgggtggggttgctgcctgcaatttctctaaaaccgctttagtgccttcgtacatacacccagacatcctgagcaagggggacgcacatgtgtgtgtgtgtggtccagtcactccacagatgtaagatactcacccataaaggaaattggagtggttctggacaggccccaaaggcagtgggctgaatttaaaataaataaacaaacgtcaagcaagttaatatgcttatgtctcagtaatgtagaatgccaagttccttcctgtgtcgtgtgccctccattactgtgcattgattcctccaggtgtgtaattgtgacaactgcagtgatttggaaagtctctttgtcttgggcaaatagaaggggttcctgttgttctgctcttgtccttcgtctcctccccttttcccccagacctcccccttctttttgtcaacttgctgggagctttgctttattggttggcagtgacctaagaacaggatatggtgaggatgtcatggaagagaagagctctttccgtggtattctttggcaagagccatgtctactaagaggttagatgacttcagtatacttataaaattcagtgagagtgccttcttctcttctaccacactctggcatagatacaggcttgctggtcacctctcattacatagatttattttaaaaacattttgattatgttaatttgagctttcccttttttttttttaactactttttaaaacacttgattactagtggcttagaggtgtgtacatctcctgaacatcacaaacttggtttctacctaccacacgagtagccaaaagaaaagaagcactaatagagaaaggggtgtctcacaccagacagaggacctctgctgtcaattagatccagtatcatgacctaactttaagtgtggaaaagagttcagatctctgagacactgtgaagaaatggatggctcatgtaacatctctgatccctcagtccccaaccctggacgtgtttcatttacaacattcataggagttaacttagcagtgttgcaagttaaggttccaaaccaaattatttaatcagtgtccccccaataaatcacttatccatttattgctagttagttttatttatagcaacttgatttcctatgagtatggctcctgttgtaagaattttcccacctcttctgacatgaatgtagcataagttagcaatcggttcttccaaactcctgtgggttgaatatggtatagaaggtatgcaagaggaaaaagaaaggaaaagataaaactcctgcctgagaatttggaagcacctttattaacacatatatctcgcagaaactagaagctcataggctgttaactttttgcaactattcactcatttttaccacttttttttttgggtgagggggtgatttttgtaaggttaacagccagattccattttgacctcagatgctgtgtactttttaatttcattttttatattctgccatcttgactcttctctaaaacagaatgaaaatgtctgcatgctgagcaaaatgcttacgccaagcctgtttttctctgcagagtaaacaggatgttttcagcagacttggctctaatagccatctctaagattagggaacaattgagtctttatgtagaaaagatccattttttccccatcctcagagttaaaattcaacatttaaagctttatcggttattgttttagatttgagatttttgtttttaagtatctataagatctttagaagtgagataaatttttcgctggttaaaaaaaatcaaactttcctctgcagtgtttttgccaagttttgtcacacttcatgtgtatgcattaactatacttcttagtgttactgcaaaaaaaaaaaacaaaaacaaaacaaaaaaaagccttgttctttaattgtgtttttcctcctgtgagtggacaactaaagccgcgtgatgatgcggatgaaaatattctggtctgtgtgtatacaatgaattgtcagtcttcagacctcatggtcgttaagaaaatagggaactcacaaaccctgctgcgcactacatttacttctttatctgcaagtacagggagtccatacagtcaagaaacacacagatacacataatgctattgaggacattgtcattctgtaagaaaacagaatattatctagatttccagagttagtgcagaccctgtgataacagtctgtgggtttgtggccagcgccaaaggtgtgtgtattttcagaaatggtccctatttgtcagtgatagtgttttttttttcttaagtttgacaaagggggtggtaatatcacattctttagatttgaaataattatcagctccaagaatctgtgaacatagtaataacaataaaaattcaacatcgaccctccctaacctgctcaccatacctccccaccccatgcctctgaagaaagaggccatgaacctacgaggtggtaaagggggacacaggtcagggagtggagagctactcctccagcagctcagcacccacactgcccgcatgcgtgtggccaccgggaccagatcccgagtgattgtggcatacccctaatatttgagtagtttttaagctgtcagtctcttgtcataacctcctaccgccacccaaaaaagtaacgaaagttgcagtaactgccagtgtttgcctcaccaaatttaaatcgttcccttttcagttagctatatacctgaatttgtttttaacaagaaactgtacatggccaggaaaaatggtactaccttggccaaagggtctttgcaaaaagctcagtcttcagttcttcactgtgacaaatgcttatcttgttcatgggaggggaaagatcagataaataggcaagaagtactctgttttaaataaagaataaatagtgtccgtttaaagcactttgtgcctcaacttcatttttaaactgtaaatcattgctttggaaataaattcccaattataattgacccatatctagccaatatcaacaagttgggatggtttttgtttttttcttttttttcaaaaagggaaattcctctttactgctcacagtaagctgcaaaagaaagttgtcaaggtggcttatgatgctgttgtagcagagctgtgaaaggaagtgctttgctttctctcccgccttccggaatctggcgttccttccccttcggctactgaaaggtgtgtacaactcccagaggggtggctgtaaaagttgactggaggcaaagtggagtggccttattgccaggactagccctacagaagagctttacagagaggaggacagtacatcctatgtgtgttcgccaaaaatgggaaaggtgggtatttaggcaaaacaaaataaaaacctttggaaccctttaagaagttacataccttttaaaggtagtatagtttctcaccaagtgatgcattttagcatgacacttcttgccagaaattttgggataagttggaataaatgtgtttaaaacatcatccaccgccctttttaaattttgtctaaggaattacttaagtatagtatttctgaatgtgcctttgtgagtacagagaccgtccgttctaggaagaagctatccgttggatacaaacaaacagacggtcagctttagtcattagggaagtcaaagttcctcctggaagtcccaggagcagctgttgagatttcattagcatcaatattgcacagtgtagagttgagtggaagagattctgggacttgggagaggagacaggggaaggtacccaggcgacgcagacccacgttagtccaagagcgcaggtttacacatctgcattccctagttttctccgtctgtatgtttgtgctcatgtggctttggctgttttgttttttgtttttctgtaagcactggagaattggaatatggtgatacttgtgacacattcatgcatgtaaacaaggcattttccagcttctgccgtgtgcagagcgggcagcacgcttttaccctttgagtctgtgtcctgaggcggccattacattcccacatgggcgtcacatcacgttgctgttgatgcaaacagggtattacacacaaggaaaaggggttttgaagagttaagattgaagtgtttgagaaagaaaagagaaaaatctgaaatcatattttatttcttcagagctattatagttgaacacagaaatctgcagtgtctttatttgtttttatgttttaaacaatttcacctcttctccccactcctatcttctaaagaaatatcaagcaaatgctaagggccatttccatgattcctcagagctcccccaaagaggagaacagtccctcccactcgattccttcagcttcattcaggaagacacagggaggagagatgctgcttctgcgctttgctctcattcctctctcatggccttgaaatgtattattatgcaaatgtgaattttgatactgaatttaagaagaggttgttggatttttttttttttttttttttttttcaaaaaaaaaagtcccacatgtggtcatcgtcgcttctttatgttgtaaggtgaattgtaactatgcattctgcaaagggggtggggaggagagggcagaaaggggaagggagtagcgttgcatccttgttcttcagtttctgtgtccatggtgtccccgtgtcctggaggggaaggggagtgagagacgaatgtggtaaggtcagcacagtgagatagagacctctgagtcctcttgccactgttgctggcaggtctgatggccaggtaaattccagggggcctgcagttcctgtcaaccaatgtggttcaggattcttgatcctagccgtgcagtgttaatccagtgcagcaatggaactccacaggctccagtgttctctggaaaaagtactcatcctttcctgaattcagagcccttcaagctcaggaaaccacgcttcactcgtgctgacctgaaagttaatctttaggtcgattttgaaaaactccgcctcctctctcctttttaatatttctttcttcctttttaatcatgtttaagtgaacttactcttagttataaggaactgtcctgctttgtggggaagagggctgttgcttgtcaggcaaaaaagttttctcttcctacccaccatccctctctctgcttcccttgcatttggcaggctgtatgaagccaatgagctgcgaggtgttttgacaggggaggtctgcatgcagcctcttctttgtcctaacaattcctttgttgatcttgcctgtgatgaatcatagcgcctgcattgctctggtctaggcattatttgcaacacacagtatcgtaagcgagagattgttctgcctatattcagtgttttccatgcagcaattcttcttgttgacgttcacagtactgtaacgagtaacagacttgatcacagtctcctcgtgcctgtgcagggctgcacaggcatgatcttatcagggttccaatctgttagattgcctttaaacaaaaaaaacaacaaaaaaataaaatcctgacgtttcaactgtctcacacaaaataatacctcgaggtacatttccccctgcaatgtaaacccttaactcctctctcctttctgacatcagtggattatcctttttaaaatatgaacatgtaaatagcaggataactttaaaaaacattttctttgctgtgaaagtaaccctaaaatatgttttcttcttttgtatttttttggtttttgtttttaagccatcagaagtttcagatctttactctttcatgtttaagaagaaagagcagaggaggtcgggggagccggtttgcatttgtgttggaggggtgttatctccattgcctcccacacagtgacagcagaccagtatgtaaaccctgtcttggctgggcgcggtggctcacaccagtaatcccagcactttgggaggctgaggcaggcagatcatctgaggtcaggagtttaagaccagcctggccaacatggtgaaaccccgtctctactaaaaaattagccggacgcagtggcgcgcgcctgtggtcccagctgctcgggaggctaaggcaggagaattgcttgaacccgggagacggaggttgcggtgagccgagattgcaccactgcactccagtgtgggcaacagagcaagacttcgactcaaaaacataaaataaacaaaagacacacacacacacaaaaaccctgtcttaaatagctgccatctcttccagcaatctagtgccagggtaagaagtgtctgaatttctctcttccagcagatccatcccctgcagggactccagaatgttctccacacaatacctggagctctcaacctttcttggttcagacacacacatacacaccccttgagtaactcagtatcattttgtagttcacagaaggatgtagtccctggcattttggtttgcactgtagaatccatagccttgtcactttgttatgctctggaaatgtactgatttcttacttgggaggaaacttgtgtaaggagatgtgcaaaccaccctgaaagccatgtgcatcctcacctcttccattaccccctccatgagctcgaagcgacattaagtagagggaaatgcttttaacaaatgctgctcatgtggatctgtcagctattgcttgcctagatttgggcacccatgaagcagggttggaatggatcattttgaattgcttctttgcagacacccccttcgcccccatctttaagataaaccctttactagtcaagaagcccttttcagttggatctcactgatcttgtatagtgacgacttcctttgaaggaagaagcttgattataagtgcatgcatattatccacccaccttctgatttgggcactgttcaccttggaattttatttattttgtttatctggaggccctttttctatcagtctctgatccctcatgggttctgcctgcccttgtatctcttgtacaatgctcccaaagggctttgctgatctctgcacttctttcctgggacactccccccaccaccaccctttgcacacaccagtgaccaaagtgtatgcagtgatctcacagaagacatcaaaaatggtgcatgcaccgtgaatgtgctcacagagacacgtgcacaagattctgcacccttggccttaatctcagtatgacttaaggtgcaggaacatttttaacaggttttaaaaaaacaaaaaacccttctgggaggaaaaaaataaaaagcagatacaacagctcaactgttcccactcctaactctccactatgtgcttataacttcacattctatgccctccccgccacccacctcatccctgttctgcgtaaccaaaaaacagacaacaaaagcaacctgaggagaggtttctggactattttatctgtctccatttagatggagatataaatgctgctttgggttccataatcctagggggctatgtttacatagtaaaatacatcctaccaaatcaggaaacagtgaataatgggagtcacttcacagagacgcaggaggacctggggggcgtagcagaggaggataggtagagaagtaccattttaattatttgtgacttgtggcttccttcctcctctcctcctccctccacgtctctctttgccccctttagacagaaggtgcagaaaagggcatcaaaaagaggctggattttttaaaaggcagctttccaactttgcacacaaacaggtaacaggaaggtacagcaaaaatcctctcatctgaaacactgtcagcagaaacaaaacctgtaaaaatgactaatcagctgcacatattgatgctctctgcaagttacctttaagtgttttttttttcttatacttgaagttgcttttacgatattattttggtggctttcttttctctctttgatgggcaatagaggaagtagataatgggatttaaggacgcctgggggagaaaagggaggatgtggcattgtctttttttttttttttttttttttttttagcatagaggtttaatcaaactcccatatgttgaaattgctcctcatattactggttttacatggacacagaaactaggcactttagaggtgcacttgcatggcaggctgggcccccttttctatattttattttcctttttagtatagtggtacttaaaatcactggttcacttaaaaaaacaaacaataaaatgttaaactctactaatgtacaaataagctgaaaagttgcattttatgtgtattttttgccatagcaggtactgtatttctcatgctggatttcaaaaaaaaaaaaaaaagtatcaaaaacaaaaaaaactaaagggtggtgttttattggattgtgacaggttgagtaataaggaattaagtcgtcgtcatttcattaaaactgagagatgatgtaatgcatatataagagttttctgaagggttttttttgggcttttaaacagcttatttttgtttttgtttagtttttttattttattttattttggaaagatatgattgtattatgtgcaactcagttgcttacattataactacaaaatatttttgggttcctggaaaaaaaagaaaaaagactaataaatgtgtttggctgctaagca

SEQ ID NO: 194643 - DNA, 3444 bp, Homo sapiens
  Payload ID: 18466
  Gene Name: trinucleotide repeat containing 6B
  Uniprot ID: Q9UPQ9
  ENST ID: ENST00000402203
  CDS Start-End: 236-3325
cggcccgcggaggcgcgtccgcccctggctggcggtggcagagggaggcgtcaggcctcggatcctcgggtccctgcgcagcgtcccggcctgtgtgcaggacctgcgtgacaagggttgtggttttttgcactgaatgtaacctagactcatcttcacgggcttgtgttgccccaggtactgtcaaaggcagtatttttgtgtttctgcagagttttgcacaaaatctgttcccatgcaaaccaatgagggagaagtatcggaagaaagcagttccaaggtggaacaggaggattttgtaatggaagggcatggcaagactccacctcctggtgaagaaagcaaacaagagaaggagcaagaaagggaagaacagttaatggaagacaagaaaaggaagaaagaggataaaaagaaaaaagaagccactcagaaggtcacggaacaaaaaaccaaagtgcccgaagtgacgaaaccaagtttaagccaaccaacggccgccagcccaattggcagctctccatcgccaccagtcaatggtggcaacaatgccaaaagggtggcagtgccgaacggacaaccgccaagcgccgcccgctacatgcctcgggaggtgccgccgcgattccgttgccagcaggaccacaaagtgttactaaaacgtgggcagccccctccaccgtcctgcatgctccttgggggtggggcagggcctcctccctgcacagcacctggagcaaacccaaacaacgcacaagtgacaggagcgctgctgcagagtgagagtgggactgcgccagtctggagcaaaagcacaccacctgctccagataatggtacttccgcttggggtgagccaaatgaaagcagtcctgggtggggcgagatggatgatacaggagcatcgaccacaggctgggggaacacgcccgccaacgctcccaatgccatgaagcctaattccaaatctatgcaagacggctggggggagagtgacgggccagtcacaggagctcgccatcccagctgggaagaggaggaggatggaggagtctggaacaccactggctctcagggcagtgcttcctcccacaactcagcaagctggggacaaggaggaaagaaacaaatgaagtgctcactcaaaggaggaaacaatgattcatggatgaatcctcttgccaaacagttttcaaatatgggattgctgagtcagactgaagataatccaagcagcaaaatggatttgtctgtaggaagcctttcagataaaaaatttgatgtggacaagcgagcgatgaatctcggggattttaatgatatcatgaggaaggatcgatctgggttccgtccacctaattccaaagacatgggaaccacagatagtgggccttattttgagaagggcggtagtcatggtttgtttggaaacagcacagcacaatcgagaggtctgcacacacccgtgcagccactaaattcttctcccagtctccgggcgcaagtgcctccccagtttatttccccccaggtttctgcctcaatgctcaagcagtttcccaacagtggcctgagtccaggtcttttcaatgtggggccccagttatctcctcaacaaattgccatgctgagccagcttccacaaattccccagtttcagttggcatgtcagcttctcttgcagcagcagcaacagcagcagttgttacagaaccagagaaagatttctcaagctgtacgccaacagcaagagcagcagctggctcgaatggtgagtgcactgcagcagcagcagcagcagcagcagaggcagccaggcatgaagcactcgccctctcatcctgttgggcccaagccgcatctggacaacatggtacccaacgcattgaatgtggggctcccagaccttcaaaccaaagggccaatacctggatatggttctggcttcagctctggcggcatggactatggcatggttggtgggaaggaggctggaaccgagtctcgctttaaacagtggacctccatgatggaggggctgccctctgtagccacacaggaagccaatatgcacaaaaatggcgctatagtggcccctggtaaaacccggggagggtcaccgtacaaccagtttgatatcatccctggtgacacactgggtggccatacgggtcctgctggtgatagctggttacctgccaaatctccaccaacaaataaaatcggaagtaaatccagcaatgccagttggcctccagaattccaaccaggagtgccatggaaaggtatccaaaacattgaccctgaatctgacccctatgtcaccccaggaagtgtgctggggggtacagccacatctcccattgtagatactgaccaccaactgctgcgggataacaccacagggtctaattcttccctcaacacctcgctgccttcacctggtgcctggccctacagtgcctctgacaactcctttaccaacgttcatagcacttcagcaaagttccctgattacaaatcaacatggtccccagatcccataggacacaaccccactcatctctccaacaagatgtggaaaaaccatatttcctccaggaacactacaccgctgccccgcccacctcctggtctgaccaaccccaaaccatcatctccctggagcagcacagcaccccgatcagtcagggggtgggggacacaggactcacggctcgcctcggcctctacctggagtgatggtggctcagttcgtcctagttactggctggttcttcacaatctcaccccacagattgatgggtcaaccttgagaacgatctgcatgcagcatggcccactgctgacattccatctgaatctaacccagggcactgccctgatccgatacagcaccaaacaggaggcggccaaggcccaaactgcactgcacatgtgtgtgttgggaaacactaccatccttgctgagtttgccactgatgatgaagtcagccgctttctggcacaagctcagccccctacacctgcagcaaccccaagtgcgccagctgcggggtggcagtcgctggagaccggccagaaccagtcagatcccgtgggacctgctctgaatctttttggtgggtccactgggctcgggcagtggagcagcagcgctggtggcagcagcggggccgatcttgctggcgcttcattgtgggggcccccaaactattcttctagcttatggggagtcccaacggtggaagatccccataggatgggcagccctgctcctttactacctggtgaccttctgggaggagggtcggattcaatctgaacttagaactttcaactctgacctcgtgaccttttttggaacagcagcagcactaacttgaccttttcgttttttttttcaacttgcaataaatacatttttaaaaggaaaaaagaaaa

SEQ ID NO: 194644 - DNA, 415 bp, Homo sapiens
  Payload ID: 18466
  Gene Name: trinucleotide repeat containing 6B
  ENST ID: ENST00000441751
  CDS Start-End: 303-415
ttgtttattttgtttttagtttttggggtccccgtgctgctgcaaggcgaaacgggagggagtgacccctgcgcccctcagtcccccctacgacgtcgcctccatagtctgcggagaagcggagactgcgcgcctcgcctcacagcgaaacgccgcgcactcggagccggcacggctcggcgggttgtggttttttgcactgaatgtaacctagactcatcttcacgggcttgtgttgccccaggtactgtcaaaggcagtatttttgtgtttctgcagagttttgcacaaaatctgttcccatgcaaaccaatgagggagaagtatcggaagaaagcagttccaaggtggaacaggaggattttgtaatggaagggcatggcaagactccacctcctggtgaagaaagcaaaca

SEQ ID NO: 194645 - DNA, 18279 bp, Homo sapiens
  Payload ID: 18466
  Gene Name: trinucleotide repeat containing 6B
  Uniprot ID: Q9UPQ9
  ENST ID: ENST00000454349
  CDS Start-End: 212-5713
agagacagagagggagagagagagcaagagggagagtgtgtgagagagagttagttcaagccaaaatggccgacagagtctctgctggtttctgaatatttaaaatacaaaaaaacagatagacaaaaagaattcattttttggaccttttttcatttccatttctaccttgtatgcctcaatttgctggatttaagcactgctgcactttatgagagagaaggagcaagaaagggaagaacagttaatggaagacaagaaaaggaagaaagaggataaaaagaaaaaagaagccactcagaaggtcacggaacaaaaaaccaaagtgcccgaagtgacgaaaccaagtttaagccaaccaacggccgccagcccaattggcagctctccatcgccaccagtcaatggtggcaacaatgccaaaagggtggcagtgccgaacggacaaccgccaagcgccgcccgctacatgcctcgggaggtgccgccgcgattccgttgccagcaggaccacaaagtgttactaaaacgtgggcagccccctccaccgtcctgcatgctccttgggggtggggcagggcctcctccctgcacagcacctggagcaaacccaaacaacgcacaagtgacaggagcgctgctgcagagtgagagtgggactgcgccagactcaacccttggaggtgctgctgcttcaaattatgcaaattccacttggggctcgggagcctcctccaacaacggcacctcccccaacccaattcacatctgggacaaggtgattgtagacgggtctgacatggaagagtggccttgtattgccagcaaagacactgaatcttcttccgaaaacaccaccgataacaacagtgcctcgaaccctggctctgagaagagcactctgccaggaagcaccactagtaacaaaggaaaagggagccagtgccagtctgcaagttctgggaacgaatgtaatcttggggtctggaaatctgaccctaaggctaaatctgttcaatcttccaactctactacagagaacaacaatggactaggaaattggaggaatgtgagtggtcaggatagaattggacctggctctggcttcagcaactttaacccaaatagcaacccatctgcctggccagcactggtccaagaaggaacttctaggaaaggggcattggaaacagataatagtaattccagtgcacaggttagcacagtaggtcagacatccagggaacagcagtcaaagatggaaaatgcgggtgttaattttgttgtctctggcagagaacaggctcaaattcataacactgatggaccaaaaaatggaaacactaactccttgaacttaagttcaccaaaccccatggagaataagggaatgccctttggaatgggcttggggaacacctccaggagcactgatgccccttcacaaagcactggagatcgaaagactgggagtgttggatcttggggtgcagctagggggccttctggaactgacacagtctctggacaaagcaattctggaaacaatgggaacaatggaaaagagagagaggactcctggaaaggagcttctgttcagaaatcaactgggtcaaaaaatgactcttgggacaacaataacaggtctacgggtgggtcctggaactttggcccccaggactctaatgacaacaaatggggtgaagggaacaaaatgacatctggggtctctcagggagaatggaaacagccgactgggtctgatgagttgaaaattggagaatggagtggtccaaaccaaccaaattctagcactggagcatgggacaatcaaaagggccaccccctccctgaaaaccaaggcaatgcccaggctccctgttggggaagatcttccagctccacaggaagtgaagttggaggtcaaagcactggaagcaaccacaaagcaggaagtagtgacagtcataactctggccgtcggtcgtacaggcccacacatcctgattgtcaggctgtcttgcagactcttttgagccgaactgatttggaccccagggtgctctcaaacactggctggggccaaactcaaattaagcaggacacagtgtgggacattgaagaggtgccaaggcctgaggggaaatctgacaaaggaactgaggggtgggagagcgctgccacacagaccaagaactcagggggctggggagatgcacccagccaaagcaatcaaatgaagtctggatggggggagctctcagcctctacagagtggaaagaccccaagaacacaggaggctggaatgactacaagaacaacaactcttccaactggggaggaggacgacctgatgaaaagacaccttcctcttggaatgagaatcccagcaaggatcaggggtggggaggtggacgccagcccaatcaaggatggtcttctggaaagaatggttggggggaggaagtcgatcagacaaaaaacagcaattgggaaagttctgcaagtaaacctgtgtctgggtggggtgaaggagggcagaatgaaatcgggacttggggtaatggtggcaatgcaagcctagcttcaaaaggtgggtgggaggattgcaaaagatccccagcatggaatgagacgggccgacagcccaattcctggaataaacaacaccaacagcagcagcccccacagcagccgccgccaccacaaccagaggcttctggttcgtggggaggcccacccccaccacctccaggcaacgttcgaccttccaattccagctggagcagcgggccacagcctgcaacacctaaggatgaggaacccagtggttgggaagagccatccccacagtcaattagtcggaaaatggacattgatgatggcacttcagcatggggagaccctaacagttataactacaagaatgtgaatctgtgggataagaattcccaagggggcccagcacctcgagaaccaaacctgcccaccccaatgaccagtaaatcggcatcagtctggagcaaaagcacaccacctgctccagataatggtacttccgcttggggtgagccaaatgaaagcagtcctgggtggggcgagatggatgatacaggagcatcgaccacaggctgggggaacacgcccgccaacgctcccaatgccatgaagcctaattccaaatctatgcaagacggctggggggagagtgacgggccagtcacaggagctcgccatcccagctgggaagaggaggaggatggaggagtctggaacaccactggctctcagggcagtgcttcctcccacaactcagcaagctggggacaaggaggaaagaaacaaatgaagtgctcactcaaaggaggaaacaatgattcatggatgaatcctcttgccaaacagttttcaaatatgggattgctgagtcagactgaagataatccaagcagcaaaatggatttgtctgtaggaagcctttcagataaaaaatttgatgtggacaagcgagcgatgaatctcggggattttaatgatatcatgaggaaggatcgatctgggttccgtccacctaattccaaagacatgggaaccacagatagtgggccttattttgagaagctgactttgcctttctccaatcaagatgggtgccttggggatgaggctccctgctctcccttctccccttctcccagctacaagctgtctccctctggttccacactacccaacgtcagccttggagcaatcggcacagggctcaacccccaaaacttcgctgctagacaaggcggtagtcatggtttgtttggaaacagcacagcacaatcgagaggtctgcacacacccgtgcagccactaaattcttctcccagtctccgggcgcaagtgcctccccagtttatttccccccaggtttctgcctcaatgctcaagcagtttcccaacagtggcctgagtccaggtcttttcaatgtggggccccagttatctcctcaacaaattgccatgctgagccagcttccacaaattccccagtttcagttggcatgtcagcttctcttgcagcagcagcaacagcagcagttgttacagaaccagagaaagatttctcaagctgtacgccaacagcaagagcagcagctggctcgaatggtgagtgcactgcagcagcagcagcagcagcagcagaggcagccaggcatgaagcactcgccctctcatcctgttgggcccaagccgcatctggacaacatggtacccaacgcattgaatgtggggctcccagaccttcaaaccaaagggccaatacctggatatggttctggcttcagctctggcggcatggactatggcatggttggtgggaaggaggctggaaccgagtctcgctttaaacagtggacctccatgatggaggggctgccctctgtagccacacaggaagccaatatgcacaaaaatggcgctatagtggcccctggtaaaacccggggagggtcaccgtacaaccagtttgatatcatccctggtgacacactgggtggccatacgggtcctgctggtgatagctggttacctgccaaatctccaccaacaaataaaatcggaagtaaatccagcaatgccagttggcctccagaattccaaccaggagtgccatggaaaggtatccaaaacattgaccctgaatctgacccctatgtcaccccaggaagtgtgctggggggtacagccacatctcccattgtagatactgaccaccaactgctgcgggataacaccacagggtctaattcttccctcaacacctcgctgccttcacctggtgcctggccctacagtgcctctgacaactcctttaccaacgttcatagcacttcagcaaagttccctgattacaaatcaacatggtccccagatcccataggacacaaccccactcatctctccaacaagatgtggaaaaaccatatttcctccaggaacactacaccgctgccccgcccacctcctggtctgaccaaccccaaaccatcatctccctggagcagcacagcaccccgatcagtcagggggtgggggacacaggactcacggctcgcctcggcctctacctggagtgatggtggctcagttcgtcctagttactggctggttcttcacaatctcaccccacagattgatgggtcaaccttgagaacgatctgcatgcagcatggcccactgctgacattccatctgaatctaacccagggcactgccctgatccgatacagcaccaaacaggaggcggccaaggcccaaactgcactgcacatgtgtgtgttgggaaacactaccatccttgctgagtttgccactgatgatgaagtcagccgctttctggcacaagctcagccccctacacctgcagcaaccccaagtgcgccagctgcggggtggcagtcgctggagaccggccagaaccagtcagatcccgtgggacctgctctgaatctttttggtgggtccactgggctcgggcagtggagcagcagcgctggtggcagcagcggggccgatcttgctggcgcttcattgtgggggcccccaaactattcttctagcttatggggagtcccaacggtggaagatccccataggatgggcagccctgctcctttactacctggtgaccttctgggaggagggtcggattcaatctgaacttagaactttcaactctgacctcgtgaccttttttggaacagcagcagcactaacttgaccttttcgttttttttttcaacttgcaataaatacatttttaaaaggaaaaaagaaaacggagagaaaaaaaggtgggtcattgacagactgtctgagcacatagttgcctcccttataacttcagttttttcgtttggaatatgaatccaaaaagagaacatatcactcttgaaatacttgaatcatgaacgccaacctagaaagacaatgtgaagcaagtacacataccatttaaatttaaacacaaaaaaattaaaaaaattagtttctagtttttcacttttttcatgttatatggaagttgttgctaagaaacatatatactgaaaaaaaatagctttttaactttgtttgcactgggtgtgtttccgtccttaggtctaccatgtttgggagggagggaaattcaaaagaattgttgggggaggggggagggaagacttgacggagcctcactttaaaaacaaaaacacaaaaaacctaaaaaaaaaaaaaaggaaaaaatttgtgattggctggttgataaataccagtgtgttctggcacatgtaactgcccaggcatgctcgttctggtgtgtgtgtgcacgtgtgttcatgtgcattcgcgtgcatccttctctgtctctgtgtgtgtgcctgtgttcttcccttctcccctgccccaccctgacttctcagaaagctgcatcgctgacagtctgcaggctggctggccggcccatctgctttttattttatttttttaactatgagaacacacaggcccggagagccactgctactaaagcaactccattgggctgcattaagatgaacagagtgctttttaatgatgaaagcagggagctcctttccatttgcaacttagcctgaatgtggggtttctctggctgttcttttgacctagcagtagagtggagcactgccaagtccaaaaaactagagcaggaggtacctcttggagcaacggtgtgtttatttctgtttttttttttttttaagtgaatggccaccaggcacatctgagtatctgttaagtttcatgcaggccttttcgttagtttgaaatgggaacggaagataacttttgatgatgcgatgtctcaaaaacagagaaactttgttccctctttccttatgatcaggtttgagaaattcttcaaaaaattaggtgaagttgagttacatatttctgttggttggttctctttttcattttatgaaaacagaaaagaataagtggtgagcagcctcctgaaagcatctgcagctactccctctgctcctttctcgccgagcgttacctgtgccaggccgtggcgcgttacagcaccaggccatcactgacagaaacgtttacttaacgaatgttcttaaaccagtgtgtacttcaagcgtttccttttgtttctctgtgttgtgtatttcctgtgtatgtggttttgcttaggcaggtataacttagcgaagacttttaagtattgcacctttttttgatttttgacctcttccccccaccttgtaattttgcttttttaatttcggtatttaaatacttttttttttttttaagcatcaatgtagtagtactctgggccgaacaggggtcaacgtttaatctacagttatcaccaacatgtatgtacttatgtcggaatcaaaatgtatcaaactgcttattgtgaagagaattatagcagacctgaagggggcgaaaaaccagatagggtggggggatggatgccggtgacgtgctagcacttgtgtggacatcccagtctgcattatgctgtttaacataaagtgccgacattttgtaccagcaaatacctgcccattccaacccttggtgggagcagacctctactgtcctctgtaacttgctgctattgaggacaagggagtttttctttctttagcgtcttcagtgaaggatacaatacaacaatgcctaatgtatttgactttttagcttgtgtctgtgtgtaggtgggtgggtgggtgtgtataggaaaagcctaaaacaagttatttgcatttcagtggttttgtgagacaaagaatgggaaattctgtagcccttctggcttaccctgttgattataaacctagcctcaaaagagattgacaggcatgactcaagtgagtgttcacatatacaagcctgcatgagccctctgtgggtaggtggtcacacttggcatctgcagcattgacgtggccccgctgggtgccttgagcatgccctcttcctgctctgcaatttgaatcaccaccgtgccccttccaccactgttccccatgcaaaagctctgcttccagcagcccccactgaccgctctctgtgtggagcaaagtgctgtcgtgcggtgaccaccaggtgaagagcagcttgtattcagacatctagagaaggttaaatcttagtgtccctgggccaggagcatatcccaaggctcctgcgagccagtggcgaccctgtccactgccgctcttggttcactgctgtgtcctgccccaccctcctctcctcctgcctgttggttccttgacctgcactatgggttagttgagttccttacgatactacggtgaaagccgggtgctagagcccctcttgtttacaagacataatgagggatttgaaatatgtaaaaataaacatgagaagctaaaatgttcttccatcataagcttaaagggaaaaaaactaaaaactttaaaaaaaaaagaccaaaaagtgcgtatatatatacatataaatatatattttagatgaagactaactctgggagcatttaacagtgttttttgtttctgtttttaacatttgttttcctgctttaaaatttgcaagcattctcaggaattctagggtaggaagccagttttttgaagatggtttatttaaccatatcttatcctagagagatggctgtttctttcctgttaataaacttttacaagttcctgaaacttcagaaagtttaaacaatttttacttaaaaaaatgtaaaaagaaaagtctccaaacattattgtcatactggggatcacacattttaaaacacatagaaatattttttaaaaattatcaatttagcagcaacaggtaaattcattatcttaaaaatatgggagaaggattaagctttgtaagagctcgatcatggattcttttgaaattgtgtgtagtttaatgggagagtgtttggtgtatatagatgagaatgccatcactttgttcctttccatttgagactgaactgaaatctcccctagtaatttttatttttttaaaggaacccttctccttgtccccacaaccccagcaacaaaagaaaggaaggaaggaagaaacaacagcttaaaaaaaaaagtaatctgtaaaatagtacagttggattgctgagaatctatgtaaagagttaggaaatataggttaataatttttggaacaaattttaaatataggcattactagaggaaaattatctatggactgtcctattaatgaagaatgtctgtcttacctccgtttgttttgggaggaggagaaaatatagaagaatctaataaggaacaagtgattttacttttttagctcccagctactgttgtgctcgttttaattgctgttttgaagatctgctgcttaattatccccatcccttagccggagatgtggagtgtttcctttcagtttttggtgatgttgaattcttttgtattccctcctggggccaggggtcagaattcccaagcatgaccacagcttcttttaaacattaagcttcccagtgggaaggaaactccagctcgacaggtaaagggagtgggtggggttgctgcctgcaatttctctaaaaccgctttagtgccttcgtacatacacccagacatcctgagcaagggggacgcacatgtgtgtgtgtgtggtccagtcactccacagatgtaagatactcacccataaaggaaattggagtggttctggacaggccccaaaggcagtgggctgaatttaaaataaataaacaaacgtcaagcaagttaatatgcttatgtctcagtaatgtagaatgccaagttccttcctgtgtcgtgtgccctccattactgtgcattgattcctccaggtgtgtaattgtgacaactgcagtgatttggaaagtctctttgtcttgggcaaatagaaggggttcctgttgttctgctcttgtccttcgtctcctccccttttcccccagacctcccccttctttttgtcaacttgctgggagctttgctttattggttggcagtgacctaagaacaggatatggtgaggatgtcatggaagagaagagctctttccgtggtattctttggcaagagccatgtctactaagaggttagatgacttcagtatacttataaaattcagtgagagtgccttcttctcttctaccacactctggcatagatacaggcttgctggtcacctctcattacatagatttattttaaaaacattttgattatgttaatttgagctttcccttttttttttttaactactttttaaaacacttgattactagtggcttagaggtgtgtacatctcctgaacatcacaaacttggtttctacctaccacacgagtagccaaaagaaaagaagcactaatagagaaaggggtgtctcacaccagacagaggacctctgctgtcaattagatccagtatcatgacctaactttaagtgtggaaaagagttcagatctctgagacactgtgaagaaatggatggctcatgtaacatctctgatccctcagtccccaaccctggacgtgtttcatttacaacattcataggagttaacttagcagtgttgcaagttaaggttccaaaccaaattatttaatcagtgtccccccaataaatcacttatccatttattgctagttagttttatttatagcaacttgatttcctatgagtatggctcctgttgtaagaattttcccacctcttctgacatgaatgtagcataagttagcaatcggttcttccaaactcctgtgggttgaatatggtatagaaggtatgcaagaggaaaaagaaaggaaaagataaaactcctgcctgagaatttggaagcacctttattaacacatatatctcgcagaaactagaagctcataggctgttaactttttgcaactattcactcatttttaccacttttttttttgggtgagggggtgatttttgtaaggttaacagccagattccattttgacctcagatgctgtgtactttttaatttcattttttatattctgccatcttgactcttctctaaaacagaatgaaaatgtctgcatgctgagcaaaatgcttacgccaagcctgtttttctctgcagagtaaacaggatgttttcagcagacttggctctaatagccatctctaagattagggaacaattgagtctttatgtagaaaagatccattttttccccatcctcagagttaaaattcaacatttaaagctttatcggttattgttttagatttgagatttttgtttttaagtatctataagatctttagaagtgagataaatttttcgctggttaaaaaaaatcaaactttcctctgcagtgtttttgccaagttttgtcacacttcatgtgtatgcattaactatacttcttagtgttactgcaaaaaaaaaaaacaaaaacaaaacaaaaaaaagccttgttctttaattgtgtttttcctcctgtgagtggacaactaaagccgcgtgatgatgcggatgaaaatattctggtctgtgtgtatacaatgaattgtcagtcttcagacctcatggtcgttaagaaaatagggaactcacaaaccctgctgcgcactacatttacttctttatctgcaagtacagggagtccatacagtcaagaaacacacagatacacataatgctattgaggacattgtcattctgtaagaaaacagaatattatctagatttccagagttagtgcagaccctgtgataacagtctgtgggtttgtggccagcgccaaaggtgtgtgtattttcagaaatggtccctatttgtcagtgatagtgttttttttttcttaagtttgacaaagggggtggtaatatcacattctttagatttgaaataattatcagctccaagaatctgtgaacatagtaataacaataaaaattcaacatcgaccctccctaacctgctcaccatacctccccaccccatgcctctgaagaaagaggccatgaacctacgaggtggtaaagggggacacaggtcagggagtggagagctactcctccagcagctcagcacccacactgcccgcatgcgtgtggccaccgggaccagatcccgagtgattgtggcatacccctaatatttgagtagtttttaagctgtcagtctcttgtcataacctcctaccgccacccaaaaaagtaacgaaagttgcagtaactgccagtgtttgcctcaccaaatttaaatcgttcccttttcagttagctatatacctgaatttgtttttaacaagaaactgtacatggccaggaaaaatggtactaccttggccaaagggtctttgcaaaaagctcagtcttcagttcttcactgtgacaaatgcttatcttgttcatgggaggggaaagatcagataaataggcaagaagtactctgttttaaataaagaataaatagtgtccgtttaaagcactttgtgcctcaacttcatttttaaactgtaaatcattgctttggaaataaattcccaattataattgacccatatctagccaatatcaacaagttgggatggtttttgtttttttcttttttttcaaaaagggaaattcctctttactgctcacagtaagctgcaaaagaaagttgtcaaggtggcttatgatgctgttgtagcagagctgtgaaaggaagtgctttgctttctctcccgccttccggaatctggcgttccttccccttcggctactgaaaggtgtgtacaactcccagaggggtggctgtaaaagttgactggaggcaaagtggagtggccttattgccaggactagccctacagaagagctttacagagaggaggacagtacatcctatgtgtgttcgccaaaaatgggaaaggtgggtatttaggcaaaacaaaataaaaacctttggaaccctttaagaagttacataccttttaaaggtagtatagtttctcaccaagtgatgcattttagcatgacacttcttgccagaaattttgggataagttggaataaatgtgtttaaaacatcatccaccgccctttttaaattttgtctaaggaattacttaagtatagtatttctgaatgtgcctttgtgagtacagagaccgtccgttctaggaagaagctatccgttggatacaaacaaacagacggtcagctttagtcattagggaagtcaaagttcctcctggaagtcccaggagcagctgttgagatttcattagcatcaatattgcacagtgtagagttgagtggaagagattctgggacttgggagaggagacaggggaaggtacccaggcgacgcagacccacgttagtccaagagcgcaggtttacacatctgcattccctagttttctccgtctgtatgtttgtgctcatgtggctttggctgttttgttttttgtttttctgtaagcactggagaattggaatatggtgatacttgtgacacattcatgcatgtaaacaaggcattttccagcttctgccgtgtgcagagcgggcagcacgcttttaccctttgagtctgtgtcctgaggcggccattacattcccacatgggcgtcacatcacgttgctgttgatgcaaacagggtattacacacaaggaaaaggggttttgaagagttaagattgaagtgtttgagaaagaaaagagaaaaatctgaaatcatattttatttcttcagagctattatagttgaacacagaaatctgcagtgtctttatttgtttttatgttttaaacaatttcacctcttctccccactcctatcttctaaagaaatatcaagcaaatgctaagggccatttccatgattcctcagagctcccccaaagaggagaacagtccctcccactcgattccttcagcttcattcaggaagacacagggaggagagatgctgcttctgcgctttgctctcattcctctctcatggccttgaaatgtattattatgcaaatgtgaattttgatactgaatttaagaagaggttgttggatttttttttttttttttttttttttcaaaaaaaaaagtcccacatgtggtcatcgtcgcttctttatgttgtaaggtgaattgtaactatgcattctgcaaagggggtggggaggagagggcagaaaggggaagggagtagcgttgcatccttgttcttcagtttctgtgtccatggtgtccccgtgtcctggaggggaaggggagtgagagacgaatgtggtaaggtcagcacagtgagatagagacctctgagtcctcttgccactgttgctggcaggtctgatggccaggtaaattccagggggcctgcagttcctgtcaaccaatgtggttcaggattcttgatcctagccgtgcagtgttaatccagtgcagcaatggaactccacaggctccagtgttctctggaaaaagtactcatcctttcctgaattcagagcccttcaagctcaggaaaccacgcttcactcgtgctgacctgaaagttaatctttaggtcgattttgaaaaactccgcctcctctctcctttttaatatttctttcttcctttttaatcatgtttaagtgaacttactcttagttataaggaactgtcctgctttgtggggaagagggctgttgcttgtcaggcaaaaaagttttctcttcctacccaccatccctctctctgcttcccttgcatttggcaggctgtatgaagccaatgagctgcgaggtgttttgacaggggaggtctgcatgcagcctcttctttgtcctaacaattcctttgttgatcttgcctgtgatgaatcatagcgcctgcattgctctggtctaggcattatttgcaacacacagtatcgtaagcgagagattgttctgcctatattcagtgttttccatgcagcaattcttcttgttgacgttcacagtactgtaacgagtaacagacttgatcacagtctcctcgtgcctgtgcagggctgcacaggcatgatcttatcagggttccaatctgttagattgcctttaaacaaaaaaaacaacaaaaaaataaaatcctgacgtttcaactgtctcacacaaaataatacctcgaggtacatttccccctgcaatgtaaacccttaactcctctctcctttctgacatcagtggattatcctttttaaaatatgaacatgtaaatagcaggataactttaaaaaacattttctttgctgtgaaagtaaccctaaaatatgttttcttcttttgtatttttttggtttttgtttttaagccatcagaagtttcagatctttactctttcatgtttaagaagaaagagcagaggaggtcgggggagccggtttgcatttgtgttggaggggtgttatctccattgcctcccacacagtgacagcagaccagtatgtaaaccctgtcttggctgggcgcggtggctcacaccagtaatcccagcactttgggaggctgaggcaggcagatcatctgaggtcaggagtttaagaccagcctggccaacatggtgaaaccccgtctctactaaaaaattagccggacgcagtggcgcgcgcctgtggtcccagctgctcgggaggctaaggcaggagaattgcttgaacccgggagacggaggttgcggtgagccgagattgcaccactgcactccagtgtgggcaacagagcaagacttcgactcaaaaacataaaataaacaaaagacacacacacacacaaaaaccctgtcttaaatagctgccatctcttccagcaatctagtgccagggtaagaagtgtctgaatttctctcttccagcagatccatcccctgcagggactccagaatgttctccacacaatacctggagctctcaacctttcttggttcagacacacacatacacaccccttgagtaactcagtatcattttgtagttcacagaaggatgtagtccctggcattttggtttgcactgtagaatccatagccttgtcactttgttatgctctggaaatgtactgatttcttacttgggaggaaacttgtgtaaggagatgtgcaaaccaccctgaaagccatgtgcatcctcacctcttccattaccccctccatgagctcgaagcgacattaagtagagggaaatgcttttaacaaatgctgctcatgtggatctgtcagctattgcttgcctagatttgggcacccatgaagcagggttggaatggatcattttgaattgcttctttgcagacacccccttcgcccccatctttaagataaaccctttactagtcaagaagcccttttcagttggatctcactgatcttgtatagtgacgacttcctttgaaggaagaagcttgattataagtgcatgcatattatccacccaccttctgatttgggcactgttcaccttggaattttatttattttgtttatctggaggccctttttctatcagtctctgatccctcatgggttctgcctgcccttgtatctcttgtacaatgctcccaaagggctttgctgatctctgcacttctttcctgggacactccccccaccaccaccctttgcacacaccagtgaccaaagtgtatgcagtgatctcacagaagacatcaaaaatggtgcatgcaccgtgaatgtgctcacagagacacgtgcacaagattctgcacccttggccttaatctcagtatgacttaaggtgcaggaacatttttaacaggttttaaaaaaacaaaaaacccttctgggaggaaaaaaataaaaagcagatacaacagctcaactgttcccactcctaactctccactatgtgcttataacttcacattctatgccctccccgccacccacctcatccctgttctgcgtaaccaaaaaacagacaacaaaagcaacctgaggagaggtttctggactattttatctgtctccatttagatggagatataaatgctgctttgggttccataatcctagggggctatgtttacatagtaaaatacatcctaccaaatcaggaaacagtgaataatgggagtcacttcacagagacgcaggaggacctggggggcgtagcagaggaggataggtagagaagtaccattttaattatttgtgacttgtggcttccttcctcctctcctcctccctccacgtctctctttgccccctttagacagaaggtgcagaaaagggcatcaaaaagaggctggattttttaaaaggcagctttccaactttgcacacaaacaggtaacaggaaggtacagcaaaaatcctctcatctgaaacactgtcagcagaaacaaaacctgtaaaaatgactaatcagctgcacatattgatgctctctgcaagttacctttaagtgttttttttttcttatacttgaagttgcttttacgatattattttggtggctttcttttctctctttgatgggcaatagaggaagtagataatgggatttaaggacgcctgggggagaaaagggaggatgtggcattgtctttttttttttttttttttttttttttagcatagaggtttaatcaaactcccatatgttgaaattgctcctcatattactggttttacatggacacagaaactaggcactttagaggtgcacttgcatggcaggctgggcccccttttctatattttattttcctttttagtatagtggtacttaaaatcactggttcacttaaaaaaacaaacaataaaatgttaaactctactaatgtacaaataagctgaaaagttgcattttatgtgtattttttgccatagcaggtactgtatttctcatgctggatttcaaaaaaaaaaaaaaaagtatcaaaaacaaaaaaaactaaagggtggtgttttattggattgtgacaggttgagtaataaggaattaagtcgtcgtcatttcattaaaactgagagatgatgtaatgcatatataagagttttctgaagggttttttttgggcttttaaacagcttatttttgtttttgtttagtttttttattttattttattttggaaagatatgattgtattatgtgcaactcagttgcttacattataactacaaaatatttttgggttcctggaaaaaaaagaaaaaagactaataaatgtgtttggctgctaagc

SEQ ID NO: 194646 - DNA, 4741 bp, Homo sapiens
  Payload ID: 18466
  Gene Name: trinucleotide repeat containing 6B
  ENST ID: ENST00000446273
  CDS Start-End: 1-4175
tctggaaatctgaccctaaggctaaatctgttcaatcttccaactctactacagagaacaacaatggactaggaaattggaggaatgtgagtggtcaggatagaattggacctggctctggcttcagcaactttaacccaaatagcaacccatctgcctggccagcactggtccaagaaggaacttctaggaaaggggcattggaaacagataatagtaattccagtgcacaggttagcacagtaggtcagacatccagggaacagcagtcaaagatggaaaatgcgggtgttaattttgttgtctctggcagagaacaggctcaaattcataacactgatggaccaaaaaatggaaacactaactccttgaacttaagttcaccaaaccccatggagaataagggaatgccctttggaatgggcttggggaacacctccaggagcactgatgccccttcacaaagcactggagatcgaaagactgggagtgttggatcttggggtgcagctagggggccttctggaactgacacagtctctggacaaagcaattctggaaacaatgggaacaatggaaaagagagagaggactcctggaaaggagcttctgttcagaaatcaactgggtcaaaaaatgactcttgggacaacaataacaggtctacgggtgggtcctggaactttggcccccaggactctaatgacaacaaatggggtgaagggaacaaaatgacatctggggtctctcagggagaatggaaacagccgactgggtctgatgagttgaaaattggagaatggagtggtccaaaccaaccaaattctagcactggagcatgggacaatcaaaagggccaccccctccctgaaaaccaaggcaatgcccaggctccctgttggggaagatcttccagctccacaggaagtgaagttggaggtcaaagcactggaagcaaccacaaagcaggaagtagtgacagtcataactctggccgtcggtcgtacaggcccacacatcctgattgtcaggctgtcttgcagactcttttgagccgaactgatttggaccccagggtgctctcaaacactggctggggccaaactcaaattaagcaggacacagtgtgggacattgaagaggtgccaaggcctgaggggaaatctgacaaaggaactgaggggtgggagagcgctgccacacagaccaagaactcagggggctggggagatgcacccagccaaagcaatcaaatgaagtctggatggggggagctctcagcctctacagagtggaaagaccccaagaacacaggaggctggaatgactacaagaacaacaactcttccaactggggaggaggacgacctgatgaaaagacaccttcctcttggaatgagaatcccagcaaggatcaggggtggggaggtggacgccagcccaatcaaggatggtcttctggaaagaatggttggggggaggaagtcgatcagacaaaaaacagcaattgggaaagttctgcaagtaaacctgtgtctgggtggggtgaaggagggcagaatgaaatcgggacttggggtaatggtggcaatgcaagcctagcttcaaaaggtgggtgggaggattgcaaaagatccccagcatggaatgagacgggccgacagcccaattcctggaataaacaacaccaacagcagcagcccccacagcagccgccgccaccacaaccagaggcttctggttcgtggggaggcccacccccaccacctccaggcaacgttcgaccttccaattccagctggagcagcgggccacagcctgcaacacctaaggatgaggaacccagtggttgggaagagccatccccacagtcaattagtcggaaaatggacattgatgatggcacttcagcatggggagaccctaacagttataactacaagaatgtgaatctgtgggataagaattcccaagggggcccagcacctcgagaaccaaacctgcccaccccaatgaccagtaaatcggcatcagtctggagcaaaagcacaccacctgctccagataatggtacttccgcttggggtgagccaaatgaaagcagtcctgggtggggcgagatggatgatacaggagcatcgaccacaggctgggggaacacgcccgccaacgctcccaatgccatgaagcctaattccaaatctatgcaagacggctggggggagagtgacgggccagtcacaggagctcgccatcccagctgggaagaggaggaggatggaggagtctggaacaccactggctctcagggcagtgcttcctcccacaactcagcaagctggggacaaggaggaaagaaacaaatgaagtgctcactcaaaggaggaaacaatgattcatggatgaatcctcttgccaaacagttttcaaatatgggattgctgagtcagactgaagataatccaagcagcaaaatggatttgtctgtaggaagcctttcagataaaaaatttgatgtggacaagcgagcgatgaatctcggggattttaatgatatcatgaggaaggatcgatctgggttccgtccacctaattccaaagacatgggaaccacagatagtgggccttattttgagaagggcggtagtcatggtttgtttggaaacagcacagcacaatcgagaggtctgcacacacccgtgcagccactaaattcttctcccagtctccgggcgcaagtgcctccccagtttatttccccccaggtttctgcctcaatgctcaagcagtttcccaacagtggcctgagtccaggtcttttcaatgtggggccccagttatctcctcaacaaattgccatgctgagccagcttccacaaattccccagtttcagttggcatgtcagcttctcttgcagcagcagcaacagcagcagttgttacagaaccagagaaagatttctcaagctgtacgccaacagcaagagcagcagctggctcgaatggtgagtgcactgcagcagcagcagcagcagcagcagaggcagccaggcatgaagcactcgccctctcatcctgttgggcccaagccgcatctggacaacatggtacccaacgcattgaatgtggggctcccagaccttcaaaccaaagggccaatacctggatatggttctggcttcagctctggcggcatggactatggcatggttggtgggaaggaggctggaaccgagtctcgctttaaacagtggacctccatgatggaggggctgccctctgtagccacacaggaagccaatatgcacaaaaatggcgctatagtggcccctggtaaaacccggggagggtcaccgtacaaccagtttgatatcatccctggtgacacactgggtggccatacgggtcctgctggtgatagctggttacctgccaaatctccaccaacaaataaaatcggaagtaaatccagcaatgccagttggcctccagaattccaaccaggagtgccatggaaaggtatccaaaacattgaccctgaatctgacccctatgtcaccccaggaagtgtgctggggggtacagccacatctcccattgtagatactgaccaccaactgctgcgggataacaccacagggtctaattcttccctcaacacctcgctgccttcacctggtgcctggccctacagtgcctctgacaactcctttaccaacgttcatagcacttcagcaaagttccctgattacaaatcaacatggtccccagatcccataggacacaaccccactcatctctccaacaagatgtggaaaaaccatatttcctccaggaacactacaccgctgccccgcccacctcctggtctgaccaaccccaaaccatcatctccctggagcagcacagcaccccgatcagtcagggggtgggggacacaggactcacggctcgcctcggcctctacctggagtgatggtggctcagttcgtcctagttactggctggttcttcacaatctcaccccacagattgatgggtcaaccttgagaacgatctgcatgcagcatggcccactgctgacattccatctgaatctaacccagggcactgccctgatccgatacagcaccaaacaggaggcggccaaggcccaaactgcactgcacatgtgagtattcggtcctacacccacgtagacaaacatgcatgaagatgcacccgtgagtattctggcagctgctgaattaaagatgcaccagaacatatacgaagaatggcaccgtcacacgtgcatctgcaagtctcgagtgtggagagtgtggaggtgccgggtcttttccaccaaagcttggattgtcctgtatatatcagaggccagtcgtcagaattccaaacgtaaataatttgtgaagtagtgagtaaattctaagtaacataaagctagggccgggcacagtggcccatgcctgtaatcccagcactttgggaggccaaggcgggcagatcacaaggtcaggagatggagaccatcttggccaacatggtaaaaccctgtctctactaaaacacaaaaaatcagccaggcgtgggggcgcatgcctgtagtcccagctactgggaaggttgaggcaggggaatcgcttgaacctgggaagcagaggttgcagtgagctgagatcatgccactgccctccagcctggtgacagagcaagattccatctcaaaaaagaaaaaaaa

SEQ ID NO: 194647 - DNA, 9632 bp, Homo sapiens
  Payload ID: 18467
  Gene Name: trinucleotide repeat containing 6C
  Uniprot ID: Q9HCJ0
  ENST ID: ENST00000301624
  CDS Start-End: 570-5642
aggctgctgatcaaaaaaccaaagtgccagaacctactaagacctgttcaagccagccccaacctgccggtaccagtaccagtacttccaccagcactatctcaagcagcaacaatggcaaacgtgcatctgccagtggccagcagccagctgcatcccgttacctgcctcgtgaggtgcctccacgcttccgccagcaagaacagaagcagctattaaagagaggccagccattgcctacggggactctaaccagtgtgagcccaacccagggtgctgggcctgcaggggtaagcccacctcccctacctggagccggaacacagcatcatcccagtaagctccaaccagatctcagtcatagtggattggcagatcattatgaaaattcccactggggacagcagcctacttacagaagcgaagccaactgcagctgggataaagtgataatagataggactgacaaggaggcgtggccttccatcacaggaacagagactgaatctgcctcagaatgtactacagacactgactctgcctccaactgtggctcagagaacagtagcatggctacagggagtgcccagggcaacttcactggacataccaagaagacaaatggcaataatggcaccaatggcgcactcgtccaaagcccttctaatcagagtgcccttggagcagggggagcgaacagtaatggaagtgcggccagagtgtggggtgtagccacaggctccagctctggcctggctcactgctctgtcagtggtggggatggaaaaatggacactatgattggagatgggagaagtcagaattgctggggtgcttccaactccaatgctggcattaatcttaaccttaatcctaatgccaacccagctgcctggcctgtacttggacatgaaggaaccgtggcgacaggcaacccttccagtatttgcagtccagtcagtgccataggtcaaaatatgggcaaccagaacgggaacccaacaggcactttaggtgcttggggaaacttgctgccacaagagagcacagaaccacaaacgtccacttctcagaatgtgtctttcagcgcacaacctcagaaccttaacactgatggaccaaataacactaaccccatgaactcttcacccaaccctatcaatgcaatgcagacaaatggactgccaaactggggcatggctgttggtatgggggccatcatcccgccccacctgcaaggccttcctggtgctaatggatcatcagtttctcaagtcagtgggggcagtgctgaaggaataagcaattctgtgtggggactgtccccaggtaaccctgccacaggaaatagcaattctgggttcagtcaggggaatggagacactgtgaactcagcattaagtgctaaacaaaatggatccagcagtgctgtgcaaaaggaaggaagtggaggaaatgcttgggattcaggacctcctgctggtcctggaatactcgcctggggaaggggcagtggcaacaatggcgttggtaatatccattcaggagcttggggccaccccagccgaagcacctctaacggtgtgaatggggaatggggaaagcccccaaaccagcattccaacagtgacatcaatgggaaaggatcaacagggtgggagagtcctagtgtcaccagccagaaccctaccgtacagcctggtggtgaacacatgaactcctgggccaaagcggcatcttctggaactacagcaagtgaaggaagtagtgatggttctggcaaccacaatgaaggaagcactgggagggaaggaacgggagaaggccgaaggcgagataaagggattatagaccaagggcacatccagttgccaaggaatgatcttgacccaagagttctgtctaatactggttggggacagactcctgtaaagcaaaacactgcctgggaatttgaagaatcccctaggtctgaaaggaaaaatgacaatgggacagaggcctggggttgtgcagctactcaggcttcaaactcaggggggaagaacgatgggtccatcatgaacagtacaaatacctcttcagtatctgggtgggtcaacgcgccacctgccgctgtgccagcaaacacaggttggggagacagcaacaacaaagcgccaagtggcccgggggtttggggggactcgataagctctactgctgttagtactgctgctgctgccaagagtggccatgcttggagtggggccgcaaatcaggaggacaagtcacccacctggggtgagcctccaaagcccaaatcccaacactggggagatggacaaagatcaaatccagcctggagtgcaggagggggagattgggcagattcatcgtctgtccttggacacttgggggatgggaaaaaaaatggatctggatgggatgctgacagtaataggtcagggtctggttggaatgacaccacgagatctgggaacagtggctggggcaacagcacaaatacaaaggccaatccaggtacaaactggggggagactttaaaacctggcccccaacagaactgggctagcaaaccccaagacaacaatgtgagtaactggggaggagctgcttctgtgaaacagacaggaacagggtggatcggggggccggtaccggtcaaacagaaggacagcagtgaagcaactggctgggaagaaccctctccaccgtccattcgccgcaaaatggaaattgatgatggtacctcagcttggggggacccaagcaactataacaataaaactgtaaacatgtgggatagaaacaacccggtcatccagagcagtaccacgaccaataccaccaccaccaccaccactaccacgagcaacaccacacacagggtcgagacgccgcccccgcaccaggccggtactcagctgaatcgatcaccgttgcttggtccaggtaggaaagtttcatcaggctggggagaaatgcctaatgttcactcaaagactgaaaactcttggggagaaccatcctccccttctaccctggtggataatggcacagcagcatgggggaagccacccagcagtggcagcgggtggggagatcaccctgcagagccgccggtggcatttggaagagctggcgcacctgttgctgcctcagccctgtgcaaaccagcttcaaaatctatgcaagaaggctggggcagtggtggggatgaaatgaacctcagtaccagccagtgggaggatgaagaaggggacgtgtggaataatgctgcttcccaagaaagcacctcctcctgcagctcctgggggaacgcccccaaaaaaggacttcaaaagggcatgaagacgtctggcaagcaggatgaggcctggatcatgagccggctgatcaaacaactcacagacatgggcttcccgagagagccagctgaggaggccttgaagagtaacaatatgaatcttgatcaggccatgagcgctctgctggaaaagaaggtggacgtggacaagcgtgggctgggagtgaccgaccataatggaatggccgccaagcccctcggctgccgcccgccaatctccaaagagtcttccgtggaccgccccacctttcttgacaaggatggcggcctcgtggaagagcccacgccttcaccgttcttgccttccccaagcctgaagctccccctttcacacagtgcactccccagtcaggccctgggtgggattgcctccgggctgggcatgcaaaacttgaattcttctagacagataccgagtggcaatctgggtatgtttggcaatagtggagcagcacaagccaggaccatgcagcagccgccacagccaccagtgcagcctcttaactcttcccagcccagtctccgtgctcaagtgcctcagtttctatcccctcaggttcaagcacagcttttgcagtttgcagcaaaaaacattggtctcaaccctgcactattaacctcgccaattaatcctcaacatatgacgatgttgaaccagctctatcagctgcagctggcataccaacgtttacaaatccagcagcagatgttacaggcccagcgtaatgtgtccggatccatgagacaacaggagcagcaagttgcgcgcacaatcactaatctgcagcagcagatccagcagcaccagcgccagctggcccaggccctgctcgtgaagcagccaccaccgccaccgcccccgccgcacctgtctctgcacccctctgcaggcaaatcggccatggacagcttcccctcgcacccacagactcccggcctacctgacctgcagaccaaagagcagcagtcttcacccaacacctttgctccttaccctctcgctggactgaacccaaacatgaatgtcaacagcatggacatgaccggtggcttgtcggtgaaggacccatcccagtcccagtcacgcctcccccagtggacgcaccccaactccatggataacttgcccagtgccgcttcccccctggagcagaaccctagcaagcatggtgctatccctggaggtctaagcattgggcctccaggtaagtcctccattgatgactcctatggccggtacgatttaatccagaacagtgagtcaccagccagtcctcccgtagctgttccccatagctggtcacgtgccaaatctgacagtgataaaatctcaaatggctctagcatcaactggcccccagaattccatccgggagttccatggaaaggactgcagaatattgaccctgagaatgaccctgacgtcactcctggcagtgtccccactgggcctaccatcaacaccaccatccaggatgtcaaccgctacctcctcaagagtggaggtaaactgtcagacatcaaatcgacgtggtcctctggccctacctcccacacgcaagcctctctgtctcatgaactatggaaggtgcccagaaacagtactgcacccacgaggccacctccagggttaaccaatcccaagccctcctccacctggggtgccagccccctcggctggaccagctcctactcctcgggttctgcctggagcaccgacacctcaggaagaaccagcagctggctcgttcttcgaaacctcactccccagattgatggttctacactgcggacattgtgtttgcaacatgggcctcttatcacattccacctgaatctgactcaaggcaatgctgtggtccggtacagctccaaggaggaggctgccaaggcccagaagtctctgcacatgtgcgtcctgggaaacactaccatcctggccgagttcgctggtgaagaagaagtgaatcgcttcttagcccaaggccaggcgctgccacccacttccagctggcagtccagcagcgcgtccagccagccgcggctcagcgcagcgggcagctcccatggcctggtacgcagcgacgctggccactggaacgccccgtgcctgggtggcaaggggagcagtgagctgctgtggggcggggtgccccagtactccagcagcctgtggggcccgcccagcgccgacgacagcagggtgataggcagccccacgccgctaaccaccctgctgcctggggacctgctcagcggggagtccctgtaggctctgccatcatcagcaccaggagagccgacccctcccgggacccctcccggctgggcggccccacagacccgctggaacccagcagcggccgcccttttgagtacctctgtccaggactgaagacgaaccttggccgcagtccttgcgaactgttcgcaaaacagtgcgggctgcggtgggtcagcgtcacatgctaatgacaggatgttcctcgtagctttttattttgtgcgtcttatgtttgtatagtgtgttgtcattttgattttttttttttttttaagtataaaagctgcttagaatagttctatcatgaagggcacttttcagattgtgggctggaaagggttattttatctgtgggggagggagggagacgtgaagcctatttaaaatgagcctgtgacgattatgcacatgaccagaggcggccggtaatcagggcagagtctggtgtggaccgccgggcgcagagcggctccgcggcgggagctgagcggaaggcgcgggctgcgatctgctctctgttcccctggatccgcctatgcacattacccttgtttcattactttttcatgtcatttttttatcccaaaaaatattttttaaaagttaaaaaaagacatatcaaacatgcaaatacttgaatccagcaggccaatagtgaaatgtgaacactttctaattctacacttccaggttgacatcagtacacagaaacaggctctaggaaaaatttctaagttcatagcctacgtgtgtgtatgtgtgcgtgttgaaacagaagtgtgtgtgtgtgtgcatgtgtggcgcgtgctcctgcacggcgtgcagttttctgtgtttgtgtgtttgaaagcgtgtgaggatttaactgtgggttttcccttgtattcagtatacgctttttttttggcgcattggtcaaacggttgttattattagcttctaactttgcactgagtgtcctcgcccttcctttagctaatcctatacattacagagaattcctaggacagggctggcgacaattcatgtgtaaatgtttactcaaggactctgtgactgcgtttaaaaagtacagtgtatatctctggagaaataacatgtatacctacctttagcagctttttattgtggactaatgcaagaaaattattaccagagtattgcaccatttttccatttggaatataaagttaaagagaaaaaaaaaaaaaactgttgttgaactgtggccatagatacttgtaaagaatggatggttccgtggaaggaacagaaacaagcacttgggcgtgggttgtgactgcttttgggggagcctggggtttgggctcccacctgtttacagacctttttttctccttcagactttaaaattttaaaaatttaaaaaggaattaaaaaaaaaaaaagacttccgtcgtaaagaaacctattttcagaatgcagatgcgttccttcagagctctgggacgggacagtgttgttccctcggccatcgtcgtggactctgtcgattgctttcgccccttcgtcaaggtgacaggcgttgtggccactgtcttgcacatgccggacgcgctctcaggaaagccagggctcccgagggcagctccacaccatttcatgtatttttaaacccaactcctagcactgaagatgttatttaaaaaaaaaaaaaacaaaacaaaacaaaaaaatgaaaaaaaagaaaaagaggaaaaaaaaacacaaagaagaaaaatacctaatctctaatgtgtagcagttacatatttaccaaataatggactcaaaagaaatagatgtttgaagagtgctttatatattaaaaattgctttatgttttaaaaatgatcaatgttttgattgttttgcaaggaagaaagacaatggaataacataccttcaagtatgttttaaaaaatatatatatgaacattgtgctccctgcctgcttgatcaggaaacttgtgcattacatttttttaattagctttttaatggttttatcaaaacaaaaaaaatacaaaaaaaaaaaaaaaagtcctgcaagactgcagatccacaaaagctggttttatagaggatcatgaactatgcacaaactgggttcaagactttttttctcaagtttagtaggatatttagaaaaaccaaccttcctcagagtgactgcatctcattgccattacatgcgttctatatattcgatggacatacacctgcgtatgtatatccaatatgtgtgcgtgtgagcatgcgtgtgcgtatgtgcgtccgacataccacttcccgtgctgccggcgagcattgagttgtagaaaaactgttgttttaaaattggggatggaagtcaagaatatgtttgtttgtttttgggttttgttgggtttgaggggttttttgtttgtttgttttttgttttttttaccttttattttgaacttaatatgtctgtaactctgagattaaacaacaagttcgtggctcttaatgttttcctcatagaatgtgactgttgaagaacatgcatcgaaagttgctttcgaaagtacaacgctttattgaatcttaataaattgcaatttttttcttggctgttcaaagtaatgtgtttttcatttttcaaaagacactatggatgtctactttgcacgctgcgattgggagagctgtcccgctgcatgcgttccctctgtaatttcctcagagctcacatacgtacctctctcacgagtgaactcagattttccattgttttgctttattctatcatttgctttgtggttttgctgtaaatattgaaatcttaatcatcatcgagaggcacagccaagctttccagctctccacccccgtggcccatccaagtctgttcatctggtaacttctgttgtctgggacggcagcaagaagatgccggggcttgcctggagtcctggcagaggagtgccactcacttttgcctagggtccagttggggcttaaaaaatatttggagagaagagtaatgaggattttttgtgtttcctagacattttatgcatctatttttgtaaaatcaccttcgctaactttcaccaagcactttgagcacagtggaacttcagaagcacaaccagcctaaccccagaatctcaggtggcacagctagaaattgagtcccttcctaggacactggccgtggccttcagggtgaccagtcagtgccaccgggttggcattggtgttacagacaggcctctgaagacaaaccgagcaccccagcggcccctcaaactaagcaaggatcttttttctgtctgcgctccctggggcaaggtcaaaggtggacccgcccactgtgggtcaattccttcgaaaagatgggacccgcacccccgccacaggctggcccccccccacccatggggaaggtggtgtgctgctggctctgaccatactcttttggaaattgagaaggaaagcattgagtgggacctaatccggagaagaaattaaagaccagaaaaagaaggaagctgggaatgaaactcaaaatgcacttgaacctggaagcggcaaccctcagctctgcgcggccgagcctcagcaagagttcgttttgtgcctgagttactactacaggggcaaactgtacccgtgcctgtgcgctgggagaacaaggtcagcgcccaagggtgtgcaaaggatgtggcaggcttcatggaggaggtggcatttgccctgggcctgggagaccaggttggattttgacagactgggaactcgggggacaggagggcagcacagtgtaagctaaagccctgtgtagggaccccacgcaaagacctcgtgggcctgggtgtccagggcaccatttccacccatgggtgaaaaagaggcttgaggaagacaacaggttcttcacctgcatctgtggatatatatttttttaagtttattaaatttttttttaaatggcagtttcagacctgc

SEQ ID NO: 194648 - DNA, 9740 bp, Homo sapiens
  Payload ID: 18467
  Gene Name: trinucleotide repeat containing 6C
  Uniprot ID: Q9HCJ0
  ENST ID: ENST00000335749
  CDS Start-End: 570-5750
aggctgctgatcaaaaaaccaaagtgccagaacctactaagacctgttcaagccagccccaacctgccggtaccagtaccagtacttccaccagcactatctcaagcagcaacaatggcaaacgtgcatctgccagtggccagcagccagctgcatcccgttacctgcctcgtgaggtgcctccacgcttccgccagcaagaacagaagcagctattaaagagaggccagccattgcctacggggactctaaccagtgtgagcccaacccagggtgctgggcctgcaggggtaagcccacctcccctacctggagccggaacacagcatcatcccagtaagctccaaccagatctcagtcatagtggattggcagatcattatgaaaattcccactggggacagcagcctacttacagaagcgaagccaactgcagctgggataaagtgataatagataggactgacaaggaggcgtggccttccatcacaggaacagagactgaatctgcctcagaatgtactacagacactgactctgcctccaactgtggctcagagaacagtagcatggctacagggagtgcccagggcaacttcactggacataccaagaagacaaatggcaataatggcaccaatggcgcactcgtccaaagcccttctaatcagagtgcccttggagcagggggagcgaacagtaatggaagtgcggccagagtgtggggtgtagccacaggctccagctctggcctggctcactgctctgtcagtggtggggatggaaaaatggacactatgattggagatgggagaagtcagaattgctggggtgcttccaactccaatgctggcattaatcttaaccttaatcctaatgccaacccagctgcctggcctgtacttggacatgaaggaaccgtggcgacaggcaacccttccagtatttgcagtccagtcagtgccataggtcaaaatatgggcaaccagaacgggaacccaacaggcactttaggtgcttggggaaacttgctgccacaagagagcacagaaccacaaacgtccacttctcagaatgtgtctttcagcgcacaacctcagaaccttaacactgatggaccaaataacactaaccccatgaactcttcacccaaccctatcaatgcaatgcagacaaatggactgccaaactggggcatggctgttggtatgggggccatcatcccgccccacctgcaaggccttcctggtgctaatggatcatcagtttctcaagtcagtgggggcagtgctgaaggaataagcaattctgtgtggggactgtccccaggtaaccctgccacaggaaatagcaattctgggttcagtcaggggaatggagacactgtgaactcagcattaagtgctaaacaaaatggatccagcagtgctgtgcaaaaggaaggaagtggaggaaatgcttgggattcaggacctcctgctggtcctggaatactcgcctggggaaggggcagtggcaacaatggcgttggtaatatccattcaggagcttggggccaccccagccgaagcacctctaacggtgtgaatggggaatggggaaagcccccaaaccagcattccaacagtgacatcaatgggaaaggatcaacagggtgggagagtcctagtgtcaccagccagaaccctaccgtacagcctggtggtgaacacatgaactcctgggccaaagcggcatcttctggaactacagcaagtgaaggaagtagtgatggttctggcaaccacaatgaaggaagcactgggagggaaggaacgggagaaggccgaaggcgagataaagggattatagaccaagggcacatccagttgccaaggaatgatcttgacccaagagttctgtctaatactggttggggacagactcctgtaaagcaaaacactgcctgggaatttgaagaatcccctaggtctgaaaggaaaaatgacaatgggacagaggcctggggttgtgcagctactcaggcttcaaactcaggggggaagaacgatgggtccatcatgaacagtacaaatacctcttcagtatctgggtgggtcaacgcgccacctgccgctgtgccagcaaacacaggttggggagacagcaacaacaaagcgccaagtggcccgggggtttggggggactcgataagctctactgctgttagtactgctgctgctgccaagagtggccatgcttggagtggggccgcaaatcaggaggacaagtcacccacctggggtgagcctccaaagcccaaatcccaacactggggagatggacaaagatcaaatccagcctggagtgcaggagggggagattgggcagattcatcgtctgtccttggacacttgggggatgggaaaaaaaatggatctggatgggatgctgacagtaataggtcagggtctggttggaatgacaccacgagatctgggaacagtggctggggcaacagcacaaatacaaaggccaatccaggtacaaactggggggagactttaaaacctggcccccaacagaactgggctagcaaaccccaagacaacaatgtgagtaactggggaggagctgcttctgtgaaacagacaggaacagggtggatcggggggccggtaccggtcaaacagaaggacagcagtgaagcaactggctgggaagaaccctctccaccgtccattcgccgcaaaatggaaattgatgatggtacctcagcttggggggacccaagcaactataacaataaaactgtaaacatgtgggatagaaacaacccggtcatccagagcagtaccacgaccaataccaccaccaccaccaccactaccacgagcaacaccacacacagggtcgagacgccgcccccgcaccaggccggtactcagctgaatcgatcaccgttgcttggtccagtttcatcaggctggggagaaatgcctaatgttcactcaaagactgaaaactcttggggagaaccatcctccccttctaccctggtggataatggcacagcagcatgggggaagccacccagcagtggcagcgggtggggagatcaccctgcagagccgccggtggcatttggaagagctggcgcacctgttgctgcctcagccctgtgcaaaccagcttcaaaatctatgcaagaaggctggggcagtggtggggatgaaatgaacctcagtaccagccagtgggaggatgaagaaggggacgtgtggaataatgctgcttcccaagaaagcacctcctcctgcagctcctgggggaacgcccccaaaaaaggacttcaaaagggcatgaagacgtctggcaagcaggatgaggcctggatcatgagccggctgatcaaacaactcacagacatgggcttcccgagagagccagctgaggaggccttgaagagtaacaatatgaatcttgatcaggccatgagcgctctgctggaaaagaaggtggacgtggacaagcgtgggctgggagtgaccgaccataatggaatggccgccaagcccctcggctgccgcccgccaatctccaaagagtcttccgtggaccgccccacctttcttgacaaggatggcggcctcgtggaagagcccacgccttcaccgttcttgccttccccaagcctgaagctccccctttcacacagtgcactccccagtcaggccctgggtgggattgcctccgggctgggcatgcaaaacttgaattcttctagacagataccgagtggcaatctgggtatgtttggcaatagtggagcagcacaagccaggaccatgcagcagccgccacagccaccagtgcagcctcttaactcttcccagcccagtctccgtgctcaagtgcctcagtttctatcccctcaggttcaagcacagcttttgcagtttgcagcaaaaaacattggtctcaaccctgcactattaacctcgccaattaatcctcaacatatgacgatgttgaaccagctctatcagctgcagctggcataccaacgtttacaaatccagcagcagatgttacaggcccagcgtaatgtgtccggatccatgagacaacaggagcagcaagttgcgcgcacaatcactaatctgcagcagcagatccagcagcaccagcgccagctggcccaggccctgctcgtgaagcagccaccaccgccaccgcccccgccgcacctgtctctgcacccctctgcaggcaaatcggccatggacagcttcccctcgcacccacagactcccggcctacctgacctgcagaccaaagagcagcagtcttcacccaacacctttgctccttaccctctcgctggactgaacccaaacatgaatgtcaacagcatggacatgaccggtggcttgtcggtgaaggacccatcccagtcccagtcacgcctcccccagtggacgcaccccaactccatggataacttgcccagtgccgcttcccccctggagcagaaccctagcaagcatggtgctatccctggaggtctaagcattgggcctccaggtaagtcctccattgatgactcctatggccggtacgatttaatccagaacagtgagtcaccagccagtcctcccgtagctgttccccatagctggtcacgtgccaaatctgacagtgataaaatctcaaatggctctagcatcaactggcccccagaattccatccgggagttccatggaaaggactgcagaatattgaccctgagaatgaccctgacgtcactcctggcagtgtccccactgggcctaccatcaacaccaccatccaggatgtcaaccgctacctcctcaagagtggagggtcctccccgccatcatctcagaatgccacgctgccttcttcgagtgcctggccactcagtgcctccggctacagtagctctttcagcagcattgcatccgcacctagtgttgcaggtaaactgtcagacatcaaatcgacgtggtcctctggccctacctcccacacgcaagcctctctgtctcatgaactatggaaggtgcccagaaacagtactgcacccacgaggccacctccagggttaaccaatcccaagccctcctccacctggggtgccagccccctcggctggaccagctcctactcctcgggttctgcctggagcaccgacacctcaggaagaaccagcagctggctcgttcttcgaaacctcactccccagattgatggttctacactgcggacattgtgtttgcaacatgggcctcttatcacattccacctgaatctgactcaaggcaatgctgtggtccggtacagctccaaggaggaggctgccaaggcccagaagtctctgcacatgtgcgtcctgggaaacactaccatcctggccgagttcgctggtgaagaagaagtgaatcgcttcttagcccaaggccaggcgctgccacccacttccagctggcagtccagcagcgcgtccagccagccgcggctcagcgcagcgggcagctcccatggcctggtacgcagcgacgctggccactggaacgccccgtgcctgggtggcaaggggagcagtgagctgctgtggggcggggtgccccagtactccagcagcctgtggggcccgcccagcgccgacgacagcagggtgataggcagccccacgccgctaaccaccctgctgcctggggacctgctcagcggggagtccctgtaggctctgccatcatcagcaccaggagagccgacccctcccgggacccctcccggctgggcggccccacagacccgctggaacccagcagcggccgcccttttgagtacctctgtccaggactgaagacgaaccttggccgcagtccttgcgaactgttcgcaaaacagtgcgggctgcggtgggtcagcgtcacatgctaatgacaggatgttcctcgtagctttttattttgtgcgtcttatgtttgtatagtgtgttgtcattttgattttttttttttttttaagtataaaagctgcttagaatagttctatcatgaagggcacttttcagattgtgggctggaaagggttattttatctgtgggggagggagggagacgtgaagcctatttaaaatgagcctgtgacgattatgcacatgaccagaggcggccggtaatcagggcagagtctggtgtggaccgccgggcgcagagcggctccgcggcgggagctgagcggaaggcgcgggctgcgatctgctctctgttcccctggatccgcctatgcacattacccttgtttcattactttttcatgtcatttttttatcccaaaaaatattttttaaaagttaaaaaaagacatatcaaacatgcaaatacttgaatccagcaggccaatagtgaaatgtgaacactttctaattctacacttccaggttgacatcagtacacagaaacaggctctaggaaaaatttctaagttcatagcctacgtgtgtgtatgtgtgcgtgttgaaacagaagtgtgtgtgtgtgtgcatgtgtggcgcgtgctcctgcacggcgtgcagttttctgtgtttgtgtgtttgaaagcgtgtgaggatttaactgtgggttttcccttgtattcagtatacgctttttttttggcgcattggtcaaacggttgttattattagcttctaactttgcactgagtgtcctcgcccttcctttagctaatcctatacattacagagaattcctaggacagggctggcgacaattcatgtgtaaatgtttactcaaggactctgtgactgcgtttaaaaagtacagtgtatatctctggagaaataacatgtatacctacctttagcagctttttattgtggactaatgcaagaaaattattaccagagtattgcaccatttttccatttggaatataaagttaaagagaaaaaaaaaaaaaactgttgttgaactgtggccatagatacttgtaaagaatggatggttccgtggaaggaacagaaacaagcacttgggcgtgggttgtgactgcttttgggggagcctggggtttgggctcccacctgtttacagacctttttttctccttcagactttaaaattttaaaaatttaaaaaggaattaaaaaaaaaaaaagacttccgtcgtaaagaaacctattttcagaatgcagatgcgttccttcagagctctgggacgggacagtgttgttccctcggccatcgtcgtggactctgtcgattgctttcgccccttcgtcaaggtgacaggcgttgtggccactgtcttgcacatgccggacgcgctctcaggaaagccagggctcccgagggcagctccacaccatttcatgtatttttaaacccaactcctagcactgaagatgttatttaaaaaaaaaaaaaacaaaacaaaacaaaaaaatgaaaaaaaagaaaaagaggaaaaaaaaacacaaagaagaaaaatacctaatctctaatgtgtagcagttacatatttaccaaataatggactcaaaagaaatagatgtttgaagagtgctttatatattaaaaattgctttatgttttaaaaatgatcaatgttttgattgttttgcaaggaagaaagacaatggaataacataccttcaagtatgttttaaaaaatatatatatgaacattgtgctccctgcctgcttgatcaggaaacttgtgcattacatttttttaattagctttttaatggttttatcaaaacaaaaaaaatacaaaaaaaaaaaaaaaagtcctgcaagactgcagatccacaaaagctggttttatagaggatcatgaactatgcacaaactgggttcaagactttttttctcaagtttagtaggatatttagaaaaaccaaccttcctcagagtgactgcatctcattgccattacatgcgttctatatattcgatggacatacacctgcgtatgtatatccaatatgtgtgcgtgtgagcatgcgtgtgcgtatgtgcgtccgacataccacttcccgtgctgccggcgagcattgagttgtagaaaaactgttgttttaaaattggggatggaagtcaagaatatgtttgtttgtttttgggttttgttgggtttgaggggttttttgtttgtttgttttttgttttttttaccttttattttgaacttaatatgtctgtaactctgagattaaacaacaagttcgtggctcttaatgttttcctcatagaatgtgactgttgaagaacatgcatcgaaagttgctttcgaaagtacaacgctttattgaatcttaataaattgcaatttttttcttggctgttcaaagtaatgtgtttttcatttttcaaaagacactatggatgtctactttgcacgctgcgattgggagagctgtcccgctgcatgcgttccctctgtaatttcctcagagctcacatacgtacctctctcacgagtgaactcagattttccattgttttgctttattctatcatttgctttgtggttttgctgtaaatattgaaatcttaatcatcatcgagaggcacagccaagctttccagctctccacccccgtggcccatccaagtctgttcatctggtaacttctgttgtctgggacggcagcaagaagatgccggggcttgcctggagtcctggcagaggagtgccactcacttttgcctagggtccagttggggcttaaaaaatatttggagagaagagtaatgaggattttttgtgtttcctagacattttatgcatctatttttgtaaaatcaccttcgctaactttcaccaagcactttgagcacagtggaacttcagaagcacaaccagcctaaccccagaatctcaggtggcacagctagaaattgagtcccttcctaggacactggccgtggccttcagggtgaccagtcagtgccaccgggttggcattggtgttacagacaggcctctgaagacaaaccgagcaccccagcggcccctcaaactaagcaaggatcttttttctgtctgcgctccctggggcaaggtcaaaggtggacccgcccactgtgggtcaattccttcgaaaagatgggacccgcacccccgccacaggctggcccccccccacccatggggaaggtggtgtgctgctggctctgaccatactcttttggaaattgagaaggaaagcattgagtgggacctaatccggagaagaaattaaagaccagaaaaagaaggaagctgggaatgaaactcaaaatgcacttgaacctggaagcggcaaccctcagctctgcgcggccgagcctcagcaagagttcgttttgtgcctgagttactactacaggggcaaactgtacccgtgcctgtgcgctgggagaacaaggtcagcgcccaagggtgtgcaaaggatgtggcaggcttcatggaggaggtggcatttgccctgggcctgggagaccaggttggattttgacagactgggaactcgggggacaggagggcagcacagtgtaagctaaagccctgtgtagggaccccacgcaaagacctcgtgggcctgggtgtccagggcaccatttccacccatgggtgaaaaagaggcttgaggaagacaacaggttcttcacctgcatctgtggatatatatttttttaagtttattaaatttttttttaaatggcagtttcagacctgc

SEQ ID NO: 194649 - DNA, 576 bp, Homo sapiens
  Payload ID: 18467
  Gene Name: trinucleotide repeat containing 6C
  ENST ID: ENST00000588549
  CDS Start-End: 290-576
gatgcaggcgtagaggcagctgtgcacgcgaggtggcgtctcctaggagggttgggcggcaccgtctgcagatctcagtcatagtggattggcagatcattatgaaaattcccactggggacagcagcctacttacagaagcgaagccaactgcagctgggataaagtgataatagataggactgacaaggaggcgtggccttccatcacaggaacagagactgaatctgcctcagaatgtactacagacactgactctgcctccaactgtggctcagagaacagtagcatggctacagggagtgcccagggcaacttcactggacataccaagaagacaaatggcaataatggcaccaatggcgcactcgtccaaagcccttctaatcagagtgcccttggagcagggggagcgaacagtaatggaagtgcggccagagtgtggggtgtagccacaggctccagctctggcctggctcactgctctgtcagtggtggggatggaaaaatggacactatgattggagatgggagaagtcagaattgctggggtgcttccaactccaatgctggcat

SEQ ID NO: 194650 - DNA, 682 bp, Homo sapiens
  Payload ID: 18467
  Gene Name: trinucleotide repeat containing 6C
  ENST ID: ENST00000585438
  CDS Start-End: 333-682
aacctactaagacctgttcaagccagccccaacctgccggtaccagtaccagtacttccaccagcactatctcaagcagcaacaatggcaaacgtgcatctgccagtggccagcagccagctgcatcccgttacctgcctcgtgaggtgcctccacgcttccgccagcaagaacagaagcagctattaaagagaggccagccattgcctacggggactctaaccagtgtgagcccaacccagggtgctgggcctgcaggggtaagcccacctcccctacctggagccggaacacagcatcatcccagtaagctccaaccaggctggggagaaatgcctaatgttcactcaaagactgaaaactcttggggagaaccatcctccccttctaccctggtggataatggcacagcagcatgggggaagccacccagcagtggcagcgggtggggagatcaccctgcagagccgccggtggcatttggaagagctggcgcacctgttgctgcctcagccctgtgcaaaccagcttcaaaatctatgcaagaaggctggggcagtggtggggatgaaatgaacctcagtaccagccagtgggaggatgaagaaggggacgtgtggaataatgctgcttcccaagaaagcacctcctcctgcagctcctgggggaacgcccccaaaaa

SEQ ID NO: 194651 - DNA, 8527 bp, Homo sapiens
  Payload ID: 18467
  Gene Name: trinucleotide repeat containing 6C
  Uniprot ID: Q9HCJ0
  ENST ID: ENST00000588847
  CDS Start-End: 728-5908
agggagaaagagcaagaaacacaagaagaggaacgtttgatggaagaaaagaaaaagaaaaagcaggaagaaaagaaaaagaaggaaggtgctcagaaaaaggctgctgatcaaaaaaccaaagattggtttctgatactaaattggcctctagagttgggcagaaagactcatcgctacagtgccagaacctactaagacctgttcaagccagccccaacctgccggtaccagtaccagtacttccaccagcactatctcaagcagcaacaatggcaaacgtgcatctgccagtggccagcagccagctgcatcccgttacctgcctcgtgaggtgcctccacgcttccgccagcaagaacagaagcagctattaaagagaggccagccattgcctacggggactctaaccagtgtgagcccaacccagggtgctgggcctgcaggggtaagcccacctcccctacctggagccggaacacagcatcatcccagtaagctccaaccagatctcagtcatagtggattggcagatcattatgaaaattcccactggggacagcagcctacttacagaagcgaagccaactgcagctgggataaagtgataatagataggactgacaaggaggcgtggccttccatcacaggaacagagactgaatctgcctcagaatgtactacagacactgactctgcctccaactgtggctcagagaacagtagcatggctacagggagtgcccagggcaacttcactggacataccaagaagacaaatggcaataatggcaccaatggcgcactcgtccaaagcccttctaatcagagtgcccttggagcagggggagcgaacagtaatggaagtgcggccagagtgtggggtgtagccacaggctccagctctggcctggctcactgctctgtcagtggtggggatggaaaaatggacactatgattggagatgggagaagtcagaattgctggggtgcttccaactccaatgctggcattaatcttaaccttaatcctaatgccaacccagctgcctggcctgtacttggacatgaaggaaccgtggcgacaggcaacccttccagtatttgcagtccagtcagtgccataggtcaaaatatgggcaaccagaacgggaacccaacaggcactttaggtgcttggggaaacttgctgccacaagagagcacagaaccacaaacgtccacttctcagaatgtgtctttcagcgcacaacctcagaaccttaacactgatggaccaaataacactaaccccatgaactcttcacccaaccctatcaatgcaatgcagacaaatggactgccaaactggggcatggctgttggtatgggggccatcatcccgccccacctgcaaggccttcctggtgctaatggatcatcagtttctcaagtcagtgggggcagtgctgaaggaataagcaattctgtgtggggactgtccccaggtaaccctgccacaggaaatagcaattctgggttcagtcaggggaatggagacactgtgaactcagcattaagtgctaaacaaaatggatccagcagtgctgtgcaaaaggaaggaagtggaggaaatgcttgggattcaggacctcctgctggtcctggaatactcgcctggggaaggggcagtggcaacaatggcgttggtaatatccattcaggagcttggggccaccccagccgaagcacctctaacggtgtgaatggggaatggggaaagcccccaaaccagcattccaacagtgacatcaatgggaaaggatcaacagggtgggagagtcctagtgtcaccagccagaaccctaccgtacagcctggtggtgaacacatgaactcctgggccaaagcggcatcttctggaactacagcaagtgaaggaagtagtgatggttctggcaaccacaatgaaggaagcactgggagggaaggaacgggagaaggccgaaggcgagataaagggattatagaccaagggcacatccagttgccaaggaatgatcttgacccaagagttctgtctaatactggttggggacagactcctgtaaagcaaaacactgcctgggaatttgaagaatcccctaggtctgaaaggaaaaatgacaatgggacagaggcctggggttgtgcagctactcaggcttcaaactcaggggggaagaacgatgggtccatcatgaacagtacaaatacctcttcagtatctgggtgggtcaacgcgccacctgccgctgtgccagcaaacacaggttggggagacagcaacaacaaagcgccaagtggcccgggggtttggggggactcgataagctctactgctgttagtactgctgctgctgccaagagtggccatgcttggagtggggccgcaaatcaggaggacaagtcacccacctggggtgagcctccaaagcccaaatcccaacactggggagatggacaaagatcaaatccagcctggagtgcaggagggggagattgggcagattcatcgtctgtccttggacacttgggggatgggaaaaaaaatggatctggatgggatgctgacagtaataggtcagggtctggttggaatgacaccacgagatctgggaacagtggctggggcaacagcacaaatacaaaggccaatccaggtacaaactggggggagactttaaaacctggcccccaacagaactgggctagcaaaccccaagacaacaatgtgagtaactggggaggagctgcttctgtgaaacagacaggaacagggtggatcggggggccggtaccggtcaaacagaaggacagcagtgaagcaactggctgggaagaaccctctccaccgtccattcgccgcaaaatggaaattgatgatggtacctcagcttggggggacccaagcaactataacaataaaactgtaaacatgtgggatagaaacaacccggtcatccagagcagtaccacgaccaataccaccaccaccaccaccactaccacgagcaacaccacacacagggtcgagacgccgcccccgcaccaggccggtactcagctgaatcgatcaccgttgcttggtccagtttcatcaggctggggagaaatgcctaatgttcactcaaagactgaaaactcttggggagaaccatcctccccttctaccctggtggataatggcacagcagcatgggggaagccacccagcagtggcagcgggtggggagatcaccctgcagagccgccggtggcatttggaagagctggcgcacctgttgctgcctcagccctgtgcaaaccagcttcaaaatctatgcaagaaggctggggcagtggtggggatgaaatgaacctcagtaccagccagtgggaggatgaagaaggggacgtgtggaataatgctgcttcccaagaaagcacctcctcctgcagctcctgggggaacgcccccaaaaaaggacttcaaaagggcatgaagacgtctggcaagcaggatgaggcctggatcatgagccggctgatcaaacaactcacagacatgggcttcccgagagagccagctgaggaggccttgaagagtaacaatatgaatcttgatcaggccatgagcgctctgctggaaaagaaggtggacgtggacaagcgtgggctgggagtgaccgaccataatggaatggccgccaagcccctcggctgccgcccgccaatctccaaagagtcttccgtggaccgccccacctttcttgacaaggatggcggcctcgtggaagagcccacgccttcaccgttcttgccttccccaagcctgaagctccccctttcacacagtgcactccccagtcaggccctgggtgggattgcctccgggctgggcatgcaaaacttgaattcttctagacagataccgagtggcaatctgggtatgtttggcaatagtggagcagcacaagccaggaccatgcagcagccgccacagccaccagtgcagcctcttaactcttcccagcccagtctccgtgctcaagtgcctcagtttctatcccctcaggttcaagcacagcttttgcagtttgcagcaaaaaacattggtctcaaccctgcactattaacctcgccaattaatcctcaacatatgacgatgttgaaccagctctatcagctgcagctggcataccaacgtttacaaatccagcagcagatgttacaggcccagcgtaatgtgtccggatccatgagacaacaggagcagcaagttgcgcgcacaatcactaatctgcagcagcagatccagcagcaccagcgccagctggcccaggccctgctcgtgaagcagccaccaccgccaccgcccccgccgcacctgtctctgcacccctctgcaggcaaatcggccatggacagcttcccctcgcacccacagactcccggcctacctgacctgcagaccaaagagcagcagtcttcacccaacacctttgctccttaccctctcgctggactgaacccaaacatgaatgtcaacagcatggacatgaccggtggcttgtcggtgaaggacccatcccagtcccagtcacgcctcccccagtggacgcaccccaactccatggataacttgcccagtgccgcttcccccctggagcagaaccctagcaagcatggtgctatccctggaggtctaagcattgggcctccaggtaagtcctccattgatgactcctatggccggtacgatttaatccagaacagtgagtcaccagccagtcctcccgtagctgttccccatagctggtcacgtgccaaatctgacagtgataaaatctcaaatggctctagcatcaactggcccccagaattccatccgggagttccatggaaaggactgcagaatattgaccctgagaatgaccctgacgtcactcctggcagtgtccccactgggcctaccatcaacaccaccatccaggatgtcaaccgctacctcctcaagagtggagggtcctccccgccatcatctcagaatgccacgctgccttcttcgagtgcctggccactcagtgcctccggctacagtagctctttcagcagcattgcatccgcacctagtgttgcaggtaaactgtcagacatcaaatcgacgtggtcctctggccctacctcccacacgcaagcctctctgtctcatgaactatggaaggtgcccagaaacagtactgcacccacgaggccacctccagggttaaccaatcccaagccctcctccacctggggtgccagccccctcggctggaccagctcctactcctcgggttctgcctggagcaccgacacctcaggaagaaccagcagctggctcgttcttcgaaacctcactccccagattgatggttctacactgcggacattgtgtttgcaacatgggcctcttatcacattccacctgaatctgactcaaggcaatgctgtggtccggtacagctccaaggaggaggctgccaaggcccagaagtctctgcacatgtgcgtcctgggaaacactaccatcctggccgagttcgctggtgaagaagaagtgaatcgcttcttagcccaaggccaggcgctgccacccacttccagctggcagtccagcagcgcgtccagccagccgcggctcagcgcagcgggcagctcccatggcctggtacgcagcgacgctggccactggaacgccccgtgcctgggtggcaaggggagcagtgagctgctgtggggcggggtgccccagtactccagcagcctgtggggcccgcccagcgccgacgacagcagggtgataggcagccccacgccgctaaccaccctgctgcctggggacctgctcagcggggagtccctgtaggctctgccatcatcagcaccaggagagccgacccctcccgggacccctcccggctgggcggccccacagacccgctggaacccagcagcggccgcccttttgagtacctctgtccaggactgaagacgaaccttggccgcagtccttgcgaactgttcgcaaaacagtgcgggctgcggtgggtcagcgtcacatgctaatgacaggatgttcctcgtagctttttattttgtgcgtcttatgtttgtatagtgtgttgtcattttgattttttttttttttttaagtataaaagctgcttagaatagttctatcatgaagggcacttttcagattgtgggctggaaagggttattttatctgtgggggagggagggagacgtgaagcctatttaaaatgagcctgtgacgattatgcacatgaccagaggcggccggtaatcagggcagagtctggtgtggaccgccgggcgcagagcggctccgcggcgggagctgagcggaaggcgcgggctgcgatctgctctctgttcccctggatccgcctatgcacattacccttgtttcattactttttcatgtcatttttttatcccaaaaaatattttttaaaagttaaaaaaagacatatcaaacatgcaaatacttgaatccagcaggccaatagtgaaatgtgaacactttctaattctacacttccaggttgacatcagtacacagaaacaggctctaggaaaaatttctaagttcatagcctacgtgtgtgtatgtgtgcgtgttgaaacagaagtgtgtgtgtgtgtgcatgtgtggcgcgtgctcctgcacggcgtgcagttttctgtgtttgtgtgtttgaaagcgtgtgaggatttaactgtgggttttcccttgtattcagtatacgctttttttttggcgcattggtcaaacggttgttattattagcttctaactttgcactgagtgtcctcgcccttcctttagctaatcctatacattacagagaattcctaggacagggctggcgacaattcatgtgtaaatgtttactcaaggactctgtgactgcgtttaaaaagtacagtgtatatctctggagaaataacatgtatacctacctttagcagctttttattgtggactaatgcaagaaaattattaccagagtattgcaccatttttccatttggaatataaagttaaagagaaaaaaaaaaaaaactgttgttgaactgtggccatagatacttgtaaagaatggatggttccgtggaaggaacagaaacaagcacttgggcgtgggttgtgactgcttttgggggagcctggggtttgggctcccacctgtttacagacctttttttctccttcagactttaaaattttaaaaatttaaaaaggaattaaaaaaaaaaaaagacttccgtcgtaaagaaacctattttcagaatgcagatgcgttccttcagagctctgggacgggacagtgttgttccctcggccatcgtcgtggactctgtcgattgctttcgccccttcgtcaaggtgacaggcgttgtggccactgtcttgcacatgccggacgcgctctcaggaaagccagggctcccgagggcagctccacaccatttcatgtatttttaaacccaactcctagcactgaagatgttatttaaaaaaaaaaaaaacaaaacaaaacaaaaaaatgaaaaaaaagaaaaagaggaaaaaaaaacacaaagaagaaaaatacctaatctctaatgtgtagcagttacatatttaccaaataatggactcaaaagaaatagatgtttgaagagtgctttatatattaaaaattgctttatgttttaaaaatgatcaatgttttgattgttttgcaaggaagaaagacaatggaataacataccttcaagtatgttttaaaaaatatatatatgaacattgtgctccctgcctgcttgatcaggaaacttgtgcattacatttttttaattagctttttaatggttttatcaaaacaaaaaaaatacaaaaaaaaaaaaaaaagtcctgcaagactgcagatccacaaaagctggttttatagaggatcatgaactatgcacaaactgggttcaagactttttttctcaagtttagtaggatatttagaaaaaccaaccttcctcagagtgactgcatctcattgccattacatgcgttctatatattcgatggacatacacctgcgtatgtatatccaatatgtgtgcgtgtgagcatgcgtgtgcgtatgtgcgtccgacataccacttcccgtgctgccggcgagcattgagttgtagaaaaactgttgttttaaaattggggatggaagtcaagaatatgtttgtttgtttttgggttttgttgggtttgaggggttttttgtttgtttgttttttgttttttttaccttttattttgaacttaatatgtctgtaactctgagattaaacaacaagttcgtggctcttaatgttttcctcatagaatgtgactgttgaagaacatgcatcgaaagttgctttcgaaagtacaacgctttattgaatcttaataaattgcaatttttttcttggctgttcaaag

SEQ ID NO: 194652 - DNA, 8419 bp, Homo sapiens
  Payload ID: 18467
  Gene Name: trinucleotide repeat containing 6C
  Uniprot ID: Q9HCJ0
  ENST ID: ENST00000588061
  CDS Start-End: 728-5800
agggagaaagagcaagaaacacaagaagaggaacgtttgatggaagaaaagaaaaagaaaaagcaggaagaaaagaaaaagaaggaaggtgctcagaaaaaggctgctgatcaaaaaaccaaagattggtttctgatactaaattggcctctagagttgggcagaaagactcatcgctacagtgccagaacctactaagacctgttcaagccagccccaacctgccggtaccagtaccagtacttccaccagcactatctcaagcagcaacaatggcaaacgtgcatctgccagtggccagcagccagctgcatcccgttacctgcctcgtgaggtgcctccacgcttccgccagcaagaacagaagcagctattaaagagaggccagccattgcctacggggactctaaccagtgtgagcccaacccagggtgctgggcctgcaggggtaagcccacctcccctacctggagccggaacacagcatcatcccagtaagctccaaccagatctcagtcatagtggattggcagatcattatgaaaattcccactggggacagcagcctacttacagaagcgaagccaactgcagctgggataaagtgataatagataggactgacaaggaggcgtggccttccatcacaggaacagagactgaatctgcctcagaatgtactacagacactgactctgcctccaactgtggctcagagaacagtagcatggctacagggagtgcccagggcaacttcactggacataccaagaagacaaatggcaataatggcaccaatggcgcactcgtccaaagcccttctaatcagagtgcccttggagcagggggagcgaacagtaatggaagtgcggccagagtgtggggtgtagccacaggctccagctctggcctggctcactgctctgtcagtggtggggatggaaaaatggacactatgattggagatgggagaagtcagaattgctggggtgcttccaactccaatgctggcattaatcttaaccttaatcctaatgccaacccagctgcctggcctgtacttggacatgaaggaaccgtggcgacaggcaacccttccagtatttgcagtccagtcagtgccataggtcaaaatatgggcaaccagaacgggaacccaacaggcactttaggtgcttggggaaacttgctgccacaagagagcacagaaccacaaacgtccacttctcagaatgtgtctttcagcgcacaacctcagaaccttaacactgatggaccaaataacactaaccccatgaactcttcacccaaccctatcaatgcaatgcagacaaatggactgccaaactggggcatggctgttggtatgggggccatcatcccgccccacctgcaaggccttcctggtgctaatggatcatcagtttctcaagtcagtgggggcagtgctgaaggaataagcaattctgtgtggggactgtccccaggtaaccctgccacaggaaatagcaattctgggttcagtcaggggaatggagacactgtgaactcagcattaagtgctaaacaaaatggatccagcagtgctgtgcaaaaggaaggaagtggaggaaatgcttgggattcaggacctcctgctggtcctggaatactcgcctggggaaggggcagtggcaacaatggcgttggtaatatccattcaggagcttggggccaccccagccgaagcacctctaacggtgtgaatggggaatggggaaagcccccaaaccagcattccaacagtgacatcaatgggaaaggatcaacagggtgggagagtcctagtgtcaccagccagaaccctaccgtacagcctggtggtgaacacatgaactcctgggccaaagcggcatcttctggaactacagcaagtgaaggaagtagtgatggttctggcaaccacaatgaaggaagcactgggagggaaggaacgggagaaggccgaaggcgagataaagggattatagaccaagggcacatccagttgccaaggaatgatcttgacccaagagttctgtctaatactggttggggacagactcctgtaaagcaaaacactgcctgggaatttgaagaatcccctaggtctgaaaggaaaaatgacaatgggacagaggcctggggttgtgcagctactcaggcttcaaactcaggggggaagaacgatgggtccatcatgaacagtacaaatacctcttcagtatctgggtgggtcaacgcgccacctgccgctgtgccagcaaacacaggttggggagacagcaacaacaaagcgccaagtggcccgggggtttggggggactcgataagctctactgctgttagtactgctgctgctgccaagagtggccatgcttggagtggggccgcaaatcaggaggacaagtcacccacctggggtgagcctccaaagcccaaatcccaacactggggagatggacaaagatcaaatccagcctggagtgcaggagggggagattgggcagattcatcgtctgtccttggacacttgggggatgggaaaaaaaatggatctggatgggatgctgacagtaataggtcagggtctggttggaatgacaccacgagatctgggaacagtggctggggcaacagcacaaatacaaaggccaatccaggtacaaactggggggagactttaaaacctggcccccaacagaactgggctagcaaaccccaagacaacaatgtgagtaactggggaggagctgcttctgtgaaacagacaggaacagggtggatcggggggccggtaccggtcaaacagaaggacagcagtgaagcaactggctgggaagaaccctctccaccgtccattcgccgcaaaatggaaattgatgatggtacctcagcttggggggacccaagcaactataacaataaaactgtaaacatgtgggatagaaacaacccggtcatccagagcagtaccacgaccaataccaccaccaccaccaccactaccacgagcaacaccacacacagggtcgagacgccgcccccgcaccaggccggtactcagctgaatcgatcaccgttgcttggtccaggtaggaaagtttcatcaggctggggagaaatgcctaatgttcactcaaagactgaaaactcttggggagaaccatcctccccttctaccctggtggataatggcacagcagcatgggggaagccacccagcagtggcagcgggtggggagatcaccctgcagagccgccggtggcatttggaagagctggcgcacctgttgctgcctcagccctgtgcaaaccagcttcaaaatctatgcaagaaggctggggcagtggtggggatgaaatgaacctcagtaccagccagtgggaggatgaagaaggggacgtgtggaataatgctgcttcccaagaaagcacctcctcctgcagctcctgggggaacgcccccaaaaaaggacttcaaaagggcatgaagacgtctggcaagcaggatgaggcctggatcatgagccggctgatcaaacaactcacagacatgggcttcccgagagagccagctgaggaggccttgaagagtaacaatatgaatcttgatcaggccatgagcgctctgctggaaaagaaggtggacgtggacaagcgtgggctgggagtgaccgaccataatggaatggccgccaagcccctcggctgccgcccgccaatctccaaagagtcttccgtggaccgccccacctttcttgacaaggatggcggcctcgtggaagagcccacgccttcaccgttcttgccttccccaagcctgaagctccccctttcacacagtgcactccccagtcaggccctgggtgggattgcctccgggctgggcatgcaaaacttgaattcttctagacagataccgagtggcaatctgggtatgtttggcaatagtggagcagcacaagccaggaccatgcagcagccgccacagccaccagtgcagcctcttaactcttcccagcccagtctccgtgctcaagtgcctcagtttctatcccctcaggttcaagcacagcttttgcagtttgcagcaaaaaacattggtctcaaccctgcactattaacctcgccaattaatcctcaacatatgacgatgttgaaccagctctatcagctgcagctggcataccaacgtttacaaatccagcagcagatgttacaggcccagcgtaatgtgtccggatccatgagacaacaggagcagcaagttgcgcgcacaatcactaatctgcagcagcagatccagcagcaccagcgccagctggcccaggccctgctcgtgaagcagccaccaccgccaccgcccccgccgcacctgtctctgcacccctctgcaggcaaatcggccatggacagcttcccctcgcacccacagactcccggcctacctgacctgcagaccaaagagcagcagtcttcacccaacacctttgctccttaccctctcgctggactgaacccaaacatgaatgtcaacagcatggacatgaccggtggcttgtcggtgaaggacccatcccagtcccagtcacgcctcccccagtggacgcaccccaactccatggataacttgcccagtgccgcttcccccctggagcagaaccctagcaagcatggtgctatccctggaggtctaagcattgggcctccaggtaagtcctccattgatgactcctatggccggtacgatttaatccagaacagtgagtcaccagccagtcctcccgtagctgttccccatagctggtcacgtgccaaatctgacagtgataaaatctcaaatggctctagcatcaactggcccccagaattccatccgggagttccatggaaaggactgcagaatattgaccctgagaatgaccctgacgtcactcctggcagtgtccccactgggcctaccatcaacaccaccatccaggatgtcaaccgctacctcctcaagagtggaggtaaactgtcagacatcaaatcgacgtggtcctctggccctacctcccacacgcaagcctctctgtctcatgaactatggaaggtgcccagaaacagtactgcacccacgaggccacctccagggttaaccaatcccaagccctcctccacctggggtgccagccccctcggctggaccagctcctactcctcgggttctgcctggagcaccgacacctcaggaagaaccagcagctggctcgttcttcgaaacctcactccccagattgatggttctacactgcggacattgtgtttgcaacatgggcctcttatcacattccacctgaatctgactcaaggcaatgctgtggtccggtacagctccaaggaggaggctgccaaggcccagaagtctctgcacatgtgcgtcctgggaaacactaccatcctggccgagttcgctggtgaagaagaagtgaatcgcttcttagcccaaggccaggcgctgccacccacttccagctggcagtccagcagcgcgtccagccagccgcggctcagcgcagcgggcagctcccatggcctggtacgcagcgacgctggccactggaacgccccgtgcctgggtggcaaggggagcagtgagctgctgtggggcggggtgccccagtactccagcagcctgtggggcccgcccagcgccgacgacagcagggtgataggcagccccacgccgctaaccaccctgctgcctggggacctgctcagcggggagtccctgtaggctctgccatcatcagcaccaggagagccgacccctcccgggacccctcccggctgggcggccccacagacccgctggaacccagcagcggccgcccttttgagtacctctgtccaggactgaagacgaaccttggccgcagtccttgcgaactgttcgcaaaacagtgcgggctgcggtgggtcagcgtcacatgctaatgacaggatgttcctcgtagctttttattttgtgcgtcttatgtttgtatagtgtgttgtcattttgattttttttttttttttaagtataaaagctgcttagaatagttctatcatgaagggcacttttcagattgtgggctggaaagggttattttatctgtgggggagggagggagacgtgaagcctatttaaaatgagcctgtgacgattatgcacatgaccagaggcggccggtaatcagggcagagtctggtgtggaccgccgggcgcagagcggctccgcggcgggagctgagcggaaggcgcgggctgcgatctgctctctgttcccctggatccgcctatgcacattacccttgtttcattactttttcatgtcatttttttatcccaaaaaatattttttaaaagttaaaaaaagacatatcaaacatgcaaatacttgaatccagcaggccaatagtgaaatgtgaacactttctaattctacacttccaggttgacatcagtacacagaaacaggctctaggaaaaatttctaagttcatagcctacgtgtgtgtatgtgtgcgtgttgaaacagaagtgtgtgtgtgtgtgcatgtgtggcgcgtgctcctgcacggcgtgcagttttctgtgtttgtgtgtttgaaagcgtgtgaggatttaactgtgggttttcccttgtattcagtatacgctttttttttggcgcattggtcaaacggttgttattattagcttctaactttgcactgagtgtcctcgcccttcctttagctaatcctatacattacagagaattcctaggacagggctggcgacaattcatgtgtaaatgtttactcaaggactctgtgactgcgtttaaaaagtacagtgtatatctctggagaaataacatgtatacctacctttagcagctttttattgtggactaatgcaagaaaattattaccagagtattgcaccatttttccatttggaatataaagttaaagagaaaaaaaaaaaaaactgttgttgaactgtggccatagatacttgtaaagaatggatggttccgtggaaggaacagaaacaagcacttgggcgtgggttgtgactgcttttgggggagcctggggtttgggctcccacctgtttacagacctttttttctccttcagactttaaaattttaaaaatttaaaaaggaattaaaaaaaaaaaaagacttccgtcgtaaagaaacctattttcagaatgcagatgcgttccttcagagctctgggacgggacagtgttgttccctcggccatcgtcgtggactctgtcgattgctttcgccccttcgtcaaggtgacaggcgttgtggccactgtcttgcacatgccggacgcgctctcaggaaagccagggctcccgagggcagctccacaccatttcatgtatttttaaacccaactcctagcactgaagatgttatttaaaaaaaaaaaaaacaaaacaaaacaaaaaaatgaaaaaaaagaaaaagaggaaaaaaaaacacaaagaagaaaaatacctaatctctaatgtgtagcagttacatatttaccaaataatggactcaaaagaaatagatgtttgaagagtgctttatatattaaaaattgctttatgttttaaaaatgatcaatgttttgattgttttgcaaggaagaaagacaatggaataacataccttcaagtatgttttaaaaaatatatatatgaacattgtgctccctgcctgcttgatcaggaaacttgtgcattacatttttttaattagctttttaatggttttatcaaaacaaaaaaaatacaaaaaaaaaaaaaaaagtcctgcaagactgcagatccacaaaagctggttttatagaggatcatgaactatgcacaaactgggttcaagactttttttctcaagtttagtaggatatttagaaaaaccaaccttcctcagagtgactgcatctcattgccattacatgcgttctatatattcgatggacatacacctgcgtatgtatatccaatatgtgtgcgtgtgagcatgcgtgtgcgtatgtgcgtccgacataccacttcccgtgctgccggcgagcattgagttgtagaaaaactgttgttttaaaattggggatggaagtcaagaatatgtttgtttgtttttgggttttgttgggtttgaggggttttttgtttgtttgttttttgttttttttaccttttattttgaacttaatatgtctgtaactctgagattaaacaacaagttcgtggctcttaatgttttcctcatagaatgtgactgttgaagaacatgcatcgaaagttgctttcgaaagtacaacgctttattgaatcttaataaattgcaatttttttcttggctgttcaaag

SEQ ID NO: 194653 - DNA, 7300 bp, Homo sapiens
  Payload ID: 18468
  Gene Name: TRIO and F-actin binding protein
  ENST ID: ENST00000344404
  CDS Start-End: 137-451
cccaggggaggaggtgaaattcctcagctctccaccaagattggccacaaaagcctgatcccctggaacacagcaggcctcacatagacggtcagccattggatcataggaactgccctggcctgactcacccaatatggaggaggtgcctggggatgccctgtgtgaacactttgaggccaacatacttacccagaaccgctgtcaaaactgcttccaccctgaggaggcccatggagcaagataccaggagctcaggagcccttcaggtgctgaggtgccctactgcgacctgcctcgatgtccacctgcccctgaggacccactcagcgcctcaacctccggctgccagtctgtggtggacccaggcctcaggccagggcccaagaggactgggacactgttgagaggcaggaggaggaggcccccagctgggacgagctcgcagtgatgatcccgaggaggcctcgggaggggccgagagctgacagctcccaaagggctccgtctctcctcaccaggtcccctgtgggaggagatgctgcaggccagaaaaaggaggacaccggcggtgggggccggagcgcaggacagcactgggcaaggctccggggagaaagcgggttgtccctggagcggcaccggtcaacactgacccaggcttcctccatgacaccacacagtggacctcgaagcaccacgtctcaggcttctcctgcccaaagggacactgctcaggctgcctctacacgtgaaatccccagagcctcctctccccatcgaatcacccaaagggacacctccagggcctcatccacccaacaggaaatctccagggcctcatccacccaacaggaaacctccagggcctcatccacccaagaggacacccctagggcctcatccacccaagaggacacccccagggcctcatctacacagtggaacacccccagagcttcctctccctcacgaagcacccaactggataaccccagaacctcttctacccagcaggacaacccccaaacttcttttcctacttgtactccccagcgggaaaaccccaggacaccctgtgtccagcaggacgatcccagagcctcctctcccaacagaaccactcaacgagagaattccagaacatcctgtgcccagcgggacaatcccaaagcctccagaacctcctctcccaatagagccacacgagacaaccccagaacatcctgcgcccagcgggacaatcccagagcctcctctcccagtagagctacacgagacaaccccacaacatcctgtgcccagcgggacaatcccagagcctccagaacctcctctcccaatagagccacacgagacaaccccagaacatcctgtgcccagcgggacaatcccagagcctcctctcccagtagagctacacgagacaaccccacaacatcctgtgcccagcgggacaatcccagagcctccagaacctcctctcccaatagagccacacgagacaaccccagaacatcctgcgcccagcgggacaatcccagagcctcctctcccaatagagctgcacgagacaaccccacaacatcctgtgcccagcgggacaatcccagagcctccagaacctcctctcccaatagagccacacgagacaaccccagaacatcctgtgcccagcgggacaatcccagagcctcctctcccaatagagctacacgagacaaccccacaacatcctgtgcccagcgggacaatcccagagcctccagaacctcctctcccaatagagccacacgagataaccccagaacatcctgtgcccagcgggacaatcccagagcctcctctcccaacagaaccacccaacaagacagccccagaacatcctgtgcccgacgggacgatcccagagcctcctctcctaacagaaccatccaacaagagaaccccagaacatcctgtgccctacgggacaatcccagagcctcctctcccagcagaaccatccaacaagagaaccccagaacatcctgtgcccaacgggacgatcccagagcctcctctcctaacagaaccacccaacaagagaaccccagaacatcctgtgcccgacgggacaatcccagagcctcctctcgcaacagaaccatccagcgagacaaccccagaacatcctgtgcccagcgggacaatcccagagcctcctctcctaacagaaccatccaacaagagaacctcagaacatcctgtacccgacaggacaatcccaggacctcctctcccaatagagccacacgagacaaccccagaacatcctgtgcccagcgggacaatctcagagcctcctctcccatcagagccacccaacaggacaaccccagaacttgtattcaacagaacatccccagatcatcttctacccaacaagacaaccctaaaacctcttgtaccaaacgagataacctcagacccacttgtacacagcgggaccgcacacagtccttttcctttcaacgagacaaccctggaacctcctcatctcaatgctgcacccaaaaggagaatctgagaccatcatctccccaccgctccactcaatggaacaatcccaggaattcatctccccatcgtactaacaaagacatcccctgggcctcgtttcccctccggccaactcagagtgatggtccccgaacctcttccccatctcgctccaagcaaagcgaggttccctgggcatccatcgccctccggccaacccaaggtgacaggcctcagacatcctctcccagcaggccagcccagcatgacccaccccagtcctcctttggccccacccagtacaacttgccatcccgggccacctcttcctcccataacccaggccaccagagcacctcccgaacttcctcacctgtgtaccccgctgcctatggggctcccctgacctctcctgagccctcccagcctccatgtgctgtgtgcattgggcaccgggatgcccctcgagcctcttcgccccctcgctatttgcagcacgaccccttccccttcttcccagagccccgcgcccctgagagtgaaccgccccaccacgagcctccctatataccacctgctgtgtgcattggacaccgagatgccccccgggcgtcctcgcccccccgccacacccaatttgaccccttccccttcctcccagacacatcagatgccgagcatcagtgtcagtccccccaacacgagccccttcagctccctgcacctgtgtgtattgggtaccgagatgcaccccgggcctcctccccaccacgccaggccccagagccttccctcttattccaggacctccccagggccagcacagagagccttgtcccttccatggactctctgcacgagtgcccccacatccccacccctgtgtgcattgggcaccgggatgcaccctccttctcatccccaccacgccaggctcctgagccatccctcttcttccaggatccccctggaactagtatggagagcctggccccctccactgactctctgcatggctccccagtgctgatcccccaagtgtgcatcgggcaccgggatgcaccccgagcctcctccccaccccgccacccacccagtgacctagcgttcctggcaccctcaccttcaccgggcagctctgggggctcccggggctcagcgcctcccggggagaccaggcacaacttggagcgggaggagtacactgtgctggccgacctgcccccacccaggaggctggcccagagacagccagggccccaggcgcagtgcagcagcgggggccgcacccacagccctggccgtgcagaggtggagcgcctcttcgggcaagagcgcaggaagtccgaggcagcgggggccttccaggcccaggacgagggacggtcacagcagcccagccaaggccagagccaacttctccgaagacagtccagccctgcccccagcaggcaggtgaccatgctccctgccaaacaggcagaactgacccggcggagccaagcagagccccctcatccttggagtcctgagaagagacctgagggagatcggcagctccaggggtccccgctgccccccaggacatcagccaggacccctgagagggagctgcggacacagagacctctggagagtggccaagcaggcccaagacagcctctgggggtgtggcagagtcaggaggaaccgccagggtcccagggccctcatagacacctagaaaggagctggagcagccaggagggaggcctgggccctgggggctggtggggatgtggagagcccagcctgggggcagccaaagccccggagggagcatgggggggcacttccagggagtacaaggagagctgggggcagccagaggcctgggaggagaagcccactcatgagctccccagagaactaggaaagagaagcccactcacgagcccccctgagaactggggaggccccgcagagtcctcacaatcctggcactctgggacacccactgctgtgggctggggggcagagggagcgtgtccatacccgcgtggctctgagaggcgacccgagcttgactggagggatctgcttggccttctccgggcaccaggagagggggtctgggcccgtgtccccagcctggactgggagggcctcttggagctcctgcaggccaggctgccccgcaaggacccagctggacacagggatgacctggccagggctttagggccagagctgggtcccccaggcacaaacgatgtccctgagcaggagtcacacagccagccagaaggctgggccgaggccaccccagtcaatggacacagccccgcactgcagtcccagagcccggtccagctgcccagccctgcctgcacctccacccagtggccaaagatcaaagtgacaagaggaccagcgaccgcaactctggcaggcctggagcagacgggccccctggggagcaggagcactgcgaagggccccagcttgccagagctgcagttccaaccagaggagcctgaggagtcagaaccaagcagaggccaagaccccctgactgaccagaagcaggcagactcggcagacaagaggccagcagagggcaaggctgggagcccgctcaagggccgactggtgacctcatggcggatgcccggggaccggcccacgctgttcaatccgttcctgctgtctctgggggtcctcaggtggcgaaggcccgatctgctcaacttcaagaagggatggatgtcgatcttggacgagcctggagagcctccctccccctcgctcaccaccacctctacttcgcagtggaagaaacattggtttgtgctgacagattcaagtctcaaatattacagagactccactgctgaggaggcagatgagctggatggtgagatcgacctgcgttcctgcacggatgtcactgagtacgcggtgcagcgcaactatggcttccagatccacaccaaggatgctgtctataccttgtcggccatgacctcaggcatccggcggaactggatcgaggctctgagaaagaccgtacgtccaacttcagccccagatgtcaccaagctctcggactctaacaaggagaacgcgctgcacagctacagcacccagaagggccccctgaaggcaggggagcagcgggcgggctctgaggtcatcagccggggtggccctcggaaggcggacgggcagcgtcaggccttggactacgtggagctctcgccgctgacccaggcttccccgcagcgggcccgcaccccagcccgcactcctgaccgcctggccaagcaggaggagctggagcgggacctggcccagcgctccgaggagcggcgcaagtggtttgaggccacagacagcaggaccccagaggtgcctgctggtgaggggccgcgccggggcctgggtgcccccctgactgaggaccagcaaaaccggcttagtgaggagatcgagaagaagtggcaggagctggagaagctgcccctgcgggagaataagcgggtgcccctcactgccctgctcaaccaaagccgcggagagcgccgagggcccccaagtgacggccacgaggcactggagaaggaggttcaggctcttcgggcccagctggaggcgtggcgtctccaaggggaggctcctcagagtgcactgagatcccaggaggatggccacatccccccgggctacatctcacaggaggcatgtgagcgcagcctggcagagatggagtcctcgcaccagcaggtgatggaggagctgcagcggcaccacgagcgggagctgcagcgcctgcagcaggagaaggagtggctcctggctgaggagacggcagccacggcctcagccattgaagccatgaagaaggcctaccaggaagagctgagccgagagctgagcaaaacacggagtctccagcagggcccggatggcctccggaagcagcaccagtcagatgtggaggcactgaagcgagagctgcaggtgctatcggagcagtactcgcagaagtgcctggagattggggcactcatgcggcaggctgaggagcgcgagcacacgctgcgccgctgccagcaggagggccaggagctgctgcgccacaaccaggagctgcatggccgcctgtcagaggagatagaccagctgcgcggcttcattgcctcgcagggcatgggcaatggctgcgggcgcagcaacgagcggagttcctgcgagctagaggtgctgcttcgcgtaaaagaaaacgaactccagtacctaaagaaggaggtgcagtgcctccgggacgagctccagatgatgcagaaggacaagcgcttcacctcgggaaagtaccaggacgtctatgtggagctgagccacatcaagacacggtctgagcgggagatcgagcagctgaaggagcacctgcgtcttgccatggccgccctccaggagaaggagtcgatgcgcaacagcctggctgagtagaggtcccgcccagctgcagaccctccaggctggaggaccagccgccctccttccctcctggatggaagtaaaaagccaagctttctccccaccctctgtgggccacacgtgcacttgcacccaccacacacacacacacacacacacacacacacacagacacacagacacatacgcacacacgtgcacacatgtacacacggatacacacacacacacacacactgcatatctgagcgcgcccctcgcactgggtctcaccttgcac

SEQ ID NO: 194654 - DNA, 2125 bp, Homo sapiens
  Payload ID: 18468
  Gene Name: TRIO and F-actin binding protein
  Uniprot ID: Q9H2D6
  ENST ID: ENST00000407319
  CDS Start-End: 11-1306
aaaaagttttatgggcggatggaaggggccggggcagcgtcggggaaaggaagggccggaggcgcggcggcgggcggccgagaggggcggcggcggcggcggcggcggggttcccgcgccgcggagcccggcccgagagccgcgtccacgttcctgcctcctgctcccgccgccctggggcgccgccatgacgcccgatctgctcaacttcaagaagggatggatgtcgatcttggacgagcctggagagcctccctccccctcgctcaccaccacctctacttcgcagtggaagaaacattggtttgtgctgacagattcaagtctcaaatattacagagactccactgctgaggaggcagatgagctggatggtgagatcgacctgcgttcctgcacggatgtcactgagtacgcggtgcagcgcaactatggcttccagatccacaccaaggatgctgtctataccttgtcggccatgacctcaggcatccggcggaactggatcgaggctctgagaaagaccgtacgtccaacttcagccccagatgtcaccaagctctcggactctaacaaggagaacgcgctgcacagctacagcacccagaagggccccctgaaggcaggggagcagcgggcgggctctgaggtcatcagccggggtggccctcggaaggcggacgggcagcgtcaggccttggactacgtggagctctcgccgctgacccaggcttccccgcagcgggcccgcaccccagcccgcactcctgaccgcctggccaagcaggaggagctggagcgggacctggcccagcgctccgaggagcggcgcaagtggtttgaggccacagacagcaggaccccagaggtgcctgctggtgaggggccgcgccggggcctgggtgcccccctgactgaggaccagcaaaaccggcttagtgaggagatcgagaagaagtggcaggagctggagaagctgcccctgcgggagaataagcgggtgcccctcactgccctgctcaaccaaagccgcggagagcgccgagggcccccaagtgacggccacgaggcactggagaaggaggttcaggctcttcgggcccagctggaggcgtggcgtctccaaggggaggctcctcagagtgcactgagatcccaggaggatggccacatccccccgggctacatctcacagctggtgggcgtgatcactgtgcccgttttacagacaaggccactgagctctgagaggttatgtgacttgcccaaggtcaccccgcctgcaggtctcaaaggtgggatttgagcgagggtccggctgactgcagagcctgtgtgtgagtccccgtgtgacactctgcacttggacccttgccccggggaagtggggggctagtggccccgagagtcactccctgaacacagggaaatcctgccgaggcccactgggccaaggccccacacaaggaggtctgcaggacaggggagcctccagtagccctcagagaatgcaccgtccgcctaggacagcggttctcaacggggtccattttgtcccccttggggacatttggctgtgtctgggaatacttctggttgtcacaactaggacaaactaactctctagaaaaaacgtgtgtgtgtacacatatataagtttattataaattttaccaataaaaacaatgcttagtacacaatttacaaataaaaatatataattttattgtgaattccgtacagcaaatggatttttctcagaatgctttcagtgattttttccatactcttgtatccacaactgattaacaaagggggttgttctaacgtgtgctggttgacatttttgtttatggtaatgagtaagatgagaagacatttgtcgaaactttactggtccatgttgtcagctacttctttgctagatcggatagtagttttctattgagaatatttgagaatattctattaagaatatttttgcaattttttgttctatttacaatgtaatggttatagatgtgagatacttctaagtttaatctgcattattagcattttcttatcacttgcttaagtctagacaatcaacaaaacaataaatcaagccctgatgtgtaatgtt

SEQ ID NO: 194655 - DNA, 10129 bp, Homo sapiens
  Payload ID: 18468
  Gene Name: TRIO and F-actin binding protein
  Uniprot ID: Q9H2D6
  ENST ID: ENST00000406386
  CDS Start-End: 256-7353
atcgctctgattcattgttaaaataaagaggccatgaccctggcactcccaccccggcagcccctgtgcgtggaaacccagccaaggtctgatgatggaggagccttggccctggctgtcccaggggaggaggtgaaattcctcagctctccaccaagattggccacaaaagcctgatcccctggaacacagcaggcctcacatagacggtcagccattggatcataggaactgccctggcctgactcacccaatatggaggaggtgcctggggatgccctgtgtgaacactttgaggccaacatacttacccagaaccgctgtcaaaactgcttccaccctgaggaggcccatggagcaagataccaggagctcaggagcccttcaggtgctgaggtgccctactgcgacctgcctcgatgtccacctgcccctgaggacccactcagcgcctcaacctccggctgccagtctgtggtggacccaggcctcaggccagggcccaagaggggcccatccccctcagcagggctcccagaagagggtcccacagctgcccccaggagcaggagccgggagcttgaggcagtaccctatctggagggcctgaccacttccttgtgtggcagctgcaacgaggaccccggctctgaccccacctccagccctgactccgccacccctgatgataccagcaactcgtcctctgtggactgggacactgttgagaggcaggaggaggaggcccccagctgggacgagctcgcagtgatgatcccgaggaggcctcgggaggggccgagagctgacagctcccaaagggctccgtctctcctcaccaggtcccctgtgggaggagatgctgcaggccagaaaaaggaggacaccggcggtgggggccggagcgcaggacagcactgggcaaggctccggggagaaagcgggttgtccctggagcggcaccggtcaacactgacccaggcttcctccatgacaccacacagtggacctcgaagcaccacgtctcaggcttctcctgcccaaagggacactgctcaggctgcctctacacgtgaaatccccagagcctcctctccccatcgaatcacccaaagggacacctccagggcctcatccacccaacaggaaatctccagggcctcatccacccaacaggaaacctccagggcctcatccacccaagaggacacccctagggcctcatccacccaagaggacacccccagggcctcatctacacagtggaacacccccagagcttcctctccctcacgaagcacccaactggataaccccagaacctcttctacccagcaggacaacccccaaacttcttttcctacttgtactccccagcgggaaaaccccaggacaccctgtgtccagcaggacgatcccagagcctcctctcccaacagaaccactcaacgagagaattccagaacatcctgtgcccagcgggacaatcccaaagcctccagaacctcctctcccaatagagccacacgagacaaccccagaacatcctgcgcccagcgggacaatcccagagcctcctctcccagtagagctacacgagacaaccccacaacatcctgtgcccagcgggacaatcccagagcctccagaacctcctctcccaatagagccacacgagacaaccccagaacatcctgtgcccagcgggacaatcccagagcctcctctcccagtagagctacacgagacaaccccacaacatcctgtgcccagcgggacaatcccagagcctccagaacctcctctcccaatagagccacacgagacaaccccagaacatcctgcgcccagcgggacaatcccagagcctcctctcccaatagagctgcacgagacaaccccacaacatcctgtgcccagcgggacaatcccagagcctccagaacctcctctcccaatagagccacacgagacaaccccagaacatcctgtgcccagcgggacaatcccagagcctcctctcccaatagagctacacgagacaaccccacaacatcctgtgcccagcgggacaatcccagagcctccagaacctcctctcccaatagagccacacgagataaccccagaacatcctgtgcccagcgggacaatcccagagcctcctctcccaacagaaccacccaacaagacagccccagaacatcctgtgcccgacgggacgatcccagagcctcctctcctaacagaaccatccaacaagagaaccccagaacatcctgtgccctacgggacaatcccagagcctcctctcccagcagaaccatccaacaagagaaccccagaacatcctgtgcccaacgggacgatcccagagcctcctctcctaacagaaccacccaacaagagaaccccagaacatcctgtgcccgacgggacaatcccagagcctcctctcgcaacagaaccatccagcgagacaaccccagaacatcctgtgcccagcgggacaatcccagagcctcctctcctaacagaaccatccaacaagagaacctcagaacatcctgtacccgacaggacaatcccaggacctcctctcccaatagagccacacgagacaaccccagaacatcctgtgcccagcgggacaatctcagagcctcctctcccatcagagccacccaacaggacaaccccagaacttgtattcaacagaacatccccagatcatcttctacccaacaagacaaccctaaaacctcttgtaccaaacgagataacctcagacccacttgtacacagcgggaccgcacacagtccttttcctttcaacgagacaaccctggaacctcctcatctcaatgctgcacccaaaaggagaatctgagaccatcatctccccaccgctccactcaatggaacaatcccaggaattcatctccccatcgtactaacaaagacatcccctgggcctcgtttcccctccggccaactcagagtgatggtccccgaacctcttccccatctcgctccaagcaaagcgaggttccctgggcatccatcgccctccggccaacccaaggtgacaggcctcagacatcctctcccagcaggccagcccagcatgacccaccccagtcctcctttggccccacccagtacaacttgccatcccgggccacctcttcctcccataacccaggccaccagagcacctcccgaacttcctcacctgtgtaccccgctgcctatggggctcccctgacctctcctgagccctcccagcctccatgtgctgtgtgcattgggcaccgggatgcccctcgagcctcttcgccccctcgctatttgcagcacgaccccttccccttcttcccagagccccgcgcccctgagagtgaaccgccccaccacgagcctccctatataccacctgctgtgtgcattggacaccgagatgccccccgggcgtcctcgcccccccgccacacccaatttgaccccttccccttcctcccagacacatcagatgccgagcatcagtgtcagtccccccaacacgagccccttcagctccctgcacctgtgtgtattgggtaccgagatgcaccccgggcctcctccccaccacgccaggccccagagccttccctcttattccaggacctccccagggccagcacagagagccttgtcccttccatggactctctgcacgagtgcccccacatccccacccctgtgtgcattgggcaccgggatgcaccctccttctcatccccaccacgccaggctcctgagccatccctcttcttccaggatccccctggaactagtatggagagcctggccccctccactgactctctgcatggctccccagtgctgatcccccaagtgtgcatcgggcaccgggatgcaccccgagcctcctccccaccccgccacccacccagtgacctagcgttcctggcaccctcaccttcaccgggcagctctgggggctcccggggctcagcgcctcccggggagaccaggcacaacttggagcgggaggagtacactgtgctggccgacctgcccccacccaggaggctggcccagagacagccagggccccaggcgcagtgcagcagcgggggccgcacccacagccctggccgtgcagaggtggagcgcctcttcgggcaagagcgcaggaagtccgaggcagcgggggccttccaggcccaggacgagggacggtcacagcagcccagccaaggccagagccaacttctccgaagacagtccagccctgcccccagcaggcaggtgaccatgctccctgccaaacaggcagaactgacccggcggagccaagcagagccccctcatccttggagtcctgagaagagacctgagggagatcggcagctccaggggtccccgctgccccccaggacatcagccaggacccctgagagggagctgcggacacagagacctctggagagtggccaagcaggcccaagacagcctctgggggtgtggcagagtcaggaggaaccgccagggtcccagggccctcatagacacctagaaaggagctggagcagccaggagggaggcctgggccctgggggctggtggggatgtggagagcccagcctgggggcagccaaagccccggagggagcatgggggggcacttccagggagtacaaggagagctgggggcagccagaggcctgggaggagaagcccactcatgagctccccagagaactaggaaagagaagcccactcacgagcccccctgagaactggggaggccccgcagagtcctcacaatcctggcactctgggacacccactgctgtgggctggggggcagagggagcgtgtccatacccgcgtggctctgagaggcgacccgagcttgactggagggatctgcttggccttctccgggcaccaggagagggggtctgggcccgtgtccccagcctggactgggagggcctcttggagctcctgcaggccaggctgccccgcaaggacccagctggacacagggatgacctggccagggctttagggccagagctgggtcccccaggcacaaacgatgtccctgagcaggagtcacacagccagccagaaggctgggccgaggccaccccagtcaatggacacagccccgcactgcagtcccagagcccggtccagctgcccagccctgcctgcacctccacccagtggccaaagatcaaagtgacaagaggaccagcgaccgcaactctggcaggcctggagcagacgggccccctggggagcaggagcactgcgaagggccccagcttgccagagctgcagttccaaccagaggagcctgaggagtcagaaccaagcagaggccaagaccccctgactgaccagaagcaggcagactcggcagacaagaggccagcagagggcaaggctgggagcccgctcaagggccgactggtgacctcatggcggatgcccggggaccggcccacgctgttcaatccgttcctgctgtctctgggggtcctcaggtggcgaaggcccgatctgctcaacttcaagaagggatggatgtcgatcttggacgagcctggagagcctccctccccctcgctcaccaccacctctacttcgcagtggaagaaacattggtttgtgctgacagattcaagtctcaaatattacagagactccactgctgaggaggcagatgagctggatggtgagatcgacctgcgttcctgcacggatgtcactgagtacgcggtgcagcgcaactatggcttccagatccacaccaaggatgctgtctataccttgtcggccatgacctcaggcatccggcggaactggatcgaggctctgagaaagaccgtacgtccaacttcagccccagatgtcaccaagctctcggactctaacaaggagaacgcgctgcacagctacagcacccagaagggccccctgaaggcaggggagcagcgggcgggctctgaggtcatcagccggggtggccctcggaaggcggacgggcagcgtcaggccttggactacgtggagctctcgccgctgacccaggcttccccgcagcgggcccgcaccccagcccgcactcctgaccgcctggccaagcaggaggagctggagcgggacctggcccagcgctccgaggagcggcgcaagtggtttgaggccacagacagcaggaccccagaggtgcctgctggtgaggggccgcgccggggcctgggtgcccccctgactgaggaccagcaaaaccggcttagtgaggagatcgagaagaagtggcaggagctggagaagctgcccctgcgggagaataagcgggtgcccctcactgccctgctcaaccaaagccgcggagagcgccgagggcccccaagtgacggccacgaggcactggagaaggaggttcaggctcttcgggcccagctggaggcgtggcgtctccaaggggaggctcctcagagtgcactgagatcccaggaggatggccacatccccccgggctacatctcacaggaggcatgtgagcgcagcctggcagagatggagtcctcgcaccagcaggtgatggaggagctgcagcggcaccacgagcgggagctgcagcgcctgcagcaggagaaggagtggctcctggctgaggagacggcagccacggcctcagccattgaagccatgaagaaggcctaccaggaagagctgagccgagagctgagcaaaacacggagtctccagcagggcccggatggcctccggaagcagcaccagtcagatgtggaggcactgaagcgagagctgcaggtgctatcggagcagtactcgcagaagtgcctggagattggggcactcatgcggcaggctgaggagcgcgagcacacgctgcgccgctgccagcaggagggccaggagctgctgcgccacaaccaggagctgcatggccgcctgtcagaggagatagaccagctgcgcggcttcattgcctcgcagggcatgggcaatggctgcgggcgcagcaacgagcggagttcctgcgagctagaggtgctgcttcgcgtaaaagaaaacgaactccagtacctaaagaaggaggtgcagtgcctccgggacgagctccagatgatgcagaaggacaagcgcttcacctcgggaaagtaccaggacgtctatgtggagctgagccacatcaagacacggtctgagcgggagatcgagcagctgaaggagcacctgcgtcttgccatggccgccctccaggagaaggagtcgatgcgcaacagcctggctgagtagaggtcccgcccagctgcagaccctccaggctggaggaccagccgccctccttccctcctggatggaagtaaaaagccaagctttctccccaccctctgtgggccacacgtgcacttgcacccaccacacacacacacacacacacacacacacacacagacacacagacacatacgcacacacgtgcacacatgtacacacggatacacacacacacacacacactgcatatctgagcgcgcccctcgcactgggtctcaccttgcaccttcttcaggattttatatgtgaagagatttttatatagatttttttcctttttttccaaaacactttatactttaaaaaaaaaaaaaaaaagcaattcctggtggctgtgtgcctccaaccctggtccccctctgtctccagccaccctctgcttgggcttctgagctggtggccctggcccagaggtctggcggaggcccaggcagcagccatggcggggtgtctctacaggggagaggcgggagcctgccaccctcttcctgccctacctcctactaacacttcctgccccatttggacccgtaccatggggctcaggacagagggagctagcagctggcctccatggccccacagcctccttcgaggctgtgctgggtgcagaaccgccagagccacccaaaaggtgtttctcttctgctccctgaacctcttaacttaataaaacgttccagcagctctggtgtcctagatggctggcagaacaggaatggagattggggtttcttgaagtggcttccccactcacaccctacccacaccccacccttcctaaagcagcggcctctaggcttctgagggtggggctgaaaatccaaggtctcccttagtacagactgtgacgcccccagtgtggcttgcaggctagtggcagcggaagcatgtgggaaatagcaagtccagtcccaccccaacctactgaaccagcgtctgcattttaacagggtgccccagtgattcacgtgaccttcaaagtctgaggagccctggagtagggcccagggcccaggcctgagagagaggcctggggctaagactagccctgaccatgaccttgggcaagtcacacccctcactgagcctcagtttgcttctccatcaaatgggtgtttttctttcagtcccagtcctctcctgaggcttttcccagaggtcatgcccagccctgggcaggggtgagggcagggttgtggctgccaggcacaggtccagcgggctgggagtcctcaccatggctggctgtgctgattatggttgcatggggctgggaagaggtcccatttctgagccacagaaacaggccacatccagtaggggtcctggaaggctgtgagaacccagaggagaccctgacccagcctgcaggtagaagactgcctttggaggcagctttgaaagatgactcttccagatggaagaatcaggaagggccttcccacgtggaggcaccagcaggagcaaacgtccctggtgtgttcaggcaaagagccacaggagagtgacctcgtggagtgggaagagattgtttcccattcccttgccagggattggttgaggaatggacaaggcttgcagttcacgcaagccagtgaaatgcgaggggaagtcttgggagtggggtggaggaggtcatctgggaagggtgtccttggtcttaaaaagaggcacaagaggccgggcgcggtggctcttgcctattatcctagcactttgggaggccaaggcagggggatcacttgaggtcaggagttcgagaccagcctggccaacatggtgaaaccccgtctctactaaaaatacaaaaaattagccagacgtggtgccaagcacctgtaatcccagctactcaggaggctgaggcaggagaatcacttgaacccaggaggcagaagttgcagtgagccaagatcgcgccactgcactccagcctgtgtgacaagggcgaaactccatctcaaaaaaaaagggggagggtggcgcaaggagaggacacctctctcctggccctgtcgccatcttccctcatcaatagctaaaaatggcaaagaagaaagagccaggaccccgtgccatcaaatcctccggccttgtgctgccctgtctcggcactgcttgccttaggagatcaggagtgttcctagccactgggagatgggatgcctgccactggcagctctgccgtccatcctcaccatcccaccgtccccccaagacagctctccatcccatcctctgcctcccttctagcctcaacctaactcagggctcccccgtctcacacctgggttgcaggaacatcctcttcaccaacccccctcccatccctcctcagggctgcctagggcagctacaaaaaccaggccagcctctgaaaggtgctccacatctcattaaaaaccgtgaaatcgcactgccccactatcagaatagctcagaggagaaggtctgccagtaccaagtgctggtggggatacggagaagagcagctcccaggcgctgctggtgcaaatgtgctttgttgcacccacggcaggaaactgaccagcttctcatcaagttaaatacgcatctaccctatggcctagcatttccactcttgcttacacatccaggagaaatgagtccttacatgcacaaaaggatgagtaccgtaatactcacatcagcaaataaacaatacagctgtgtgtcagtagtagaatgaataaattgtggtcgattcata

SEQ ID NO: 194656 - DNA, 2324 bp, Homo sapiens
  Payload ID: 18468
  Gene Name: TRIO and F-actin binding protein
  Uniprot ID: Q9H2D6
  ENST ID: ENST00000403663
  CDS Start-End: 6-1964
gttttatgggcggatggaaggggccggggcagcgtcggggaaaggaagggccggaggcgcggcggcgggcggccgagaggggcggcggcggcggcggcggcggggttcccgcgccgcggagcccggcccgagagccgcgtccacgttcctgcctcctgctcccgccgccctggggcgccgccatgacgcccgatctgctcaacttcaagaagggatggatgtcgatcttggacgagcctggagagcctccctccccctcgctcaccaccacctctacttcgcagtggaagaaacattggtttgtgctgacagattcaagtctcaaatattacagagactccactgctgaggaggcagatgagctggatggtgagatcgacctgcgttcctgcacggatgtcactgagtacgcggtgcagcgcaactatggcttccagatccacaccaaggatgctgtctataccttgtcggccatgacctcaggcatccggcggaactggatcgaggctctgagaaagaccgtacgtccaacttcagccccagatgtcaccaagctctcggactctaacaaggagaacgcgctgcacagctacagcacccagaagggccccctgaaggcaggggagcagcgggcgggctctgaggtcatcagccggggtggccctcggaaggcggacgggcagcgtcaggccttggactacgtggagctctcgccgctgacccaggcttccccgcagcgggcccgcaccccagcccgcactcctgaccgcctggccaagcaggaggagctggagcgggacctggcccagcgctccgaggagcggcgcaagtggtttgaggccacagacagcaggaccccagaggtgcctgctggtgaggggccgcgccggggcctgggtgcccccctgactgaggaccagcaaaaccggcttagtgaggagatcgagaagaagtggcaggagctggagaagctgcccctgcgggagaataagcgggtgcccctcactgccctgctcaaccaaagccgcggagagcgccgagggcccccaagtgacggccacgaggcactggagaaggaggttcaggctcttcgggcccagctggaggcgtggcgtctccaaggggaggctcctcagagtgcactgagatcccaggaggatggccacatccccccgggctacatctcacaggaggcatgtgagcgcagcctggcagagatggagtcctcgcaccagcaggtgatggaggagctgcagcggcaccacgagcgggagctgcagcgcctgcagcaggagaaggagtggctcctggctgaggagacggcagccacggcctcagccattgaagccatgaagaaggcctaccaggaagagctgagccgagagctgagcaaaacacggagtctccagcagggcccggatggcctccggaagcagcaccagtcagatgtggaggcactgaagcgagagctgcaggtgctatcggagcagtactcgcagaagtgcctggagattggggcactcatgcggcaggctgaggagcgcgagcacacgctgcgccgctgccagcaggagggccaggagctgctgcgccacaaccaggagctgcatggccgcctgtcagaggagatagaccagctgcgcggcttcattgcctcgcagggcatgggcaatggctgcgggcgcagcaacgagcggagttcctgcgagctagaggtgctgcttcgcgtaaaagaaaacgaactccagtacctaaagaaggaggtgcagtgcctccgggacgagctccagatgatgcagaaggacaagcgcttcacctcgggaaagtaccaggacgtctatgtggagctgagccacatcaagacacggtctgagcgggagatcgagcagctgaaggagcacctgcgtcttgccatggccgccctccaggagaaggagtcgatgcgcaacagcctggctgagtagaggtcccgcccagctgcagaccctccaggctggaggaccagccgccctccttccctcctggatggaagtaaaaagccaagctttctccccaccctctgtgggccacacgtgcacttgcacccaccacacacacacacacacacacacacacacacacagacacacagacacatacgcacacacgtgcacacatgtacacacggatacacacacacacacacacactgcatatctgagcgcgcccctcgcactgggtctcaccttgcaccttcttcaggattttatatgtgaagagatttttatatagatttttttcctttttttccaaaacactttatactttaaaaaaaaaaaaaaaaa

SEQ ID NO: 194657 - DNA, 919 bp, Homo sapiens
  Payload ID: 18468
  Gene Name: TRIO and F-actin binding protein
  ENST ID: ENST00000417857
  CDS Start-End: 150-919
gctggtctggactgccctctgagctctcagggggtctctatgcaggcagagtcctcccagcccctctctcccattcttgggcgaggggtcggctggagagaggcccctgggacatctggcccgatctgctcaacttcaagaagggatggatgtcgatcttggacgagcctggagagcctccctccccctcgctcaccaccacctctacttcgcagtggaagaaacattggtttgtgctgacagattcaagtctcaaatattacagagactccactgctgaggaggcagatgagctggatggtgagatcgacctgcgttcctgcacggatgtcactgagtacgcggtgcagcgcaactatggcttccagatccacaccaaggatgctgtctataccttgtcggccatgacctcaggcatccggcggaactggatcgaggctctgagaaagaccgtacgtccaacttcagccccagatgtcaccaagctctcggactctaacaaggagaacgcgctgcacagctacagcacccagaagggccccctgaaggcaggggagcagcgggcgggctctgaggtcatcagccggggtggccctcggaaggcggacgggcagcgtcaggccttggactacgtggagctctcgccgctgacccaggcttccccgcagcgggcccgcaccccagcccgcactcctgaccgcctggccaagcaggaggagctggagcgggacctggcccagcgctccgaggagcggcgcaagtggtttgaggccacagacagcaggaccccagaggtgcctgctggtgaggggccgcgccggggcctgggtgcccccctgactgaggaccagcaaaaccggcttagtgaggagatcgagaagaagtggcaggagctggagaagctgcccctgcgggagaa

SEQ ID NO: 194658 - DNA, 939 bp, Homo sapiens
  Payload ID: 18468
  Gene Name: TRIO and F-actin binding protein
  ENST ID: ENST00000418339
  CDS Start-End: 145-939
cttagatgagagaggtctccccagcaggaagggagggtctggtggttggcacccactagatgagcatggtcagaaaaatatcaggatgagcaacttctttatctaggcctgggtgggggtgcctggcacaggtctccatgggacatgctgcagctggtagcccccagaccccggggctgtgcccccctgggcggcacccagaagcccgatctgctcaacttcaagaagggatggatgtcgatcttggacgagcctggagagcctccctccccctcgctcaccaccacctctacttcgcagtggaagaaacattggtttgtgctgacagattcaagtctcaaatattacagagactccactgctgaggaggcagatgagctggatggtgagatcgacctgcgttcctgcacggatgtcactgagtacgcggtgcagcgcaactatggcttccagatccacaccaaggatgctgtctataccttgtcggccatgacctcaggcatccggcggaactggatcgaggctctgagaaagaccgtacgtccaacttcagccccagatgtcaccaagctctcggactctaacaaggagaacgcgctgcacagctacagcacccagaagggccccctgaaggcaggggagcagcgggcgggctctgaggtcatcagccggggtggccctcggaaggcggacgggcagcgtcaggccttggactacgtggagctctcgccgctgacccaggcttccccgcagcgggcccgcaccccagcccgcactcctgaccgcctggccaagcaggaggagctggagcgggacctggcccagcgctccgaggagcggcgcaagtggtttgaggccacagacagcaggaccccagaggtgcctgctggtgaggggccgcgccggggcctgggtgcccccctgactgaggaccagcaa

SEQ ID NO: 194659 - DNA, 931 bp, Homo sapiens
  Payload ID: 18468
  Gene Name: TRIO and F-actin binding protein
  ENST ID: ENST00000428075
  CDS Start-End: 1-931
gggaaaggaagggccggaggcgcggcggcgggcggccgagaggggcggcggcggcggcggcggcggggttcccgcgccgcggagcccggcccgagagccgcgtccacgttcctgcctcctgctcccgccgccctggggcgccgccatgacgcccgatctgctcaacttcaagaagggatggatgtcgatcttggacgagcctggagaggcagatgagctggatggtgagatcgacctgcgttcctgcacggatgtcactgagtacgcggtgcagcgcaactatggcttccagatccacaccaaggatgctgtctataccttgtcggccatgacctcaggcatccggcggaactggatcgaggctctgagaaagaccgtacgtccaacttcagccccagatgtcaccaagctctcggactctaacaaggagaacgcgctgcacagctacagcacccagaagggccccctgaaggcaggggagcagcgggcgggctctgaggtcatcagccggggtggccctcggaaggcggacgggcagcgtcaggccttggactacgtggagctctcgccgctgacccaggcttccccgcagcgggcccgcaccccagcccgcactcctgaccgcctggccaagcaggaggagctggagcgggacctggcccagcgctccgaggagcggcgcaagtggtttgaggccacagacagcaggaccccagaggtgcctgctggtgaggggccgcgccggggcctgggtgcccccctgactgaggaccagcaaaaccggcttagtgaggagatcgagaagaagtggcaggagctggagaagctgcccctgcgggagaataagcgggtgcccctcactgccctgctcaaccaaagccgcggagagcgccgagggcccccaagtgacggccacgaggcactggagaag

SEQ ID NO: 194660 - DNA, 904 bp, Homo sapiens
  Payload ID: 18468
  Gene Name: TRIO and F-actin binding protein
  ENST ID: ENST00000413051
  CDS Start-End: 1-309
ggcggcggcggcggggttcccgcgccgcggagcccggcccgagagccgcgtccacgttcctgcctcctgctcccgccgccctggggcgccgccatgacggtatacagggaggggctgggatgccaacctactgggtcccccgactgtggctgtggaaggttctggatcttcagctgtcccaagccccgcccgatctgctcaacttcaagaagggatggatgtcgatcttggacgagcctggagagcctccctccccctcgctcaccaccacctctacttcgcagtggaagaaacattggtttgtgctgacagattcaagtctcaaatattacagagactccactgctgaggaggcagatgagctggatggtgagatcgacctgcgttcctgcacggatgtcactgagtacgcggtgcagcgcaactatggcttccagatccacaccaaggatgctgtctataccttgtcggccatgacctcaggcatccggcggaactggatcgaggctctgagaaagaccgtacgtccaacttcagccccagatgtcaccaagctctcggactctaacaaggagaacgcgctgcacagctacagcacccagaagggccccctgaaggcaggggagcagcgggcgggctctgaggtcatcagccggggtggccctcggaaggcggacgggcagcgtcaggccttggactacgtggagctctcgccgctgacccaggcttccccgcagcgggcccgcaccccagcccgcactcctgaccgcctggccaagcaggaggagctggagcgggacctggcccagcgctccgaggagcggcgcaagtggtttgaggccacagacagcaggaccccagaggtgcctgctggtgaggggccgcgccggggcctgggtgcccc

SEQ ID NO: 194661 - DNA, 586 bp, Homo sapiens
  Payload ID: 18468
  Gene Name: TRIO and F-actin binding protein
  ENST ID: ENST00000452519
  CDS Start-End: 337-586
ttcgcgcagtgctgctggtctggactgccctctgagctctcagggggtctctatgcaggcagagtcctcccagcccctctctcccattcttgggcgaggggtcggctggagagaggcccctgggacatctgggtgtgtgtgccagccacccagcccaacttcttggctctctgagtgccactatcaggaaaggggccagggctgcctcagtggctgggaggcctgcttggacttgggggttacctagggccttagccctcttggctggcttcccaggagctcggtcccacaggacttggggacaggcccgatctgctcaacttcaagaagggatggatgtcgatcttggacgagcctggagagcctccctccccctcgctcaccaccacctctacttcgcagtggaagaaacattggtttgtgctgacagattcaagtctcaaatattacagagactccactgctgaggaggcagatgagctggatggtgagatcgacctgcgttcctgcacggatgtcactgagtacgcggtgcagcgcaactatggcttccagatccacaccaaggatgctgtctataccttgt

SEQ ID NO: 194662 - DNA, 4065 bp, Homo sapiens
  Payload ID: 18469
  Gene Name: trio Rho guanine nucleotide exchange factor
  Uniprot ID: O75962
  ENST ID: ENST00000344135
  CDS Start-End: 494-2284
tgttcgtgtcttctaataagagcaagccgatcattaaccttctcaacgcagcgtcttttggtttcttccatttccaaccagcagaatatcttcttggaactttcttttttaacctctgccttcctcacgcacctattttttggagggttccttttccctgctctctacctcctgtttaaattgaaacctgtacactttaagctttttgctcatcgcttggttttgctcttttatgccttaaattatctttgcggcatttttgactcatctgctggggaagaccattccctcaagaaaacttccaacagcaactcaaagcaaactaagatgaaaaaatggggggaaagaatctgtccactgggaacgctttacgtcaccgtgttgctctggaagacagagactgctctgggcacctggcgaggcggctctgcagtgcaggctggggccggtccctgcggcctgctgggctctggcctcgtttggcccatcactcatgctgccgtctcaagcacaagggttgctgtggtgggttttccctctgtttcctgcttcctcactgtcctacccacctgtttcctacagggcagatggcctggcccgtaacactttcctgaaggcatgcagtgaaagcagcagcagtagcaacatctccaccatgttggtgacacacgattacacggcagtgaaggaggatgagatcaacgtctaccaaggagaggtcgttcaaattctggccagcaaccagcagaacatgtttctggtgttccgagccgccactgaccagtgccccgcagctgagggctggattccaggctttgtcctgggccacaccagtgcagtcatcgtggagaacccggacgggactctcaagaagtcaacatcttggcacacagcactccgtttaaggaaaaaatctgagaaaaaagataaagacggcaaaagggaaggcaagttagagaacggttatcggaagtcacgggaaggactcagcaacaaggtatctgtgaagcttctcaatcccaactacatttatgacgttcccccagaattcgtcattccattgagtgaggtcacgtgtgagacaggggagaccgttgttcttagatgtcgagtctgtggccgccccaaagcctcaattacctggaagggccctgaacacaacaccttgaacaacgatggtcactacagcatctcctacagtgacctgggagaggccacgctgaagattgtgggcgtgaccacggaagatgacggcatctacacgtgcatcgctgtcaatgacatgggttcagcctcatcgtcggccagcctgagggtcctaggtccagggatggatgggatcatggtgacctggaaagacaactttgactccttctacagtgaagtggctgagcttggcaggggcagattctctgtcgttaagaaatgtgatcagaaaggaaccaagcgagcagtggccactaagtttgtgaacaagaagttgatgaagcgcgaccaggtcacccatgagcttggcatcctgcagagcctccagcaccccctgcttgtcggcctcctcgacacctttgagacccccaccagctacatcctggtcttagaaatggctgaccagggtcgcctcctggactgcgtggtgcgatggggaagcctcactgaagggaagatcagggcgcacctgggggaggttctggaagctgtccggtacctgcacaactgcaggatagcacacctggacctaaagcctgagaatatcctggtggatgagagtttagccaagccaaccatcaaactggctgactttggagatgctgttcagctcaacacgacctactacatccaccagttactggggaaccctgaattcgcagcccctgaaatcatcctcgggaaccctgtctccctgacctcggatacgtggagtgttggagtgctcacatacgtacttcttagtggcgtgtcccccttcctggatgacagtgtggaagagacctgcctgaacatttgccgcttagactttagcttcccagatgactactttaaaggagtgagccagaaggccaaggagttcgtgtgcttcctcctgcaggaggaccccgccaagcgtccctcggctgcgctggccctccaggagcagtggctgcaggccggcaacggcagaagcacgggcgtcctcgacacgtccagactgacttccttcattgagcggcgcaaacaccagaatgatgttcgacctatccgtagcattaaaaactttctgcagagcaggcttctgcctagagtttgacctatccagaagttctttctcattctctttcacctgccaatcagctgttaatctgaattttcaagagaaaacaagcaaacataactgatcagctgccggtatgttcatcgtgtgaaattgcattccaagtgagctgtgctcagcagtgcttggacacagagctgcaagctgcgctggggtggaggaccgtcacttacactctgcccaaggcagaggtcgcattgctgtatcacagtattttattcaggtttctgcaaaaaaataaaaagataacttttttaaacaaacatgaatagaattttgcaaatttaacgttttcaagatttattcaaggaaacaaaatgcctatgttcaaccactggtgttaatgaacaaagatactgtgcgtctctggggaagacgcacctaggtggcggccactcccatggccttgtctaggactcagagaccactcggctctgagcttccaggcgcctcgtctgtgtgcatctcacgcccgacgtggcttctgaaacgtgcattcaacctcaaacttttgcataaaatagaatgaatcgttttgctctgatgaaatgtaggccttacttgtatataagactgttcctgccttcggtctgtcattttcccacctgcctcccctacccaccccccacccaccacctggggcttcctctgggggtccgagggtcttcccatcacatgaagacatcaggttgggtcctgccccactgcccctccccctgttcctgccccaagccgtcaatcagattgtggagcagtacacagtcagatgaaaatactgtaaatgcactcattgggggttttttggttttacttcatatcatgtgcaatgttgtggctttaacattttatgcaactatttatgaagacctctgttgtacctgtaataaatatatagaaaaagcacatacttcgtatggtgagctttatggttttgtgtgtgtgttggggttggcgggtgggtgggtagggtcgtagccctgtgccatcggttcaaagagacttttcgtgaaatttgttggttttgaggactgtaaaagtgatttcatactctgaatataaaactggataatagggtaatgttttaaaatttattatgctattattcagaatgccaaagtattattttttttcccaaaatcagtctggacatttactactttttagactttttgacgttgaactttctgtataaaaattggctgggttttgagcttttggtaagaaataaaagccgattaagcactggccgccccgcggctggtacccaatgcccgagtcactgtggcagcattcgcactggtgtggggagtcctttcaactcaaggaggctgggtttctgggcaccctcgaagttttctggatgtctttttatctttctcgtgtgaactgcactacaaaagagaccagcccgcttcccaagccagccagacacctgggtcttgagccataaactggcgtagttaagctttgcagcttccagtgtattttatttattcttttgttgggtttttgtttgtttcttcttgtaaaattgtacagaaactttttaaaagaaattggattcgaaactggatgtgtattcgtaacctcataatttttatttgtgtattgtttcttttattatttcagttaaatttttacattattttgcatgtatatttctttgtacagagaccttacatgtttacacagtatgatgtgatgtaaatattttattttgccatcagttattttaaaaaattaaacatatttgcctg

SEQ ID NO: 194663 - DNA, 11100 bp, Homo sapiens
  Payload ID: 18469
  Gene Name: trio Rho guanine nucleotide exchange factor
  Uniprot ID: O75962
  ENST ID: ENST00000344204
  CDS Start-End: 25-9318
gcggccgcgggcgccgccgcagccatgagcggcagcagcggcggagccgccgcccccgccgcgtcctccggccccgccgcggcggccagcgcggctggctcgggctgcgggggcggtgccggcgagggggcagaggaggcggccaaggacctggccgacatcgcggccttcttccgatccgggtttcgaaaaaacgatgaaatgaaagctatggatgttttaccaattttgaaggaaaaagttgcatacctttcaggtgggagagataaacgtggaggtcccattttaacgtttccggcccgcagcaatcatgacagaatacgacaggaggatctcaggagactcatttcctatctagcctgtattcccagcgaggaggtctgcaagcgtggcttcacggtgatcgtggacatgcgtgggtccaagtgggactccatcaagccccttctgaagatcctgcaggagtccttcccctgctgcatccatgtggccctgatcatcaagccagacaacttctggcagaaacagaggactaattttggcagttctaaatttgaatttgagacaaatatggtctctttagaaggccttaccaaagtagttgatccttctcagctaactcctgagtttgatggctgcctggaatacaaccacgaagaatggattgaaatcagagttgcttttgaagactacattagcaatgccacccacatgctgtctcggctggaggaacttcaggacatcctagctaagaaggagctgcctcaggatttagagggggctcggaatatgatcgaggaacattctcagctgaagaagaaggtgattaaggcccccatcgaggacctggatttggagggacagaagctgcttcagaggatacagagcagtgaaagctttcccaaaaagaactcaggctcaggcaatgcggacctgcagaacctcttgcccaaggtgtccaccatgctggaccggctgcactcgacacggcagcatctgcaccagatgtggcatgtgaggaagctgaagctggaccagtgcttccagctgaggctgtttgaacaggatgctgagaagatgtttgactggatcacacacaacaaaggcctgtttctaaacagctacacagagattgggaccagccaccctcatgccatggagcttcagacgcagcacaatcactttgccatgaactgtatgaacgtgtatgtaaatataaaccgcatcatgtcggtggccaatcgtctggtggagtctggccactatgcctcgcagcagatcaggcagatcgcgagtcagctggagcaggagtggaaggcgtttgcggcagccctggatgagcggagcaccttgctggacatgtcctccattttccaccagaaggccgaaaagtatatgagcaacgtggattcatggtgtaaagcttgcggtgaggtagaccttccctcagagctgcaggacctagaagatgccattcatcaccaccagggaatatatgaacatatcactcttgcttattctgaggtcagccaagatgggaagtcgctccttgacaagctccagcggcccttgactcccggcagctccgattccctgacagcctctgccaactactccaaggccgtgcaccatgtcctggatgtcatccacgaggtgctgcaccaccagcggcagctggagaacatctggcaacaccgcaaggtccggctgcatcagaggctgcagctgtgtgttttccagcaggacgttcagcaggtgctagactggatcgagaaccacggagaagcatttctgagcaaacatacaggtgtggggaaatctcttcatcgggccagagcattgcagaaacgtcatgaagattttgaagaagtggcacagaacacatacaccaatgcggataaattactggaagcagcagaacagctggctcagactggggaatgtgaccccgaagagatttatcaggctgcccatcagctggaagaccggattcaagatttcgttcggcgtgttgagcagcgaaagatcctactggacatgtcagtgtcctttcacacccatgtgaaagagctgtggacgtggctggaggagctgcagaaggagctgctggacgacgtgtatgccgagtcggtggaggccgtgcaggacctcatcaagcgctttggccagcagcagcagaccaccctgcaggtgactgtcaacgtgatcaaggaaggggaggacctcatccagcagctcagggactctgccatctccagtaacaagaccccccacaacagctccatcaaccacattgagacggtgctgcagcagctggacgaggcgcagtcgcagatggaggagctcttccaggagcgcaagatcaagctggagctcttcctgcagctgcgcatcttcgagagggacgccatcgacattatctcagacctcgagtcttggaatgatgagctttctcagcaaatgaatgacttcgacacagaagatctcacgattgcagagcagcgcctccagcaccatgcagacaaagccttgaccatgaacaacttgacttttgacgtcatccaccaagggcaagatcttctgcagtatgtcaatgaggtccaggcctctggtgtggagctgctgtgtgatagagatgtagacatggcaactcgggtccaggacctgctggagtttcttcatgaaaaacagcaggaattggatttagccgcagagcagcatcggaaacacctggagcagtgcgtgcagctgcgccacctgcaggcagaagtgaaacaggtgctgggttggatccgcaacggagagtccatgttaaatgccggacttatcacagccagctcgttacaagaggcagagcagctccagcgagagcacgagcagttccagcatgccattgagaaaacacatcagagcgcgctgcaggtgcagcagaaggcagaagccatgctacaggccaaccactacgacatggacatgatccgggactgcgccgagaaggtggcgtctcactggcaacagctcatgctcaagatggaagatcgcctcaagctcgtcaacgcctctgtcgctttctacaaaacctcagagcaggtctgcagcgtcctcgagagcctggaacaggagtacaagagagaagaagactggtgtggcggggcggataagctgggcccaaactctgagacggaccacgtgacgcccatgatcagcaagcacctggagcagaaggaggcattcctgaaggcttgcacccttgctcggaggaatgcagacgtcttcctgaaatacctgcacaggaacagcgtgaacatgccaggaatggtgacgcacatcaaagctcctgaacagcaagtgaaaaatatcttgaatgaactcttccaacgggagaacagggtattgcattactggaccatgaggaagagacggctggaccagtgtcagcagtacgtggtctttgagaggagtgccaagcaggctttggaatggatccatgacaatggcgagttctacctttccacacacacctccacgggctccagtatacagcacacccaggagctcctgaaagagcacgaggagttccagataactgcaaagcaaaccaaagagagagtgaagctattgatacagctggctgatggcttttgtgaaaaagggcatgcccatgcggcagagataaaaaaatgtgttactgctgtggataagaggtacagagatttctctctgcggatggagaagtacaggacctctttggaaaaagccctggggatttcttcagattccaacaaatcgagtaaaagtctccagctagatatcattccagccagtatccctggctcagaggtgaaacttcgagatgctgctcatgaacttaatgaagagaagcggaaatctgcccgcaggaaagagttcataatggctgagctcattcaaactgaaaaggcttatgtaagagacctccgggaatgtatggatacgtacctgtgggaaatgaccagtggcgtggaagagattccacctggcattgtaaacaaagaactcatcatcttcggaaacatgcaagaaatctacgaatttcataataacatattcctaaaggagctggaaaaatatgaacagttgccagaggatgttggacattgttttgttacttgggcagacaagtttcagatgtatgtcacatattgcaaaaataagcctgattctactcagctgatattggaacatgcagggtcctattttgacgagatacagcagcgacatggattagccaattccatttcttcctaccttattaaaccagttcagcgaataacgaagtatcagctccttttaaaagagctgctgacgtgctgtgaggaaggaaagggagagattaaagatggcctggaggtgatgctcagcgtgccgaagcgagccaatgatgccatgcacctcagcatgctggaagggtttgatgaaaacattgagtctcagggagaactcatcctacaggaatccttccaagtgtgggacccaaaaaccttaattcgaaagggtcgagaacggcatctcttcctttttgaaatgtccttagtatttagtaaagaagtgaaagattccagtgggagaagcaagtacctttataaaagcaaattgtttacctcagagttgggtgtcacagaacatgttgaaggagacccttgcaaatttgcactgtgggtggggagaacaccaacttcagataataaaattgtccttaaggcttccagcatagagaacaagcaggactggataaagcatatccgcgaagtcatccaggagcggacgatccacctgaagggagccctgaaggagcccattcacatccctaagaccgctcccgccacaagacagaagggaaggagggatggagaggatctggacagccaaggagacggcagcagccagcctgatacgatttccatcgcctcacggacgtctcagaacacgctggacagcgataagctctctggtggctgtgagctgacagtggtgatccatgacttcaccgcttgcaacagcaacgagctgaccatccgacggggccagaccgtggaagttctggagcggccgcatgacaagcctgactggtgtctggtgcggacaactgaccgctccccagcggcagaaggcctggtcccctgtggttcactgtgcatcgcccactccagaagtagcatggaaatggagggcatcttcaaccacaaagactcgctctccgtctccagcaatgacgccagtccacccgcatccgtggcttccctccagccccacatgatcggggcccagagctcgccgggccccaagcggccgggcaacaccctgcgcaagtggctcaccagccccgtgcggcggctcagcagcggcaaggccgacgggcacgtgaagaagctggcgcacaagcacaagaagagccgcgaggtccgcaagagcgccgacgccggctcgcagaaggactccgacgacagtgcggccaccccgcaggacgagacggtcgaggagagaggccggaacgagggcctgagcagcggtactctctccaaatcctcctcctcggggatgcagagctgtggagaagaggaaggcgaggagggggccgacgccgtgcccctgccgccacccatggccatccagcagcacagcctcctccagccagactcacaggatgacaaggcctcttctcggttattagtccgccccaccagctccgaaacaccgagtgcagccgagctcgtcagtgcaattgaggaactcgtgaaaagcaagatggcactggaggatcgccccagctcactccttgttgaccagggagatagtagcagcccttccttcaacccttcggataattcccttctctcttcctcctcgcccattgatgagatggaagaaaggaaatccagctctttaaagagaagacactacgttttgcaagaactagtggagacagagcgtgactatgtgcgggaccttggctatgtggttgagggctacatggcacttatgaaagaagatggtgttcctgatgacatgaaaggaaaagacaaaattgtgttcggcaacatccatcagatttacgactggcacagagacttttttttaggagagttagagaagtgccttgaagatccagaaaaactaggatccctttttgttaaacacgagagaaggttgcacatgtacatagcttattgtcaaaataaaccaaagtctgagcacattgtctcagaatacattgataccttttttgaggacttaaagcagcgtcttggccacaggttacagctcacagatctgttgatcaaaccagtgcagagaatcatgaagtatcagctgttactgaaggacttcctcaagtattccaaaaaggccagcctggatacatcagaattagagagagctgtggaagtcatgtgcatagtacccaggcggtgcaacgacatgatgaacgtggggcggctgcaaggattcgacgggaaaatcgttgcccagggtaaactgctcttgcaggacacattcttggtcacagaccaagatgcaggacttctgcctcgctgcagagagaggcgcatcttcctctttgagcagatcgtcatattcagcgaaccacttgataaaaagaagggcttctccatgccgggattcctgtttaagaacagtatcaaggtgagttgcctttgcctggaggaaaatgtggaaaatgatccctgtaaatttgctctgacatcgaggacgggtgacgtggtagagaccttcattttgcattcatctagtccaagtgtccggcaaacttggatccatgaaatcaaccaaattttagaaaaccagcgcaattttttaaatgccttgacatcgccaatcgagtaccagaggaaccacagcgggggcggcggcggcggcggcagcgggggcagcggcgggggtgggggcagcggcggcggcggggcccccagtggcggcagcggccacagtggcggccccagcagctgcggcggcgcccccagcacgagcaggagccggccctcccggatcccccagcctgtccgacaccacccccccgtgctggtctcctctgcagcctcgagccaggcagaggcagacaagatgtcaggtacgtccacccccgggccctccctgcctccccctggcgcggcccccgaggccggccccagcgcgcccagcaggcggccccccggcgcggacgccgaggggtccgagcgagaagcggagccgatccccaagatgaaggtgctggagagccccaggaaaggcgccgcgaacgcctcggggtcgagcccagacgcccccgccaaggacgcgcgcgctagcctgggcaccctgccgcttgggaagccccgggccggggccgcttcgccgctgaactcgccgctctccagcgcggtcccttctctcggcaaggagcccttcccccccagcagccccctgcagaaggggggctccttctggagctccatccccgcctcccccgccagccgacccggctccttcaccttcccgggggacagcgactccctccagcggcagacaccccgccacgcggcccctggcaaggatactgaccgcatgagcacgtgctcctcggccagcgagcagtccgtgcagtccacccagagcaacgggagtgaaagcagcagcagtagcaacatctccaccatgttggtgacacacgattacacggcagtgaaggaggatgagatcaacgtctaccaaggagaggtcgttcaaattctggccagcaaccagcagaacatgtttctggtgttccgagccgccactgaccagtgccccgcagctgagggctggattccaggctttgtcctgggccacaccagtgcagtcatcgtggagaacccggacgggactctcaagaagtcaacatcttggcacacagcactccgtttaaggaaaaaatctgagaaaaaagataaagacggcaaaagggaaggcaagttagagaacggttatcggaagtcacgggaaggactcagcaacaaggtatctgtgaagcttctcaatcccaactacatttatgacgttcccccagaattcgtcattccattgagtgaggtcacgtgtgagacaggggagaccgttgttcttagatgtcgagtctgtggccgccccaaagcctcaattacctggaagggccctgaacacaacaccttgaacaacgatggtcactacagcatctcctacagtgacctgggagaggccacgctgaagattgtgggcgtgaccacggaagatgacggcatctacacgtgcatcgctgtcaatgacatgggttcagcctcatcgtcggccagcctgagggtcctaggtccagggatggatgggatcatggtgacctggaaagacaactttgactccttctacagtgaagtggctgagcttggcaggggcagattctctgtcgttaagaaatgtgatcagaaaggaaccaagcgagcagtggccactaagtttgtgaacaagaagttgatgaagcgcgaccaggtcacccatgagcttggcatcctgcagagcctccagcaccccctgcttgtcggcctcctcgacacctttgagacccccaccagctacatcctggtcttagaaatggctgaccagggtcgcctcctggactgcgtggtgcgatggggaagcctcactgaagggaagatcagggcgcacctgggggaggttctggaagctgtccggtacctgcacaactgcaggatagcacacctggacctaaagcctgagaatatcctggtggatgagagtttagccaagccaaccatcaaactggctgactttggagatgctgttcagctcaacacgacctactacatccaccagttactggggaaccctgaattcgcagcccctgaaatcatcctcgggaaccctgtctccctgacctcggatacgtggagtgttggagtgctcacatacgtacttcttagtggcgtgtcccccttcctggatgacagtgtggaagagacctgcctgaacatttgccgcttagactttagcttcccagatgactactttaaaggagtgagccagaaggccaaggagttcgtgtgcttcctcctgcaggaggaccccgccaagcgtccctcggctgcgctggccctccaggagcagtggctgcaggccggcaacggcagaagcacgggcgtcctcgacacgtccagactgacttccttcattgagcggcgcaaacaccagaatgatgttcgacctatccgtagcattaaaaactttctgcagagcaggcttctgcctagagtttgacctatccagaagttctttctcattctctttcacctgccaatcagctgttaatctgaattttcaagagaaaacaagcaaacataactgatcagctgccggtatgttcatcgtgtgaaattgcattccaagtgagctgtgctcagcagtgcttggacacagagctgcaagctgcgctggggtggaggaccgtcacttacactctgcccaaggcagaggtcgcattgctgtatcacagtattttattcaggtttctgcaaaaaaataaaaagataacttttttaaacaaacatgaatagaattttgcaaatttaacgttttcaagatttattcaaggaaacaaaatgcctatgttcaaccactggtgttaatgaacaaagatactgtgcgtctctggggaagacgcacctaggtggcggccactcccatggccttgtctaggactcagagaccactcggctctgagcttccaggcgcctcgtctgtgtgcatctcacgcccgacgtggcttctgaaacgtgcattcaacctcaaacttttgcataaaatagaatgaatcgttttgctctgatgaaatgtaggccttacttgtatataagactgttcctgccttcggtctgtcattttcccacctgcctcccctacccaccccccacccaccacctggggcttcctctgggggtccgagggtcttcccatcacatgaagacatcaggttgggtcctgccccactgcccctccccctgttcctgccccaagccgtcaatcagattgtggagcagtacacagtcagatgaaaatactgtaaatgcactcattgggggttttttggttttacttcatatcatgtgcaatgttgtggctttaacattttatgcaactatttatgaagacctctgttgtacctgtaataaatatatagaaaaagcacatacttcgtatggtgagctttatggttttgtgtgtgtgttggggttggcgggtgggtgggtagggtcgtagccctgtgccatcggttcaaagagacttttcgtgaaatttgttggttttgaggactgtaaaagtgatttcatactctgaatataaaactggataatagggtaatgttttaaaatttattatgctattattcagaatgccaaagtattattttttttcccaaaatcagtctggacatttactactttttagactttttgacgttgaactttctgtataaaaattggctgggttttgagcttttggtaagaaataaaagccgattaagcactggccgccccgcggctggtacccaatgcccgagtcactgtggcagcattcgcactggtgtggggagtcctttcaactcaaggaggctgggtttctgggcaccctcgaagttttctggatgtctttttatctttctcgtgtgaactgcactacaaaagagaccagcccgcttcccaagccagccagacacctgggtcttgagccataaactggcgtagttaagctttgcagcttccagtgtattttatttattcttttgttgggtttttgtttgtttcttcttgtaaaattgtacagaaactttttaaaagaaattggattcgaaactggatgtgtattcgtaacctcataatttttatttgtgtattgtttcttttattatttcagttaaatttttacattattttgcatgtatatttctttgtacagagaccttacatgtttacacagtatgatgtgatgtaaatattttattttgccatcagttattttaaaaaattaaacatatttgcctga

SEQ ID NO: 194664 - DNA, 8907 bp, Homo sapiens
  Payload ID: 18469
  Gene Name: trio Rho guanine nucleotide exchange factor
  ENST ID: ENST00000512070
  CDS Start-End: 67-6996
gaggcggccaaggacctggccgacatcgcggccttcttccgatccgggtttcgaaaaaacgatgaaatgaaagctatggatgttttaccaattttgaaggaaaaagttgcatacctttcaggtgggagagataaacgtggaggtcccattttaacgtttccggcccgcagcaatcatgacagaatacgacaggaggatctcaggagactcatttcctatctagcctgtattcccagcgaggaggtctgcaagcgtggcttcacggtgatcgtggacatgcgtgggtccaagtgggactccatcaagccccttctgaagatcctgcaggagtccttcccctgctgcatccatgtggccctgatcatcaagccagacaacttctggcagaaacagaggactaattttggcagttctaaatttgaatttgagacaaatatggtctctttagaaggccttaccaaagtagttgatccttctcagctaactcctgagtttgatggctgcctggaatacaaccacgaagaatggattgaaatcagagttgcttttgaagactacattagcaatgccacccacatgctgtctcggctggaggaacttcaggacatcctagctaagaaggagctgcctcaggatttagagggggctcggaatatgatcgaggaacattctcagctgaagaagaaggtgattaaggcccccatcgaggacctggatttggagggacagaagctgcttcagaggatacagagcagtgaaagctttcccaaaaagaactcaggctcaggcaatgcggacctgcagaacctcttgcccaaggtgtccaccatgctggaccggctgcactcgacacggcagcatctgcaccagatgtggcatgtgaggaagctgaagctggaccagtgcttccagctgaggctgtttgaacaggatgctgagaagatgtttgactggatcacacacaacaaaggcctgtttctaaacagctacacagagattgggaccagccaccctcatgccatggagcttcagacgcagcacaatcactttgccatgaactgtatgaacgtgtatgtaaatataaaccgcatcatgtcggtggccaatcgtctggtggagtctggccactatgcctcgcagcagatcaggcagatcgcgagtcagctggagcaggagtggaaggcgtttgcggcagccctggatgagcggagcaccttgctggacatgtcctccattttccaccagaaggccgaaaagtatatgagcaacgtggattcatggtgtaaagcttgcggtgaggtagaccttccctcagagctgcaggacctagaagatgccattcatcaccaccagggaatatatgaacatatcactcttgcttattctgaggtcagccaagatgggaagtcgctccttgacaagctccagcggcccttgactcccggcagctccgattccctgacagcctctgccaactactccaaggccgtgcaccatgtcctggatgtcatccacgaggtgctgcaccaccagcggcagctggagaacatctggcaacaccgcaaggtccggctgcatcagaggctgcagctgtgtgttttccagcaggacgttcagcaggtgctagactggatcgagaaccacggagaagcatttctgagcaaacatacaggtgtggggaaatctcttcatcgggccagagcattgcagaaacgtcatgaagattttgaagaagtggcacagaacacatacaccaatgcggataaattactggaagcagcagaacagctggctcagactggggaatgtgaccccgaagagatttatcaggctgcccatcagctggaagaccggattcaagatttcgttcggcgtgttgagcagcgaaagatcctactggacatgtcagtgtcctttcacacccatgtgaaagagctgtggacgtggctggaggagctgcagaaggagctgctggacgacgtgtatgccgagtcggtggaggccgtgcaggacctcatcaagcgctttggccagcagcagcagaccaccctgcaggtgactgtcaacgtgatcaaggaaggggaggacctcatccagcagctcagggactctgccatctccagtaacaagaccccccacaacagctccatcaaccacattgagacggtgctgcagcagctggacgaggcgcagtcgcagatggaggagctcttccaggagcgcaagatcaagctggagctcttcctgcagctgcgcatcttcgagagggacgccatcgacattatctcagacctcgagtcttggaatgatgagctttctcagcaaatgaatgacttcgacacagaagatctcacgattgcagagcagcgcctccagcaccatgcagacaaagccttgaccatgaacaacttgacttttgacgtcatccaccaagggcaagatcttctgcagtatgtcaatgaggtccaggcctctggtgtggagctgctgtgtgatagagatgtagacatggcaactcgggtccaggacctgctggagtttcttcatgaaaaacagcaggaattggatttagccgcagagcagcatcggaaacacctggagcagtgcgtgcagctgcgccacctgcaggcagaagtgaaacaggtgctgggttggatccgcaacggagagtccatgttaaatgccggacttatcacagccagctcgttacaagaggcagagcagctccagcgagagcacgagcagttccagcatgccattgagaaaacacatcagagcgcgctgcaggtgcagcagaaggcagaagccatgctacaggccaaccactacgacatggacatgatccgggactgcgccgagaaggtggcgtctcactggcaacagctcatgctcaagatggaagatcgcctcaagctcgtcaacgcctctgtcgctttctacaaaacctcagagcaggtctgcagcgtcctcgagagcctggaacaggagtacaagagagaagaagactggtgtggcggggcggataagctgggcccaaactctgagacggaccacgtgacgcccatgatcagcaagcacctggagcagaaggaggcattcctgaaggcttgcacccttgctcggaggaatgcagacgtcttcctgaaatacctgcacaggaacagcgtgaacatgccaggaatggtgacgcacatcaaagctcctgaacagcaagtgaaaaatatcttgaatgaactcttccaacgggagaacagggtattgcattactggaccatgaggaagagacggctggaccagtgtcagcagtacgtggtctttgagaggagtgccaagcaggctttggaatggatccatgacaatggcgagttctacctttccacacacacctccacgggctccagtatacagcacacccaggagctcctgaaagagcacgaggagttccagataactgcaaagcaaaccaaagagagagtgaagctattgatacagctggctgatggcttttgtgaaaaagggcatgcccatgcggcagagataaaaaaatgtgttactgctgtggataagaggtacagagatttctctctgcggatggagaagtacaggacctctttggaaaaagccctggggatttcttcagattccaacaaatcgagtaaaagtctccagctagatatcattccagccagtatccctggctcagaggtgaaacttcgagatgctgctcatgaacttaatgaagagaagcggaaatctgcccgcaggaaagagttcataatggctgagctcattcaaactgaaaaggcttatgtaagagacctccgggaatgtatggatacgtacctgtgggaaatgaccagtggcgtggaagagattccacctggcattgtaaacaaagaactcatcatcttcggaaacatgcaagaaatctacgaatttcataataacatattcctaaaggagctggaaaaatatgaacagttgccagaggatgttggacattgttttgttacttgggcagacaagtttcagatgtatgtcacatattgcaaaaataagcctgattctactcagctgatattggaacatgcagggtcctattttgacgagatacagcagcgacatggattagccaattccatttcttcctaccttattaaaccagttcagcgaataacgaagtatcagctccttttaaaagagctgctgacgtgctgtgaggaaggaaagggagagattaaagatggcctggaggtgatgctcagcgtgccgaagcgagccaatgatgccatgcacctcagcatgctggaagggtttgatgaaaacattgagtctcagggagaactcatcctacaggaatccttccaagtgtgggacccaaaaaccttaattcgaaagggtcgagaacggcatctcttcctttttgaaatgtccttagtatttagtaaagaagtgaaagattccagtgggagaagcaagtacctttataaaagcaaattgtttacctcagagttgggtgtcacagaacatgttgaaggagacccttgcaaatttgcactgtgggtggggagaacaccaacttcagataataaaattgtccttaaggcttccagcatagagaacaagcaggactggataaagcatatccgcgaagtcatccaggagcggacgatccacctgaagggagccctgaaggagcccattcacatccctaagaccgctcccgccacaagacagaagggaaggagggatggagaggatctggacagccaaggagacggcagcagccagcctgatacgatttccatcgcctcacggacgtctcagaacacgctggacagcgataagctctctggtggctgtgagctgacagtggtgatccatgacttcaccgcttgcaacagcaacgagctgaccatccgacggggccagaccgtggaagttctggagcggccgcatgacaagcctgactggtgtctggtgcggacaactgaccgctccccagcggcagaaggcctggtcccctgtggttcactgtgcatcgcccactccagaagtagcatggaaatggagggcatcttcaaccacaaagactcgctctccgtctccagcaatgacgccagtccacccgcatccgtggcttccctccagccccacatgatcggggcccagagctcgccgggccccaagcggccgggcaacaccctgcgcaagtggctcaccagccccgtgcggcggctcagcagcggcaaggccgacgggcacgtgaagaagctggcgcacaagcacaagaagagccgcgaggtccgcaagagcgccgacgccggctcgcagaaggactccgacgacagtgcggccaccccgcaggacgagacggtcgaggagagaggccggaacgagggcctgagcagcggtactctctccaaatcctcctcctcggggatgcagagctgtggagaagaggaaggcgaggagggggccgacgccgtgcccctgccgccacccatggccatccagcagcacagcctcctccagccagactcacaggatgacaaggcctcttctcggttattagtccgccccaccagctccgaaacaccgagtgcagccgagctcgtcagtgcaattgaggaactcgtgaaaagcaagatggcactggaggatcgccccagctcactccttgttgaccagggagatagtagcagcccttccttcaacccttcggataattcccttctctcttcctcctcgcccattgatgagatggaagaaaggaaatccagctctttaaagagaagacactacgttttgcaagaactagtggagacagagcgtgactatgtgcgggaccttggctatgtggttgagggctacatggcacttatgaaagaagatggtgttcctgatgacatgaaaggaaaagacaaaattgtgttcggcaacatccatcagatttacgactggcacagagacttttttttaggagagttagagaagtgccttgaagatccagaaaaactaggatccctttttgttaaacacgagagaaggttgcacatgtacatagcttattgtcaaaataaaccaaagtctgagcacattgtctcagaatacattgataccttttttgaggacttaaagcagcgtcttggccacaggttacagctcacagatctgttgatcaaaccagtgcagagaatcatgaagtatcagctgttactgaaggacttcctcaagtattccaaaaaggccagcctggatacatcagaattagagagagctgtggaagtcatgtgcatagtacccaggcggtgcaacgacatgatgaacgtggggcggctgcaaggattcgacgggaaaatcgttgcccagggtaaactgctcttgcaggacacattcttggtcacagaccaagatgcaggacttctgcctcgctgcagagagaggcgcatcttcctctttgagcagatcgtcatattcagcgaaccacttgataaaaagaagggcttctccatgccgggattcctgtttaagaacagtatcaaggtgagttgcctttgcctggaggaaaatgtggaaaatgatccctgtaaatttgctctgacatcgaggacgggtgacgtggtagagaccttcattttgcattcatctagtccaagtgtccggcaaacttggatccatgaaatcaaccaaattttagaaaaccagcgcaattttttaaatgccttgacatcgccaatcgagtaccagaggaaccacagcgggggcggcggcggcggcggcagcgggggcagcggcgggggtgggggcagcggcggcggcggggcccccagtggcggcagcggccacagtggcggccccagcagctgcggcggcgcccccagcacgagcaggagccggccctcccggatcccccagcctgtccgacaccacccccccgtgctggtctcctctgcagcctcgagccaggcagaggcagacaagatgtcagagtgaaagcagcagcagtagcaacatctccaccatgttggtgacacacgattacacggcagtgaaggaggatgagatcaacgtctaccaaggagaggtcgttcaaattctggccagcaaccagcagaacatgtttctggtgttccgagccgccactgaccagtgccccgcagctgagggctggattccaggctttgtcctgggccacaccagtgcagtcatcgtggagaacccggacgggactctcaagaagtcaacatcttggcacacagcactccgtttaaggaaaaaatctgagaaaaaagataaagacggcaaaagggaaggcaagttagagaacggttatcggaagtcacgggaaggactcagcaacaaggtatctgtgaagcttctcaatcccaactacatttatgacgttcccccagaattcgtcattccattgagtgaggtcacgtgtgagacaggggagaccgttgttcttagatgtcgagtctgtggccgccccaaagcctcaattacctggaagggccctgaacacaacaccttgaacaacgatggtcactacagcatctcctacagtgacctgggagaggccacgctgaagattgtgggcgtgaccacggaagatgacggcatctacacgtgcatcgctgtcaatgacatgggttcagcctcatcgtcggccagcctgagggtcctaggtccagggatggatgggatcatggtgacctggaaagacaactttgactccttctacagtgaagtggctgagcttggcaggggcagattctctgtcgttaagaaatgtgatcagaaaggaaccaagcgagcagtggccactaagtttgtgaacaagaagttgatgaagcgcgaccaggtcacccatgagcttggcatcctgcagagcctccagcaccccctgcttgtcggcctcctcgacacctttgagacccccaccagctacatcctggtcttagaaatggctgaccagggtcgcctcctggactgcgtggtgcgatggggaagcctcactgaagggaagatcagggcgcacctgggggaggttctggaagctgtccggtacctgcacaactgcaggatagcacacctggacctaaagcctgagaatatcctggtggatgagagtttagccaagccaaccatcaaactggctgactttggagatgctgttcagctcaacacgacctactacatccaccagttactggggaaccctgaattcgcagcccctgaaatcatcctcgggaaccctgtctccctgacctcggatacgtggagtgttggagtgctcacatacgtacttcttagtggcgtgtcccccttcctggatgacagtgtggaagagacctgcctgaacatttgccgcttagactttagcttcccagatgactactttaaaggagtgagccagaaggccaaggagttcgtgtgcttcctcctgcaggaggaccccgccaagcgtccctcggctgcgctggccctccaggagcagtggctgcaggccggcaacggcagaagcacgggcgtcctcgacacgtccagactgacttccttcattgagcggcgcaaacaccagaatgatgttcgacctatccgtagcattaaaaactttctgcagagcaggcttctgcctagagtttgacctatccagaagttctttctcattctctttcacctgccaatcagctgttaatctgaattttcaagagaaaacaagcaaacataactgatcagctgccggtatgttcatcgtgtgaaattgcattccaagtgagctgtgctcagcagtgcttggacacagagctgcaagctgcgctggggtggaggaccgtcacttacactctgcccaaggcagaggtcgcattgctgtatcacagtattttattcaggtttctg

SEQ ID NO: 194665 - DNA, 7995 bp, Homo sapiens
  Payload ID: 18469
  Gene Name: trio Rho guanine nucleotide exchange factor
  ENST ID: ENST00000513206
  CDS Start-End: 1-7641
attaaggcccccatcgaggacctggatttggagggacagaagctgcttcagaggatacagagcagtgaaagctttcccaaaaagaactcaggctcaggcaatgcggacctgcagaacctcttgcccaaggtgtccaccatgctggaccggctgcactcgacacggcagcatctgcaccagatgtggcatgtgaggaagctgaagctggaccagtgcttccagctgaggctgtttgaacaggatgctgagaagatgtttgactggatcacacacaacaaaggcctgtttctaaacagctacacagagattgggaccagccaccctcatgccatggagcttcagacgcagcacaatcactttgccatgaactgtatgaacgtgtatgtaaatataaaccgcatcatgtcggtggccaatcgtctggtggagtctggccactatgcctcgcagcagatcaggcagatcgcgagtcagctggagcaggagtggaaggcgtttgcggcagccctggatgagcggagcaccttgctggacatgtcctccattttccaccagaaggccgaaaagtatatgagcaacgtggattcatggtgtaaagcttgcggtgaggtagaccttccctcagagctgcaggacctagaagatgccattcatcaccaccagggaatatatgaacatatcactcttgcttattctgaggtcagccaagatgggaagtcgctccttgacaagctccagcggcccttgactcccggcagctccgattccctgacagcctctgccaactactccaaggccgtgcaccatgtcctggatgtcatccacgaggtgctgcaccaccagcggcagctggagaacatctggcaacaccgcaaggtccggctgcatcagaggctgcagctgtgtgttttccagcaggacgttcagcaggtgctagactggatcgagaaccacggagaagcatttctgagcaaacatacaggtgtggggaaatctcttcatcgggccagagcattgcagaaacgtcatgaagattttgaagaagtggcacagaacacatacaccaatgcggataaattactggaagcagcagaacagctggctcagactggggaatgtgaccccgaagagatttatcaggctgcccatcagctggaagaccggattcaagatttcgttcggcgtgttgagcagcgaaagatcctactggacatgtcagtgtcctttcacacccatgtgaaagagctgtggacgtggctggaggagctgcagaaggagctgctggacgacgtgtatgccgagtcggtggaggccgtgcaggacctcatcaagcgctttggccagcagcagcagaccaccctgcaggtgactgtcaacgtgatcaaggaaggggaggacctcatccagcagctcagggactctgccatctccagtaacaagaccccccacaacagctccatcaaccacattgagacggtgctgcagcagctggacgaggcgcagtcgcagatggaggagctcttccaggagcgcaagatcaagctggagctcttcctgcagctgcgcatcttcgagagggacgccatcgacattatctcagacctcgagtcttggaatgatgagctttctcagcaaatgaatgacttcgacacagaagatctcacgattgcagagcagcgcctccagcaccatgcagacaaagccttgaccatgaacaacttgacttttgacgtcatccaccaagggcaagatcttctgcagtatgtcaatgaggtccaggcctctggtgtggagctgctgtgtgatagagatgtagacatggcaactcgggtccaggacctgctggagtttcttcatgaaaaacagcaggaattggatttagccgcagagcagcatcggaaacacctggagcagtgcgtgcagctgcgccacctgcaggcagaagtgaaacaggtgctgggttggatccgcaacggagagtccatgttaaatgccggacttatcacagccagctcgttacaagaggcagagcagctccagcgagagcacgagcagttccagcatgccattgagaaaacacatcagagcgcgctgcaggtgcagcagaaggcagaagccatgctacaggccaaccactacgacatggacatgatccgggactgcgccgagaaggtggcgtctcactggcaacagctcatgctcaagatggaagatcgcctcaagctcgtcaacgcctctgtcgctttctacaaaacctcagagcaggtctgcagcgtcctcgagagcctggaacaggagtacaagagagaagaagactggtgtggcggggcggataagctgggcccaaactctgagacggaccacgtgacgcccatgatcagcaagcacctggagcagaaggaggcattcctgaaggcttgcacccttgctcggaggaatgcagacgtcttcctgaaatacctgcacaggaacagcgtgaacatgccaggaatggtgacgcacatcaaagctcctgaacagcaagtgaaaaatatcttgaatgaactcttccaacgggagaacagggtattgcattactggaccatgaggaagagacggctggaccagtgtcagcagtacgtggtctttgagaggagtgccaagcaggctttggaatggatccatgacaatggcgagttctacctttccacacacacctccacgggctccagtatacagcacacccaggagctcctgaaagagcacgaggagttccagataactgcaaagcaaaccaaagagagagtgaagctattgatacagctggctgatggcttttgtgaaaaagggcatgcccatgcggcagagataaaaaaatgtgttactgctgtggataagaggtacagagatttctctctgcggatggagaagtacaggacctctttggaaaaagccctggggatttcttcagattccaacaaatcgagtaaaagtctccagctagatatcattccagccagtatccctggctcagaggtgaaacttcgagatgctgctcatgaacttaatgaagagaagcggaaatctgcccgcaggaaagagttcataatggctgagctcattcaaactgaaaaggcttatgtaagagacctccgggaatgtatggatacgtacctgtgggaaatgaccagtggcgtggaagagattccacctggcattgtaaacaaagaactcatcatcttcggaaacatgcaagaaatctacgaatttcataataacatattcctaaaggagctggaaaaatatgaacagttgccagaggatgttggacattgttttgttacttgggcagacaagtttcagatgtatgtcacatattgcaaaaataagcctgattctactcagctgatattggaacatgcagggtcctattttgacgagatacagcagcgacatggattagccaattccatttcttcctaccttattaaaccagttcagcgaataacgaagtatcagctccttttaaaagagctgctgacgtgctgtgaggaaggaaagggagagattaaagatggcctggaggtgatgctcagcgtgccgaagcgagccaatgatgccatgcacctcagcatgctggaagggtttgatgaaaacattgagtctcagggagaactcatcctacaggaatccttccaagtgtgggacccaaaaaccttaattcgaaagggtcgagaacggcatctcttcctttttgaaatgtccttagtatttagtaaagaagtgaaagattccagtgggagaagcaagtacctttataaaagcaaattgtttacctcagagttgggtgtcacagaacatgttgaaggagacccttgcaaatttgcactgtgggtggggagaacaccaacttcagataataaaattgtccttaaggcttccagcatagagaacaagcaggactggataaagcatatccgcgaagtcatccaggagcggacgatccacctgaagggagccctgaaggagcccattcacatccctaagaccgctcccgccacaagacagaagggaaggagggatggagaggatctggacagccaaggagacggcagcagccagcctgatacgatttccatcgcctcacggacgtctcagaacacgctggacagcgataagctctctggtggctgtgagctgacagtggtgatccatgacttcaccgcttgcaacagcaacgagctgaccatccgacggggccagaccgtggaagttctggagcggccgcatgacaagcctgactggtgtctggtgcggacaactgaccgctccccagcggcagaaggcctggtcccctgtggttcactgtgcatcgcccactccagaagtagcatggaaatggagggcatcttcaaccacaaagactcgctctccgtctccagcaatgacgccagtccacccgcatccgtggcttccctccagccccacatgatcggggcccagagctcgccgggccccaagcggccgggcaacaccctgcgcaagtggctcaccagccccgtgcggcggctcagcagcggcaaggccgacgggcacgtgaagaagctggcgcacaagcacaagaagagccgcgaggtccgcaagagcgccgacgccggctcgcagaaggactccgacgacagtgcggccaccccgcaggacgagacggtcgaggagagaggccggaacgagggcctgagcagcggtactctctccaaatcctcctcctcggggatgcagagctgtggagaagaggaaggcgaggagggggccgacgccgtgcccctgccgccacccatggccatccagcagcacagcctcctccagccagactcacaggatgacaaggcctcttctcggttattagtccgccccaccagctccgaaacaccgagtgcagccgagctcgtcagtgcaattgaggaactcgtgaaaagcaagatggcactggaggatcgccccagctcactccttgttgaccagggagatagtagcagcccttccttcaacccttcggataattcccttctctcttcctcctcgcccattgatgagatggaagaaaggaaatccagctctttaaagagaagacactacgttttgcaagaactagtggagacagagcgtgactatgtgcgggaccttggctatgtggttgagggctacatggcacttatgaaagaagatggtgttcctgatgacatgaaaggaaaagacaaaattgtgttcggcaacatccatcagatttacgactggcacagagacttttttttaggagagttagagaagtgccttgaagatccagaaaaactaggatccctttttgttaaacacgagagaaggttgcacatgtacatagcttattgtcaaaataaaccaaagtctgagcacattgtctcagaatacattgataccttttttgaggacttaaagcagcgtcttggccacaggttacagctcacagatctgttgatcaaaccagtgcagagaatcatgaagtatcagctgttactgaaggacttcctcaagtattccaaaaaggccagcctggatacatcagaattagagagagctgtggaagtcatgtgcatagtacccaggcggtgcaacgacatgatgaacgtggggcggctgcaaggattcgacgggaaaatcgttgcccagggtaaactgctcttgcaggacacattcttggtcacagaccaagatgcaggacttctgcctcgctgcagagagaggcgcatcttcctctttgagcagatcgtcatattcagcgaaccacttgataaaaagaagggcttctccatgccgggattcctgtttaagaacagtatcaaggtgagttgcctttgcctggaggaaaatgtggaaaatgatccctgtaaatttgctctgacatcgaggacgggtgacgtggtagagaccttcattttgcattcatctagtccaagtgtccggcaaacttggatccatgaaatcaaccaaattttagaaaaccagcgcaattttttaaatgccttgacatcgccaatcgagtaccagaggaaccacagcgggggcggcggcggcggcggcagcgggggcagcggcgggggtgggggcagcggcggcggcggggcccccagtggcggcagcggccacagtggcggccccagcagctgcggcggcgcccccagcacgagcaggagccggccctcccggatcccccagcctgtccgacaccacccccccgtgctggtctcctctgcagcctcgagccaggcagaggcagacaagatgtcaggtacgtccacccccgggccctccctgcctccccctggcgcggcccccgaggccggccccagcgcgcccagcaggcggccccccggcgcggacgccgaggggtccgagcgagaagcggagccgatccccaagatgaaggtgctggagagccccaggaaaggcgccgcgaacgcctcggggtcgagcccagacgcccccgccaaggacgcgcgcgctagcctgggcaccctgccgcttgggaagccccgggccggggccgcttcgccgctgaactcgccgctctccagcgcggtcccttctctcggcaaggagcccttcccccccagcagccccctgcagaaggggggctccttctggagctccatccccgcctcccccgccagccgacccggctccttcaccttcccgggggacagcgactccctccagcggcagacaccccgccacgcggcccctggcaaggatactgaccgcatgagcacgtgctcctcggccagcgagcagtccgtgcagtccacccagagcaacgggagtgaaagcagcagcagtagcaacatctccaccatgttggtgacacacgattacacggcagtgaaggaggatgagatcaacgtctaccaaggagaggtcgttcaaattctggccagcaaccagcagaacatgtttctggtgttccgagccgccactgaccagtgccccgcagctgagggctggattccaggctttgtcctgggccacaccagtgcagtcatcgtggagaacccggacgggactctcaagaagtcaacatcttggcacacagcactccgtttaaggaaaaaatctgagaaaaaagataaagacggcaaaagggaaggcaagttagagaacggttatcggaagtcacgggaaggactcagcaacaaggtatctgtgaagcttctcaatcccaactacatttatgacgttcccccagaattcgtcattccattgagtgaggtcacgtgtgagacaggggagaccgttgttcttagatgtcgagtctgtggccgccccaaagcctcaattacctggaagggccctgaacacaacaccttgaacaacgatggtcactacagcatctcctacagtgacctgggagaggccacgctgaagattgtgggcgtgaccacggaagatgacggcatctacacgtgcatcgctgtcaatgacatgggttcagcctcatcgtcggccagcctgagggtcctaggtccagggatggatgggatcatggtgacctggaaagacaactttgactccttctacagtgaagtggctgagcttggcagggcaaactggaacaactggtcaccctactaacctgtaaactgggaataactggcatttgtgcagaatggctcccaggttcctgatgcccagcggcactctacagacattgccaggtctgtctgcaaatccacggtgcttggccggatgctgtttgaagtgtgcactttagagaagaaaaggggcggggtgtcatttcccacacacaagccgctagtccttatggaaactcttccaacgaaggtggatggaaacttttccaacgaaggtgatgtttttgaaacccagcttttatttggacaaagccttcttgaaaaatccttgaaaatgctttctgtttttaataaaggagatctctggaacatttccatgagctttcatagcact

SEQ ID NO: 194666 - DNA, 4949 bp, Homo sapiens
  Payload ID: 18469
  Gene Name: trio Rho guanine nucleotide exchange factor
  ENST ID: ENST00000509967
  CDS Start-End: 153-4679
atttgggatatctagaggttgtttgttggtgttctgggatcctgagggacactgccaactgttaacctttggcagatagtgactgttttacttcgattttattttcgtggtaaccgttttttaaaaaagattaataaattacccaagaggacatggcagaagggtttcgaaaaaacgatgaaatgaaagctatggatgttttaccaattttgaaggaaaaagttgcatacctttcaggtgggagagataaacgtggaggtcccattttaacgtttccggcccgcagcaatcatgacagaatacgacaggaggatctcaggagactcatttcctatctagcctgtattcccagcgaggaggtctgcaagcgtggcttcacggtgatcgtggacatgcgtgggtccaagtgggactccatcaagccccttctgaagatcctgcaggagtccttcccctgctgcatccatgtggccctgatcatcaagccagacaacttctggcagaaacagaggactaattttggcagttctaaatttgaatttgagacaaatatggtctctttagaaggccttaccaaagtagttgatccttctcagctaactcctgagtttgatggctgcctggaatacaaccacgaagaatggattgaaatcagagttgcttttgaagactacattagcaatgccacccacatgctgtctcggctggaggaacttcaggacatcctagctaagaaggagctgcctcaggatttagagggggctcggaatatgatcgaggaacattctcagctgaagaagaaggtgattaaggcccccatcgaggacctggatttggagggacagaagctgcttcagaggatacagagcagtgaaagctttcccaaaaagaactcaggctcaggcaatgcggacctgcagaacctcttgcccaaggtgtccaccatgctggaccggctgcactcgacacggcagcatctgcaccagatgtggcatgtgaggaagctgaagctggaccagtgcttccagctgaggctgtttgaacaggatgctgagaagatgtttgactggatcacacacaacaaaggcctgtttctaaacagctacacagagattgggaccagccaccctcatgccatggagcttcagacgcagcacaatcactttgccatgaactgtatgaacgtgtatgtaaatataaaccgcatcatgtcggtggccaatcgtctggtggagtctggccactatgcctcgcagcagatcaggcagatcgcgagtcagctggagcaggagtggaaggcgtttgcggcagccctggatgagcggagcaccttgctggacatgtcctccattttccaccagaaggccgaaaagtatatgagcaacgtggattcatggtgtaaagcttgcggtgaggtagaccttccctcagagctgcaggacctagaagatgccattcatcaccaccagggaatatatgaacatatcactcttgcttattctgaggtcagccaagatgggaagtcgctccttgacaagctccagcggcccttgactcccggcagctccgattccctgacagcctctgccaactactccaaggccgtgcaccatgtcctggatgtcatccacgaggtgctgcaccaccagcggcagctggagaacatctggcaacaccgcaaggtccggctgcatcagaggctgcagctgtgtgttttccagcaggacgttcagcaggtgctagactggatcgagaaccacggagaagcatttctgagcaaacatacaggtgtggggaaatctcttcatcgggccagagcattgcagaaacgtcatgaagattttgaagaagtggcacagaacacatacaccaatgcggataaattactggaagcagcagaacagctggctcagactggggaatgtgaccccgaagagatttatcaggctgcccatcagctggaagaccggattcaagatttcgttcggcgtgttgagcagcgaaagatcctactggacatgtcagtgtcctttcacacccatgtgaaagagctgtggacgtggctggaggagctgcagaaggagctgctggacgacgtgtatgccgagtcggtggaggccgtgcaggacctcatcaagcgctttggccagcagcagcagaccaccctgcaggtgactgtcaacgtgatcaaggaaggggaggacctcatccagcagctcagggactctgccatctccagtaacaagaccccccacaacagctccatcaaccacattgagacggtgctgcagcagctggacgaggcgcagtcgcagatggaggagctcttccaggagcgcaagatcaagctggagctcttcctgcagctgcgcatcttcgagagggacgccatcgacattatctcagacctcgagtcttggaatgatgagctttctcagcaaatgaatgacttcgacacagaagatctcacgattgcagagcagcgcctccagcaccatgcagacaaagccttgaccatgaacaacttgacttttgacgtcatccaccaagggcaagatcttctgcagtatgtcaatgaggtccaggcctctggtgtggagctgctgtgtgatagagatgtagacatggcaactcgggtccaggacctgctggagtttcttcatgaaaaacagcaggaattggatttagccgcagagcagcatcggaaacacctggagcagtgcgtgcagctgcgccacctgcaggcagaagtgaaacaggtgctgggttggatccgcaacggagagtccatgttaaatgccggacttatcacagccagctcgttacaagaggcagagcagctccagcgagagcacgagcagttccagcatgccattgagaaaacacatcagagcgcgctgcaggtgcagcagaaggcagaagccatgctacaggccaaccactacgacatggacatgatccgggactgcgccgagaaggtggcgtctcactggcaacagctcatgctcaagatggaagatcgcctcaagctcgtcaacgcctctgtcgctttctacaaaacctcagagcaggtctgcagcgtcctcgagagcctggaacaggagtacaagagagaagaagactggtgtggcggggcggataagctgggcccaaactctgagacggaccacgtgacgcccatgatcagcaagcacctggagcagaaggaggcattcctgaaggcttgcacccttgctcggaggaatgcagacgtcttcctgaaatacctgcacaggaacagcgtgaacatgccaggaatggtgacgcacatcaaagctcctgaacagcaagtgaaaaatatcttgaatgaactcttccaacgggagaacagggtattgcattactggaccatgaggaagagacggctggaccagtgtcagcagtacgtggtctttgagaggagtgccaagcaggctttggaatggatccatgacaatggcgagttctacctttccacacacacctccacgggctccagtatacagcacacccaggagctcctgaaagagcacgaggagttccagataactgcaaagcaaaccaaagagagagtgaagctattgatacagctggctgatggcttttgtgaaaaagggcatgcccatgcggcagagataaaaaaatgtgttactgctgtggataagaggtacagagatttctctctgcggatggagaagtacaggacctctttggaaaaagccctggggatttcttcagattccaacaaatcgagtaaaagtctccagctagatatcattccagccagtatccctggctcagaggtgaaacttcgagatgctgctcatgaacttaatgaagagaagcggaaatctgcccgcaggaaagagttcataatggctgagctcattcaaactgaaaaggcttatgtaagagacctccgggaatgtatggatacgtacctgtgggaaatgaccagtggcgtggaagagattccacctggcattgtaaacaaagaactcatcatcttcggaaacatgcaagaaatctacgaatttcataataacatattcctaaaggagctggaaaaatatgaacagttgccagaggatgttggacattgttttgttacttgggcagacaagtttcagatgtatgtcacatattgcaaaaataagcctgattctactcagctgatattggaacatgcagggtcctattttgacgagatacagcagcgacatggattagccaattccatttcttcctaccttattaaaccagttcagcgaataacgaagtatcagctccttttaaaagagctgctgacgtgctgtgaggaaggaaagggagagattaaagatggcctggaggtgatgctcagcgtgccgaagcgagccaatgatgccatgcacctcagcatgctggaagggtttgatgaaaacattgagtctcagggagaactcatcctacaggaatccttccaagtgtgggacccaaaaaccttaattcgaaagggtcgagaacggcatctcttcctttttgaaatgtccttagtatttagtaaagaagtgaaagattccagtgggagaagcaagtacctttataaaagcaaattgtttgtaagtataggcgttcagaattgtaagtctaaaggtaacacaattgcagtctttttgtaggtagagaagaattgttcattgtcttcagtttaacctcccaatctgtcctgaaatgttcaagtctgaattgtggtagggttttcatcttcagtgaaattatttcccaccctcaagtccactagagggtgctctggagtttatagacttaggaaacttgctcttcttaaatcctgtatcatataactgcaggataagaaaacatttcataagtgaaatcatttatctccggtgtgcttaactagctttataaataaaataatcatatctatg

SEQ ID NO: 194667 - DNA, 1547 bp, Homo sapiens
  Payload ID: 18469
  Gene Name: trio Rho guanine nucleotide exchange factor
  ENST ID: ENST00000620511
  CDS Start-End: 50-817
gagtgcagccgagctcgtcagtgcaattgaggaactcgtgaaaagcaagatggcactggaggatcgccccagctcactccttgttgaccagggagatagtagcagcccttccttcaacccttcggataattcccttctctcttcctcctcgcccattgatgagatggaagaaaggaaatccagctctttaaagagaagacactacgttttgcaagaactagtggagacagagcgtgactatgtgcgggaccttggctatgtggttgagggctacatggcacttatgaaagaagatggtgttcctgatgacatgaaaggaaaagacaaaattgtgttcggcaacatccatcagatttacgactggcacagagacttttttttaggagagttagagaagtgccttgaagatccagaaaaactaggatccctttttgttaaacacgagagaaggttgcacatgtacatagcttattgtcaaaataaaccaaagtctgagcacattgtctcagaatacattgataccttttttgaggacttaaagcagcgtcttggccacaggttacagctcacagatctgttgatcaaaccagtgcagagaatcatgaagtatcagctgttactgaaggacttcctcaagtattccaaaaaggccagcctggatacatcagaattagagagagctgtggaagtcatgtgcatagtacccaggcggtgcaacgacatgatgaacgtggggcggctgcaaggattcgacggtagggtcgtagccctgtgccatcggttcaaagagacttttcgtgaaatttgttggttttgaggactgtaaaagtgatttcatactctgaatataaaactggataatagggtaatgttttaaaatttattatgctattattcagaatgccaaagtattattttttttcccaaaatcagtctggacatttactactttttagactttttgacgttgaactttctgtataaaaattggctgggttttgagcttttggtaagaaataaaagccgattaagcactggccgccccgcggctggtacccaatgcccgagtcactgtggcagcattcgcactggtgtggggagtcctttcaactcaaggaggctgggtttctgggcaccctcgaagttttctggatgtctttttatctttctcgtgtgaactgcactacaaaagagaccagcccgcttcccaagccagccagacacctgggtcttgagccataaactggcgtagttaagctttgcagcttccagtgtattttatttattcttttgttgggtttttgtttgtttcttcttgtaaaattgtacagaaactttttaaaagaaattggattcgaaactggatgtgtattcgtaacctcataatttttatttgtgtattgtttcttttattatttcagttaaatttttacattattttgcatgtatatttctttgtacagagaccttacatgtttacacagtatgatgtgatgtaaatattttattttgccatcagttattttaaaaaattaaacatatttgcc

SEQ ID NO: 194668 - DNA, 4696 bp, Homo sapiens
  Payload ID: 18470
  Gene Name: triokinase/FMN cyclase
  Uniprot ID: Q3LXA3
  ENST ID: ENST00000394900
  CDS Start-End: 230-1957
accgcctcgcctctttccgccagcgcccgcaggacccggatgagagcgcacgcttcggggtctccgggaagtcgcggcgccttcggatgtggcggatgcggccgtgagccggcgggggaggtgctgctgctgcctccactgtactcagacccaggtagcacaggattgtccatcctccagcagctcagtgcaacggtgtgaactcagcctgtttcagagcctccacaccatgacctccaagaagctggtgaactcggtggctggctgtgctgatgacgctcttgctggcctggtggcctgcaaccccaacctgcagctcctgcagggccaccgcgtggccctccgttctgacctggacagcctcaagggccgggtggcactgctgtcgggtgggggctctggccatgagcctgcccatgctggtttcatagggaaggggatgctgactggggtcatcgcgggagctgtgttcacctccccggcagtgggcagcatcctggcagccatcagggccgtggcccaggccggcacagtggggacgctccttatcgtgaagaactacactggggatcggctcaacttcggcctggcccgggagcaggcccgggctgaaggcatcccggtggagatggtggtgattggggacgacagcgccttcactgtcctgaagaaggcaggccggcgggggctgtgcggcacggtgcttatacacaaggtggcaggtgctctggctgaggctggtgtggggctggaggagatcgcaaagcaggtgaacgtggtcgccaaggccatgggtaccctgggggtgagcttatcctcctgcagcgtccctggttccaaacccaccttcgagctctcagccgacgaggtggagctgggcctggggatccacggggaagctggtgtgcgccggataaagatggcaaccgccgatgagattgtgaaactcatgctcgaccacatgacaaacaccaccaacgcgtcccatgtgcctgtgcagcccggctcctcagttgtgatgatggtcaacaacctgggtggcctgtcattcctggaactgggcatcatagccgacgctaccgtccgctccctggagggccgcggggtgaagattgcccgtgccctggtgggcaccttcatgtcagcactggagatgcctggcatttctctcaccctcctgctggtggatgagcctctcctgaaactgatagatgctgaaaccactgcagcagcctggcctaacgtggctgcagtctccattactgggcggaagcggagccgggtagcccctgccgagccccaggaggcccctgattccactgctgcaggaggctcagcctcgaagcggatggcgctggtgctggaacgggtgtgcagcactctcctgggcctggaggaacacctgaatgccctggaccgggctgctggtgacggcgactgtggcaccacccacagccgtgcggccagagcaatccaggagtggctgaaggagggcccaccccctgccagccctgcccagctgctctccaagttgtctgtcctgctcctggagaagatgggaggctcatctggggcgctctatggcctgttcctgactgcggctgcacagcccctgaaggccaagaccagcctcccagcctggtctgctgccatggatgccggcctggaagccatgcagaagtatggcaaggctgctccaggggacaggactatgctggattctctgtgggcagcggggcaggagctccaagcctggaagagcccaggagctgatctgttacaagtcctgaccaaagcagtcaagagtgccgaagctgcagccgaggccaccaagaatatggaagctggagccggaagagccagttatatcagctcagcacggctggagcagccagaccccggggcggtggcagctgctgccatcctccgggccatcttggaggtcttgcagagctagggtgtgtgactgcctcccttggcctcagctcctctcactgctgtgctgaggtggcctttgtcacttccttctgccttccaaccctcaccttcccccggcctggccccattggcccaccctctaagttgagcaggaaatcctccaccaagcttccagaactacagacagcacccagagtgagctggagtgggtccccatgcctctccagcatgccctttccctttgcaggagggtggagtccctgggtcatgccctcccctgccagctctgggcttcagagataaggcattttccttgtgcagcctttacctggcaatcctaatttggttttaagactccctgtgaaatgctttccgcaccttaaccccagtgagcgtgaaaaagaaagttaataaactataatacatggaagcaagaaagacactgcctcctctgagggaccttttcccaagcatgtaaacaagggggcccacagccctggctgcaggcatcatgacccatcttctaccaggcagatctttattacctgagcccctaaggcagtgtctcctcagctgggctgcttccactgagacccccgacccatcccctttccagtacacacacctgatgcatgtaagaatggtagaggggcttttcttagcattgaattaataattcagtggctcctcgggagtcgaatgggcatttgggacaccagaaggaaaagaaatcatcatagtctaaggttcagttgtagatcaaaaaatgcagccaggccgggcacggtggctcacacctgcaatcccagcactttgggaggccaaggcaggcggatcccttacactcaggagttcaagaccagtctgggcaacatggtaaaaccctgtctctaccaaaaaatacaaaattagccaggcatagtagtgtgtgcctatagtcctaacttgggaggctgagttgggaggatggcttgggcccaggaggtcgaggctgcggtgagccataagcatgccactatactccagcctgggcaacaaagcgagaccctgtctcaaaaaaaaaaaaaaaaaaaaaagaaactgcagccaagccagcccctaggtctctttctagagcgatcactgatggcaccagggtgagcaggggcactgtatgcatgtggagacaaacagcacatgcctggcacacatgtagggtagggagtggttaaaggcactggctgtcgactcatacacatgatctgaaatctgattctgctttaacccggctacaggagctaaggcctattttttagccctttgggatctgtaaaatcagaatggtacccacctcatggggacatgaaaggattcaaatgaattgatgaagatgggccataaagcccagcacagtccaagtgctcactcactgagagttacggttatcacaggggttgggcccccagcccctcccaggtcatctgctctaccactagctggtaggaaagagcctcctgccctcccaacccccgtcacctacttggcccaaatttggctgcaggctccccgagtgcctgggcttctctacccagggtcctgtctgtcggctgcaccatacgtccctgaccacaaggcatccacgtgcacaggagtatgcgcccagcagctgggaaggaggctgacctcagacggtggcctgtggatcccagctctgtcatttcctggctgggtgacctcaacctagtcaccctttttgagtcttgttttctcagattatgaaataggaaaaatttccttcctcgtgagataagcacgtgccattagctattaaggacacgcacataaatgagctgcatgtgaatccacacatgccattccatgaagacagaggatcatgtggatctttggtgccttccggttggcccctccctaggtctgtgagggtcagacctgtcctgaggcttttacaaattggcccagaactcatttaaccacagcatcatttcattagagggctgttattagagactgaatgtttgtgtcccccccaaattcctgtgttgaaaggctcacccccactatggtagtgttaggacgtggggcctttgggaggtgatggggttatgagggtggagccccagagagctctcacgccctttccaccatgtgaggttatggtgagaagatggtctctgaggaagctggcccttgccacacaccacatttgccagcgccttcatcttggatgtctatagcctccagaactgtgagaaataaacacttgttgtttaagccacccaggctattatatttttgttatagcagcctgaacaaagacagctttgattcttaacatatttaatgaaactcgagcttcataaaccagtgaaatgcctacccctatggagatggggagctggtcatgggacccaggtgcctggaggacatcccagtggctttgaaggctccagccagtcaagacggtcaatattagcccttctgccaacatctggcaatgtgaggctggggtggacgttggcctgatgttgccaggagtaggatgctgatgctgccagagagtaggtgggctccaaaccccaggcttctcacttgcttactaagcacagcagtctgaagcttgggacctggcagtgcgtctttggagaaggcaaaaaagccacagcagcaacacttaggagcaagacccttcccgctctccaccctatttcctcccctgaagaagagcaacagctcaagctctagcatggcacagaacgct

SEQ ID NO: 194669 - DNA, 805 bp, Homo sapiens
  Payload ID: 18470
  Gene Name: triokinase/FMN cyclase
  ENST ID: ENST00000532173
  CDS Start-End: 320-805
ctttccgccagcgcccgcaggacccggatgagagcgcacgcttcggggtctccgggaagtcgcggcgccttcggatgtggcggatgcggccgtgagccggcgggggagttcctccagatccagctggtgccctcgcctgacgtttgaacgaccacctgctcacctcctcccttttgcgcgttgattcttcagacttcaaagggcccaccggtgctgctgctgcctccactgtactcagacccaggtagcacaggattgtccatcctccagcagctcagtgcaacggtgtgaactcagcctgtttcagagcctccacaccatgacctccaagaagctggtgaactcggtggctggctgtgctgatgacgctcttgctggcctggtggcctgcaaccccaacctgcagctcctgcagggccaccgcgtggccctccgttctgacctggacagcctcaagggccgggtggcactgctgtcgggtgggggctctggccatgagcctgcccatgctggtttcatagggaaggggatgctgactggggtcatcgcgggagctgtgttcacctccccggcagtgggcagcatcctggcagccatcagggccgtggcccaggccggcacagtggggacgctccttatcgtgaagaactacactggggatcggctcaacttcggcctggcccgggagcaggcccgggctgaaggcatcccggtggagatggtggtgattggggacgacagcgccttcactgtcctgaagaaggcaggccggcgggggctgtgcggcacggtgcttatacacaag

SEQ ID NO: 194670 - DNA, 1781 bp, Homo sapiens
  Payload ID: 18470
  Gene Name: triokinase/FMN cyclase
  ENST ID: ENST00000529479
  CDS Start-End: 1-1602
acctccaagaagctggtgaactcggtggctggctgtgctgatgacgctcttgctggcctggtggcctgcaaccccaacctgcagctcctgcagggccaccgcgtggccctccgttctgacctggacagcctcaagggccgggtggcactgctgtcgggtgggggctctggccatgagcctgcccatgctggtttcatagggaaggggatgctgactggggtcatcgcgggagctgtgttcacctccccggcagtgggcagcatcctggcagccatcagggccgtggcccaggccggcacagtggggacgctccttatcgtgaagaactacactggggatcggctcaacttcggcctggcccgggagcaggcccgggctgaaggcatcccggtggagatggtggtgattggggacgacagcgccttcactgtcctgaagaaggcaggccggcgggggctgtgcggcacggtgcttatacacaaggtggcaggtgctctggctgaggctggtgtggggctggaggagatcgcaaagcaggtgaacgtggtcgccaaggccatgggtaccctgggggtgagcttatcctcctgcagcgtccctggttccaaacccaccttcgagctctcagccgacgaggtggagctgggcctggggatccacggggaagctggtgtgcgccggataaagatggcaaccgccgatgagattgtgaaactcatgctcgaccacatgacaaacaccaccaacgcgtcccatgtgcctgtgcagcccggctcctcagttgtgatgatggtcaacaacctgggtggcctgtcattcctggaactgggcatcatagccgacgctaccgtccgctccctggagggccgcggggtgaagattgcccgtgccctggtgggcaccttcatgtcagcactggagatgcctggcatttctctcaccctcctgctggtggatgagcctctcctgaaactgatagatgctgaaaccactgcagcagcctggcctaacgtggctgcagtctccattactgggcggaagcggagccgggtagcccctgccgagccccaggaggcccctgattccactgctgcaggaggctcagcctcgaagcggatggcgctggtgctggaacgggtgtgcagcactctcctgggcctggaggaacacctgaatgccctggaccgggctgctggtgacggcgactgtggcaccacccacagccgtgcggccagagcaatccaggagtggctgaaggagggcccaccccctgccagccctgcccagctgctctccaagttgtctgtcctgctcctggagaagatgggaggctcatctggggcgctctatggcctgttcctgactgcggctgcacagcccctgaaggccaagaccagcctcccagcctggtctgctgccatggatgccggcctggaagccatgcagaagtatggcaaggctgctccaggggacaggactatgctggattctctgtgggcagcggggcaggagctccaagcctggaagagcccaggagctgatctgttacaagtcctgaccaaagcagtcaaggaaggaggcggcctggtgatctgcccttgaacctgctcccacaccccatcccccagagtgccgaagctgcagccgaggccaccaagaatatggaagctggagccggaagagccagttatatcagctcagcacggctggagcagccagaccccggggcggtggcagctgctgccatcctccgggccatcttggaggtcttgcagagctag

SEQ ID NO: 194671 - DNA, 558 bp, Homo sapiens
  Payload ID: 18470
  Gene Name: triokinase/FMN cyclase
  ENST ID: ENST00000524968
  CDS Start-End: 388-558
attctgaggatcactgtcctttagtgatgaagtgggtgctgttcctggacataaaggcagacctgtgcttgacatggattgatctgtcttctggcagtgaagtgcaggcatgaaccttggtcagccccacactcttctccatccgtagcccatgtactagagtttggacttggaccgaagtctggggcagctccctaattactagggtgctgaaggcgtgattgtgccagtcgactgcgagttccttccgcagcttgtatcgttacccactcctgcaggtgctgctgctgcctccactgtactcagacccaggtagcacaggattgtccatcctccagcagctcagtgcaacggtgtgaactcagcctgtttcagagcctccacaccatgacctccaagaagctggtgaactcggtggctggctgtgctgatgacgctcttgctggcctggtggcctgcaaccccaacctgcagctcctgcagggccaccgcgtggccctccgttctgacctggacagcctcaagggccgggtggcactgctgtcgggtgggggctct

SEQ ID NO: 194672 - DNA, 964 bp, Homo sapiens
  Payload ID: 18470
  Gene Name: triokinase/FMN cyclase
  ENST ID: ENST00000534084
  CDS Start-End: 1-660
agccgggtagcccctgccgagccccaggaggcccctgattccactgctgcaggaggctcagcctcgaagcggatggcgctggtgctggaacgggtgtgcagcactctcctgggcctggaggaacacctgaatgccctggaccgggctgctggtgacggcgactgtggcaccacccacagccgtgcggccagagcaatccaggagtggctgaaggagggcccaccccctgccagccctgcccagctgctctccaagttgtctgtcctgctcctggagaagatgggaggctcatctggggcgctctatggcctgttcctgactgcggctgcacagcccctgaaggccaagaccagcctcccagcctggtctgctgccatggatgccggcctggaagccatgcagaagtatggcaaggctgctccaggggacaggactatgctggattctctgtgggcagcggggcaggagctccaagcctggaagagcccaggagctgatctgttacaagtcctgaccaaagcagtcaagatcaggagtggacccaaccccaaaatctctcctcccttgggtgagtcctgtgatcacagggtgtatcttttgaagaccctattccctcctcttcaccttagagttggggaccccactgcactcacaaactgaagaaaagcttctcattaatgcccgaaatgacggatgcgatggacagagagaggatggcggctccaaaaaagacgtggataggttttaggaggctgcgcagccacatggacgcccagggcaggaggaagacagcaaagcccaggaaccactgtggacaaaagggaggacacacccgactgtgctatgtgtgaccaaagcacatcccaccccatcagtgcctcctccccatctctgctccctggctcttctttcacaactcaaaccttcccacctggcattgcccactaccgtgctagcttcctca

SEQ ID NO: 194673 - DNA, 4059 bp, Homo sapiens
  Payload ID: 18470
  Gene Name: triokinase/FMN cyclase
  ENST ID: ENST00000617083
  CDS Start-End: 74-1804
accacagcagtgtggctgcgcaggatgggggtatctgtactgaccacattctgacctccttctcactcctcccttgcagacctccaagaagctggtgaactcggtggctggctgtgctgatgacgctcttgctggcctggtggcctgcaaccccaacctgcagctcctgcagggccaccgcgtggccctccgttctgacctggacagcctcaagggccgggtggcactgctgtcgggtgggggctctggccatgagcctgcccatgctggtttcatagggaaggggatgctgactggggtcatcgcgggagctgtgttcacctccccggcagtgggcagcatcctggcagccatcagggccgtggcccaggccggcacagtggggacgctccttatcgtgaagaactacactggggatcggctcaacttcggcctggcccgggagcaggcccgggctgaaggcatcccggtggagatggtggtgattggggacgacagcgccttcactgtcctgaagaaggcaggccggcgggggctgtgcggcacggtgcttatacacaaggtggcaggtgctctggctgaggctggtgtggggctggaggagatcgcaaagcaggtgaacgtggtcgccaaggccatgggtaccctgggggtgagcttatcctcctgcagcgtccctggttccaaacccaccttcgagctctcagccgacgaggtggagctgggcctggggatccacggggaagctggtgtgcgccggataaagatggcaaccgccgatgagattgtgaaactcatgctcgaccacatgacaaacaccaccaacgcgtcccatgtgcctgtgcagcccggctcctcagttgtgatgatggtcaacaacctgggtggcctgtcattcctggaactgggcatcatagccgacgctaccgtccgctccctggagggccgcggggtgaagattgcccgtgccctggtgggcaccttcatgtcagcactggagatgcctggcatttctctcaccctcctgctggtggatgagcctctcctgaaactgatagatgctgaaaccactgcagcagcctggcctaacgtggctgcagtctccattactgggcggaagcggagccgggtagcccctgccgagccccaggaggcccctgattccactgctgcaggaggctcagcctcgaagcggatggcgctggtgctggaacgggtgtgcagcactctcctgggcctggaggaacacctgaatgccctggaccgggctgctggtgacggcgactgtggcaccacccacagccgtgcggccagagcaatccaggagtggctgaaggagggcccaccccctgccagccctgcccagctgctctccaagttgtctgtcctgctcctggagaagatgggaggctcatctggggcgctctatggcctgttcctgactgcggctgcacagcccctgaaggccaagaccagcctcccagcctggtctgctgccatggatgccggcctggaagccatgcagaagtatggcaaggctgctccaggggacaggactatgctggattctctgtgggcagcggggcaggagctccaagcctggaagagcccaggagctgatctgttacaagtcctgaccaaagcagtcaagagtgccgaagctgcagccgaggccaccaagaatatggaagctggagccggaagagccagttatatcagctcagcacggctggagcagccagaccccggggcggtggcagctgctgccatcctccgggccatcttggaggtcttgcagagctagggtgtgtgactgcctcccttggcctcagctcctctcactgctgtgctgaggtggcctttgtcacttccttctgccttccaaccctcaccttcccccggcctggccccattggcccaccctctaagttgagcaggaaatcctccaccaagcttccagaactacagacagcacccagagtgagctggagtgggtccccatgcctctccagcatgccctttccctttgcaggagggtggagtccctgggtcatgccctcccctgccagctctgggcttcagagataaggcattttccttgtgcagcctttacctggcaatcctaatttggttttaagactccctgtgaaatgctttccgcaccttaaccccagtgagcgtgaaaaagaaagttaataaactataatacatggaagcaagaaagacactgcctcctctgagggaccttttcccaagcatgtaaacaagggggcccacagccctggctgcaggcatcatgacccatcttctaccaggcagatctttattacctgagcccctaaggcagtgtctcctcagctgggctgcttccactgagacccccgacccatcccctttccagtacacacacctgatgcatgtaagaatggtagaggggcttttcttagcattgaattaataattcagtggctcctcgggagtcgaatgggcatttgggacaccagaaggaaaagaaatcatcatagtctaaggttcagttgtagatcaaaaaatgcagccaggccgggcacggtggctcacacctgcaatcccagcactttgggaggccaaggcaggcggatcccttacactcaggagttcaagaccagtctgggcaacatggtaaaaccctgtctctaccaaaaaatacaaaattagccaggcatagtagtgtgtgcctatagtcctaacttgggaggctgagttgggaggatggcttgggcccaggaggtcgaggctgcggtgagccataagcatgccactatactccagcctgggcaacaaagcgagaccctgtctcaaaaaaaaaaaaaaaaaaaaaagaaactgcagccaagccagcccctaggtctctttctagagcgatcactgatggcaccagggtgagcaggggcactgtatgcatgtggagacaaacagcacatgcctggcacacatgtagggtagggagtggttaaaggcactggctgtcgactcatacacatgatctgaaatctgattctgctttaacccggctacaggagctaaggcctattttttagccctttgggatctgtaaaatcagaatggtacccacctcatggggacatgaaaggattcaaatgaattgatgaagatgggccataaagcccagcacagtccaagtgctcactcactgagagttacggttatcacaggggttgggcccccagcccctcccaggtcatctgctctaccactagctggtaggaaagagcctcctgccctcccaacccccgtcacctacttggcccaaatttggctgcaggctccccgagtgcctgggcttctctacccagggtcctgtctgtcggctgcaccatacgtccctgaccacaaggcatccacgtgcacaggagtatgcgcccagcagctgggaaggaggctgacctcagacggtggcctgtggatcccagctctgtcatttcctggctgggtgacctcaacctagtcaccctttttgagtcttgttttctcagattatgaaataggaaaaatttccttcctcgtgagataagcacgtgccattagctattaaggacacgcacataaatgagctgcatgtgaatccacacatgccattccatgaagacagaggatcatgtggatctttggtgccttccggttggcccctccctaggtctgtgagggtcagacctgtcctgaggcttttacaaattggcccagaactcatttaaccacagcatcatttcattagagggctgttattagagactgaatgtttgtgtcccccccaaattcctgtgttgaaaggctcacccccactatggtagtgttaggacgtggggcctttgggaggtgatggggttatgagggtggagccccagagagctctcacgccctttccaccatgtgaggttatggtgagaagatggtctctgaggaagctggcccttgccacacaccacatttgccagcgccttcatcttggatgtctatagcctccagaactgtgagaaataaacacttgttgtttaagcc

SEQ ID NO: 194674 - DNA, 1763 bp, Homo sapiens
  Payload ID: 18471
  Gene Name: triosephosphate isomerase 1
  Uniprot ID: P60174
  ENST ID: ENST00000229270
  CDS Start-End: 338-1198
ggaggttgtctatcccacagttggagaggggccctctctgccccagtgggcgatctgggctacggccaagttgccaccagctagttccgcttgaaaaccacttctggccccgtgggggactcaagtcgccaagcgagggttcccctgagcgccggagctcacaggtctcgccttgtcccgaaagccccgcaatcgaggcggaggcgaccgagcccccgactctcctagaacgttgccacaagaagggggaacgtcggaacagtgcatcatcgggcggcggccggggcggcggcaggagggcgggcggggggcagggctccgggggactgggcgggccatggcggaggacggcgaggaggcggagttccacttcgcggcgctctatataagtgggcagtggccgcgactgcgcgcagacactgaccttcagcgcctcggctccagcgccatggcgccctccaggaagttcttcgttgggggaaactggaagatgaacgggcggaagcagagtctgggggagctcatcggcactctgaacgcggccaaggtgccggccgacaccgaggtggtttgtgctccccctactgcctatatcgacttcgcccggcagaagctagatcccaagattgctgtggctgcgcagaactgctacaaagtgactaatggggcttttactggggagatcagccctggcatgatcaaagactgcggagccacgtgggtggtcctggggcactcagagagaaggcatgtctttggggagtcagatgagctgattgggcagaaagtggcccatgctctggcagagggactcggagtaatcgcctgcattggggagaagctagatgaaagggaagctggcatcactgagaaggttgttttcgagcagacaaaggtcatcgcagataacgtgaaggactggagcaaggtcgtcctggcctatgagcctgtgtgggccattggtactggcaagactgcaacaccccaacaggcccaggaagtacacgagaagctccgaggatggctgaagtccaacgtctctgatgcggtggctcagagcacccgtatcatttatggaggctctgtgactggggcaacctgcaaggagctggccagccagcctgatgtggatggcttccttgtgggtggtgcttccctcaagcccgaattcgtggacatcatcaatgccaaacaatgagccccatccatcttccctacccttcctgccaagccagggactaagcagcccagaagcccagtaactgccctttccctgcatatgcttctgatggtgtcatctgctccttcctgtggcctcatccaaactgtatcttcctttactgtttatatcttcaccctgtaatggttgggaccaggccaatcccttctccacttactataatggttggaactaaacgtcaccaaggtggcttctccttggctgagagatggaaggcgtggtgggatttgctcctgggttccctaggccctagtgagggcagaagagaaaccatcctctcccttcttacaccgtgaggccaagatcccctcagaaggcaggagtgctgccctctcccatggtgcccgtgcctctgtgctgtgtatgtgaaccacccatgtgagggaataaacctggcactaggtcttgtggtttgtctgccttcactggacttgcccagataatcttcctttttgaggcagctatataaatgatcatttgtgcaagaaaaaaaaaaaaacaagaacaggtttctataacaaca

SEQ ID NO: 194675 - DNA, 1231 bp, Homo sapiens
  Payload ID: 18471
  Gene Name: triosephosphate isomerase 1
  Uniprot ID: P60174
  ENST ID: ENST00000396705
  CDS Start-End: 37-786
gcagacactgaccttcagcgcctcggctccagcgccatggcgccctccaggaagttcttcgttgggggaaactggaagatgaacgggcggaagcagagtctgggggagctcatcggcactctgaacgcggccaaggtgccggccgacaccgaggtggtttgtgctccccctactgcctatatcgacttcgcccggcagaagctagatcccaagattgctgtggctgcgcagaactgctacaaagtgactaatggggcttttactggggagatcagccctggcatgatcaaagactgcggagccacgtgggtggtcctggggcactcagagagaaggcatgtctttggggagtcagatgagctgattgggcagaaagtggcccatgctctggcagagggactcggagtaatcgcctgcattggggagaagctagatgaaagggaagctggcatcactgagaaggttgttttcgagcagacaaaggtcatcgcagataacgtgaaggactggagcaaggtcgtcctggcctatgagcctgtgtgggccattggtactggcaagactgcaacaccccaacaggcccaggaagtacacgagaagctccgaggatggctgaagtccaacgtctctgatgcggtggctcagagcacccgtatcatttatggaggctctgtgactggggcaacctgcaaggagctggccagccagcctgatgtggatggcttccttgtgggtggtgcttccctcaagcccgaattcgtggacatcatcaatgccaaacaatgagccccatccatcttccctacccttcctgccaagccagggactaagcagcccagaagcccagtaactgccctttccctgcatatgcttctgatggtgtcatctgctccttcctgtggcctcatccaaactgtatcttcctttactgtttatatcttcaccctgtaatggttgggaccaggccaatcccttctccacttactataatggttggaactaaacgtcaccaaggtggcttctccttggctgagagatggaaggcgtggtgggatttgctcctgggttccctaggccctagtgagggcagaagagaaaccatcctctcccttcttacaccgtgaggccaagatcccctcagaaggcaggagtgctgccctctcccatggtgcccgtgcctctgtgctgtgtatgtgaaccacccatgtgagggaataaacctggcactagg

SEQ ID NO: 194676 - DNA, 1587 bp, Homo sapiens
  Payload ID: 18471
  Gene Name: triosephosphate isomerase 1
  Uniprot ID: P60174
  ENST ID: ENST00000535434
  CDS Start-End: 528-1031
ctcgccggcgtccgcgtccccgcgccgagctgctcgggctccctgagccccagatctgaccccttcccttcggcaacctgaacgactcccgccttccacggaagggaccgagcccgtgccaaacaggctgagcgatttgggagtgaggagccatcctaccgctttccccaacctggaaacagcaaagcgcaaggcctctgagtcagttaggtctctgccacccacgggcaaaggatgctctcctccatcctccttcctccctccaccgaaatcggagagccgcgggcctgatccaaagaggcatccccttctcgttcattccccagaggcctcaatacaaaccccaggagttggcccctctccttttgctacaaatccttgccttgcaaaggggagaggtggtttgtgctccccctactgcctatatcgacttcgcccggcagaagctagatcccaagattgctgtggctgcgcagaactgctacaaagtgactaatggggcttttactggggagatcagccctggcatgatcaaagactgcggagccacgtgggtggtcctggggcactcagagagaaggcatgtctttggggagtcagatgagctgattgggcagaaagtggcccatgctctggcagagggactcggagtaatcgcctgcattggggagaagctagatgaaagggaagctggcatcactgagaaggttgttttcgagcagacaaaggtcatcgcagataacgtgaaggactggagcaaggtcgtcctggcctatgagcctgtgtgggccattggtactggcaagactgcaacaccccaacaggcccaggaagtacacgagaagctccgaggatggctgaagtccaacgtctctgatgcggtggctcagagcacccgtatcatttatggaggctctgtgactggggcaacctgcaaggagctggccagccagcctgatgtggatggcttccttgtgggtggtgcttccctcaagcccgaattcgtggacatcatcaatgccaaacaatgagccccatccatcttccctacccttcctgccaagccagggactaagcagcccagaagcccagtaactgccctttccctgcatatgcttctgatggtgtcatctgctccttcctgtggcctcatccaaactgtatcttcctttactgtttatatcttcaccctgtaatggttgggaccaggccaatcccttctccacttactataatggttggaactaaacgtcaccaaggtggcttctccttggctgagagatggaaggcgtggtgggatttgctcctgggttccctaggccctagtgagggcagaagagaaaccatcctctcccttcttacaccgtgaggccaagatcccctcagaaggcaggagtgctgccctctcccatggtgcccgtgcctctgtgctgtgtatgtgaaccacccatgtgagggaataaacctggcactaggtcttgtggtttgtctgccttcactggacttgcccagataatcttcctttttgaggcagctatataaatgatcatttgtgcaagaaaaaaaaaaaaacaagaacaggtttct

SEQ ID NO: 194677 - DNA, 374 bp, Homo sapiens
  Payload ID: 18471
  Gene Name: triosephosphate isomerase 1
  ENST ID: ENST00000462761
  CDS Start-End: 259-374
gactcccgccttccacggaagggaccgagcccgtgccaaacaggctgagcgatttgggagtgaggagccatcctaccgctttccccaacctggaaacagcaaagcgcaaggcctctgagtcagttagaggtggtttgtgctccccctactgcctatatcgacttcgcccggcagaagctagatcccaagattgctgtggctgcgcagaactgctacaaagtgactaatggggcttttactggggagatcagccctggcatgatcaaagactgcggagccacgtgggtggtcctggggcactcagagagaaggcatgtctttggggagtcagatgagctgattgggcagaaagtggcccatgctctggcagaggg

SEQ ID NO: 194678 - DNA, 839 bp, Homo sapiens
  Payload ID: 18471
  Gene Name: triosephosphate isomerase 1
  ENST ID: ENST00000493987
  CDS Start-End: 501-839
agctgctcgggctccctgagccccagatctgaccccttcccttcggcaacctgaacgactcccgccttccacggaagggaccgagcccgtgccaaacaggctgagcgatttgggagtgaggagccatcctaccgctttccccaacctggaaacagcaaagcgcaaggcctctgagtcagttaggtctctgccacccacgggcaaaggatgctctcctccatcctccttcctccctccaccgaaatcggagagccgcgggcctgatccaaagaggcatccccttctcgttcattccccagaggcctcaatacaaaccccaggagttggcccctctccttttgctacaaatccttgccttgcaaaggggagaggtggtttgtgctccccctactgcctatatcgacttcgcccggcagaagctagatcccaagattgctgtggctgcgcagaactgctacaaagtgactaatggggcttttactggggagatcagccctggcatgatcaaagactgcggagccacgtgggtggtcctggggcactcagagagaaggcatgtctttggggagtcagatgagctgattgggcagaaagtggcccatgctctggcagagggactcggagtaatcgcctgcattggggagaagctagatgaaagggaagctggcatcactgagaaggttgttttcgagcagacaaaggtcatcgcagataacgtgaaggactggagcaaggtcgtcctggcctatgagcctgtgtgggccattggtactggcaagactgcaacaccccaacaggcccaggaagtacacgagaagctccgaggatggctgaagtcc

SEQ ID NO: 194679 - DNA, 791 bp, Homo sapiens
  Payload ID: 18471
  Gene Name: triosephosphate isomerase 1
  Uniprot ID: P60174
  ENST ID: ENST00000488464
  CDS Start-End: 288-791
gactcctccccttcctcgccggcgtccgcgtccccgcgccgagctgctcgggctccctgagccccagatctgaccccttcccttcggcaacctgaacgactcccgccttccacggaagggaccgagcccgtgccaaacaggctgagcgatttgggaaggtggtttgtgctccccctactgcctatatcgacttcgcccggcagaagctagatcccaagattgctgtggctgcgcagaactgctacaaagtgactaatggggcttttactggggagatcagccctggcatgatcaaagactgcggagccacgtgggtggtcctggggcactcagagagaaggcatgtctttggggagtcagatgagctgattgggcagaaagtggcccatgctctggcagagggactcggagtaatcgcctgcattggggagaagctagatgaaagggaagctggcatcactgagaaggttgttttcgagcagacaaaggtcatcgcagataacgtgaaggactggagcaaggtcgtcctggcctatgagcctgtgtgggccattggtactggcaagactgcaacaccccaacaggcccaggaagtacacgagaagctccgaggatggctgaagtccaacgtctctgatgcggtggctcagagcacccgtatcatttatggaggctctgtgactggggcaacctgcaaggagctggccagccagcctgatgtggatggcttccttgtgggtggtgcttccctcaagcccgaattcgtggacatcatcaatgccaaacaatga

SEQ ID NO: 194680 - DNA, 820 bp, Homo sapiens
  Payload ID: 18471
  Gene Name: triosephosphate isomerase 1
  ENST ID: ENST00000495834
  CDS Start-End: 527-820
ccctctccttttgctacaaatccttgccttgcaaaggggaggtgaggatgggctattttagaagggaagcagggttgctccctggagaatgctgagtctgtgaggtgcctatgccgagaatagctcgaggaaattggagccccagctgttaaaagagcagagggcagggtgagggccgtggcctctcaggggtatctggaaggctcttcgagttgagtgcagacccagcctgggctggaaaatggacaaaggtcatcttgctggggtgaaaagggggagagcagaaccaagaagaagagggtgagggctggggggctccagggcactggttaggaattgtggggaatgaaggctttctttagtctcatccccctgtggtaccatcttgtcctcagaggtggtttgtgctccccctactgcctatatcgacttcgcccggcagaagctagatcccaagattgctgtggctgcgcagaactgctacaaagtgactaatggggcttttactggggagatcagccctggcatgatcaaagactgcggagccacgtgggtggtcctggggcactcagagagaaggcatgtctttggggagtcagatgagctgattgggcagaaagtggcccatgctctggcagagggactcggagtaatcgcctgcattggggagaagctagatgaaagggaagctggcatcactgagaaggttgttttcgagcagacaaaggtcatcgcagataacgtgaaggactggagcaaggtcgtcctggcctatgagcctgtgtgggccattggtactggcaagactgcaacaccccaa

SEQ ID NO: 194681 - DNA, 1460 bp, Homo sapiens
  Payload ID: 18471
  Gene Name: triosephosphate isomerase 1
  Uniprot ID: P60174
  ENST ID: ENST00000613953
  CDS Start-End: 37-897
gggcggggggcagggctccgggggactgggcgggccatggcggaggacggcgaggaggcggagttccacttcgcggcgctctatataagtgggcagtggccgcgactgcgcgcagacactgaccttcagcgcctcggctccagcgccatggcgccctccaggaagttcttcgttgggggaaactggaagatgaacgggcggaagcagagtctgggggagctcatcggcactctgaacgcggccaaggtgccggccgacaccgaggtggtttgtgctccccctactgcctatatcgacttcgcccggcagaagctagatcccaagattgctgtggctgcgcagaactgctacaaagtgactaatggggcttttactggggagatcagccctggcatgatcaaagactgcggagccacgtgggtggtcctggggcactcagagagaaggcatgtctttggggagtcagatgagctgattgggcagaaagtggcccatgctctggcagagggactcggagtaatcgcctgcattggggagaagctagatgaaagggaagctggcatcactgagaaggttgttttcgagcagacaaaggtcatcgcagataacgtgaaggactggagcaaggtcgtcctggcctatgagcctgtgtgggccattggtactggcaagactgcaacaccccaacaggcccaggaagtacacgagaagctccgaggatggctgaagtccaacgtctctgatgcggtggctcagagcacccgtatcatttatggaggctctgtgactggggcaacctgcaaggagctggccagccagcctgatgtggatggcttccttgtgggtggtgcttccctcaagcccgaattcgtggacatcatcaatgccaaacaatgagccccatccatcttccctacccttcctgccaagccagggactaagcagcccagaagcccagtaactgccctttccctgcatatgcttctgatggtgtcatctgctccttcctgtggcctcatccaaactgtatcttcctttactgtttatatcttcaccctgtaatggttgggaccaggccaatcccttctccacttactataatggttggaactaaacgtcaccaaggtggcttctccttggctgagagatggaaggcgtggtgggatttgctcctgggttccctaggccctagtgagggcagaagagaaaccatcctctcccttcttacaccgtgaggccaagatcccctcagaaggcaggagtgctgccctctcccatggtgcccgtgcctctgtgctgtgtatgtgaaccacccatgtgagggaataaacctggcactaggtcttgtggtttgtctgccttcactggacttgcccagataatcttcctttttgaggcagctatataaatgatcatttgtgcaagaaaaaaaaaaaaacaagaacaggtttctataacaa

SEQ ID NO: 194682 - DNA, 3007 bp, Homo sapiens
  Payload ID: 18472
  Gene Name: tripartite motif containing 10
  Uniprot ID: Q9UDY6
  ENST ID: ENST00000259941
  CDS Start-End: 77-1264
gagtgtgtgacccagcccttcccccgtggccaagcagagagagtggccttgaggaagccatagcagcaggaccagcatggcctctgctgcctctgtgaccagcctggcagatgaagtcaactgccccatctgtcagggtaccctgagggagccggtcactatcgactgcggccacaacttctgccgggcctgccttacccgctactgtgagataccaggcccagacctggaggagtcccctacttgcccactctgcaaagaacccttccgtcctgggagcttccggcccaactggcagctggctaacgtggtggagaacattgagcgcctccagctggtgtccacactgggtttgggagaggaggatgtctgccaagagcacggagagaagatctacttcttctgtgaggatgatgagatgcagttgtgcgtggtgtgccgggaggctggggagcacgctacccacaccatgcgcttcctggaggatgcagcggctccctatagggaacaaatccataagtgtcttaaatgtctaagaaaagagagagaggagattcaagaaatccagtcaagagaaaataaaaggatgcaagtcctcctgactcaggtgtccaccaagagacaacaggtgatttctgagttcgcacacctgaggaagtttctagaggaacagcagagcatcctcttagcacaattggagagccaggatggggacatcttgaggcaacgggatgaatttgatttgctggttgctggggagatctgccggtttagtgctcttattgaagaactggaggagaagaatgagaggccagcaagggagctcctgacggacatcagaagcactctaataagatgtgaaaccagaaagtgccggaaaccggtggctgtgtcgccagagctgggccagaggattcgggactttccccagcaggccctcccgctgcagagggagatgaagatgtttctggaaaaactatgctttgagttggactatgagccagctcacatttctctagaccctcagacttcccaccccaagctcctcttgtccgaggaccaccagcgagctcagttctcctacaaatggcagaactcaccagacaacccccagcgttttgaccgggccacctgtgttctggcccacactggcatcacaggggggagacacacgtgggtgtggatggccagggtacctggggactcaggctgctgccagttctgctcaccaccatccgtgcttggcacagaagtagctgcatagaaagagcactggatttgaagtcagaagacctgggttcttgaaccagcctgtcaaccagttgtatgactttaaacaaggcatctcacctcttttcatcttgttttcttccaataatgttagagttcatgtaatcacattctctagaaccatttagtttgtgttaactatgaaccaagcagtgtggtggccactggtgacttgaaaatatagagaaaaaaaaaacctgctctatatctgaaagagctcttgggaagacagagaaacataaagaggaaattacagcacagtgtggtgggtgttacgggaagtccaaccccagcattatgggagttcaggggaaggggcatagcccagcctggaaggagagggtgagtgggggatggctttctgaaaagggtggtctaaaggatgcctatggtcaatagggaaaagaggggaagaagcatcttaagaagaggaaacagcagagaactggctggatgacctgtgactctggagcactgggttgtctccattgtcattatgggcagatgtgtgccatccccagccgacgccactcactgcctccttcctcctggtgttgccacttctgggtgagattaaggtgcagggcctgggggcaggaggacataaggtatagccataaatcataacccagggaccacactcaaccctagggaaattgtcttcctgatcagttgattaccatctgaggtcaagaaatgagatagtgggagcaaatgggtcacaaatagctcagctgtgggctcagaaactgctaggtaaaagaattccagaaggaggccagggcataagttggatgacctatgaactttagtctaaagaattgagactaccgtaattgagactactgtagtgacatctgagaaatgggatggaagagtgaccatgttttattttcttgttcttgtcactattgtattttattttgcataatcatgcccttcactgacagtctccttaacatcatctgtttactctgctcagtgtaaactacaatgctctgtcatctccctactgggtctcctgggaggaggggagccatccagggtgcaaactcaaaggcagagggcacagcgtgcttaggcccaagcttagaattcaattgagaagttctgttgttcatccttacctcagcaggtagaaaagaggtggagatcagaagccagggattagagattgaattgctttccctgggagtgtgcagtatctcattaaaatgttgtatattcaaaaaaatacagacacacacaagtgcctatataatgataaaacatatccaaagcacccaaacctgtgattccagaaaagtagatcctatttttgtttatttttattggctttagctgtgtcttttgaaaggactattatcctctaaaatgtatgtgtatgaagatcctggcttgcagctcgggagctttacacaccttgtgtcactttatcttggtaacgagccaagatcatgcaaccagttcatccatgtctgacccaagagctcttaactgctatgctgcactgcctcattcagagatagatgcctgcatgggtcctggcgattattttaatgctggctacacccccacaggtgacttggattcagaaatacaatttatatttcttctttttaaattgttttattttatttttcttttaatagttatatgtcagtgagaacaatttatatgtcttacactgagaaataaaactgctcataagtgaaaa

SEQ ID NO: 194683 - DNA, 3546 bp, Homo sapiens
  Payload ID: 18472
  Gene Name: tripartite motif containing 10
  Uniprot ID: Q9UDY6
  ENST ID: ENST00000354038
  CDS Start-End: 77-1522
gagtgtgtgacccagcccttcccccgtggccaagcagagagagtggccttgaggaagccatagcagcaggaccagcatggcctctgctgcctctgtgaccagcctggcagatgaagtcaactgccccatctgtcagggtaccctgagggagccggtcactatcgactgcggccacaacttctgccgggcctgccttacccgctactgtgagataccaggcccagacctggaggagtcccctacttgcccactctgcaaagaacccttccgtcctgggagcttccggcccaactggcagctggctaacgtggtggagaacattgagcgcctccagctggtgtccacactgggtttgggagaggaggatgtctgccaagagcacggagagaagatctacttcttctgtgaggatgatgagatgcagttgtgcgtggtgtgccgggaggctggggagcacgctacccacaccatgcgcttcctggaggatgcagcggctccctatagggaacaaatccataagtgtcttaaatgtctaagaaaagagagagaggagattcaagaaatccagtcaagagaaaataaaaggatgcaagtcctcctgactcaggtgtccaccaagagacaacaggtgatttctgagttcgcacacctgaggaagtttctagaggaacagcagagcatcctcttagcacaattggagagccaggatggggacatcttgaggcaacgggatgaatttgatttgctggttgctggggagatctgccggtttagtgctcttattgaagaactggaggagaagaatgagaggccagcaagggagctcctgacggacatcagaagcactctaataagatgtgaaaccagaaagtgccggaaaccggtggctgtgtcgccagagctgggccagaggattcgggactttccccagcaggccctcccgctgcagagggagatgaagatgtttctggaaaaactatgctttgagttggactatgagccagctcacatttctctagaccctcagacttcccaccccaagctcctcttgtccgaggaccaccagcgagctcagttctcctacaaatggcagaactcaccagacaacccccagcgttttgaccgggccacctgtgttctggcccacactggcatcacaggggggagacacacgtgggtggtgagtatagacctggcccatgggggcagctgcaccgtgggcgtggtgagcgaggatgtgcagcggaagggggagcttcggctgcggccagaggagggggtgtgggctgtgaggctggcttggggcttcgtctcggctctgggctccttccccacacggctgaccctgaaggagcagccccggcaggtgagggtgtctcttgactatgaggtgggctgggtgaccttcaccaacgctgtcacccgagagcccatctacaccttcactgcctccttcactaggaaggtcattcccttctttgggctctggggccgagggtccagtttctccctgagctcctgagaaggagcagttacctactctcctctaagtacaggactcatatcaacccaagtaccatgtggacttgatccctggctgaatcacctggatgacttggaatagaaatgactgctttagaagatgggatggggccgggtggtaagggatagaagagaggactctcaatctactgatcaagtcctttccccaatgcccagtggatggccagggtacctggggactcaggctgctgccagttctgctcaccaccatccgtgcttggcacagaagtagctgcatagaaagagcactggatttgaagtcagaagacctgggttcttgaaccagcctgtcaaccagttgtatgactttaaacaaggcatctcacctcttttcatcttgttttcttccaataatgttagagttcatgtaatcacattctctagaaccatttagtttgtgttaactatgaaccaagcagtgtggtggccactggtgacttgaaaatatagagaaaaaaaaaacctgctctatatctgaaagagctcttgggaagacagagaaacataaagaggaaattacagcacagtgtggtgggtgttacgggaagtccaaccccagcattatgggagttcaggggaaggggcatagcccagcctggaaggagagggtgagtgggggatggctttctgaaaagggtggtctaaaggatgcctatggtcaatagggaaaagaggggaagaagcatcttaagaagaggaaacagcagagaactggctggatgacctgtgactctggagcactgggttgtctccattgtcattatgggcagatgtgtgccatccccagccgacgccactcactgcctccttcctcctggtgttgccacttctgggtgagattaaggtgcagggcctgggggcaggaggacataaggtatagccataaatcataacccagggaccacactcaaccctagggaaattgtcttcctgatcagttgattaccatctgaggtcaagaaatgagatagtgggagcaaatgggtcacaaatagctcagctgtgggctcagaaactgctaggtaaaagaattccagaaggaggccagggcataagttggatgacctatgaactttagtctaaagaattgagactaccgtaattgagactactgtagtgacatctgagaaatgggatggaagagtgaccatgttttattttcttgttcttgtcactattgtattttattttgcataatcatgcccttcactgacagtctccttaacatcatctgtttactctgctcagtgtaaactacaatgctctgtcatctccctactgggtctcctgggaggaggggagccatccagggtgcaaactcaaaggcagagggcacagcgtgcttaggcccaagcttagaattcaattgagaagttctgttgttcatccttacctcagcaggtagaaaagaggtggagatcagaagccagggattagagattgaattgctttccctgggagtgtgcagtatctcattaaaatgttgtatattcaaaaaaatacagacacacacaagtgcctatataatgataaaacatatccaaagcacccaaacctgtgattccagaaaagtagatcctatttttgtttatttttattggctttagctgtgtcttttgaaaggactattatcctctaaaatgtatgtgtatgaagatcctggcttgcagctcgggagctttacacaccttgtgtcactttatcttggtaacgagccaagatcatgcaaccagttcatccatgtctgacccaagagctcttaactgctatgctgcactgcctcattcagagatagatgcctgcatgggtcctggcgattattttaatgctggctacacccccacaggtgacttggattcagaaatacaatttatatttcttctttttaaattgttttattttatttttcttttaatagttatatgtcagtgagaacaatttatatgtcttacactgagaaataaaactgctcataagtgaaaa

SEQ ID NO: 194684 - DNA, 3007 bp, Homo sapiens
  Payload ID: 18472
  Gene Name: tripartite motif containing 10
  Uniprot ID: Q9UDY6
  ENST ID: ENST00000376704
  CDS Start-End: 77-1264
gagtgtgtgacccagcccttcccccgtggccaagcagagagagtggccttgaggaagccatagcagcaggaccagcatggcctctgctgcctctgtgaccagcctggcagatgaagtcaactgccccatctgtcagggtaccctgagggagccggtcactatcgactgcggccacaacttctgccgggcctgccttacccgctactgtgagataccaggcccagacctggaggagtcccctacttgcccactctgcaaagaacccttccgtcctgggagcttccggcccaactggcagctggctaacgtggtggagaacattgagcgcctccagctggtgtccacactgggtttgggagaggaggatgtctgccaagagcacggagagaagatctacttcttctgtgaggatgatgagatgcagttgtgcgtggtgtgccgggaggctggggagcacgctacccacaccatgcgcttcctggaggatgcagcggctccctatagggaacaaatccataagtgtcttaaatgtctaagaaaagagagagaggagattcaagaaatccagtcaagagaaaataaaaggatgcaagtcctcctgactcaggtgtccaccaagagacaacaggtgatttctgagttcgcacacctgaggaagtttctagaggaacagcagagcatcctcttagcacaattggagagccaggatggggacatcttgaggcaacgggatgaatttgatttgctggttgctggggagatctgccggtttagtgctcttattgaagaactggaggagaagaatgagaggccagcaagggagctcctgacggacatcagaagcactctaataagatgtgaaaccagaaagtgccggaaaccggtggctgtgtcgccagagctgggccagaggattcgggactttccccagcaggccctcccgctgcagagggagatgaagatgtttctggaaaaactatgctttgagttggactatgagccagctcacatttctctagaccctcagacttcccaccccaagctcctcttgtccgaggaccaccagcgagctcagttctcctacaaatggcagaactcaccagacaacccccaacgttttgaccgggccacctgtgttctggcccacactggcatcacaggggggagacacacgtgggtgtggatggccagggtacctggggactcaggctgctgccagttctgctcaccaccatccgtgcttggcacagaagtagctgcatagaaagggcactggatttgaagtcagaagacctgggttcttgaaccagcctgtcaaccagttgtatgactttaaacaaggcatctcacctcttttcatcttgttttcttccaataatgttagagttcatgtaatcacattctctagaaccatttagtttgtgttaactatgaaccaagcagtgtggtggccactggtgacttgaaaatatagagaaaaaaaaaacctgctctatatctgaaagagctcttgggaagacagagaaacataaagaggaaattacagcacagtgtggtgggtgttacgggaagtccaaccccagcattatgggagttcaggggaaggggcatagcccagcctggaaggagagggtgagtgggggatggctttctgaaaagggtggtctaaaggatgcctatggtcaatagggaaaagaggggaagaagcatcttaagaagaggaaacagcagagaactggctggatgacctgtgactctggagcactgggttgtctccattgtcattatgggcagatgtgtgccatccccagccgacgccactcactgcctccttcctcctggtgttgccacttctgggtgagattaaggtgcagggcctgggggcaggaggacataaggtatagccataaatcataacccagggaccacactcaaccctagggaaattgtcttcctgatcagttgattaccatctgaggtcaagaaatgagatagtgggagcaaatgggtcacaaatagctcagctgtgggctcagaaactgctaggtaaaagaattccagaaggaggccagggcataagttggatgacctatgaactttagtctaaagaattgagactaccgtaattgagactactgtagtgacatctgagaaatgggatggaagagtgaccatgttttattttcttgttcttgtcactattgtattttattttgcataatcatgcccttcactgacagtctccttaacatcatctgtttactctgctcagtgtaaactacaatgctctgtcatctccctactgggtctcctgggaggaggggagccatccagggtgcaaactcaaaggcagagggcacagcgtgcttaggcccaagcttagaattcaattgagaagttctgttgttcatccttacctcagcaggtagaaaagaggtggagatcagaagccagggattagagattgaattgctttccctgggagtgtgcagtatctcattaaaatgttgtatattcaaaaaaatacagacacacacaagtgcctatataatgataaaacatatccaaagcacccaaacctgtgattccagaaaagtagatcctatttttgtttatttttattggctttagctgtgtcttttgaaaggactattatcctctaaaatgtatgtgtatgaagatcctggcttgcagctcgggagctttacacaccttgtgtcactttatcttggtaacgagccaagatcatgcaaccagttcatccatgtctgacccaagagctcttaactgctatgctgcactgcctcattcagagatagatgcctgcatgggtcctggcgattattttaatgctggctacacccccacaggtgacttggattcagaaatacaatttatatttcttctttttaaattgttttattttatttttcttttaatagttatatgtcagtgagaacaatttatatgtcttacactgagaaataaaactgctcataagtgaaaa

SEQ ID NO: 194685 - DNA, 3546 bp, Homo sapiens
  Payload ID: 18472
  Gene Name: tripartite motif containing 10
  Uniprot ID: Q9UDY6
  ENST ID: ENST00000449208
  CDS Start-End: 77-1522
gagtgtgtgacccagcccttcccccgtggccaagcagagagagtggccttgaggaagccatagcagcaggaccagcatggcctctgctgcctctgtgaccagcctggcagatgaagtcaactgccccatctgtcagggtaccctgagggagccggtcactatcgactgcggccacaacttctgccgggcctgccttacccgctactgtgagataccaggcccagacctggaggagtcccctacttgcccactctgcaaagaacccttccgtcctgggagcttccggcccaactggcagctggctaacgtggtggagaacattgagcgcctccagctggtgtccacactgggtttgggagaggaggatgtctgccaagagcacggagagaagatctacttcttctgtgaggatgatgagatgcagttgtgcgtggtgtgccgggaggctggggagcacgctacccacaccatgcgcttcctggaggatgcagcggctccctatagggaacaaatccataagtgtcttaaatgtctaagaaaagagagagaggagattcaagaaatccagtcaagagaaaataaaaggatgcaagtcctcctgactcaggtgtccaccaagagacaacaggtgatttctgagttcgcacacctgaggaagtttctagaggaacagcagagcatcctcttagcacaattggagagccaggatggggacatcttgaggcaacgggatgaatttgatttgctggttgctggggagatctgccggtttagtgctcttattgaagaactggaggagaagaatgagaggccagcaagggagctcctgacggacatcagaagcactctaataagatgtgaaaccagaaagtgccggaaaccggtggctgtgtcgccagagctgggccagaggattcgggactttccccagcaggccctcccgctgcagagggagatgaagatgtttctggaaaaactatgctttgagttggactatgagccagctcacatttctctagaccctcagacttcccaccccaagctcctcttgtccgaggaccaccagcgagctcagttctcctacaaatggcagaactcaccagacaacccccagcgttttgaccgggccacctgtgttctggcccacactggcatcacaggggggagacacacgtgggtggtgagtatagacctggcccatgggggcagctgcaccgtgggcgtggtgagcgaggatgtgcagcggaagggggagcttcggctgcggccagaggagggggtgtgggctgtgaggctggcttggggcttcgtctcggctctgggctccttccccacacggctgaccctgaaggagcagccccggcaggtgagggtgtctcttgactatgaggtgggctgggtgaccttcaccaacgctgtcacccgagagcccatctacaccttcactgcctccttcactaggaaggtcattcccttctttgggctctggggccgagggtccagtttctccctgagctcctgagaaggagcagttacctactctcctctaagtacaggactcatatcaacccaagtaccatgtggacttgatccctggctgaatcacctggatgacttggaatagaaatgactgctttagaagatgggatggggccgggtggtaagggatagaagagaggactctcaatctactgatcaagtcctttccccaatgcccagtggatggccagggtacctggggactcaggctgctgccagttctgctcaccaccatccgtgcttggcacagaagtagctgcatagaaagggcactggatttgaagtcagaagacctgggttcttgaaccagcctgtcaaccagttgtatgactttaaacaaggcatctcacctcttttcatcttgttttcttccaataatgttagagttcatgtaatcacattctctagaaccatttagtttgtgttaactatgaaccaagcagtgtggtggccactggtgacttgaaaatatagagaaaaaaaaaacctgctctatatctgaaagagctcttgggaagacagagaaacataaagaggaaattacagcacagtgtggtgggtgttacgggaagtccaaccccagcattatgggagttcaggggaaggggcatagcccagcctggaaggagagggtgagtgggggatggctttctgaaaagggtggtctaaaggatgcctatggtcaatagggaaaagaggggaagaagcatcttaagaagaggaaacagcagagaactggctggatgacctgtgactctggagcactgggttgtctccattgtcattatgggcagatgtgtgccatccccagccgacgccactcactgcctccttcctcctggtgttgccacttctgggtgagattaaggtgcagggcctgggggcaggaggacataaggtatagccataaatcataacccagggaccacactcaaccctagggaaattgtcttcctgatcagttgattaccatctgaggtcaagaaatgagatagtgggagcaaatgggtcacaaatagctcagctgtgggctcagaaactgctaggtaaaagaattccagaaggaggccagggcataagttggatgacctatgaactttagtctaaagaattgagactaccgtaattgagactactgtagtgacatctgagaaatgggatggaatagtgaccatgttttattttcttgttcttgtcactattgtattttattttgcataatcatgcccttcactgacagtctccttaacatcatctgtttactctgctcagtgtaaactacaatgctctgtcatctccctactgggtctcctgggaggaggggagccatccagggtgcaaactcaaaggcagagggcacagcgtgcttaggcccaagcttagaattcaattgagaagttctgttgttcatccttacctcagcaggtagaaaagaggtggagatcagaagccagggattagagattgaattgctttccctgggagtgtgcagtatctcattaaaatgttgtatattcaaaaaaatacagacacacacaagtgcctatataatgataaaacatatccaaagcacccaaacctgtgattccagaaaagtagatcctatttttgtttatttttattggctttagctgtgtcttttgaaaggactattatcctctaaaatgtatgtgtatgaagatcctggcttgcagctcgggagctttacacaccttgtgtcactttatcttggtaacgagccaagatcatgcaaccagttcatccatgtctgacccaagagctcttaactgctatgctgcactgcctcattcagagatagatgcctgcatgggtcctggcgattattttaatgctggctacacccccacaggtgacttggattcagaaatacaatttatatttcttctttttaaattgttttattttatttttcttttaatagttatatgtcagtgagaacaatttatatgtcttacactgagaaataaaactgctcataagtgaaaa

SEQ ID NO: 194686 - DNA, 3546 bp, Homo sapiens
  Payload ID: 18472
  Gene Name: tripartite motif containing 10
  Uniprot ID: Q9UDY6
  ENST ID: ENST00000451727
  CDS Start-End: 77-1522
gagtgtgtgacccagcccttcccccgtggccaagcagagagagtggccttgaggaagccatagcagcaggaccagcatggcctctgctgcctctgtgaccagcctggcagatgaagtcaactgccccatctgtcagggtaccctgagggagccggtcactatcgactgcggccacaacttctgccgggcctgccttacccgctactgtgagataccaggcccagacctggaggagtcccctacttgcccactctgcaaagaacccttccgtcctgggagcttccggcccaactggcagctggctaacgtggtggagaacattgagcgcctccagctggtgtccacactgggtttgggagaggaggatgtctgccaagagcacggagagaagatctacttcttctgtgaggatgatgagatgcagttgtgcgtggtgtgccgggaggctggggagcacgctacccacaccatgcgcttcctggaggatgcagcggctccctatagggaacaaatccataagtgtcttaaatgtctaagaaaagagagagaggagattcaagaaatccagtcaagagaaaataaaaggatgcaagtcctcctgactcaggtgtccaccaagagacaacaggtgatttctgagttcgcacacctgaggaagtttctagaggaacagcagagcatcctcttagcacaattggagagccaggatggggacatcttgaggcaacgggatgaatttgatttgctggttgctggggagatctgccggtttagtgctcttattgaagaactggaggagaagaatgagaggccagcaagggagctcctgacggacatcagaagcactctaataagatgtgaaaccagaaagtgccggaaaccggtggctgtgtcgccagagctgggccagaggattcgggactttccccagcaggccctcccgctgcagagggagatgaagatgtttctggaaaaactatgctttgagttggactatgagccagctcacatttctctagaccctcagacttcccaccccaagctcctcttgtccgaggaccaccagcgagctcagttctcctacaaatggcagaactcaccagacaacccccagcgttttgaccgggccacctgtgttctggcccacactggcatcacaggggggagacacacgtgggtggtgagtatagacctggcccatgggggcagctgcaccgtgggcgtggtgagcgaggatgtgcagcggaagggggagcttcggctgcggccagaggagggggtgtgggctgtgaggctggcttggggcttcgtctcggctctgggctccttccccacacggctgaccctgaaggagcagccccggcaggtgagggtgtctcttgactatgaggtgggctgggtgaccttcaccaacgctgtcacccgagagcccatctacaccttcactgcctccttcactaggaaggtcattcccttctttgggctctggggccgagggtccagtttctccctgagctcctgagaaggagcagttacctactctcctctaagtacaggactcatatcaacccaagtaccatgtggacttgatccctggctgaatcacctggatgacttggaatagaaatgactgctttagaagatgggatggggccgggtggtaagggatagaagagaggactctcaatctactgatcaagtcctttccccaatgcccagtggatggccagggtacctggggactcaggctgctgccagttctgctcaccaccatccgtgcttggcacagaagtagctgcatagaaagggcactggatttgaagtcagaagacctgggttcttgaaccagcctgtcaaccagttgtatgactttaaacaaggcatctcacctcttttcatcttgttttcttccaataatgttagagttcatgtaatcacattctctagaaccatttagtttgtgttaactatgaaccaagcagtgtggtggccactggtgacttgaaaatatagagaaaaaaaaaacctgctctatatctgaaagagctcttgggaagacagagaaacataaagaggaaattacagcacagtgtggtgggtgttacgggaagtccaaccccagcattatgggagttcaggggaaggggcatagcccagcctggaaggagagggtgagtgggggatggctttctgaaaagggtggtctaaaggatgcctatggtcaatagggaaaagaggggaagaagcatcttaagaagaggaaacagcagagaactggctggatgacctgtgactctggagcactgggttgtctccattgtcattatgggcagatgtgtgccatccccagccgacgccactcactgcctccttcctcctggtgttgccacttctgggtgagattaaggtgcagggcctgggggcaggaggacataaggtatagccataaatcataacccagggaccacactcaaccctagggaaattgtcttcctgatcagttgattaccatctgaggtcaagaaatgagatagtgggagcaaatgggtcacaaatagctcagctgtgggctcagaaactgctaggtaaaagaattccagaaggaggccagggcataagttggatgacctatgaactttagtctaaagaattgagactaccgtaattgagactactgtagtgacatctgagaaatgggatggaagagtgaccatgttttattttcttgttcttgtcactattgtattttattttgcataatcatgcccttcactgacagtctccttaacatcatctgtttactctgctcagtgtaaactacaatgctctgtcatctccctactgggtctcctgggaggaggggagccatccagggtgcaaactcaaaggcagagggcacagcgtgcttaggcccaagcttagaattcaattgagaagttctgttgttcatccttacctcagcaggtagaaaagaggtggagatcagaagccagggattagagattgaattgctttccctgggagtgtgcagtatctcattaaaatgttgtatattcaaaaaaatacagacacacacaagtgcctatataatgataaaacatatccaaagcacccaaacctgtgattccagaaaagtagatcctatttttgtttatttttattggctttagctgtgtcttttgaaaggactattatcctctaaaatgtatgtgtatgaagatcctggcttgcagctcgggagctttacacaccttgtgtcactttatcttggtaacgagccaagatcatgcaaccagttcatccatgtctgacccaagagctcttaactgctatgctgcactgcctcattcagagatagatgcctgcatgggtcctggcgattattttaatgctggctacacccccacaggtgacttggattcagaaatacaatttatatttcttctttttaaattgttttattttatttttcttttaatagttatatgtcagtgagaacaatttatatgtcttacactgagaaataaaactgctcataagtgaaaa

SEQ ID NO: 194687 - DNA, 3007 bp, Homo sapiens
  Payload ID: 18472
  Gene Name: tripartite motif containing 10
  Uniprot ID: Q9UDY6
  ENST ID: ENST00000417411
  CDS Start-End: 77-1264
gagtgtgtgacccagcccttcccccgtggccaagcagagagagtggccttgaggaagccatagcagcaggaccagcatggcctctgctgcctctgtgaccagcctggcagatgaagtcaactgccccatctgtcagggtaccctgagggagccggtcactatcgactgcggccacaacttctgccgggcctgccttacccgctactgtgagataccaggcccagacctggaggagtcccctacttgcccactctgcaaagaacccttccgtcctgggagcttccggcccaactggcagctggctaacgtggtggagaacattgagcgcctccagctggtgtccacactgggtttgggagaggaggatgtctgccaagagcacggagagaagatctacttcttctgtgaggatgatgagatgcagttgtgcgtggtgtgccgggaggctggggagcacgctacccacaccatgcgcttcctggaggatgcagcggctccctatagggaacaaatccataagtgtcttaaatgtctaagaaaagagagagaggagattcaagaaatccagtcaagagaaaataaaaggatgcaagtcctcctgactcaggtgtccaccaagagacaacaggtgatttctgagttcgcacacctgaggaagtttctagaggaacagcagagcatcctcttagcacaattggagagccaggatggggacatcttgaggcaacgggatgaatttgatttgctggttgctggggagatctgccggtttagtgctcttattgaagaactggaggagaagaatgagaggccagcaagggagctcctgacggacatcagaagcactctaataagatgtgaaaccagaaagtgccggaaaccggtggctgtgtcgccagagctgggccagaggattcgggactttccccagcaggccctcccgctgcagagggagatgaagatgtttctggaaaaactatgctttgagttggactatgagccagctcacatttctctagaccctcagacttcccaccccaagctcctcttgtccgaggaccaccagcgagctcagttctcctacaaatggcagaactcaccagacaacccccagcgttttgaccgggccacctgtgttctggcccacactggcatcacaggggggagacacacgtgggtgtggatggccagggtacctggggactcaggctgctgccagttctgctcaccaccatccgtgcttggcacagaagtagctgcatagaaagggcactggatttgaagtcagaagacctgggttcttgaaccagcctgtcaaccagttgtatgactttaaacaaggcatctcacctcttttcatcttgttttcttccaataatgttagagttcatgtaatcacattctctagaaccatttagtttgtgttaactatgaaccaagcagtgtggtggccactggtgacttgaaaatatagagaaaaaaaaaacctgctctatatctgaaagagctcttgggaagacagagaaacataaagaggaaattacagcacagtgtggtgggtgttacgggaagtccaaccccagcattatgggagttcaggggaaggggcatagcccagcctggaaggagagggtgagtgggggatggctttctgaaaagggtggtctaaaggatgcctatggtcaatagggaaaagaggggaagaagcatcttaagaagaggaaacagcagagaactggctggatgacctgtgactctggagcactgggttgtctccattgtcattatgggcagatgtgtgccatccccagccgacgccactcactgcctccttcctcctggtgttgccacttctgggtgagattaaggtgcagggcctgggggcaggaggacataaggtatagccataaatcataacccagggaccacactcaaccctagggaaattgtcttcctgatcagttgattaccatctgaggtcaagaaatgagatagtgggagcaaatgggtcacaaatagctcagctgtgggctcagaaactgctaggtaaaagaattccagaaggaggccagggcataagttggatgacctatgaactttagtctaaagaattgagactaccgtaattgagactactgtagtgacatctgagaaatgggatggaagagtgaccatgttttattttcttgttcttgtcactattgtattttattttgcataatcatgcccttcactgacagtctccttaacatcatctgtttactctgctcagtgtaaactacaatgctctgtcatctccctactgggtctcctgggaggaggggagccatccagggtgcaaactcaaaggcagagggcacagcgtgcttaggcccaagcttagaattcaattgagaagttctgttgttcatccttacctcagcaggtagaaaagaggtggagatcagaagccagggattagagattgaattgctttccctgggagtgtgcagtatctcattaaaatgttgtatattcaaaaaaatacagacacacacaagtgcctatataatgataaaacatatccaaagcacccaaacctgtgattccagaaaagtagatcctatttttgtttatttttattggctttagctgtgtcttttgaaaggactattatcctctaaaatgtatgtgtatgaagatcctggcttgcagctcgggagctttacacaccttgtgtcactttatcttggtaacgagccaagatcatgcaaccagttcatccatgtctgacccaagagctcttaactgctatgctgcactgcctcattcagagatagatgcctgcatgggtcctggcgattattttaatgctggctacacccccacaggtgacttggattcagaaatacaatttatatttcttctttttaaattgttttattttatttttcttttaatagttatatgtcagtgagaacaatttatatgtcttacactgagaaataaaactgctcataagtgaaaa

SEQ ID NO: 194688 - DNA, 3007 bp, Homo sapiens
  Payload ID: 18472
  Gene Name: tripartite motif containing 10
  Uniprot ID: Q9UDY6
  ENST ID: ENST00000413055
  CDS Start-End: 77-1264
gagtgtgtgacccagcccttcccccgtggccaagcagagagagtggccttgaggaagccatagcagcaggaccagcatggcctctgctgcctctgtgaccagcctggcagatgaagtcaactgccccatctgtcagggtaccctgagggagccggtcactatcgactgcggccacaacttctgccgggcctgccttacccgctactgtgagataccaggcccagacctggaggagtcccctacttgcccactctgcaaagaacccttccgtcctgggagcttccggcccaactggcagctggctaacgtggtggagaacattgagcgcctccagctggtgtccacactgggtttgggagaggaggatgtctgccaagagcacggagagaagatctacttcttctgtgaggatgatgagatgcagttgtgcgtggtgtgccgggaggctggggagcacgctacccacaccatgcgcttcctggaggatgcagcggctccctatagggaacaaatccataagtgtcttaaatgtctaagaaaagagagagaggagattcaagaaatccagtcaagagaaaataaaaggatgcaagtcctcctgactcaggtgtccaccaagagacaacaggtgatttctgagttcgcacacctgaggaagtttctagaggaacagcagagcatcctcttagcacaattggagagccaggatggggacatcttgaggcaacgggatgaatttgatttgctggttgctggggagatctgccggtttagtgctcttattgaagaactggaggagaagaatgagaggccagcaagggagctcctgacggacatcagaagcactctaataagatgtgaaaccagaaagtgccggaaaccggtggctgtgtcgccagagctgggccagaggattcgggactttccccagcaggccctcccgctgcagagggagatgaagatgtttctggaaaaactatgctttgagttggactatgagccagctcacatttctctagaccctcagacttcccaccccaagctcctcttgtccgaggaccaccagcgagctcagttctcctacaaatggcagaactcaccagacaacccccagcgttttgaccgggccacctgtgttctggcccacactggcatcacaggggggagacacacgtgggtgtggatggccagggtacctggggactcaggctgctgccagttctgctcaccaccatccgtgcttggcacagaagtagctgcatagaaagggcactggatttgaagtcagaagacctgggttcttgaaccagcctgtcaaccagttgtatgactttaaacaaggcatctcacctcttttcatcttgttttcttccaataatgttagagttcatgtaatcacattctctagaaccatttagtttgtgttaactatgaaccaagcagtgtggtggccactggtgacttgaaaatatagagaaaaaaaaaacctgctctatatctgaaagagctcttgggaagacagagaaacataaagaggaaattacagcacagtgtggtgggtgttacgggaagtccaaccccagcattatgggagttcaggggaaggggcatagcccagcctggaaggagagggtgagtgggggatggctttctgaaaagggtggtctaaaggatgcctatggtcaatagggaaaagaggggaagaagcatcttaagaagaggaaacagcagagaactggctggatgacctgtgactctggagcactgggttgtctccattgtcattatgggcagatgtgtgccatccccagccgacgccactcactgcctccttcctcctggtgttgccacttctgggtgagattaaggtgcagggcctgggggcaggaggacataaggtatagccataaatcataacccagggaccacactcaaccctagggaaattgtcttcctgatcagttgattaccatctgaggtcaagaaatgagatagtgggagcaaatgggtcacaaatagctcagctgtgggctcagaaactgctaggtaaaagaattccagaaggaggccagggcataagttggatgacctatgaactttagtctaaagaattgagactaccgtaattgagactactgtagtgacatctgagaaatgggatggaatagtgaccatgttttattttcttgttcttgtcactattgtattttattttgcataatcatgcccttcactgacagtctccttaacatcatctgtttactctgctcagtgtaaactacaatgctctgtcatctccctactgggtctcctgggaggaggggagccatccagggtgcaaactcaaaggcagagggcacagcgtgcttaggcccaagcttagaattcaattgagaagttctgttgttcatccttacctcagcaggtagaaaagaggtggagatcagaagccagggattagagattgaattgctttccctgggagtgtgcagtatctcattaaaatgttgtatattcaaaaaaatacagacacacacaagtgcctatataatgataaaacatatccaaagcacccaaacctgtgattccagaaaagtagatcctatttttgtttatttttattggctttagctgtgtcttttgaaaggactattatcctctaaaatgtatgtgtatgaagatcctggcttgcagctcgggagctttacacaccttgtgtcactttatcttggtaacgagccaagatcatgcaaccagttcatccatgtctgacccaagagctcttaactgctatgctgcactgcctcattcagagatagatgcctgcatgggtcctggcgattattttaatgctggctacacccccacaggtgacttggattcagaaatacaatttatatttcttctttttaaattgttttattttatttttcttttaatagttatatgtcagtgagaacaatttatatgtcttacactgagaaataaaactgctcataagtgaaaa

SEQ ID NO: 194689 - DNA, 3007 bp, Homo sapiens; identical to SEQ ID NO: 194688
  Payload ID: 18472
  Gene Name: tripartite motif containing 10
  Uniprot ID: Q9UDY6
  ENST ID: ENST00000447465
  CDS Start-End: 77-1264

SEQ ID NO: 194690 - DNA, 3546 bp, Homo sapiens; identical to SEQ ID NO: 194685
  Payload ID: 18472
  Gene Name: tripartite motif containing 10
  Uniprot ID: Q9UDY6
  ENST ID: ENST00000431258
  CDS Start-End: 77-1522

SEQ ID NO: 194691 - DNA, 3546 bp, Homo sapiens
  Payload ID: 18472
  Gene Name: tripartite motif containing 10
  Uniprot ID: Q9UDY6
  ENST ID: ENST00000449742
  CDS Start-End: 77-1522
gagtgtgtgacccagcccttcccccgtggccaagcagagagagtggccttgaggaagccatagcagcaggaccagcatggcctctgctgcctctgtgaccagcctggcagatgaagtcaactgccccatctgtcagggtaccctgagggagccggtcactatcgactgcggccacaacttctgccgggcctgccttacccgctactgtgagataccaggcccagacctggaggagtcccctacttgcccactctgcaaagaacccttccgtcctgggagcttccggcccaactggcagctggctaacgtggtggagaacattgagcgcctccagctggtgtccacactgggtttgggagaggaggatgtctgccaagagcacggagagaagatctacttcttctgtgaggatgatgagatgcagttgtgcgtggtgtgccgggaggctggggagcacgctacccacaccatgcgcttcctggaggatgcagcggctccctatagggaacaaatccataagtgtcttaaatgtctaagaaaagagagagaggagattcaagaaatccagtcaagagaaaataaaaggatgcaagtcctcctgactcaggtgtccaccaagagacaacaggtgatttctgagttcgcacacctgaggaagtttctagaggaacagcagagcatcctcttagcacaattggagagccaggatggggacatcttgaggcaacgggatgaatttgatttgctggttgctggggagatctgccggtttagtgctcttattgaagaactggaggagaagaatgagaggccagcaagggagctcctgacggacatcagaagcactctaataagatgtgaaaccagaaagtgccggaaaccggtggctgtgtcgccagagctgggccagaggattcgggactttccccagcaggccctcccgctgcagagggagatgaagatgtttctggaaaaactatgctttgagttggactatgagccagctcacatttctctagaccctcagacttcccaccccaagctcctcttgtccgaggaccaccagcgagctcagttctcctacaaatggcagaactcaccagacaacccccaacgttttgaccgggccacctgtgttctggcccacactggcatcacaggggggagacacacgtgggtggtgagtatagacctggcccatgggggcagctgcaccgtgggcgtggtgagcgaggatgtgcagcggaagggggagcttcggctgcggccagaggagggggtgtgggctgtgaggctggcttggggcttcgtctcggctctgggctccttccccacacggctgaccctgaaggagcagccccggcaggtgagggtgtctcttgactatgaggtgggctgggtgaccttcaccaacgctgtcacccgagagcccatctacaccttcactgcctccttcactaggaaggtcattcccttctttgggctctggggccgagggtccagtttctccctgagctcctgagaaggagcagttacctactctcctctaagtacaggactcatatcaacccaagtaccatgtggacttgatccctggctgaatcacctggatgacttggaatagaaatgactgctttagaagatgggatggggccgggtggtaagggatagaagagaggactctcaatctactgatcaagtcctttccccaatgcccagtggatggccagggtacctggggactcaggctgctgccagttctgctcaccaccatccgtgcttggcacagaagtagctgcatagaaagggcactggatttgaagtcagaagacctgggttcttgaaccagcctgtcaaccagttgtatgactttaaacaaggcatctcacctcttttcatcttgttttcttccaataatgttagagttcatgtaatcacattctctagaaccatttagtttgtgttaactatgaaccaagcagtgtggtggccactggtgacttgaaaatatagagaaaaaaaaaacctgctctatatctgaaagagctcttgggaagacagagaaacataaagaggaaattacagcacagtgtggtgggtgttacgggaagtccaaccccagcattatgggagttcaggggaaggggcatagcccagcctggaaggagagggtgagtgggggatggctttctgaaaagggtggtctaaaggatgcctatggtcaatagggaaaagaggggaagaagcatcttaagaagaggaaacagcagagaactggctggatgacctgtgactctggagcactgggttgtctccattgtcattatgggcagatgtgtgccatccccagccgacgccactcactgcctccttcctcctggtgttgccacttctgggtgagattaaggtgcagggcctgggggcaggaggacataaggtatagccataaatcataacccagggaccacactcaaccctagggaaattgtcttcctgatcagttgattaccatctgaggtcaagaaatgagatagtgggagcaaatgggtcacaaatagctcagctgtgggctcagaaactgctaggtaaaagaattccagaaggaggccagggcataagttggatgacctatgaactttagtctaaagaattgagactaccgtaattgagactactgtagtgacatctgagaaatgggatggaagagtgaccatgttttattttcttgttcttgtcactattgtattttattttgcataatcatgcccttcactgacagtctccttaacatcatctgtttactctgctcagtgtaaactacaatgctctgtcatctccctactgggtctcctgggaggaggggagccatccagggtgcaaactcaaaggcagagggcacagcgtgcttaggcccaagcttagaattcaattgagaagttctgttgttcatccttacctcagcaggtagaaaagaggtggagatcagaagccagggattagagattgaattgctttccctgggagtgtgcagtatctcattaaaatgttgtatattcaaaaaaatacagacacacacaagtgcctatataatgataaaacatatccaaagcacccaaacctgtgattccagaaaagtagatcctatttttgtttatttttattggctttagctgtgtcttttgaaaggactattatcctctaaaatgtatgtgtatgaagatcctggcttgcagctcgggagctttacacaccttgtgtcactttatcttggtaacgagccaagatcatgcaaccagttcatccatgtctgacccaagagctcttaactgctatgctgcactgcctcattcagagatagatgcctgcatgggtcctggcgattattttaatgctggctacacccccacaggtgacttggattcagaaatacaatttatatttcttctttttaaattgttttattttatttttcttttaatagttatatgtcagtgagaacaatttatatgtcttacactgagaaataaaactgctcataagtgaaaa

SEQ ID NO: 194692 - DNA, 3546 bp, Homo sapiens; identical to SEQ ID NO: 194685
  Payload ID: 18472
  Gene Name: tripartite motif containing 10
  Uniprot ID: Q9UDY6
  ENST ID: ENST00000426996
  CDS Start-End: 77-1522

SEQ ID NO: 194693 - DNA, 3007 bp, Homo sapiens; identical to SEQ ID NO: 194688
  Payload ID: 18472
  Gene Name: tripartite motif containing 10
  Uniprot ID: Q9UDY6
  ENST ID: ENST00000446013
  CDS Start-End: 77-1264

SEQ ID NO: 194694 - DNA, 3549 bp, Homo sapiens
  Payload ID: 18472
  Gene Name: tripartite motif containing 10
  Uniprot ID: Q9UDY6
  ENST ID: ENST00000448645
  CDS Start-End: 77-1522
gagtgtgtgacccagcccttcccccgtggccaagcagagagagtggccttgaggaagccatagcagcaggaccagcatggcctctgctgcctctgtgaccagcctggcagatgaagtcaactgccccatctgtcagggtaccctgagggagccggtcactatcgactgcggccacaacttctgccgggcctgccttacccgctactgtgagataccaggcccagacctggaggagtcccctacttgcccactctgcaaagaacccttccgtcctgggagcttccggcccaactggcagctggctaacgtggtggagaacattgagcgcctccagctggtgtccacactgggtttgggagaggaggatgtctgccaagagcacggagagaagatctacttcttctgtgaggatgatgagatgcagttgtgcgtggtgtgccgggaggctggggagcacgctacccacaccatgcgcttcctggaggatgcagcggctccctatagggaacaaatccataagtgtcttaaatgtctaagaaaagagagagaggagattcaagaaatccagtcaagagaaaataaaaggatgcaagtcctcctgactcaggtgtccaccaagagacaacaggtgatttctgagttcgcacacctgaggaagtttctagaggaacagcagagcatcctcttagcacaattggagagccaggatggggacatcttgaggcaacgggatgaatttgatttgctggttgctggggagatctgccggtttagtgctcttattgaagaactggaggagaagaatgagaggccagcaagggagctcctgacggacatcagaagcactctaataagatgtgaaaccagaaagtgccggaaaccggtggctgtgtcgccagagctgggccagaggattcgggactttccccagcaggccctcccgctgcagagggagatgaagatgtttctggaaaaactatgctttgagttggactatgagccagctcacatttctctagaccctcagacttcccaccccaagctcctcttgtccgaggaccaccagcgagctcagttctcctacaaatggcagaactcaccagacaacccccagcgttttgaccgggccacctgtgttctggcccacactggcatcacaggggggagacacacgtgggtggtgagtatagacctggcccatgggggcagctgcaccgtgggcgtggtgagcgaggatgtgcagcggaagggggagcttcggctgcggccagaggagggggtgtgggctgtgaggctggcttggggcttcgtctcggctctgggctccttccccacacggctgaccctgaaggagcagccccggcaggtgagggtgtctcttgactatgaggtgggctgggtgaccttcaccaacgctgtcacccgagagcccatctacaccttcactgcctccttcactaggaaggtcattcccttctttgggctctggggccgagggtccagtttctccctgagctcctgagaaggagcagttacctactctcctctaagtacaggactcatatcaacccaagtaccatgtggacttgatccctggctgaatcacctggatgacttggaatagaaatgactgctttagaagatgggatggggccgggtggtgagggatagaagagaggactctcaatctactgatcaagtcctttccccaatgcccagtggatggccagggtacctggggactcaggctgctgccagttctgctcaccaccatccgtgcttggcacagaagtagctgcatagaaagagcactggatttgaagtcagaagacctgggttcttgaaccagcctgtcaaccagttgtatgactttaaacaaggcatctcacctcttttcatcttgttttcttccaataatgttagagttcatgtaatcacattctctagaaccatttagtttgtgttaactatgaaccaagcagtgtggtggccactggtgacttgaaaatgtagagaaaaaaaaaacctgctctatatctgaaagagctcttgggaagacagagaaacataaagaggaaattatagcacagtgtggtgggtgttacgggaagtccaaccccagcattatgggagttcaggggaaggggcatagcccagcctggaaggagaggatgagtgggggatggctttctgaaaagggtagtctaaaggatgcctatagtcaatagggaaaagaggggaagaagcatcttaagaagaggaaacagcagagaactggctggatgacctgtgactctggagcactgggttgtctccattgtccttatgggcagatgtgtgccatccccagccgacaccactcactgcctccttcctcctggtgttgccacttctgggtgagattaaggtgcagggcctgggggcaggaggacataaggtatagccataaatcataacccagggaccacactcaaccctagggaaattgtcttcctgatcagttgattaccatctgaggtcaagaaatgagatagtgggagcaaatgggtcacaaatagctcagctgtgggctcagaaactgctaggtaaaagaattccagaaggaggccagggcataagttggatgacctatgacctttagtctaaagaattgagactaccgtaattgagactactgtagtgacatctgagaaatgggatggaagagtgaccatgttttattttcttgttcttgtcactattgtattttattttgcataatcatgcccttcactgacagtctccttaacatcatctgtttactctgctcagatgtaaaatacaatgctctgtcatctccctactgggtctcctgggaggaggggagccatccagggtgcaaactcaaaggcagagggcacagcgtgcttaggcccaagcttagaattcaattgagaagttctgttgttcatccttacctcagcaggtagaaaagaggtggagatcagaagccagggattaaagattgaattgctttccctgggagtgtgcagtatctcattaaaatgttgtatattcaaaaaaatacagacacacacaagtgcctatataatgataaaacatatgcaaagcacccaaacctgtgattccagaaaggtagatcctatttttctgtttatttttattggctttagctgtgtcttttgaaaggactattatcctctaaaatgtatgtgtatgaagatcctggcttgcagctcgggagctttacacaccttgtgtcactttatcttggtaacgagccaagatcatgcaaccagttcatccatgtctgacccaagagctcttaactgctatgctgcactgcctcattcagagatagatgcctgcatgggtcctggcgattattttaatgctggctacacccccacaggtgacttggattcagaaatacaatttatatttcttctttttaaattgttttattttatttttcttttaatagttatatgtcagtgagaacaatttatatgtcttacactgagaaataaaactgctcataagtgaaaa

SEQ ID NO: 194695 - DNA, 3009 bp, Homo sapiens
  Payload ID: 18472
  Gene Name: tripartite motif containing 10
  Uniprot ID: Q9UDY6
  ENST ID: ENST00000416714
  CDS Start-End: 76-1263
agtgtgtgacccagcccttcccccgtggccaagcagagagagtggccttgaggaagccatagcagcaggaccagcatggcctctgctgcctctgtgaccagcctggcagatgaagtcaactgccccatctgtcagggtaccctgagggagccggtcactatcgactgcggccacaacttctgccgggcctgccttacccgctactgtgagataccaggcccagacctggaggagtcccctacttgcccactctgcaaagaacccttccgtcctgggagcttccggcccaactggcagctggctaacgtggtggagaacattgagcgcctccagctggtgtccacactgggtttgggagaggaggatgtctgccaagagcacggagagaagatctacttcttctgtgaggatgatgagatgcagttgtgcgtggtgtgccgggaggctggggagcacgctacccacaccatgcgcttcctggaggatgcagcggctccctatagggaacaaatccataagtgtcttaaatgtctaagaaaagagagagaggagattcaagaaatccagtcaagagaaaataaaaggatgcaagtcctcctgactcaggtgtccaccaagagacaacaggtgatttctgagttcgcacacctgaggaagtttctagaggaacagcagagcatcctcttagcacaattggagagccaggatggggacatcttgaggcaacgggatgaatttgatttgctggttgctggggagatctgccggtttagtgctcttattgaagaactggaggagaagaatgagaggccagcaagggagctcctgacggacatcagaagcactctaataagatgtgaaaccagaaagtgccggaaaccggtggctgtgtcgccagagctgggccagaggattcgggactttccccagcaggccctcccgctgcagagggagatgaagatgtttctggaaaaactatgctttgagttggactatgagccagctcacatttctctagaccctcagacttcccaccccaagctcctcttgtccgaggaccaccagcgagctcagttctcctacaaatggcagaactcaccagacaacccccagcgttttgaccgggccacctgtgttctggcccacactggcatcacaggggggagacacacgtgggtgtggatggccagggtacctggggactcaggctgctgccagttctgctcaccaccatccgtgcttggcacagaagtagctgcatagaaagagcactggatttgaagtcagaagacctgggttcttgaaccagcctgtcaaccagttgtatgactttaaacaaggcatctcacctcttttcatcttgttttcttccaataatgttagagttcatgtaatcacattctctagaaccatttagtttgtgttaactatgaaccaagcagtgtggtggccactggtgacttgaaaatgtagagaaaaaaaaaacctgctctatatctgaaagagctcttgggaagacagagaaacataaagaggaaattatagcacagtgtggtgggtgttacgggaagtccaaccccagcattatgggagttcaggggaaggggcatagcccagcctggaaggagaggatgagtgggggatggctttctgaaaagggtagtctaaaggatgcctatagtcaatagggaaaagaggggaagaagcatcttaagaagaggaaacagcagagaactggctggatgacctgtgactctggagcactgggttgtctccattgtccttatgggcagatgtgtgccatccccagccgacaccactcactgcctccttcctcctggtgttgccacttctgggtgagattaaggtgcagggcctgggggcaggaggacataaggtatagccataaatcataacccagggaccacactcaaccctagggaaattgtcttcctgatcagttgattaccatctgaggtcaagaaatgagatagtgggagcaaatgggtcacaaatagctcagctgtgggctcagaaactgctaggtaaaagaattccagaaggaggccagggcataagttggatgacctatgacctttagtctaaagaattgagactaccgtaattgagactactgtagtgacatctgagaaatgggatggaagagtgaccatgttttattttcttgttcttgtcactattgtattttattttgcataatcatgcccttcactgacagtctccttaacatcatctgtttactctgctcagatgtaaaatacaatgctctgtcatctccctactgggtctcctgggaggaggggagccatccagggtgcaaactcaaaggcagagggcacagcgtgcttaggcccaagcttagaattcaattgagaagttctgttgttcatccttacctcagcaggtagaaaagaggtggagatcagaagccagggattaaagattgaattgctttccctgggagtgtgcagtatctcattaaaatgttgtatattcaaaaaaatacagacacacacaagtgcctatataatgataaaacatatgcaaagcacccaaacctgtgattccagaaaggtagatcctatttttctgtttatttttattggctttagctgtgtcttttgaaaggactattatcctctaaaatgtatgtgtatgaagatcctggcttgcagctcgggagctttacacaccttgtgtcactttatcttggtaacgagccaagatcatgcaaccagttcatccatgtctgacccaagagctcttaactgctatgctgcactgcctcattcagagatagatgcctgcatgggtcctggcgattattttaatgctggctacacccccacaggtgacttggattcagaaatacaatttatatttcttctttttaaattgttttattttatttttcttttaatagttatatgtcagtgagaacaatttatatgtcttacactgagaaataaaactgctcataagtgaaaa

SEQ ID NO: 194696 - DNA, 3549 bp, Homo sapiens
  Payload ID: 18472
  Gene Name: tripartite motif containing 10
  Uniprot ID: Q9UDY6
  ENST ID: ENST00000456988
  CDS Start-End: 77-1522
gagtgtgtgacccagcccttcccccgtggccaagcagagagagtggccttgaggaagccatagcagcaggaccagcatggcctctgctgcctctgtgaccagcctggcagatgaagtcaactgccccatctgtcagggtaccctgagggagccggtcactatcgactgcggccacaacttctgccgggcctgccttacccgctactgtgagataccaggcccagacctggaggagtcccctacttgcccactctgcaaagaacccttccgtcctgggagcttccggcccaactggcagctggctaacgtggtggagaacattgagcgcctccagctggtgtccacactgggtttgggagaggaggatgtctgccaagagcacggagagaagatctacttcttctgtgaggatgatgagatgcagttgtgcgtggtgtgccgggaggctggggagcacgctacccacaccatgcgcttcctggaggatgcagcggctccctatagggaacaaatccataagtgtcttaaatgtctaagaaaagagagagaggagattcaagaaatccagtcaagagaaaataaaaggatgcaagtcctcctgactcaggtgtccaccaagagacaacaggtgatttctgagttcgcacacctgaggaagtttctagaggaacagcagagcatcctcttagcacaattggagagccaggatggggacatcttgaggcaacgggatgaatttgatttgctggttgctggggagatctgccggtttagtgctcttattgaagaactggaggagaagaatgagaggccagcaagggagctcctgacggacatcagaagcactctaataagatgtgaaaccagaaagtgccggaaaccggtggctgtgtcgccagagctgggccagaggattcgggactttccccagcaggccctcccgctgcagagggagatgaagatgtttctggaaaaactatgctttgagttggactatgagccagctcacatttctctagaccctcagacttcccaccccaagctcctcttgtccgaggaccaccagcgagctcagttctcctacaaatggcagaactcaccagacaacccccagcgttttgaccgggccacctgtgttctggcccacactggcatcacaggggggagacacacgtgggtggtgagtatagacctggcccatgggggcagctgcaccgtgggcgtggtgagcgaggatgtgcagcggaagggggagcttcggctgcggccagaggagggggtgtgggctgtgaggctggcttggggcttcgtctcggctctgggctccttccccacacggctgaccctgaaggagcagccccggcaggtgagggtgtctcttgactatgaggtgggctgggtgaccttcaccaacgctgtcacccgagagcccatctacaccttcactgcctccttcactaggaaggtcattcccttctttgggctctggggccgagggtccagtttctccctgagctcctgagaaggagcagttacctactctcctctaagtacaggactcatatcaacccaagtaccatgtggacttgatccctggctgaatcacctggatgacttggaatagaaatgactgctttagaagatgggatggggccgggtggtaagggatagaagagaggactctcaatctactgatcaagtcctttccccaatgcccagtggatggccagggtacctggggactcaggctgctgccagttctgctcaccaccatccgtgcttggcacagaagtagctgcatagaaagagcactggatttgaagtcagaagacctgggttcttgaaccagcctgtcaaccagttgtatgactttaaacaaggcatctcacctcttttcatcttgttttcttccaataatgttagagttcatgtaatcacattctctagaaccatttagtttgtgttaactatgaaccaagcagtgtggtggccactggtgacttgaaaatgtagagaaaaaaaaaacctgctctatatctgaaagagctcttgggaagacagagaaacataaagaggaaattatagcacagtgtggtgggtgttacgggaagtccaaccccagcattatgggagttcaggggaaggggcatagcccagcctggaaggagaggatgagtgggggatggctttctgaaaagggtagtctaaaggatgcctatagtcaatagggaaaagaggggaagaagcatcttaagaagaggaaacagcagagaactggctggatgacctgtgactctggagcactgggttgtctccattgtccttatgggcagatgtgtgccatccccagccgacaccactcactgcctccttcctcctggtgttgccacttctgggtgagattaaggtgcagggcctgggggcaggaggacataaggtatagccataaatcataacccagggaccacactcaaccctagggaaattgtcttcctgatcagttgattaccatctgaggtcaagaaatgagatagtgggagcaaatgggtcacaaatagctcagctgtgggctcagaaactgctaggtaaaagaattccagaaggaggccagggcataagttggatgacctatgacctttagtctaaagaattgagactaccgtaattgagactactgtagtgacatctgagaaatgggatggaagagtgaccatgttttattttcttgttcttgtcactattgtattttattttgcataatcatgcccttcactgacagtctccttaacatcatctgtttactctgctcagatgtaaaatacaatgctctgtcatctccctactgggtctcctgggaggaggggagccatccagggtgcaaactcaaaggcagagggcacagcgtgcttaggcccaagcttagaattcaattgagaagttctgttgttcatccttacctcagcaggtagaaaagaggtggagatcagaagccagggattaaagattgaattgctttccctgggagtgtgcagtatctcattaaaatgttgtatattcaaaaaaatacagacacacacaagtgcctatataatgataaaacatatgcaaagcacccaaacctgtgattccagaaaggtagatcctatttttctgtttatttttattggctttagctgtgtcttttgaaaggactattatcctctaaaatgtatgtgtatgaagatcctggcttgcagctcgggagctttacacaccttgtgtcactttatcttggtaacgagccaagatcatgcaaccagttcatccatgtctgacccaagagctcttaactgctatgctgcactgcctcattcagagatagatgcctgcatgggtcctggcgattattttaatgctggctacacccccacaggtgacttggattcagaaatacaatttatatttcttctttttaaattgttttattttatttttcttttaatagttatatgtcagtgagaacaatttatatgtcttacactgagaaataaaactgctcataagtgaaaa

SEQ ID NO: 194697 - DNA, 3010 bp, Homo sapiens
  Payload ID: 18472
  Gene Name: tripartite motif containing 10
  Uniprot ID: Q9UDY6
  ENST ID: ENST00000428611
  CDS Start-End: 77-1264
gagtgtgtgacccagcccttcccccgtggccaagcagagagagtggccttgaggaagccatagcagcaggaccagcatggcctctgctgcctctgtgaccagcctggcagatgaagtcaactgccccatctgtcagggtaccctgagggagccggtcactatcgactgcggccacaacttctgccgggcctgccttacccgctactgtgagataccaggcccagacctggaggagtcccctacttgcccactctgcaaagaacccttccgtcctgggagcttccggcccaactggcagctggctaacgtggtggagaacattgagcgcctccagctggtgtccacactgggtttgggagaggaggatgtctgccaagagcacggagagaagatctacttcttctgtgaggatgatgagatgcagttgtgcgtggtgtgccgggaggctggggagcacgctacccacaccatgcgcttcctggaggatgcagcggctccctatagggaacaaatccataagtgtcttaaatgtctaagaaaagagagagaggagattcaagaaatccagtcaagagaaaataaaaggatgcaagtcctcctgactcaggtgtccaccaagagacaacaggtgatttctgagttcgcacacctgaggaagtttctagaggaacagcagagcatcctcttagcacaattggagagccaggatggggacatcttgaggcaacgggatgaatttgatttgctggttgctggggagatctgccggtttagtgctcttattgaagaactggaggagaagaatgagaggccagcaagggagctcctgacggacatcagaagcactctaataagatgtgaaaccagaaagtgccggaaaccggtggctgtgtcgccagagctgggccagaggattcgggactttccccagcaggccctcccgctgcagagggagatgaagatgtttctggaaaaactatgctttgagttggactatgagccagctcacatttctctagaccctcagacttcccaccccaagctcctcttgtccgaggaccaccagcgagctcagttctcctacaaatggcagaactcaccagacaacccccagcgttttgaccgggccacctgtgttctggcccacactggcatcacaggggggagacacacgtgggtgtggatggccagggtacctggggactcaggctgctgccagttctgctcaccaccatccgtgcttggcacagaagtagctgcatagaaagagcactggatttgaagtcagaagacctgggttcttgaaccagcctgtcaaccagttgtatgactttaaacaaggcatctcacctcttttcatcttgttttcttccaataatgttagagttcatgtaatcacattctctagaaccatttagtttgtgttaactatgaaccaagcagtgtggtggccactggtgacttgaaaatgtagagaaaaaaaaaacctgctctatatctgaaagagctcttgggaagacagagaaacataaagaggaaattatagcacagtgtggtgggtgttacgggaagtccaaccccagcattatgggagttcaggggaaggggcatagcccagcctggaaggagaggatgagtgggggatggctttctgaaaagggtagtctaaaggatgcctatagtcaatagggaaaagaggggaagaagcatcttaagaagaggaaacagcagagaactggctggatgacctgtgactctggagcactgggttgtctccattgtccttatgggcagatgtgtgccatccccagccgacaccactcactgcctccttcctcctggtgttgccacttctgggtgagattaaggtgcagggcctgggggcaggaggacataaggtatagccataaatcataacccagggaccacactcaaccctagggaaattgtcttcctgatcagttgattaccatctgaggtcaagaaatgagatagtgggagcaaatgggtcacaaatagctcagctgtgggctcagaaactgctaggtaaaagaattccagaaggaggccagggcataagttggatgacctatgacctttagtctaaagaattgagactaccgtaattgagactactgtagtgacatctgagaaatgggatggaagagtgaccatgttttattttcttgttcttgtcactattgtattttattttgcataatcatgcccttcactgacagtctccttaacatcatctgtttactctgctcagatgtaaaatacaatgctctgtcatctccctactgggtctcctgggaggaggggagccatccagggtgcaaactcaaaggcagagggcacagcgtgcttaggcccaagcttagaattcaattgagaagttctgttgttcatccttacctcagcaggtagaaaagaggtggagatcagaagccagggattaaagattgaattgctttccctgggagtgtgcagtatctcattaaaatgttgtatattcaaaaaaatacagacacacacaagtgcctatataatgataaaacatatgcaaagcacccaaacctgtgattccagaaaggtagatcctatttttctgtttatttttattggctttagctgtgtcttttgaaaggactattatcctctaaaatgtatgtgtatgaagatcctggcttgcagctcgggagctttacacaccttgtgtcactttatcttggtaacgagccaagatcatgcaaccagttcatccatgtctgacccaagagctcttaactgctatgctgcactgcctcattcagagatagatgcctgcatgggtcctggcgattattttaatgctggctacacccccacaggtgacttggattcagaaatacaatttatatttcttctttttaaattgttttattttatttttcttttaatagttatatgtcagtgagaacaatttatatgtcttacactgagaaataaaactgctcataagtgaaaa

SEQ ID NO: 194698 - DNA, 2715 bp, Homo sapiens
  Payload ID: 18473
  Gene Name: tripartite motif containing 11
  Uniprot ID: Q96F44
  ENST ID: ENST00000284551
  CDS Start-End: 280-1686
cttccgcctcggctcctcttcctgccggcatccgggatccctacgtcccgcgtcccccgagcgctcggagcctacgcgcccagcgctaccgaaacccagagtcctgcgccctggagtccccgcgccccggagcccgagcacccgggagtcccgagcctcgcgccccggagtgcccgagcctgcgccgccgcacccggataccccgcgtccccgcgagctgccgaggccgcccgccgccgccccgcggacagtaccgccttcctcccctctgtccgcgccatggccgcccccgacctgtccaccaacctccaggaggaggccacctgcgccatctgcctcgactacttcacggatccggtgatgaccgactgcggccacaacttctgccgcgagtgcatccggcgctgctggggccagcccgagggcccgtacgcgtgccccgagtgccgcgagctgtccccgcagaggaacctgcggcccaaccgcccgcttgctaagatggccgagatggcgcggcgcctgcacccgccgtcgccggtcccgcagggcgtgtgccccgcgcaccgcgagccactggccgccttctgtggcgacgagctgcgcctcctgtgtgcggcctgcgagcgctctggggagcactgggcgcaccgcgtgcggccgctgcaggacgcggccgaagacctcaaggcgaagctggagaagtcactggagcatctccggaagcagatgcaggatgcgttgctgttccaagcccaggcggatgagacctgcgtcttgtggcagaagatggtggagagccagcggcagaacgtgctgggtgagttcgagcgtcttcgccgtttgctggcagaggaggagcagcagctgctgcagaggctggaggaggaggagctggaggtgctgccccggctgcgggagggcgcagcccacctaggccagcagagcgcccacctagctgagctcatcgccgagctcgagggccgctgccagctgcctgctctggggctgctgcaggacatcaaggacgccctgcgcagggtccaggatgtgaagctgcagcccccagaagttgtgcctatggagctgaggaccgtgtgcagggtcccgggactggtagagacactgcggaggtttcgaggggacgtgaccttggacccggacaccgccaaccctgagctgatcctgtctgaagacaggcggagcgtgcagcggggggacctacggcaggccctgccggacagcccagagcgctttgaccccggcccctgcgtgctgggccaggagcgcttcacctcaggccgccactactgggaggtggaggttggggaccgcaccagctgggccctgggggtgtgcagggagaacgtgaacaggaaggagaagggcgagctgtccgcgggcaacggcttctggatcctggtcttcctggggagctattacaattcctcggaacgggccttggctccactccgggacccacccaggcgcgtggggatctttctggactacgaggctggacatctctctttctacagtgccaccgatgggtcactgctattcatctttcccgagatccccttctcggggacgctgcggcccctcttctcacccctgtccagcagcccgaccccgatgactatctgccggccgaaaggtgggtccggggacaccctggctccccagtgactcgggccctcctggaggagtcctgttgcctctcctgcccctccaggccactgagtgttttggccacttggaggacctgggaggagggagtgtgtcctttgagcaagaggaggaactcctggtgcctttctgagcctgcgtgggagaaccccaattctagcactccaggaaactgtgggagagtgtggggcaggctccgtcctccctgggagacccctccagccaccgggtgccacttaatgccaacagcccttaccaaagctgggagccccattgccccggcagctctggcctgtggttccagaagctgagaaaactccactggggcttgcagaatccagggttcacctaagctgcacagttcctgcagctttgccagccccctgaaagtcttgtgtaccccacctctgaagatgctgggggaggcagctgggatgggagccagccccatgcctgtctgtgaccccacagtgggtgagagcccgtcacagtcctgggtgtggctgctctggaagaattaggaggcagccataataagagtcttcagagagatgatgggaggggccagtgaggacaggaacagagagtagatgtcctataataaaggggcttctgggaggtgcctgggcacagatgtctgttcagcaggtgtgtgggcctagaggagagagcagagcccagaaatgtcttttgcaggcccacgttctgacttgaagctttcgtgggcatgttgccattgggttttgcccttgcaaaggcttcctaggtctccagtggcccctcaggacccagggtcccagctgctgcttggggatgtgcactgctggccgccggccttgcagtctctctaccctggggaggaacagtggcttctcagagcctggggcatacagaagaaggcaggagttgatttttgtgttgggtttggggtttctttgtcctcaaggtactgttctgtttctctttacccctctgctttatttattgtaagcattcccacgttaaataaactttggctgttgtctacaa

SEQ ID NO: 194699 - DNA, 2511 bp, Homo sapiens
  Payload ID: 18473
  Gene Name: tripartite motif containing 11
  Uniprot ID: Q96F44
  ENST ID: ENST00000366699
  CDS Start-End: 240-1397
ctacgtcccgcgtcccccgagcgctcggagcctacgcgcccagcgctaccgaaacccagagtcctgcgccctggagtccccgcgccccggagcccgagcacccgggagtcccgagcctcgcgccccggagtgcccgagcctgcgccgccgcacccggataccccgcgtccccgcgagctgccgaggccgcccgccgccgccccgcggacagtaccgccttcctcccctctgtccgcgccatggccgcccccgacctgtccaccaacctccaggaggaggccacctgcgccatctgcctcgactacttcacggatccggtgatgaccgactgcggccacaacttctgccgcgagtgcatccggcgctgctggggccagcccgagggcccgtacgcgtgccccgagtgccgcgagctgtccccgcagaggaacctgcggcccaaccgcccgcttgctaagatggccgagatggcgcggcgcctgcacccgccgtcgccggtcccgcagggcgtgtgccccgcgcaccgcgagccactggccgccttctgtggcgacgagctgcgcctcctgtgtgcggcctgcgagcgctctggggagcactgggcgcaccgcgtgcggccgctgcaggacgcggccgaagacctcaaggcgaagctggagaagtcactggagcatctccggaagcagatgcaggatgcgttgctgttccaagcccaggcggatgagacctgcgtcttgtggcagaagatggtggagagccagcggcagaacgtgctgggtgagttcgagcgtcttcgccgtttgctggcagaggaggagcagcagctgctgcagaggctggaggaggaggagctggaggtgctgccccggctgcgggagggcgcagcccacctaggccagcagagcgcccacctagctgagctcatcgccgagctcgagggccgctgccagctgcctgctctggggctgctgcaggacatcaaggacgccctgcgcagggtccaggatgtgaagctgcagcccccagaagttgtgcctatggagctgaggaccgtgtgcagggtcccgggactggtagagacactgcggaggtttcgaggtaggtgtggaggccccaggtggggagatgactccaggaggggacctgccaaggacctgggcagccagccacgtgttctgtgccctgccactgccagctccaaactcacagtgtcatggtggtgggttgttgggaaaacgtcctctgctcatacttctgacatcagttgtgtgggtattttcacaccaaacaattcttcaacttctggaaacgaattgggtatccaaggattccattcagcattgaacagaattgccagtgctgacactacaggagttagtacagaccccacagattaagggctcagtcccataagactgcccccacttcagatgccagtcacaacttccaggggctgcccatacttctgttccctcagcgcctctgcagatgtgagcattcgctagcacagcccatggaactcagaagagcactttacttactgtcattggtttattgtgaaggataccactcaggaagagccaaatggaagagacacatgggcaaagcctggggaagggctcagagctttcccaccctccctgggtgcaccttcccagcacctcagtgtgctcaccaacctggaaactccctgagccccaagagctgtttaggtgtctttgtggaggttccattacatggttatgattgattaaatcattggtcattggtgatggggctcaacctcagacccctttccccttcctgaggtcagaggctggggctgagtgttcccgccctctactgacaggattggtctttctggtggctggccttatgctgggctctcaggtccccacctcagccactgcagtggcatcaactcaggtgtgatggaaaggggcatcttatgatagcacaagatgcttctatcagtcaggaaattcccagggttctgtgagctctgcgccaggaactgggcacaaaacccaaatctgagtcttgtatcacagtcacccaaaggaagtactatcctcagctcttgctagcaggtcaggagcctgttgtgtaggaactgtgtgcaggcctccagaggtggatagatctgaaatcggagtggtcagggttgggacagctgccctaattcacatccttcatttggagattgaaaggaaaaacagactggatgcattggctcacctctgtaatcccagcactttgagaggctcaggcgggaggattgcttgaggccatcagttcaagaccaacccgggaaacatagcaagactcccatctctacaaataaaaaacaaaaaaatgagccagccatggtggcacacgcctgtaatcccagcagcttgggaggatctgaggcgggaggatcatttgagcccaggagatcaaggctgcagtgagccatgatcgcaccactgcactgcagcctggggccacagagcaagaccctgcctcttt

SEQ ID NO: 194700 - DNA, 5774 bp, Homo sapiens
  Payload ID: 18473
  Gene Name: tripartite motif containing 11
  ENST ID: ENST00000493030
  CDS Start-End: 3711-4742
ctcgggggtgaggggcgtacctctcatagatagaggctaagagaggaaggtggaaggtggaaggtggtggagtgggggcaaggaaaatgtggccataccctggccagcaaggagctggaatcagaggaaagtgggagaacctcagaggtggccgatcctagatggactccctgcagggactgtgttagcaggtcagtacttaagtcctgggaaagccccagactgggcaggatgagggggacacagtcgtttcctctctaacctcccctccagggctgccctgcatttctgggtggggtactgggagccatctctgccatctgagatgccagggctcagcctgccttttctccccttgtcttgctgcttaaaacccaaataaaacccgagctgaagggcctggggcacacgttccctggcctgcgctccctcccgctgtcctctttcctcgctgacctgctgcaggtgtgctcctgggagcctacgtgtggggcagatggcagcatctttggagctttcttgattgcactttgtgtgttgcatcatggtcacttgtgtgtgccagatgagcagttaaggcagtgttagaatcagtactgagcttgatctgtccctatcacagagcaaacttctgggatactagaataaatctgaatctgtccccttctgctttggattttagcagaaaggtggtttagagccatatccgtgggcttgttcagacacagattcatttgggttttcttttctttgcccatgcaggaatgtctacacctgaaacatgttagcccagcagaattacccttgtgacaccaattaccccaatgggtgcagagagtgcccaatagctctatagagttgactcgatatagtttcatgggatagcacttaaccctttcttttgcaggtgaagaaaaaaatttccctctaccctgttaggttcagtggctcagggctgcaaattaaactggcacaagacaaattaacaggaaaaaaaatcatacaatttgattaatattttaagtttcacatgcacaagaacttcatagaaaagcgtatttcagcaaaggtttgtgaattgtggagaagtgactggacacagaaatgggattgggcgtctaggactgataaattgtgggaaagtgactaggaaatagatgggaagaattaacacaagataatggtcattgtagtaaggtctgtttaggcagaatcatctcccaggattagagtgccctcctcttcctggtagagagagggtgcctttctcatggggaatgaataccctacttttaggcagataggagtacagagagctcttcctgcatctgcttttactcagaataattcttgtaccacagcggtatatttggggatgacatcctgttcttcactgccttagagcctaggttatgttaaccacagcaaactgcttttacctgcccccatgggcctagaaagctcagtcccacctatggggctgtgtgtccacttgccagagctggggcccattagctccatgacaggttcactccttgcctggccctgacctggggtcatgacagctgaacaagccccaggctgggttgccccgaggtggtaaacagggaagtcccagtaagctccagttccaggaagcagcaccatgggagagagaagatggcccccagatctctctgggttgtgtgtcagatggcacttgtgtggggagggggtttgccacaggaaggaggaggccagggaagatcccaggcctgcaccaagccccagcatcccagttctgactacacgcagggtaagaggtttctgttctgatctggccagagacacaaagatgcaggtacctgaaatgcaagatctttgccatgctgggtatgttgtgctgctttacagcccattccatctgatcaaatgctgtttgtaaccttagtgttgaaaactgaaaacgttggccaggtgtggtggctcacgcctgtaatcccagcaatttgggaggccgaggtgggcggatcacctgaggtcaggagtttgagaccaccctggccaacatggtgaaatcccatctgtacaaaaaatacaaaaattagctgggtgtggtgatgggcacctgtaatcccagctactcagggggctgaggcagaagaatcacttgaacacaggaggcagaggttgcagtgagccgagatcgtgccactgcactccagcttgggggacaaagcgagactccgtctcaaaaaaagaaaactgaaaatgtcccgtagggactgaggcattgagggagaagtgagaggcactgggccaagtgtttgaggtggggttggggtcacaggggccaggcctgagttttctggaacaggtcggcagcagtgaggagagaggcctggggacagggaccgccatttggggttcttgtagctcacgtgagagctgagcctaggcagagacagtaaagcagttggacatgtccttggtgctccagcggtcttcccgaatcgtgaggccaagtggtgaactaaagtgagcacctggagccaggcagctgggctgaagtcctggctctgctaccggggcagacttctggaccctcccagcacctccatccttccagagcgtggatagcgagagatgagagccaagacttggggtggctgagaagcaaagaggtgtggccagcacagggcccgttgctgataagggtgtcagatggggtggaagtgagcagacccttcgagaagtgggttcagggcaccccaagcacacacagtacagtgagcttgtgtacaggattttcactgcttcctggtatgcacagcatgaggaaccgtgggaatgagaattaaggaccaagaaagcagaatggaggtgtacccatcctggagcttattacagtgatagctgatgaagctgaaaatgcacaaggtcccgagtggcttggagaaaagatagggtgggtagccaggcatgtctgtccgtgctgactgtcctaccaaaacaccatggtttgcacatggcagatgtatacaagctggagactcacagctctggaggctggaagtctaagatcaagccctggcaggtttggtgtctggtgagggtgcttcctggttcacagacaacaccctctcactgtgttgtcatatggtgaaaggggcgagggttcctttataacactaatcccattgtggcggcactgccctcctgacctagtcacctcccaaagcccccgcctcctaacatcatcacactgggtgttgggatttcaacctatgaatttgtgggggcatagggcagaatttttggaccccagcataggcttggtccaaggcccttatgtgagccagcaggtgagaaggaagaggaggaggagtagacactggcttgggaacaggagagctcagcaccttcagagccagcttggggacagatggggtgggcagccagaacccttgaggtagctttgcaaaggggggtgaggcctgggctagggtagcaaggtcgaggactagaaatgccccatatgagaaaaaggaaagaatgtggctggggctgtcagcctctggcaagaggctgcccacctaccatgagggctcacgcttattggagggcattgagttccctgattcaccaggcagatttcagtttgtccccattgtctttgaggaggggacagggtgtcaggtgcaaaagggcaggcttctgtgacaggactcatgtctcatggtcctgcctggcctctcccgcaggcgaagctggagaagtcactggagcatctccggaagcagatgcaggatgcgttgctgttccaagcccaggcggatgagacctgcgtcttgtggcagaagatggtggagagccagcggcagaacgtgctgggtgagttcgagcgtcttcgccgtttgctggcagaggaggagcagcagctgctgcagaggctggaggaggaggagctggaggtgctgccccggctgcgggagggcgcagcccacctaggccagcagagcgcccacctagctgagctcatcgccgagctcgagggccgctgccagctgcctgctctggggctgctgcaggacatcaaggacgccctgcgcagggtccaggatgtgaagctgcagcccccagaagttgtgcctatggagctgaggaccgtgtgcagggtcccgggactggtagagacactgcggaggtttcgaggggacgtgaccttggacccggacaccgccaaccctgagctgatcctgtctgaagacaggcggagcgtgcagcggggggacctacggcaggccctgccggacagcccagagcgctttgaccccggcccctgcgtgctgggccaggagcgcttcacctcaggccgccactactgggaggtggaggttggggaccgcaccagctgggccctgggggtgtgcagggagaacgtgaacaggaaggagaagggcgagctgtccgcgggcaacggcttctggatcctggtcttcctggggagctattacaattcctcggaacgggccttggctccactccgggacccacccaggcgcgtggggatctttctggactacgaggctggacatctctctttctacagtgccaccgatgggtcactgctattcatctttcccgagatccccttctcggggacgctgcggcccctcttctcacccctgtccagcagcccgaccccgatgactatctgccggccgaaaggtgggtccggggacaccctggctccccagtgactcgggccctcctggaggagtcctgttgcctctcctgcccctccaggccactgagtgttttggccacttggaggacctgggaggagggagtgtgtcctttgagcaagaggaggaactcctggtgcctttctgagcctgcgtgggagaaccccaattctagcactccaggaaactgtgggagagtgtggggcaggctccgtcctccctgggagacccctccagccaccgggtgccacttaatgccaacagcccttaccaaagctgggagccccattgccccggcagctctggcctgtggttccagaagctgagaaaactccactggggcttgcagaatccagggttcacctaagctgcacagttcctgcagctttgccagccccctgaaagtcttgtgtaccccacctctgaagatgctgggggaggcagctgggatgggagccagccccatgcctgtctgtgaccccacagtgggtgagagcccgtcacagtcctgggtgtggctgctctggaagaattaggaggcagccataataagagtcttcagagagatgatgggaggggccagtgaggacaggaacagagagtagatgtcctataataaaggggcttctgggaggtgcctgggcacagatgtctgttcagcaggtgtgtgggcctagaggagagagcagagcccagaaatgtcttttgcaggcccacgttctgacttgaagctttcgtgggcatgttgccattgggttttgcccttgcaaaggcttcctaggtctccagtggcccctcaggacccagggtcccagctgctgcttggggatgtgcactgctggccgccggccttgcagtctctctaccctggggaggaacagtggcttctcagagcctggggcatacagaagaaggcaggagttgatttttgtgttgggtttggggtttctttgtcctcaaggtactgttctgtttctctttacccctctgctttatttattgtaagcattcccacgttaaataaactttggctgttgtctacaagtc

SEQ ID NO: 194701 - DNA, 682 bp, Homo sapiens
  Payload ID: 18473
  Gene Name: tripartite motif containing 11
  ENST ID: ENST00000602582
  CDS Start-End: 1-682
gcggccgctgcaggacgcggccgaagacctcaaggcgaagctggagaagtcactggagcatctccggaagcagatgcaggatgcgttgctgttccaagcccaggcggatgagacctgcgtcttgtggcaggacatcaaggacgccctgcgcagggtccaggatgtgaagctgcagcccccagaagttgtgcctatggagctgaggaccgtgtgcagggtcccgggactggtagagacactgcggaggtttcgaggggacgtgaccttggacccggacaccgccaaccctgagctgatcctgtctgaagacaggcggagcgtgcagcggggggacctacggcaggccctgccggacagcccagagcgctttgaccccggcccctgcgtgctgggccaggagcgcttcacctcaggccgccactactgggaggtggaggttggggaccgcaccagctgggccctgggggtgtgcagggagaacgtgaacaggaaggagaagggcgagctgtccgcgggcaacggcttctggatcctggtcttcctggggagctattacaattcctcggaacgggccttggctccactccgggacccacccaggcgcgtggggatctttctggactacgaggctggacatctctctttctacagtgccaccgatgggtcactgctattcatcttt

SEQ ID NO: 194702 - DNA, 586 bp, Homo sapiens
  Payload ID: 18473
  Gene Name: tripartite motif containing 11
  ENST ID: ENST00000602308
  CDS Start-End: 1-165
cggccgctgcaggacgcggccgaagacctcaaggacatcaaggacgccctgcgcaggtacgaacccagcctctcctggagggggggcaggagggagtggggtgggacccagctgttggccatggcgacaacacctgggttgtcccctctagggtccaggatgtgaagctgcagcccccagaagttgtgcctatggagctgaggaccgtgtgcagggtcccgggactggtagagacactgcggaggtttcgaggtaggtgtggaggccccaggtggggagatgactccaggaggggacctgccaaggacctgggcagccagccacgtgttctgtgccctgccactgccagctccaaactcacagtgtcatggtggtgggttgttgggaaaacgtcctctgctcatacttctgacatcagttgtgtgggtattttcacaccaaacaattcttcaacttctggaaacgaattgggtatccaaggattccattcagcattgaacagaattgccagtgctgacactacaggagttagtacagaccccacagattaagggctcagtcccataagactgcccccacttcagat

SEQ ID NO: 194703 - DNA, 1637 bp, Homo sapiens
  Payload ID: 18474
  Gene Name: tripartite motif containing 13
  Uniprot ID: O60858
  ENST ID: ENST00000356017
  CDS Start-End: 389-1621
gccgcgagtccattttggggctgtgcttggcgcgtaccgtgcggtccctgtagttggaggacgggcggtcgcgcggcctttcccactagccggaggtcggagataagtacccgccgcccggctcctctcgggaaagcggggtggtcctcgaaccttcagcgagggtggggagttgcccagtagcctctagttcgttagtcaaaacgtgaaaaaaaagacctgctttgccctgggaaatagtaaccctgccaaatacatcagcttgtaggagacagagaataacagcacctggccgggtgcagtggctcaggcctgtaatcgcagcactttgggaggctgaggtgggcggatcacctgaggtcaggagctcgagaccagcctggccaaaatggatgtgatggagctgcttgaagaagatctcacatgccctatttgttgtagtctgtttgatgatccacgggttttgccttgctcccacaacttctgcaaaaaatgcttagaaggtatcttagaagggagtgtgcggaattccttgtggagaccagctccattcaagtgtcctacatgccgtaaggaaacttcagctactggaattaatagcctgcaggttaattactccctgaagggtattgtggaaaagtataacaagatcaagatctctcccaaaatgccagtatgcaaaggacacttggggcagcctctcaacattttctgcctgactgatatgcagctgatttgtgggatctgtgctactcgtggggagcacaccaaacatgtcttctgttctattgaagatgcctatgctcaggaaagggatgcctttgagtccctcttccagagctttgagacctggcgtcggggagatgctctttctcgcttggataccttggaaactagtaagaggaaatccctacagttactgactaaagattcagataaagtgaaggaattttttgagaagttacaacacacactggatcaaaagaagaatgaaattctgtctgactttgagaccatgaaacttgctgttatgcaagcatatgacccagagatcaacaaactcaacaccatcttgcaggagcaacggatggcctttaacattgctgaggctttcaaagatgtgtcagaacccattgtatttctgcaacagatgcaggagtttagagagaaaatcaaagtaatcaaggaaactcctttacctccctctaatttgcctgcaagccctttaatgaagaactttgataccagtcagtgggaagacataaaactagtcgatgtggataaactttctttgcctcaagacactggcacattcattagcaagattccctggagcttttataagttatttttgctaatccttctgcttggccttgtcattgtctttggtcctaccatgttcctagaatggtcattatttgatgacctggcaacttggaaaggctgtctttcaaacttcagttcctatctgactaaaacagccgatttcatagaacaatcagttttttactgggaacaggtgacagatgggtttttcattttcaatgaaagattcaagaattttactttggtggtactgaacaatgtggcagaatttgtgtgcaaatataaactattataaaatctgtttcaagtat

SEQ ID NO: 194704 - DNA, 7249 bp, Homo sapiens
  Payload ID: 18474
  Gene Name: tripartite motif containing 13
  Uniprot ID: O60858
  ENST ID: ENST00000378182
  CDS Start-End: 739-1962
ccggagccgcgagtccattttggggctgtgcttggcgcgtaccgtgcggtccctgtagttggaggacgggcggtcgcgcggcctttcccactagccggaggtcggagataagtacccgccgcccggctcctctcgggaaagcggggtggtcctcgaaccttcagcgagggtggggagttgcccaggtcagcagggatctgcgtgggttgggggggctggcgaaggccgtctgagctccagtccggcagcgcggcagaaaccagcggggcactgtcatgggcctggggaggagcggcctgcggagggcgccggggcagtgtgtctgtggtccagaaaacctgctccgtccggagccttcctggccccgctaccagcgtctccacatcccctagaaaagaaaagacgggtgtgggccttaggttacagcgcgccgccagcgtttggttgcatggcgccgggggagggcgccctaaccgagaagctgcttaatacaaagagctccaggctcctggcggttcaccaggtctaaacagccgggctttatttgtgggggcgattgaaaaaattgagggtcaagattggggtgctgtgcaaataaatgcgttaatactgttctttttcttctttctttgcagtagcctctagttcgttagtcaaaacgtgaaaaaaaagacctgctttgccctgggaaatagtaaccctgccaaatacatcagcttgtaggagacagaggatgtgatggagctgcttgaagaagatctcacatgccctatttgttgtagtctgtttgatgatccacgggttttgccttgctcccacaacttctgcaaaaaatgcttagaaggtatcttagaagggagtgtgcggaattccttgtggagaccagctccattcaagtgtcctacatgccgtaaggaaacttcagctactggaattaatagcctgcaggttaattactccctgaagggtattgtggaaaagtataacaagatcaagatctctcccaaaatgccagtatgcaaaggacacttggggcagcctctcaacattttctgcctgactgatatgcagctgatttgtgggatctgtgctactcgtggggagcacaccaaacatgtcttctgttctattgaagatgcctatgctcaggaaagggatgcctttgagtccctcttccagagctttgagacctggcgtcggggagatgctctttctcgcttggataccttggaaactagtaagaggaaatccctacagttactgactaaagattcagataaagtgaaggaattttttgagaagttacaacacacactggatcaaaagaagaatgaaattctgtctgactttgagaccatgaaacttgctgttatgcaagcatatgacccagagatcaacaaactcaacaccatcttgcaggagcaacggatggcctttaacattgctgaggctttcaaagatgtgtcagaacccattgtatttctgcaacagatgcaggagtttagagagaaaatcaaagtaatcaaggaaactcctttacctccctctaatttgcctgcaagccctttaatgaagaactttgataccagtcagtgggaagacataaaactagtcgatgtggataaactttctttgcctcaagacactggcacattcattagcaagattccctggagcttttataagttatttttgctaatccttctgcttggccttgtcattgtctttggtcctaccatgttcctagaatggtcattatttgatgacctggcaacttggaaaggctgtctttcaaacttcagttcctatctgactaaaacagccgatttcatagaacaatcagttttttactgggaacaggtgacagatgggtttttcattttcaatgaaagattcaagaattttactttggtggtactgaacaatgtggcagaatttgtgtgcaaatataaactattataaaatctgtttcaagtatgcagttttcttttgttagaaattgttagagaatagagagtggtaattcagatttggtcaacgattctagtcacatattttcctccaaaagtattccttccaaaaataatctatacatgttcaaattaggtagcataaagataaaagtgaaatttagtagtataggcctgaacctttttttgtttaaaagagtgcttttgaaataagcatccaccccaaatgttggttgtatttatgctgtgataaaaataggtgagagatcatatgatctaatattgtattgatggaagtataggtagtatagtagtgattgttcttcaagcatgcagtaaagatcacttttttttttttttttttttttgagatggagtcttgctctgtcgcccaggctggagtgcagtgatgcaatcttggctcactgcagcctctacctcccaggttcaagtgattatcctgccttagcctcctgagtagctgggattacaggcgcgtgccaccacgcccagctaattttttgtatttttagttgagacagggtttcactgtcccttaagaccatcctgttagccaagatggtcttgatctcctgacctcgtgatccgcctgcctcggcctcccaaagtgctgggattacaggtgtgagccaccgtgcccagccaaagactgctcttaaagcacctttttgacagtgaacatggtctaaaaaagggaagatattgtagaagatttcacacacacacgcgtgtgtgggagacaactaaaggtattgaaggtactaattaattagatttccaaaattttctacagagagttaattatcaccaaaatgtgaatggtacatacaaaacctggcattttcttgtgataagtttacatttttaggagagtggagctttcaatctgcccttttctcctttgtttttgtagttttcaccaaagatgatcaactagaaatgttaagtggctatgcaagcaaaagcatagataggttaaaaaaaaggatcagctggctgggcagggtggctcatgtctataatctcagcattctaggacagtgatgtgggaggattatttgaggctaggagttccagttcgaaaccagcttcgtaaacatagcaagacccagtctctaccaaaaaaaaaaaaaaaaaaaaaaaaaaaaaaaatatatatatatatatacacacacacacacacatatgtacacatacatatatatacatatatatgtatatatagaacacatggcaagagcaggaaatgggaagactaccttttttctggcagctatgtgttgttttgttcgaaagatggcaagtgtacaaccaaaccaatccacttgcttacagaaagaatgtttagtgtagttaagactaatttgacaacagataaaacagtctgtcagctattacaaagtaatcagctgaacactaatgctgttctgtctgctcacaagagataaagataccctctcatggaataaacaccttgcttagaattcatataacaaagaagtaaccttataactgctctctagtctgccttatttgtgtcatagagtaagatattccttgaaagcccattaagtggaatagactttctgaaaataagagttctttacctcagtcctcctctaatttggttgagaggaggtaatgaaaatggggacaggataaaaggtggcaactaaatttaaagcacagaagaaatgatttccttctagctatgagaatagtcaaattgagcttgccaggctgtctcattcctaacatgtaattcatgatttagccactaaatttctaaggagatcataagaaattaagaaaaacgtttaagtctagcctctgcgtggtagacaggtatggggagggagaatgcttttcccctcccagtaataaaaaaaaaaaaaaaaaaaatatatatatatatatatatatatatatatatatatatatatatatatatatatatagttttactaggttttcatggataagtttttaaatgtaagacaggaaagggatctatttgatgtctatcttcagatatattggcagttttccttaagctatttagttcctcatctgttgctttttcattttgtatactgcaagttcccaggcaactcgaatttgcaaacacagccatggatacactatttaccttacagtagtttcctgggaatctaagtctggtttttgttattcttccctcccctccactgcataatcatgtataactagcaacatttatggttataggttgatttcctaagtgtggctgatggtagcctctagtttgaagtgagggaagaatgagtagtcaggaactggtcactttgaatgtgggagggaagatattcacgacaaggttttctacgataaagcagtttcctgcttctcgtttggcacgcatgttagatggcagagaccaagaattcaagatggttggtggccagatttttgtagacagagatggtgatttgtttagtttcatcttagattttttgagaactcaccagcttttattacccactgaattttcagactatcttaggcttcagagagaggctcttttctatgaacttcgttctctagttgatctcttaaacccatacctgctacagccaagacctgctcttgtggaggtacatttcctaagccggaacactcaagcttttttcagggtgtttggctcttgcagcaaaacaattgagatgctaacagggaggattacagtgtttacagaacaaccttcagcgccgacctggaatggtaactttttccctcctcagatgaccttacttccactgcctccacaaagaccttcttaccatgacctggttttccagtgtggttctgacagcactactgataaccaaactggagtcaggtattttgtactttgcagtatttctcttgtataccagtttgtgatgttttctctaaaaacttgaagttcctcaggcctgtaacttctggaaaagatgattattcaaaataatgttttggggtaaccagtggagttgggtagaatgaccaaataattattttccaaactgggatactttttagagtgaaaggggctattattaggtgggacaaaaggaataaatgaagactgcccagaaaaaactgagactatggacattcaaatcatgggagaaaataattttgtagattatgttccattgctaatgaatttgacttagaaaagaattgccttatttttaagagattgtttcagtggttcacataaaggctcgctcactggtttctcttgagttccttacacactatataagttgttctttcagttttatgattcaactactgtttttccttcagctgactttatttttaaacacccttaaagacagatatatctcatggcaaatttggtatcctgttacagccttggctcttaaacaactcaaaatattgggataggctgtcagtatgttaaggatagttgctcctgagtcaattcttcacttactccctctgttgttcttggctggatcctaacgctgatttccactctgctgtcacaaacatttttccccccgtaaaatgtcttaatgctgtcctaccattattttaccaactgtgaaagctggctttaatttttaggaggaaaagaaaagcctgcatgtgttctttattggtatcatttaaaatatacttttttttttttttttggtaaaggtaggcgtattttaagatattttcttaacttgagcagtagccaacaggaaggataccagtgtctctctctcttagcgacacactccttggtcttgcttaccaactggaggacactaggtagaataaccgagtatgacaattcttaattgtttacattttataacttcctgtccttcaaaagagtttgaaatgtcattttgggaaaagagagccagtcaagctagtaggctgattgtgaagaaaatctaataccttatctttatctcaaacctctgtacaactttattttcattgatgggatactttaacaaaaatgaaattttttttggtttttaaaatatgagtgattatgacctctttggggatcatgcttcaaaaagtcagaaacctagagacaaaactgtcattgatttttaagaagaaacacactaggtcaaaagaagatgtcctggaaatacgaagtactctttaaaaaccatgcatttggagaaagtaattgtttccttgaaaaacatgattaaaaactaaaactgggatgttcctgtgtgtacacagtgccaaatggttttccctttttatgttgtgttttagaaacagcacgaaagttttttccattttaaagtgagaaaacattatatttagacttccataattccaaaatcagaagctatttttaaaattagcattttcttgcatcaccaaatggtattcaattgtttgaagctcaaaatttttaccattccataaatgtttgtgaatttttagacagtgccaatttaaaagtagagatagccaatctgaatacggtgaaattatggggatctctggtgattgggatgaaaactctggccttaaaaggtccacttttagtatataattgcctaattagcaatcatttttattttttgctcactccctggtctgaatctatctgtctattcagatattttttggtaggtttggaaaatggagaagtgagcctaattggtgcctaattgtctggtgtatcattcactttattcagtttgttctatcaatatgatttacccctcaaggttaacctagcaggttgctcagttattatctctcaaggtcacagtactagaaatacttggcttgcatctttcagatgccattcatgttatcaagctcaaattatagttggtcacaggattctaaagtctttatttgacttctcctttttgaactggctcaaatggaaaagtgtagttgcttttaaatgttaaaaataagtttaaactttatatttcccattggtttcccctattttgtcctttctttgtgtgcttgaaatattttatttttcagtttgtcctcatagggaatcaagtattttagctaggtgatgtcttgcaagtacgttccactttgttacaatctactatctgtatatactatttgtatcttaattcttttatgagatgttctgtaacatttttctcactttgacaaatgtttttagactgtacagtcaagatctggcgcttgggggtaagtggaatgatttgctaatattgagaatctgttgtatcaaacataataaa

SEQ ID NO: 194705 - DNA, 1251 bp, Homo sapiens
  Payload ID: 18474
  Gene Name: tripartite motif containing 13
  ENST ID: ENST00000378183
  CDS Start-End: 452-1251
cttaattgcacggcagcttaactgggagactttcttcccgggcggccccacccgggaccgcgccgcttcagtcgagcccaccgtctgggcaaacggcgtccacttcccggagccgctgcccagcctctgcgggggggctttgggcgggcgcaggactctggaagggagaaaagcccgcagcccggccctccccgtcccaggcggcccgcgcgggtggacggcgggagcaggcggcggttggagacgccggaaggaacgcggtctcaccacccggctccctccgccaaggcgaggcgcggccggggaggcgggacacaggcgaagcgggacggggaggcggggccggagtagcctctagttcgttagtcaaaacgtgaaaaaaaagacctgctttgccctgggaaatagtaaccctgccaaatacatcagcttgtaggagacagaggatgtgatggagctgcttgaagaagatctcacatgccctatttgttgtagtctgtttgatgatccacgggttttgccttgctcccacaacttctgcaaaaaatgcttagaaggtatcttagaagggagtgtgcggaattccttgtggagaccagctccattcaagtgtcctacatgccgtaaggaaacttcagctactggaattaatagcctgcaggttaattactccctgaagggtattgtggaaaagtataacaagatcaagatctctcccaaaatgccagtatgcaaaggacacttggggcagcctctcaacattttctgcctgactgatatgcagctgatttgtgggatctgtgctactcgtggggagcacaccaaacatgtcttctgttctattgaagatgcctatgctcaggaaagggatgcctttgagtccctcttccagagctttgagacctggcgtcggggagatgctctttctcgcttggataccttggaaactagtaagaggaaatccctacagttactgactaaagattcagataaagtgaaggaattttttgagaagttacaacacacactggatcaaaagaagaatgaaattctgtctgactttgagaccatgaaacttgctgttatgcaagcatatgacccagagatcaacaaactcaacaccatcttgcaggagcaacggatggcctttaacattgctgaggctttcaaagatgtgtcagaacccattgtatttctgcaacagatgcaggagtttagagagaaaatcaaagtaatcaaggaaactccttt

SEQ ID NO: 194706 - DNA, 1489 bp, Homo sapiens
  Payload ID: 18474
  Gene Name: tripartite motif containing 13
  Uniprot ID: O60858
  ENST ID: ENST00000457662
  CDS Start-End: 262-1485
gtgcttggcgcgtaccgtgcggtccctgtagttggaggacgggcggtcgcgcggcctttcccactagccggaggtcggagataagtacccgccgcccggctcctctcgggaaagcggggtggtcctcgaaccttcagcgagggtggggagttgcccagtagcctctagttcgttagtcaaaacgtgaaaaaaaagacctgctttgccctgggaaatagtaaccctgccaaatacatcagcttgtaggagacagaggatgtgatggagctgcttgaagaagatctcacatgccctatttgttgtagtctgtttgatgatccacgggttttgccttgctcccacaacttctgcaaaaaatgcttagaaggtatcttagaagggagtgtgcggaattccttgtggagaccagctccattcaagtgtcctacatgccgtaaggaaacttcagctactggaattaatagcctgcaggttaattactccctgaagggtattgtggaaaagtataacaagatcaagatctctcccaaaatgccagtatgcaaaggacacttggggcagcctctcaacattttctgcctgactgatatgcagctgatttgtgggatctgtgctactcgtggggagcacaccaaacatgtcttctgttctattgaagatgcctatgctcaggaaagggatgcctttgagtccctcttccagagctttgagacctggcgtcggggagatgctctttctcgcttggataccttggaaactagtaagaggaaatccctacagttactgactaaagattcagataaagtgaaggaattttttgagaagttacaacacacactggatcaaaagaagaatgaaattctgtctgactttgagaccatgaaacttgctgttatgcaagcatatgacccagagatcaacaaactcaacaccatcttgcaggagcaacggatggcctttaacattgctgaggctttcaaagatgtgtcagaacccattgtatttctgcaacagatgcaggagtttagagagaaaatcaaagtaatcaaggaaactcctttacctccctctaatttgcctgcaagccctttaatgaagaactttgataccagtcagtgggaagacataaaactagtcgatgtggataaactttctttgcctcaagacactggcacattcattagcaagattccctggagcttttataagttatttttgctaatccttctgcttggccttgtcattgtctttggtcctaccatgttcctagaatggtcattatttgatgacctggcaacttggaaaggctgtctttcaaacttcagttcctatctgactaaaacagccgatttcatagaacaatcagttttttactgggaacaggtgacagatgggtttttcattttcaatgaaagattcaagaattttactttggtggtactgaacaatgtggcagaatttgtgtgcaaatataaactattataaaatc

SEQ ID NO: 194707 - DNA, 692 bp, Homo sapiens
  Payload ID: 18474
  Gene Name: tripartite motif containing 13
  ENST ID: ENST00000442421
  CDS Start-End: 306-692
acttctcccaagatcgtaaattctggaggagccattccttcatcatccatgtttgcatccttcacaccgttcactggttaagtgcttatagcctctagttcgttagtcaaaacgtgaaaaaaaagacctgctttgccctgggaaatagtaaccctgccaaatacatcagcttgtaggagacagagaataacagcacctggccgggtgcagtggctcaggcctgtaatcgcagcactttgggaggctgaggtgggcggatcacctgaggtcaggagctcgagaccagcctggccaaaatggatgtgatggagctgcttgaagaagatctcacatgccctatttgttgtagtctgtttgatgatccacgggttttgccttgctcccacaacttctgcaaaaaatgcttagaaggtatcttagaagggagtgtgcggaattccttgtggagaccagctccattcaagtgtcctacatgccgtaaggaaacttcagctactggaattaatagcctgcaggttaattactccctgaagggtattgtggaaaagtataacaagatcaagatctctcccaaaatgccagtatgcaaaggacacttggggcagcctctcaacattttctgcctgactgatatgcagctgatttgtgggatctgtgctactcgtggggagcacaccaaacatgtcttctgt

SEQ ID NO: 194708 - DNA, 2607 bp, Homo sapiens
  Payload ID: 18474
  Gene Name: tripartite motif containing 13
  Uniprot ID: O60858
  ENST ID: ENST00000420995
  CDS Start-End: 217-1440
ggggcggagctagccggagccgcgagtccattttggggctgtgcttggcgcgtaccgtgcggtccctgtagttggaggacgggcggtcgcgcggcctttcccactagccggagtagcctctagttcgttagtcaaaacgtgaaaaaaaagacctgctttgccctgggaaatagtaaccctgccaaatacatcagcttgtaggagacagaggatgtgatggagctgcttgaagaagatctcacatgccctatttgttgtagtctgtttgatgatccacgggttttgccttgctcccacaacttctgcaaaaaatgcttagaaggtatcttagaagggagtgtgcggaattccttgtggagaccagctccattcaagtgtcctacatgccgtaaggaaacttcagctactggaattaatagcctgcaggttaattactccctgaagggtattgtggaaaagtataacaagatcaagatctctcccaaaatgccagtatgcaaaggacacttggggcagcctctcaacattttctgcctgactgatatgcagctgatttgtgggatctgtgctactcgtggggagcacaccaaacatgtcttctgttctattgaagatgcctatgctcaggaaagggatgcctttgagtccctcttccagagctttgagacctggcgtcggggagatgctctttctcgcttggataccttggaaactagtaagaggaaatccctacagttactgactaaagattcagataaagtgaaggaattttttgagaagttacaacacacactggatcaaaagaagaatgaaattctgtctgactttgagaccatgaaacttgctgttatgcaagcatatgacccagagatcaacaaactcaacaccatcttgcaggagcaacggatggcctttaacattgctgaggctttcaaagatgtgtcagaacccattgtatttctgcaacagatgcaggagtttagagagaaaatcaaagtaatcaaggaaactcctttacctccctctaatttgcctgcaagccctttaatgaagaactttgataccagtcagtgggaagacataaaactagtcgatgtggataaactttctttgcctcaagacactggcacattcattagcaagattccctggagcttttataagttatttttgctaatccttctgcttggccttgtcattgtctttggtcctaccatgttcctagaatggtcattatttgatgacctggcaacttggaaaggctgtctttcaaacttcagttcctatctgactaaaacagccgatttcatagaacaatcagttttttactgggaacaggtgacagatgggtttttcattttcaatgaaagattcaagaattttactttggtggtactgaacaatgtggcagaatttgtgtgcaaatataaactattataaaatctgtttcaagtatgcagttttcttttgttagaaattgttagagaatagagagtggtaattcagatttggtcaacgattctagtcacatattttcctccaaaagtattccttccaaaaataatctatacatgttcaaattaggtagcataaagataaaagtgaaatttagtagtataggcctgaacctttttttgtttaaaagagtgcttttgaaataagcatccaccccaaatgttggttgtatttatgctgtgataaaaataggtgagagatcatatgatctaatattgtattgatggaagtataggtagtatagtagtgattgttcttcaagcatgcagtaaagatcacttttttttttttttttttttttgagatggagtcttgctctgtcgcccaggctggagtgcagtgatgcaatcttggctcactgcagcctctacctcccaggttcaagtgattatcctgccttagcctcctgagtagctgggattacaggcgcgtgccaccacgcccagctaattttttgtatttttagttgagacagggtttcactgtcccttaagaccatcctgttagccaagatggtcttgatctcctgacctcgtgatccgcctgcctcggcctcccaaagtgctgggattacaggtgtgagccaccgtgcccagccaaagactgctcttaaagcacctttttgacagtgaacatggtctaaaaaagggaagatattgtagaagatttcacacacacacgcgtgtgtgggagacaactaaaggtattgaaggtactaattaattagatttccaaaattttctacagagagttaattatcaccaaaatgtgaatggtacatacaaaacctggcattttcttgtgataagtttacatttttaggagagtggagctttcaatctgcccttttctcctttgtttttgtagttttcaccaaagatgatcaactagaaatgttaagtggctatgcaagcaaaagcatagataggttaaaaaaaaggatcagctggctgggcagggtggctcatgtctataatctcagcattctaggacagtgatgtgggaggattatttgaggctaggagttccagttcgaaaccagcttcgtaaacatagcaagacccagtctctaccaaaaaaaaaaaaaaaaaa

SEQ ID NO: 194709 - DNA, 1479 bp, Homo sapiens
  Payload ID: 18475
  Gene Name: tripartite motif containing 14
  Uniprot ID: Q14142
  ENST ID: ENST00000342043
  CDS Start-End: 11-1339
gtggagatgaatggcgggcgcggcgaccgggagccggacccctgggaggtcggagcttgtcgagggatgcggctggcgctgcccggagcatggcgaccgcgtggctgagctcttctgtcgccgctgccgccgctgcgtgtgcgcgctttgcccggtgctgggcgcgcaccgtggccaccctgtgggcctggcgctggaggcagcggtgcacgtgcagaaactcagccaagaatgtttaaagcagctggcaatcaagaagcagcagcacattgacaacataacccagatagaagatgccaccgagaagctcaaggctaatgcagagtcaagtaaaacctggctgaaggggaaattcactgaactcagattactacttgacgaagaggaagcgctggccaagaaattcattgataaaaacacgcagcttaccctccaggtgtacagggaacaagctgactcttgcagagagcaacttgacatcatgaatgatctctccaacagggtctggagtatcagccaggagcccgatcctgtccagaggcttcaggcatacacggccaccgagcaggagatgcagcagcagatgagcctcggggagctgtgccatcccgtgcccctctcctttgagcccgtcaagagcttctttaagggcctcgtggaagccgtggagagtacattacagacgccattggacattcgccttaaggaaagcataaactgccagctctcagacccttccagcaccaagccaggtaccttgttgaaaaccagcccctcaccagagcgatcgctattgctgaaatacgcgcgcacgcccacgctggatcctgacacgatgcacgcgcgcctgcgcctgtccgccgatcgcctgacggtgcgctgcggcctgctgggcagcctggggcccgtgcccgtgctgcggttcgacgcgctctggcaagtgctggctcgtgactgcttcgccaccggccgccactactgggaggttgacgtgcaggaggcgggcgccggctggtgggtgggcgcggcctacgcctcccttcggcgccgcggggcctcggccgccgcccgcctgggctgcaaccgccagtcctggtgcctcaagcgctacgaccttgagtactgggccttccacgacggccagcgcagccgcctgcggccccgcgacgacctcgaccggctcggcgtcttcctggactacgaggccggcgtcctcgccttctacgacgtgacgggcggcatgagccacctgcataccttccgcgccacgttccaggagccgctctacccggccctgcggctctgggagggggccatcagcatcccccggctgccctaggggccaggaccggcgtgacagcctccagacttgaatctgtagacatttctttattgatatggcaaattgcttgcagatatttttaaatgacagcaattttctaatatttggtttaataaaatgtgaataatgtccctttt

SEQ ID NO: 194710 - DNA, 4454 bp, Homo sapiens
  Payload ID: 18475
  Gene Name: tripartite motif containing 14
  Uniprot ID: Q14142
  ENST ID: ENST00000341469
  CDS Start-End: 11-1339
gtggagatgaatggcgggcgcggcgaccgggagccggacccctgggaggtcggagcttgtcgagggatgcggctggcgctgcccggagcatggcgaccgcgtggctgagctcttctgtcgccgctgccgccgctgcgtgtgcgcgctttgcccggtgctgggcgcgcaccgtggccaccctgtgggcctggcgctggaggcagcggtgcacgtgcagaaactcagccaagaatgtttaaagcagctggcaatcaagaagcagcagcacattgacaacataacccagatagaagatgccaccgagaagctcaaggctaatgcagagtcaagtaaaacctggctgaaggggaaattcactgaactcagattactacttgacgaagaggaagcgctggccaagaaattcattgataaaaacacgcagcttaccctccaggtgtacagggaacaagctgactcttgcagagagcaacttgacatcatgaatgatctctccaacagggtctggagtatcagccaggagcccgatcctgtccagaggcttcaggcatacacggccaccgagcaggagatgcagcagcagatgagcctcggggagctgtgccatcccgtgcccctctcctttgagcccgtcaagagcttctttaagggcctcgtggaagccgtggagagtacattacagacgccattggacattcgccttaaggaaagcataaactgccagctctcagacccttccagcaccaagccaggtaccttgttgaaaaccagcccctcaccagagcgatcgctattgctgaaatacgcgcgcacgcccacgctggatcctgacacgatgcacgcgcgcctgcgcctgtccgccgatcgcctgacggtgcgctgcggcctgctgggcagcctggggcccgtgcccgtgctgcggttcgacgcgctctggcaagtgctggctcgtgactgcttcgccaccggccgccactactgggaggttgacgtgcaggaggcgggcgccggctggtgggtgggcgcggcctacgcctcccttcggcgccgcggggcctcggccgccgcccgcctgggctgcaaccgccagtcctggtgcctcaagcgctacgaccttgagtactgggccttccacgacggccagcgcagccgcctgcggccccgcgacgacctcgaccggctcggcgtcttcctggactacgaggccggcgtcctcgccttctacgacgtgacgggcggcatgagccacctgcataccttccgcgccacgttccaggagccgctctacccggccctgcggctctgggagggggccatcagcatcccccggctgccctaggggccaggaccggcgtgacagcctccaggtacgccgcagctgcccagtctcgcctaatctacctagatcagcgtggctggtccccttactgcctgcttcttagggccctctccctgccccagctttccccgaccaatcacgcctacagtgctttgaaggtttcctctcctaggctagtttcaaacaggccctaaacaagtctgctgctgccctctcatcagacctccgcaccctcaccccaccatcacttacactactttaatccagttccttcaaagtgatacccccacaggtaagccctcagcatcctgaatacatcatccgcagcctgggaaccttctccctcgtacagcacaggaacctgacacatagtaggcacacagtaaacgtttgtgaatgaatgggagtcatccagtcctgactcttctgtctcttgaggtcccttgaatcttccgcttcctccccaccgatttcagcgtgtccacatcacagctccctccagaagctgcaagagcttcttagcagttcctggtctgaaccctctcccagtcctcatcttccaccctaaaactagagtgatcttcctaaaacttcacttaacccctcagctatgaaaaggcttccaggagtttccatgaaataacaaaaaaaaatacaagcgcctcaccttagcattcaaggcttgtctagtctgcccaaaattacttatcctcacctagctcctaccactcttcttagagactctccagtcagaaatgtgtcgcatagttccacctccacacctctctgctgccagcacattcatgcagaaaagtcttttcacctgtctcagtcttccgcaggcttacctgcgccaggaagtctaaccaaggaacaagaatctcactatcagagccacaaatctgggacctgtctttccaactaaattggaggctttggaagggcagctttgtcctatactctctccaccctgaaaagttcccagaaagccccttccctcccaagcagtgaattaataaccagcaggtgcctatcactgagtaacagaagagctgagttaggcgggcctcacaggtcacccagccagatctcatctggggagtctgaggtcctgaaagaaagcagagctgcgtaaagttaccccggggtgatataggggggccagacgtgtgccccgttcacccacccccaggcaagcatctgacctgtcccctggcccagcccttaggcccagctttcaacctgcttactcatttctcaggggattttgggaaggaatcagcaggtgacagttgctaagcaaccaaagggggtggtgtttcccaactgtcttgggacaaaaagggtaagagcacccttagatccagatgttgccaaggaaacccagagtgcccagctgtctggaatgaagtgacagaggtagaaaacagtaggccctcacaggaggccaccttcgctagcagggagtgggaggcttctttccagggatttgtgtctccgttctgaaggttctgcgtcctgttttgtcaattccctagacggttttgaagttatattctgttaaagcatcttcataggtgcttggtgggaggccaaggtcgccgaatcctcgtggtttaaatagactttcagtgcattagtttgaaccatataaaactgacaattttcaatagtttttgagttaaaaatggcacttttgatatgagacaatgtagcagaataccaggcagacagaaccttgcaaacaccttaacttctaaccaaagactttaaaactctggctggacagagttttaagcactatgctgcaggaatcctgagaaaaaggggaaattaattctattaggaatggcccaaactgaattgtgacaggcagagggtgttcctgacagagggaagatgaatacacttgaccccaacatttctgcccatccctgatgaccaagacctcttcccagacccacagctgcaggggccaagtaataacagctcttaatagtttataatgcactgttttaatgctttacgactaaactcatctgatcctttcatcagccctagagggtagaaagttttcccaattctacacatggcaaaatggagacccagagtcacttgcccaaggtcgcacagctagtggtggagctggagtctgggcccaggctgtgagttccaggtctgtgctcatggccaccaggccctactgctcagggtgaatgcagctggtctctggccagtgcctggtgctctggcccctctcgtggagctactgcccatgatgctttcctagtgcctggttactctgcgagacttgagtctacctttggactgccttccttgggggtctgagatgaggccttatggcccagaggggaacttgattcaaaaatttgggattcatgtagcagagacagagctagactgtaaaggtcacaaactagctgtgtcaaggcccgtgatagccagaaagcggcagtttcagtccatatcaattgtgtgaccagggctagtcactttttacttctcagtgccatctataaaatggggataatagcactacctaccaagtgctgtgaggctcaaatgagccaaaggttataaacttgccttaaaactatagtcctatacaaaaattagctgggcgtggtggtgcatgcctgtaatcccagctactagggaggctgaggcaagagagttgcttgaacccaggaggcggagattgcagtgagctgagattgcaccactgcactccagcctggggacagagcaagactcttgtctcaaaaaaaacaaaaaaaacatatatactgctgtatcatgccaggatttatcagcattcccaagggagcttgcacggtactgaccgagtgctgagactactggtattcccagctgccatgtggcagcagcaggagctactagaatattctcagcacaggaatgaggcttccttggtttccatgtctgtaagggttactgatcacttaccttcttctctttcagacttgaatctgtagacatttctttattgatatggcaaattgcttgcagatatttttaaatgacagcaattttctaatatttggtttaataaaatgtgaataatgtccctttt

SEQ ID NO: 194711 - DNA, 1792 bp, Homo sapiens
  Payload ID: 18475
  Gene Name: tripartite motif containing 14
  Uniprot ID: Q14142
  ENST ID: ENST00000375098
  CDS Start-End: 23-1351
gagccggaggaggtggagatgaatggcgggcgcggcgaccgggagccggacccctgggaggtcggagcttgtcgagggatgcggctggcgctgcccggagcatggcgaccgcgtggctgagctcttctgtcgccgctgccgccgctgcgtgtgcgcgctttgcccggtgctgggcgcgcaccgtggccaccctgtgggcctggcgctggaggcagcggtgcacgtgcagaaactcagccaagaatgtttaaagcagctggcaatcaagaagcagcagcacattgacaacataacccagatagaagatgccaccgagaagctcaaggctaatgcagagtcaagtaaaacctggctgaaggggaaattcactgaactcagattactacttgacgaagaggaagcgctggccaagaaattcattgataaaaacacgcagcttaccctccaggtgtacagggaacaagctgactcttgcagagagcaacttgacatcatgaatgatctctccaacagggtctggagtatcagccaggagcccgatcctgtccagaggcttcaggcatacacggccaccgagcaggagatgcagcagcagatgagcctcggggagctgtgccatcccgtgcccctctcctttgagcccgtcaagagcttctttaagggcctcgtggaagccgtggagagtacattacagacgccattggacattcgccttaaggaaagcataaactgccagctctcagacccttccagcaccaagccaggtaccttgttgaaaaccagcccctcaccagagcgatcgctattgctgaaatacgcgcgcacgcccacgctggatcctgacacgatgcacgcgcgcctgcgcctgtccgccgatcgcctgacggtgcgctgcggcctgctgggcagcctggggcccgtgcccgtgctgcggttcgacgcgctctggcaagtgctggctcgtgactgcttcgccaccggccgccactactgggaggttgacgtgcaggaggcgggcgccggctggtgggtgggcgcggcctacgcctcccttcggcgccgcggggcctcggccgccgcccgcctgggctgcaaccgccagtcctggtgcctcaagcgctacgaccttgagtactgggccttccacgacggccagcgcagccgcctgcggccccgcgacgacctcgaccggctcggcgtcttcctggactacgaggccggcgtcctcgccttctacgacgtgacgggcggcatgagccacctgcataccttccgcgccacgttccaggagccgctctacccggccctgcggctctgggagggggccatcagcatcccccggctgccctaggggccaggaccggcgtgacagcctccagaatgtcatggaagcagaatcgtacagtatgttcccttctgcatatgctgctttctcactcagcatcatttccttgagatgcatccaggctgctgcacgcatcaatagttcattcctggctgggcgcggtggctcacgcctgtaatcccagcgctttgggaggccgatgtgggtggatcacaaggtcaggagtttgagactagcctggccaagatggtgaaaccccatctctgcaaaaaatacaaaaattagccgggcaccatggcatgtgcctgtaatccctgctactcaggaggctgaggaaggagaatcacttgaacccgggcagcggaggttgcagtgagccgagatcacaccactgcactccagcctgggcaatagagtgagactccgtttcaaaaaaaaaaagaaaaa

SEQ ID NO: 194712 - DNA, 639 bp, Homo sapiens
  Payload ID: 18475
  Gene Name: tripartite motif containing 14
  ENST ID: ENST00000475147
  CDS Start-End: 25-357
gggagccggaggaggtggagatgaatggcgggcgcggcgaccgggagccggacccctgggaggtcggagcttgtcgagggatgcggctggcgctgcccggagcatggcgaccgcgtggctgagctcttctgtcgccgctgccgccgctgcgtgtgcgcgctttgcccggtgctgggcgcgcaccgtggccaccctgtgggcctggcgctggaggcagcggtgcacgtgcagggtctggagtatcagccaggagcccgatcctgtccagaggcttcaggcatacacggccaccgagcaggagatgcagcagcagatgagcctcggggagctgtgccatcccgtgcccctctcctttgagcccgtcaagagcttctttaagggcctcgtggaagccgtggagagtacattacagacgccattggacattcgccttaaggaaagcataaactgccagctctcagacccttccagcaccaagccaggtaccttgttgaaaaccagcccctcaccagagcgatcgctattgctgaaatacgcgcgcacgcccacgctggatcctgacacgatgcacgcgcgcctgcgcctgtccgccgatcgcctgacggtgcgctgcggcctgctgggcagcctggggcccgt

SEQ ID NO: 194713 - DNA, 2214 bp, Homo sapiens
  Payload ID: 18476
  Gene Name: tripartite motif containing 15
  Uniprot ID: Q9C019
  ENST ID: ENST00000259930
  CDS Start-End: 470-1867
tgtgggcacgcctcagagccagaagtttatggctcccacctgctcaatctgacaggaagcttctgctccccagttctccccagccactgtggtctacagattccaggaaacccatccccctgtgacctcatggtgtgctctgttctccaccctagggaccagaaggagccaggagtaaagaactggcttacttggccgccactgggaaattctgggtaattcgagacgccctggaatttggacccactccgctgataggtggtggccagggttctagggaacacaagaggcggagccaggtggcttccctgtgctggcattcttgcctctctctctctttctctctctctgtctctcagccttgcagccgtttccctctgcgattcatgtaagtgtgactcgatttcagggaaagggaactcgcgtgggctgaggagaccggagtggacgggctggggaaggcaccgtgatgcccgcaaccccgtccctgaaggtggtccatgagctgcctgcctgtaccctctgtgcggggccgctggaggatgcggtgaccattccctgtggacacaccttctgccggctctgcctccccgcgctctcccagatgggggcccaatcctcgggcaagatcctgctctgcccgctctgccaagaggaggagcaggcagagactcccatggcccctgtgcccctgggcccgctgggagaaacttactgcgaggagcacggcgagaagatctacttcttctgcgagaacgatgccgagttcctctgtgtgttctgcagggagggtcccacgcaccaggcgcacaccgtggggttcctggacgaggccattcagccctaccgggatcgtctcaggagtcgactggaagctctgagcacggagagagatgagattgaggatgtaaagtgtcaagaagaccagaagcttcaagtgctgctgactcagatcgaaagcaagaagcatcaggtggaaacagcttttgagaggctgcagcaggagctggagcagcagcgatgtctcctgctggccaggctgagggagctggagcagcagatttggaaggagagggatgaatatatcacaaaggtctctgaggaagtcacccggcttggagcccaggtcaaggagctggaggagaagtgtcagcagccagcaagtgagcttctacaagatgtcagagtcaaccagagcaggtgtgagatgaagacttttgtgagtcctgaggccatttctcctgaccttgtcaagaagatccgtgatttccacaggaaaatactcaccctcccagagatgatgaggatgttctcagaaaacttggcgcatcatctggaaatagattcaggggtcatcactctggaccctcagaccgccagccggagcctggttctctcggaagacaggaagtcagtgaggtacacccggcagaagaagagcctgccagacagccccctgcgcttcgacggcctcccggcggttctgggcttcccgggcttctcctccgggcgccaccgctggcaggttgacctgcagctgggcgacggcggcggctgcacggtgggggtggccggggagggggtgaggaggaagggagagatgggactcagcgccgaggacggcgtctgggccgtgatcatctcgcaccagcagtgctgggccagcacctccccgggcaccgacctgccgctgagcgagatcccgcgcggcgtgagagtcgccctggactacgaggcggggcaggtgaccctccacaacgcccagacccaggagcccatcttcaccttcactgcctctttctccggcaaagtcttccctttctttgccgtctggaaaaaaggttcctgccttacgctgaaaggctgaagtggggcgcgcgaagggcggcgaagcggagacggcggctctccgggatccagctccgcccctggccagtgtgcggcccgggggctccctgtgcccgcgtgaggcgagagaacaggggacttgagtctcgaacagcggttgtttttactttatttatcttaggccctcagctccctgacgtcctgagcctccctgtgacgctctggccttctctgcacctcagagtgcagaaccacagacggcttcggctgtgcctagggcaacagccaacctaggagccagcgggctttcggggaaaaaaaagaaaaagacatctaaaataaaatgtttaaactgtttcaaaataa

SEQ ID NO: 194714 - DNA, 426 bp, Homo sapiens
  Payload ID: 18476
  Gene Name: tripartite motif containing 15
  Uniprot ID: Q9C019
  ENST ID: ENST00000376688
  CDS Start-End: 1-348
atgcccgcaaccccgtccctgaaggtggtccatgagctgcctgcctgtaccctctgtgcggggccgctggaggatgcggtgaccattccctgtggacacaccttctgccggctctgcctccccgcgctctcccagatgggggcccaatcctcgggcaagatcctgctctgcccgctctgccaagaggaggagcaggcagagactcccatggcccctgtgcccctgggcccgctgggagaaacttactgcgaggagcacggcgagaagatctacttcttctgcgagaacgatgccgagttcctctgtacctcagagtgcagaaccacagacggcttcggctgtgcctagggcaacagccaacctaggagccagcgggctttcggggaaaaaaaagaaaaagacatctaaaataaaatgtttaaactg

SEQ ID NO: 194715 - DNA, 2214 bp, Homo sapiens
  Payload ID: 18476
  Gene Name: tripartite motif containing 15
  Uniprot ID: Q9C019
  ENST ID: ENST00000376694
  CDS Start-End: 470-1867
tgtgggcacgcctcagagccagaagtttatggctcccacctgctcaatctgacaggaagcttctgctccccagttctccccagccactgtggtctacagattccaggaaacccatccccctgtgacctcatggtgtgctctgttctccaccctagggaccagaaggagccaggagtaaagaactggcttacttggccgccactgggaaattctgggtaattcgagacgccctggaatttggacccactccgctgataggtggtggccagggttctagggaacacaagaggcggagccaggtggcttccctgtgctggcattcttgcctctctctctctttctctctctctgtctcttagccttgcagccgtttccctctgcgattcatgtaagtgtgactcgatttcagggaaagggaactcgcgtgggctgaggagaccggagtggacgggctggggaaggcaccgtgatgcccgcaaccccgtccctgaaggtggtccatgagctgcctgcctgtaccctctgtgcggggccgctggaggatgcggtgaccattccctgtggacacaccttctgccggctctgcctccccgcgctctcccagatgggggcccaatcctcgggcaagatcctgctctgcccgctctgccaagaggaggagcaggcagagactcccatggcccctgtgcccctgggcccgctgggagaaacttactgcgaggagcacggcgagaagatctacttcttctgcgagaacgatgccgagttcctctgtgtgttctgcagggagggtcccacgcaccaggcgcacaccgtggggttcctggacgaggccattcagccctaccgggatcgtctcaggagtcgactggaagctctgagcacggagagagatgagattgaggatgtaaagtgtcaagaagaccagaagcttcaagtgctgctgactcagatcgaaagcaagaagcatcaggtggaaacagcttttgagaggctgcagcaggagctggagcagcagcgatgtctcctgctggccaggctgagggagctggagcagcagatttggaaggagagggatgaatatatcacaaaggtctctgaggaagtcacccggcttggagcccaggtcaaggagctggaggagaagtgtcagcagccagcaagtgagcttctacaagatgtcagagtcaaccagagcaggtgtgagatgaagacttttgtgagtcctgaggccatttctcctgaccttgtcaagaagatccgtgatttccacaggaaaatactcaccctcccagagatgatgaggatgttctcagaaaacttggcgcatcatctggaaatagattcaggggtcatcactctggaccctcagaccgccagccggagcctggttctctcggaagacaggaagtcagtgaggtacacccggcagaagaagagcctgccagacagccccctgcgcttcgacggcctcccggcggttctgggcttcccgggcttctcctccgggcgccaccgctggcaggttgacctgcagctgggcgacggcggcggctgcacggtgggggtggccggggagggggtgaggaggaagggagagatgggactcagcgccgaggacggcgtctgggccgtgatcatctcgcaccagcagtgctgggccagcacctccccgggcaccgacctgccgctgagcgagatcccgcgcggcgtgagagtcgccctggactacgaggcggggcaggtgaccctccacaacgcccagacccaggagcccatcttcaccttcactgcctctttctccggcaaagtcttccctttctttgccgtctggaaaaaaggttcctgccttacgctgaaaggctgaagtggggcgcgcgaagggcggcgaagcggagacggcggctctccgggatccagctccgcccctggccagtgtgcggcccgggggctccctgtgcccgcgtgaggcgagagaacaggggacttgagtctcgaacagcggttgtttttactttatttatcttaggccctcagctccctgacgtcctgagcctccctgtgacgctctggccttctctgtacctcagagtgcagaaccacagacggcttcggctgtgcctagggcaacagccaacctaggagccagcgggctttcggggaaaaaaaagaaaaagacatctaaaataaaatgtttaaactgtttcaaaataa

SEQ ID NO: 194716 - DNA, 491 bp, Homo sapiens
  Payload ID: 18476
  Gene Name: tripartite motif containing 15
  ENST ID: ENST00000426765
  CDS Start-End: 1-491
gcaagaagcatcaggtggaaacagcttttgagaggctgcagcaggagctggagcagcagcgatgtctcctgctggccaggctgagggagctggagcagcagatttggaaggagagggatgaatatatcacaaaggtctctgaggaagtcacccggcttggagcccaggtcaaggagctggaggagaagtgtcagcagccagcaagtgagcttctacaagatgtcagagtcaaccagagcaggtgtgagatgaagacttttgtgagtcctgaggccatttctcctgaccttgtcaagaagatccgtgatttccacaggaaaatactcaccctcccagagatgatgaggatgttctcagaaaacttggcgcatcatctggaaatagattcagaccgccagccggagcctggttctctcggaagacaggaagtcagtgaggtacacccggcagaagaagagcctgccagacagccccctgcgcttcgacggcct

SEQ ID NO: 194717 - DNA, 491 bp, Homo sapiens; identical to SEQ ID NO: 194716
  Payload ID: 18476
  Gene Name: tripartite motif containing 15
  ENST ID: ENST00000425255
  CDS Start-End: 1-491

SEQ ID NO: 194718 - DNA, 491 bp, Homo sapiens; identical to SEQ ID NO: 194716
  Payload ID: 18476
  Gene Name: tripartite motif containing 15
  ENST ID: ENST00000427952
  CDS Start-End: 1-491

SEQ ID NO: 194719 - DNA, 2214 bp, Homo sapiens
  Payload ID: 18476
  Gene Name: tripartite motif containing 15
  ENST ID: ENST00000430090
  CDS Start-End: 470-1867
tgtgggcacgcctcagagccagaagtttatggctcccacctgctcaatctgacaggaagcttctgctccccagttctccccagccactgtggtctacagattccaggaaacccatccccctgtgacctcatggtgtgctctgttctccaccctagggaccagaaggagccaggagtaaagaactggcttacttggccgccactgggaaattctgggtaattcgagacgccctggaatttggacccactccgctgataggtggtggccagggttctagggaacacaagaggcggagccaggtggcttccctgtgctggcattcttgcctctctctctctttctctctctctgtctctcagccttgcagccgtttccctctgcgattcatgtaagtgtgactcgatttcagggaaagggaactcgcgtgggctgaggagaccggagtggacgggctggggaaggcaccgtgatgcccgcaaccccgtccctgaaggtggtccatgagctgcctgcctgtaccctctgtgcggggccgctggaggatgcggtgaccattccctgtggacacaccttctgccggctctgcctccccgcgctctcccagatgggggcccaatcctcgggcaagatcctgctctgcccgctctgccaagaggaggagcaggcagagactcccatggcccctgtgcccctgggcccgctgggagaaacttactgcgaggagcacggcgagaagatctacttcttctgcgagaacgatgccgagttcctctgtgtgttctgcagggagggtcccacgcaccaggcgcacaccgtggggttcctggacgaggccattcagccctaccgggatcgtctcaggagtcgactggaagctctgagcacggagagagatgagattgaggatgtaaagtgtcaagaagaccagaagcttcaagtgctgctgactcagatcgaaagcaagaagcatcaggtggaaacagcttttgagaggctgcagcaggagctggagcagcagcgatgtctcctgctggccaggctgagggagctggagcagcagatttggaaggagagggatgaatatatcacaaaggtctctgaggaagtcacccggcttggagcccaggtcaaggagctggaggagaagtgtcagcagccagcaagtgagcttctacaagatgtcagagtcaaccagagcaggtgtgagatgaagacttttgtgagtcctgaggccatttctcctgaccttgtcaagaagatccgtgatttccacaggaaaatactcaccctcccagagatgatgaggatgttctcagaaaacttggcgcatcatctggaaatagattcaggggtcatcactctggaccctcagaccgccagccggagcctggttctctcggaagacaggaagtcagtgaggtacacccggcagaagaagaacctgccagacagccccctgcgcttcgacggcctcccggcggttctgggcttcccgggcttctcctccgggcgccaccgctggcaggttgacctgcagctgggcgacggcggcggctgcacggtgggggtggccggggagggggtgaggaggaagggagagatgggactcagcgccgaggacggcgtctgggccgtgatcatctcgcaccagcagtgctgggccagcacctccccgggcaccgacctgccgctgagcgagatcccgcgcggcgtgagagtcgccctggactacgaggcggggcaggtgaccctccacaacgcccagacccaggagcccatcttcaccttcactgcctctttctccggcaaagtcttccctttctttgccgtctggaaaaaaggttcctgccttacgctgaaaggctgaagtggggcgcgcgaagggcggcgaagcggagacggcggctctccgggatccagctccgcccctggccagtgtgcggcccgggggctccctgtgcccgcgtgaggcgagagaacaggggacttgagtctcgaacagcggttgtttttactttatttatcttaggccctcagctccctgacgtcctgagcctccctgtgacgctctggccttctctgcacctcagagtgcagaaccacagacggcttcggctgtgcctagggcaacagccaacctaggagccagcgggctttcggggaaaaaaaagaaaaagacatctaaaataaaatgtttaaactgtttcaaaataa

SEQ ID NO: 194720 - DNA, 491 bp, Homo sapiens; identical to SEQ ID NO: 194716
  Payload ID: 18476
  Gene Name: tripartite motif containing 15
  ENST ID: ENST00000433744
  CDS Start-End: 1-491

SEQ ID NO: 194721 - DNA, 491 bp, Homo sapiens; identical to SEQ ID NO: 194716
  Payload ID: 18476
  Gene Name: tripartite motif containing 15
  ENST ID: ENST00000423220
  CDS Start-End: 1-491

SEQ ID NO: 194722 - DNA, 491 bp, Homo sapiens
  Payload ID: 18476
  Gene Name: tripartite motif containing 15
  ENST ID: ENST00000440260
  CDS Start-End: 1-491
gcaagaagcatcaggtggaaacagcttttgagaggctgcagcaggagctggagcagcagcgatgtctcctgctggccaggctgagggagctggagcagcagatttggaaggagagggatgaatatatcacaaaggtctctgaggaagtcacccggcttggagcccaggtcaaggagctggaggagaagtgtcagcagccagcaagtgagcttctacaagatgtcagagtcaaccagagcaggtgtgagatgaagacttttgtgagtcctgaggccatttctcctgaccttgtcaagaagatccgtgatttccacaggaaaatactcaccctcccagagatgatgaggatgttctcagaaaacttggcgcatcatctggaaatagattcagaccgccagccggagcctggttctctcggaagacaggaagtcagtgaggtacacccggcagaagaagaacctgccagacagccccctgcgcttcgacggcct

SEQ ID NO: 194723 - DNA, 2214 bp, Homo sapiens
  Payload ID: 18476
  Gene Name: tripartite motif containing 15
  Uniprot ID: Q9C019
  ENST ID: ENST00000431059
  CDS Start-End: 470-1867
tgtgggcacgcctcagagccagaagtttatggctcccacctgctcaatctgacaggaagcttctgctccccagttctccccagccactgtggtctacagattccaggaaacccatccccctgtgacctcatggtgtgctctgttctccaccctagggaccagaaggagccaggagtaaagaactggcttacttggccgccactgggaaattctgggtaattcgagacgccctggaatttggacccactccgctgataggtggtggccagggttctagggaacacaagaggcggagccaggtggcttccctgtgctggcattcttgcctctctctctctttctctctctctgtctctcagccttgcagccgtttccctctgcgattcatgtaagtgtgactcgatttcagggaaagggaactcgcgtgggctgaggagaccggagtggacgggctggggaaggcaccgtgatgcccgcaaccccgtccctgaaggtggtccatgagctgcctgcctgtaccctatgtgcggggccgctggaggatgcggtgaccattccctgtggacacaccttctgccggctctgcctccccgcgctctcccagatgggggcccaatcctcgggcaagatcctgctctgcccgctctgccaagaggaggagcaggcagagactcccatggcccctgtgcccctgggcccgctgggagaaacttactgcgaggagcacggcgagaagatctacttcttctgcgagaacgatgccgagttcctctgtgtgttctgcagggagggtcccacgcaccaggcgcacaccgtggggttcctggacgaggccattcagccctaccgggatcgtctcaggagtcgactggaagctctgagcacggagagagatgagattgaggatgtaaagtgtcaagaagaccagaagcttcaagtgctgctgactcagatcgaaagcaagaagcatcaggtggaaacagcttttgagaggctgcagcaggagctggagcagcagcgatgtctcctgctggccaggctgagggagctggagcagcagatttggaaggagagggatgaatatatcacaaaggtctctgaggaagtcacccggcttggagcccaggtcaaggagctggaggagaagtgtcagcagccagcaagtgagcttctacaagatgtcagagtcaaccagagcaggtgtgagatgaagacttttgtgagtcctgaggccatttctcctgaccttgtcaagaagatccgtgatttccacaggaaaatactcaccctcccagagatgatgaggatgttctcagaaaacttggcgcatcatctggaaatagattcaggggtcatcactctggaccctcagaccgccagccggagcctggttctctcggaagacaggaagtcagtgaggtacacccggcagaagaagagcctgccagacagccccctgcgcttcgacggcctcccggcggttctgggcttcccgggcttctcctccgggcgccaccgctggcaggttgacctgcagctgggcgacggcggcggctgcacggtgggggtggccggggagggggtgaggaggaagggagagatgggactcagcgccgaggacggcgtctgggccgtgatcatctcgcaccagcagtgctgggccagcacctccccgggcaccgacctgccgctgagcgagatcccgcgcggcgtgagagtcgccctggactacgaggcggggcaggtgaccctccacaacgcccagacccaggagcccatcttcaccttcactgcctctttctccggcaaagtcttccctttctttgccgtctggaaaaaaggttcctgccttacgctgaaaggctgaagtggggcgcgcgaagggcggcgaagcggagacggcggctctccgggatccagctccgcccctggccagtgtgcggcccgggggctccctgtgcccgcgtgaggcgagagaacaggggacttgagtctcgaacagcggttgtttttactttatttatcttaggccctcagctccctgacgtcctgagcctccctgtgacgctctggccttctctgcacctcagagtgcagaaccacagacggcttcggctgtgcctagggcaacagccaacctaggagccagcgggctttcggggaaaaaaaagaaaaagacatctaaaataaaatgtttaaactgtttcaaaataa

SEQ ID NO: 194724 - DNA, 491 bp, Homo sapiens; identical to SEQ ID NO: 194722
  Payload ID: 18476
  Gene Name: tripartite motif containing 15
  ENST ID: ENST00000424597
  CDS Start-End: 1-491

SEQ ID NO: 194725 - DNA, 2214 bp, Homo sapiens; identical to SEQ ID NO: 194719
  Payload ID: 18476
  Gene Name: tripartite motif containing 15
  ENST ID: ENST00000429524
  CDS Start-End: 470-1867

SEQ ID NO: 194726 - DNA, 2214 bp, Homo sapiens; identical to SEQ ID NO: 194723
  Payload ID: 18476
  Gene Name: tripartite motif containing 15
  Uniprot ID: Q9C019
  ENST ID: ENST00000427091
  CDS Start-End: 470-1867

SEQ ID NO: 194727 - DNA, 491 bp, Homo sapiens; identical to SEQ ID NO: 194716
  Payload ID: 18476
  Gene Name: tripartite motif containing 15
  ENST ID: ENST00000444157
  CDS Start-End: 1-491

SEQ ID NO: 194728 - DNA, 2214 bp, Homo sapiens; identical to SEQ ID NO: 194713
  Payload ID: 18476
  Gene Name: tripartite motif containing 15
  Uniprot ID: Q9C019
  ENST ID: ENST00000421984
  CDS Start-End: 470-1867

SEQ ID NO: 194729 - DNA, 2214 bp, Homo sapiens; identical to SEQ ID NO: 194723
  Payload ID: 18476
  Gene Name: tripartite motif containing 15
  Uniprot ID: Q9C019
  ENST ID: ENST00000414873
  CDS Start-End: 470-1867

SEQ ID NO: 194730 - DNA, 2217 bp, Homo sapiens
  Payload ID: 18476
  Gene Name: tripartite motif containing 15
  ENST ID: ENST00000546888
  CDS Start-End: 687-1877
actttgatgctgtgggcacgcctcagagccagaagtttatggctcccacctgctcaatctgacaggaagcttctgctccccagttctccccagccactgtggtctacagattccaggaaacccatccccctgtgacctcatggtgtgctctgttctccaccctagggaccagaaggagccaggagtaaagaactggcttacttggccgccactgggaaattctgggtaattcgagacgccctggaatttggacccactccgctgataggtggtggccagggttctagggaacacaagaggcggagccaggtggcttccctgtgctggcattcttgcctctctctctctttctctctctctgtctctcagccttgcagccgtttccctctgcgattcatgtaagtgtgactcgatttcagggaaagggaactcgcgtgggctgaggagaccggagtggacgggctggggaaggcaccgtgatgcccgcaaccccgtccctgaaggtggtccatgagctgcctgcctgtaccctctgtgcggggccgctggaggatgcggtgaccattccctgtggacacaccttctgccggctctgcctccccgcgctctcccagatgggggcccaatcctcgggcaagatcctgctctgcccgctctgccaagaggaggagcaggcagagactcccatggcccctgtgcccctgggcccgctgggagaaacttactgcgaggagcacggcgagaagatctacttcttctgcgagaacgatgccgagttcctctgtgtgttctgcagggagggtcccacgcaccaggcgcacaccgtggggttcctggacgaggccattcagccctaccgggatcgtctcaggagtcgactggaagctctgagcacggagagagatgagattgaggatgtaaagtgtcaagaagaccagaagcttcaagtgctgctgactcagatcgaaagcaagaagcatcaggtggaaacagcttttgagaggctgcagcaggagctggagcagcagcgatgtctcctgctggccaggctgagggagctggagcagcagatttggaaggagagggatgaatatatcacaaaggtctctgaggaagtcacccggcttggagcccaggtcaaggagctggaggagaagtgtcagcagccagcaagtgagcttctacaagatgtcagaggaacaattgtcacgtgtgagatgaagacttttgtgagtcctgaggccatttctcctgaccttgtcaagaagatccgtgatttccacaggaaaatactcaccctcccagagatgatgaggatgttctcagaaaacttggcgcatcatctggaaatagattcaggggtcatcactctggaccctcagaccgccagccggagcctggttctctcggaagacaggaagtcagtgaggtacacccggcagaagaagaacctgccagacagccccctgcgcttcgacggcctcccggcggttctgggcttcccgggcttctcctccgggcgccaccgctggcaggttgacctgcagctgggcgacggcggcggctgcacggtgggggtggccggggagggggtgaggaggaagggagagatgggactcagcgccgaggacggcgtctgggccgtgatcatctcgcaccagcagtgctgggccagcacctccccgggcaccgacctgccgctgagcgagatcccgcgcggcgtgagagtcgccctggactacgaggcggggcaggtgaccctccacaacgcccagacccaggagcccatcttcaccttcactgcctctttctccggcaaagtcttccctttctttgccgtctggaaaaaaggttcctgccttacgctgaaaggctgaagtggggcgcgcgaagggcggcgaagcggagacggcggctctccgggatccagctccgcccctggccagtgtgcggcccgggggctccctgtgcccgcgtgaggcgagagaacaggggacttgagtctcgaacagcggttgtttttactttatttatcttaggccctcagctccctgacgtcctgagcctccctgtgacgctctggccttctctgcacctcagagtgcagaaccacagacggcttcggctgtgcctagggcaacagccaacctaggagccagcgggctttcggggaaaaaaaagaaaaagacatctaaaataaaatgtttaaactgtttc

SEQ ID NO: 194731 - DNA, 2217 bp, Homo sapiens
  Payload ID: 18476
  Gene Name: tripartite motif containing 15
  ENST ID: ENST00000548653
  CDS Start-End: 687-1877
actttgatgctgtgggcacgcctcagagccagaagtttatggctcccacctgctcaatctgacaggaagcttctgctccccagttctccccagccactgtggtctacagattccaggaaacccatccccctgtgacctcatggtgtgctctgttctccaccctagggaccagaaggagccaggagtaaagaactggcttacttggccgccactgggaaattctgggtaattcgagacgccctggaatttggacccactccgctgataggtggtggccagggttctagggaacacaagaggcggagccaggtggcttccctgtgctggcattcttgcctctctctctctttctctctctctgtctctcagccttgcagccgtttccctctgcgattcatgtaagtgtgactcgatttcagggaaagggaactcgcgtgggctgaggagaccggagtggacgggctggggaaggcaccgtgatgcccgcaaccccgtccctgaaggtggtccatgagctgcctgcctgtaccctatgtgcggggccgctggaggatgcggtgaccattccctgtggacacaccttctgccggctctgcctccccgcgctctcccagatgggggcccaatcctcgggcaagatcctgctctgcccgctctgccaagaggaggagcaggcagagactcccatggcccctgtgcccctgggcccgctgggagaaacttactgcgaggagcacggcgagaagatctacttcttctgcgagaacgatgccgagttcctctgtgtgttctgcagggagggtcccacgcaccaggcgcacaccgtggggttcctggacgaggccattcagccctaccgggatcgtctcaggagtcgactggaagctctgagcacggagagagatgagattgaggatgtaaagtgtcaagaagaccagaagcttcaagtgctgctgactcagatcgaaagcaagaagcatcaggtggaaacagcttttgagaggctgcagcaggagctggagcagcagcgatgtctcctgctggccaggctgagggagctggagcagcagatttggaaggagagggatgaatatatcacaaaggtctctgaggaagtcacccggcttggagcccaggtcaaggagctggaggagaagtgtcagcagccagcaagtgagcttctacaagatgtcagaggaacaattgtcacgtgtgagatgaagacttttgtgagtcctgaggccatttctcctgaccttgtcaagaagatccgtgatttccacaggaaaatactcaccctcccagagatgatgaggatgttctcagaaaacttggcgcatcatctggaaatagattcaggggtcatcactctggaccctcagaccgccagccggagcctggttctctcggaagacaggaagtcagtgaggtacacccggcagaagaagagcctgccagacagccccctgcgcttcgacggcctcccggcggttctgggcttcccgggcttctcctccgggcgccaccgctggcaggttgacctgcagctgggcgacggcggcggctgcacggtgggggtggccggggagggggtgaggaggaagggagagatgggactcagcgccgaggacggcgtctgggccgtgatcatctcgcaccagcagtgctgggccagcacctccccgggcaccgacctgccgctgagcgagatcccgcgcggcgtgagagtcgccctggactacgaggcggggcaggtgaccctccacaacgcccagacccaggagcccatcttcaccttcactgcctctttctccggcaaagtcttccctttctttgccgtctggaaaaaaggttcctgccttacgctgaaaggctgaagtggggcgcgcgaagggcggcgaagcggagacggcggctctccgggatccagctccgcccctggccagtgtgcggcccgggggctccctgtgcccgcgtgaggcgagagaacaggggacttgagtctcgaacagcggttgtttttactttatttatcttaggccctcagctccctgacgtcctgagcctccctgtgacgctctggccttctctgcacctcagagtgcagaaccacagacggcttcggctgtgcctagggcaacagccaacctaggagccagcgggctttcggggaaaaaaaagaaaaagacatctaaaataaaatgtttaaactgtttc

SEQ ID NO: 194732 - DNA, 426 bp, Homo sapiens
  Payload ID: 18476
  Gene Name: tripartite motif containing 15
  Uniprot ID: Q9C019
  ENST ID: ENST00000550400
  CDS Start-End: 1-348
atgcccgcaaccccgtccctgaaggtggtccatgagctgcctgcctgtaccctatgtgcggggccgctggaggatgcggtgaccattccctgtggacacaccttctgccggctctgcctccccgcgctctcccagatgggggcccaatcctcgggcaagatcctgctctgcccgctctgccaagaggaggagcaggcagagactcccatggcccctgtgcccctgggcccgctgggagaaacttactgcgaggagcacggcgagaagatctacttcttctgcgagaacgatgccgagttcctctgtacctcagagtgcagaaccacagacggcttcggctgtgcctagggcaacagccaacctaggagccagcgggctttcggggaaaaaaaagaaaaagacatctaaaataaaatgtttaaactg

SEQ ID NO: 194733 - DNA, 2217 bp, Homo sapiens
  Payload ID: 18476
  Gene Name: tripartite motif containing 15
  ENST ID: ENST00000550969
  CDS Start-End: 687-1877
actttgatgctgtgggcacgcctcagagccagaagtttatggctcccacctgctcaatctgacaggaagcttctgctccccagttctccccagccactgtggtctacagattccaggaaacccatccccctgtgacctcatggtgtgctctgttctccaccctagggaccagaaggagccaggagtaaagaactggcttacttggccgccactgggaaattctgggtaattcgagacgccctggaatttggacccactccgctgataggtggtggccagggttctagggaacacaagaggcggagccaggtggcttccctgtgctggcattcttgcctctctctctctttctctctctctgtctctcagccttgcagccgtttccctctgcgattcatgtaagtgtgactcgatttcagggaaagggaactcgcgtgggctgaggagaccggagtggacgggctggggaaggcaccgtgatgcccgcaaccccgtccctgaaggtggtccatgagctgcctgcctgtaccctctgtgcggggccgctggaggatgcggtgaccattccctgtggacacaccttctgccggctctgcctccccgcgctctcccagatgggggcccaatcctcgggcaagatcctgctctgcccgctctgccaagaggaggagcaggcagagactcccatggcccctgtgcccctgggcccgctgggagaaacttactgcgaggagcacggcgagaagatctacttcttctgcgagaacgatgccgagttcctctgtgtgttctgcagggagggtcccacgcaccaggcgcacaccgtggggttcctggacgaggccattcagccctaccgggatcgtctcaggagtcgactggaagctctgagcacggagagagatgagattgaggatgtaaagtgtcaagaagaccagaagcttcaagtgctgctgactcagatcgaaagcaagaagcatcaggtggaaacagcttttgagaggctgcagcaggagctggagcagcagcgatgtctcctgctggccaggctgagggagctggagcagcagatttggaaggagagggatgaatatatcacaaaggtctctgaggaagtcacccggcttggagcccaggtcaaggagctggaggagaagtgtcagcagccagcaagtgagcttctacaagatgtcagaggaacaattgtcacgtgtgagatgaagacttttgtgagtcctgaggccatttctcctgaccttgtcaagaagatccgtgatttccacaggaaaatactcaccctcccagagatgatgaggatgttctcagaaaacttggcgcatcatctggaaatagattcaggggtcatcactctggaccctcagaccgccagccggagcctggttctctcggaagacaggaagtcagtgaggtacacccggcagaagaagagcctgccagacagccccctgcgcttcgacggcctcccggcggttctgggcttcccgggcttctcctccgggcgccaccgctggcaggttgacctgcagctgggcgacggcggcggctgcacggtgggggtggccggggagggggtgaggaggaagggagagatgggactcagcgccgaggacggcgtctgggccgtgatcatctcgcaccagcagtgctgggccagcacctccccgggcaccgacctgccgctgagcgagatcccgcgcggcgtgagagtcgccctggactacgaggcggggcaggtgaccctccacaacgcccagacccaggagcccatcttcaccttcactgcctctttctccggcaaagtcttccctttctttgccgtctggaaaaaaggttcctgccttacgctgaaaggctgaagtggggcgcgcgaagggcggcgaagcggagacggcggctctccgggatccagctccgcccctggccagtgtgcggcccgggggctccctgtgcccgcgtgaggcgagagaacaggggacttgagtctcgaacagcggttgtttttactttatttatcttaggccctcagctccctgacgtcctgagcctccctgtgacgctctggccttctctgcacctcagagtgcagaaccacagacggcttcggctgtgcctagggcaacagccaacctaggagccagcgggctttcggggaaaaaaaagaaaaagacatctaaaataaaatgtttaaactgtttc

SEQ ID NO: 194734 - DNA, 2217 bp, Homo sapiens; identical to SEQ ID NO: 194731
  Payload ID: 18476
  Gene Name: tripartite motif containing 15
  ENST ID: ENST00000552062
  CDS Start-End: 687-1877

SEQ ID NO: 194735 - DNA, 2217 bp, Homo sapiens; identical to SEQ ID NO: 194730
  Payload ID: 18476
  Gene Name: tripartite motif containing 15
  ENST ID: ENST00000550702
  CDS Start-End: 687-1877

SEQ ID NO: 194736 - DNA, 2217 bp, Homo sapiens; identical to SEQ ID NO: 194733
  Payload ID: 18476
  Gene Name: tripartite motif containing 15
  ENST ID: ENST00000548732
  CDS Start-End: 687-1877

SEQ ID NO: 194737 - DNA, 426 bp, Homo sapiens; identical to SEQ ID NO: 194714
  Payload ID: 18476
  Gene Name: tripartite motif containing 15
  Uniprot ID: Q9C019
  ENST ID: ENST00000552836
  CDS Start-End: 1-348

SEQ ID NO: 194738 - DNA, 426 bp, Homo sapiens; identical to SEQ ID NO: 194714
  Payload ID: 18476
  Gene Name: tripartite motif containing 15
  Uniprot ID: Q9C019
  ENST ID: ENST00000552676
  CDS Start-End: 1-348

SEQ ID NO: 194739 - DNA, 2217 bp, Homo sapiens; identical to SEQ ID NO: 194731
  Payload ID: 18476
  Gene Name: tripartite motif containing 15
  ENST ID: ENST00000550694
  CDS Start-End: 687-1877

SEQ ID NO: 194740 - DNA, 2217 bp, Homo sapiens
  Payload ID: 18476
  Gene Name: tripartite motif containing 15
  ENST ID: ENST00000619857
  CDS Start-End: 687-1877
actttgatgctgtgggcacgcctcagagccagaagtttatggctcccacctgctcaatctgacaggaagcttctgctccccagttctccccagccactgtggtctacagattccaggaaacccatccccctgtgacctcatggtgtgctctgttctccaccctagggaccagaaggagccaggagtaaagaactggcttacttggccgccactgggaaattctgggtaattcgagacgccctggaatttggacccactccgctgataggtggtggccagggttctagggaacacaagaggcggagccaggtggcttccctgtgctggcattcttgcctctctctctctttctctctctctgtctcttagccttgcagccgtttccctctgcgattcatgtaagtgtgactcgatttcagggaaagggaactcgcgtgggctgaggagaccggagtggacgggctggggaaggcaccgtgatgcccgcaaccccgtccctgaaggtggtccatgagctgcctgcctgtaccctctgtgcggggccgctggaggatgcggtgaccattccctgtggacacaccttctgccggctctgcctccccgcgctctcccagatgggggcccaatcctcgggcaagatcctgctctgcccgctctgccaagaggaggagcaggcagagactcccatggcccctgtgcccctgggcccgctgggagaaacttactgcgaggagcacggcgagaagatctacttcttctgcgagaacgatgccgagttcctctgtgtgttctgcagggagggtcccacgcaccaggcgcacaccgtggggttcctggacgaggccattcagccctaccgggatcgtctcaggagtcgactggaagctctgagcacggagagagatgagattgaggatgtaaagtgtcaagaagaccagaagcttcaagtgctgctgactcagatcgaaagcaagaagcatcaggtggaaacagcttttgagaggctgcagcaggagctggagcagcagcgatgtctcctgctggccaggctgagggagctggagcagcagatttggaaggagagggatgaatatatcacaaaggtctctgaggaagtcacccggcttggagcccaggtcaaggagctggaggagaagtgtcagcagccagcaagtgagcttctacaagatgtcagaggaacaattgtcacgtgtgagatgaagacttttgtgagtcctgaggccatttctcctgaccttgtcaagaagatccgtgatttccacaggaaaatactcaccctcccagagatgatgaggatgttctcagaaaacttggcgcatcatctggaaatagattcaggggtcatcactctggaccctcagaccgccagccggagcctggttctctcggaagacaggaagtcagtgaggtacacccggcagaagaagagcctgccagacagccccctgcgcttcgacggcctcccggcggttctgggcttcccgggcttctcctccgggcgccaccgctggcaggttgacctgcagctgggcgacggcggcggctgcacggtgggggtggccggggagggggtgaggaggaagggagagatgggactcagcgccgaggacggcgtctgggccgtgatcatctcgcaccagcagtgctgggccagcacctccccgggcaccgacctgccgctgagcgagatcccgcgcggcgtgagagtcgccctggactacgaggcggggcaggtgaccctccacaacgcccagacccaggagcccatcttcaccttcactgcctctttctccggcaaagtcttccctttctttgccgtctggaaaaaaggttcctgccttacgctgaaaggctgaagtggggcgcgcgaagggcggcgaagcggagacggcggctctccgggatccagctccgcccctggccagtgtgcggcccgggggctccctgtgcccgcgtgaggcgagagaacaggggacttgagtctcgaacagcggttgtttttactttatttatcttaggccctcagctccctgacgtcctgagcctccctgtgacgctctggccttctctgtacctcagagtgcagaaccacagacggcttcggctgtgcctagggcaacagccaacctaggagccagcgggctttcggggaaaaaaaagaaaaagacatctaaaataaaatgtttaaactgtttc

SEQ ID NO: 194741 - DNA, 2900 bp, Homo sapiens
  Payload ID: 18477
  Gene Name: tripartite motif containing 16
  Uniprot ID: O95361
  ENST ID: ENST00000336708
  CDS Start-End: 558-2252
gatttatggaaagcacctggtgcgtgttctgccctctgaggaccctgccctttcccaaaaggggtatcttaagaaggaaaatatggctgctctttgccggacagcagagtcccagtaggatttccattttccaaacctggtatcatctcctagttggaagaagtggtaagcccacgaacacaaatgcaggagggagaggtgccaagaagcagcggtacacagcaggcacagagacacgtggtcttcagcagagcctatggggttcagatgattcacataagaatagaagtttcagggctggacctggggaggcagcctgagcctgagccggctgtcctgagcctgagtactctagctgccttgtcgtcatcgcatctggctgccatccagcgccagcacacagtaatgagtggccgagcttcctctgggagggaggaaacagttaaaatcttgcagcagctgcaatcatctaggcgtggttctcttgtctgacttgggctgcacagatcctgggccaagggacagaagaaagacagcctaggagcagagcctcccagatggctgagttggatctaatggctccagggccactgcccagggccactgctcagcccccagcccctctcagcccagactctgggtcacccagcccagattctgggtcagccagcccagtggaagaagaggacgtgggctcctcggagaagcttggcagggagacggaggaacaggacagcgactctgcagagcagggggatcctgctggtgaggggaaagaggtcctgtgtgacttctgccttgatgacaccagaagagtgaaggcagtgaagtcctgtctaacctgcatggtgaattactgtgaagagcacttgcagccgcatcaggtgaacatcaaactgcaaagccacctgctgaccgagccagtgaaggaccacaactggcgatactgccctgcccaccacagcccactgtctgccttctgctgccctgatcagcagtgcatctgccaggactgttgccaggagcacagtggccacaccatagtctccctggatgcagcccgcagggacaaggaggctgaactccagtgcacccagttagacttggagcggaaactcaagttgaatgaaaatgccatctccaggctccaggctaaccaaaagtctgttctggtgtcggtgtcagaggtcaaagcggtggctgaaatgcagtttggggaactccttgctgctgtgaggaaggcccaggccaatgtgatgctcttcttagaggagaaggagcaagctgcgctgagccaggccaacggtatcaaggcccacctggagtacaggagtgccgagatggagaagagcaagcaggagctggagaggatggcggccatcagcaacactgtccagttcttggaggagtactgcaagtttaagaacactgaagacatcaccttccctagtgtttacgtagggctgaaggataaactctcgggcatccgcaaagttatcacggaatccactgtacacttaatccagttgctggagaactataagaaaaagctccaggagttttccaaggaagaggagtatgacatcagaactcaagtgtctgccgttgttcagcgcaaatattggacttccaaacctgagcccagcaccagggaacagttcctccaatatgcgtatgacatcacgtttgacccggacacagcacacaagtatctccggctgcaggaggagaaccgcaaggtcaccaacaccacgccctgggagcatccctacccggacctccccagcaggttcctgcactggcggcaggtgctgtcccagcagagtctgtacctgcacaggtactattttgaggtggagatcttcggggcaggcacctatgttggcctgacctgcaaaggcatcgaccggaaaggggaggagcgcaacagttgcatttccggaaacaacttctcctggagcctccaatggaacgggaaggagttcacggcctggtacagtgacatggagaccccactcaaagctggccctttccggaggctcggggtctatatcgacttcccgggagggatcctttccttctatggcgtagagtatgataccatgactctggttcacaagtttgcctgcaaattttcagaaccagtctatgctgccttctggctttccaagaaggaaaacgccatccggattgtagatctgggagaggaacccgagaagccagcaccgtccttggtggggactgctccctagactccaggagccatatcccagacctttgccagctacagtgatgggatttgcattttagggtgatttgggggcagaaataactgctgatggtagctggcttttgaaatcctatggggtctctgaatgaaaacattctccagctgctctcttttgctccatatggtgctgttctctatgtgtttgcagtaattcttttttttttttttgagacggagtctcgcactgttgcccaggctggagagcagtggcgcgatcttggctcactgcaagctccgcctcccgagttcaagcaattctcctgcctcagcctcccgagtagctgggattacaggtgcctgccaccacacccagctaatgttttgtatttttagtagagatggggtttcaccatgttggccaggcagatctcaaactcctgacctcgtgatgcacccacctcggcctcccaaagtgctgggattacatgcgtgagccactgcgccctgcctgtttgtagtaatttttaggcaccaaatctccctcatcttctagtgccattctcctctctgttcaggtaaatgtcacactgtgcccagaatggatgaccaggaaccttaaagagtggctgaaaagattgcagagttatcataataaattgctaacttgcgt

SEQ ID NO: 194742 - DNA, 3184 bp, Homo sapiens
  Payload ID: 18477
  Gene Name: tripartite motif containing 16
  ENST ID: ENST00000416464
  CDS Start-End: 1225-2529
tttctctggaggatctccgcgcgtggcgagtctgtgtcctccctgtcccccagagcagacaccctctctgtgtctggaccggggaggagcagacgctggacagggtgtgtgtgttcagcagtggattgtcagacttggggtcccggctgctcccttttgggtctctccccgggcccgctgatctgactgtaattccttctgctggagctagggttcggccaccttgacgcgccccctctgcccctggagcgtgtctttgggttttgtgtgtgtgggagtggggtgtatgtgtgtttcttatccgagacacctctgggtcgtttgcttggaaaccggctgagggcccgcataccctggagcatttggttgcaaagtgaggcaggtagcgcccaaggctcctgtaccagggccaggttaggcaccaacgcgtcccttatgtctctgcagcctgcagtgtggtggaaccgtttcatagactgaagtgtgaacgtaggaggggatggatatcagagatctgtttatccacattttcagagagtggtattgctctgatgtgagcgtaggcaggttactctctgtgtctcgtgttctttacctgtaatttgaggtttgttgtacctactattaagtggtggttgtgaggattaaatggaattttgacatgcaacagttgacacagggccagacaccaagtaagggatcaatcagttgttgcttttattaatagtaggcatccatctgcccatttgcacgtaagaaggaaacacccaagaatgaaaagtagcttgttgtaggtcacccagccaactagcacatagtggaaattagaatccaggcactcccagcagggcactttccaccaccctgcacttttgtattcatcaggcacagtatccttactgttgtctgtaactgtctatgttcccagtgtctgactctgcagggccctagtggtataaaggtactgagacttgcctgtgttcagggcttcctgaagattaaatggctgccgaagttcttgagtttagctttagctcaaaagatactgcgtcagactctgcgttctgagtagagtctcagagaatgaaaaaagaaatacaatgaaaaaggggaaaacttcaatccagaacctcttaccacagtttctggtagaatgctggcaatttccaggaagatacgtggagaacggaaaggttgctacacccaaatagtgaagcaaaggctatgattatggaggattggacctgcaaactccagaacagagttctgccctctgaggaccctgccctttcccaaaaggggtatcttaagaaggaaaatatggctgctctttgccggacagcagagtcccaggctgaactccagtgcacccagttagacttggagcggaaactcaagttgaatgaaaatgccatctccaggctccaggctaaccaaaagtctgttctggtgtcggtgtcagaggtcaaagcggtggctgaaatgcagtttggggaactccttgctgctgtgaggaaggcccaggccaatgtgatgctcttcttagaggagaaggagcaagctgcgctgagccaggccaacggtatcaaggcccacctggagtacaggagtgccgagatggagaagagcaagcaggagctggagaggatggcggccatcagcaacactgtccagttcttggaggagtactgcaagtttaagaacactgaagacatcaccttccctagtgtttacgtagggctgaaggataaactctcgggcatccgcaaagttatcacggaatccactgtacacttaatccagttgctggagaactataagaaaaagctccaggagttttccaaggaagaggagtatgacatcagaactcaagtgtctgccgttgttcagcgcaaatattggacttccaaacctgagcccagcaccagggaacagttcctccaatatgcgtatgacatcacgtttgacccggacacagcacacaagtatctccggctgcaggaggagaaccgcaaggtcaccaacaccacgccctgggagcatccctacccggacctccccagcaggttcctgcactggcggcaggtgctgtcccagcagagtctgtacctgcacaggtactattttgaggtggagatcttcggggcaggcacctatgttggcctgacctgcaaaggcatcgaccggaaaggggaggagcgcaacagttgcatttccggaaacaacttctcctggagcctccaatggaacgggaaggagttcacggcctggtacagtgacatggagaccccactcaaagctggccctttccggaggctcggggtctatatcgacttcccgggagggatcctttccttctatggcgtagagtatgataccatgactctggttcacaagtttgcctgcaaattttcagaaccagtctatgctgccttctggctttccaagaaggaaaacgccatccggattgtagatctgggagaggaacccgagaagccagcaccgtccttggtggggactgctccctagactccaggagccatatcccagacctttgccagctacagtgatgggatttgcattttagggtgatttgggggcagaaataactgctgatggtagctggcttttgaaatcctatggggtctctgaatgaaaacattctccagctgctctcttttgctccatatggtgctgttctctatgtgtttgcagtaattcttttttttttttttgagacggagtctcgcactgttgcccaggctggagagcagtggcgcgatcttggctcactgcaagctccgcctcccgagttcaagcaattctcctgcctcagcctcccgagtagctgggattacaggtgcctgccaccacacccagctaatgttttgtatttttagtagagatggggtttcaccatgttggccaggcagatctcaaactcctgacctcgtgatgcacccacctcggcctcccaaagtgctgggattacatgcgtgagccactgcgccctgcctgtttgtagtaatttttaggcaccaaatctccctcatcttctagtgccattctcctctctgttcaggtaaatgtcacactgtgcccagaatggatgaccaggaaccttaaagagtggctgaaaagattgcagagttatcataataaattgctaacttgcgtatttcct

SEQ ID NO: 194743 - DNA, 1979 bp, Homo sapiens
  Payload ID: 18477
  Gene Name: tripartite motif containing 16
  Uniprot ID: O95361
  ENST ID: ENST00000577886
  CDS Start-End: 278-1324
gtgcctcccggctggtttctgagatcagccacagaagttaaacttctttccagggaagaagggcggggatgtcagggctggagagtgcccgtgtccttctgtgtgcattgggctccttcctccttaattctctgctttccacttttaggctgaactccagtgcacccagttagacttggagcggaaactcaagttgaatgaaaatgccatctccaggctccaggctaaccaaaagtctgttctggtgtcggtgtcagaggtcaaagcggtggctgaaatgcagtttggggaactccttgctgctgtgaggaaggcccaggccaatgtgatgctcttcttagaggagaaggagcaagctgcgctgagccaggccaacggtatcaaggcccacctggagtacaggagtgccgagatggagaagagcaagcaggagctggagaggatggcggccatcagcaacactgtccagttcttggaggagtactgcaagtttaagaacactgaagacatcaccttccctagtgtttacgtagggctgaaggataaactctcgggcatccgcaaagttatcacggaatccactgtacacttaatccagttgctggagaactataagaaaaagctccaggagttttccaaggaagaggagtatgacatcagaactcaagtgtctgccgttgttcagcgcaaatattggacttccaaacctgagcccagcaccagggaacagttcctccaatatgcgtatgacatcacgtttgacccggacacagcacacaagtatctccggctgcaggaggagaaccgcaaggtcaccaacaccacgccctgggagcatccctacccggacctccccagcaggttcctgcactggcggcaggtgctgtcccagcagagtctgtacctgcacaggtactattttgaggtggagatcttcggggcaggcacctatgttggcctgacctgcaaaggcatcgaccggaaaggggaggagcgcaacagttgcatttccggaaacaacttctcctggagcctccaatggaacgggaaggagttcacggcctggtacagtgacatggagaccccactcaaagctggccctttccggaggctcggggtctatatcgacttcccgggagggatcctttccttctatggcgtagagtatgataccatgactctggttcacaagtttgcctgcaaattttcagaaccagtctatgctgccttctggctttccaagaaggaaaacgccatccggattgtagatctgggagaggaacccgagaagccagcaccgtccttggtggggactgctccctagactccaggagccatatcccagacctttgccagctacagtgatgggatttgcattttagggtgatttgggggcagaaataactgctgatggtagctggcttttgaaatcctatggggtctctgaatgaaaacattctccagctgctctcttttgctccatatggtgctgttctctatgtgtttgcagtaattcttttttttttttttgagacggagtctcgcactgttgcccaggctggagagcagtggcgcgatcttggctcactgcaagctccgcctcccgagttcaagcaattctcctgcctcagcctcccgagtagctgggattacaggtgcctgccaccacacccagctaatgttttgtatttttagtagagatggggtttcaccatgttggccaggcagatctcaaactcctgacctcgtgatgcacccacctcggcctcccaaagtgctgggattacatgcgtgagccactgcgccctgcctgtttgtagtaatttttaggcaccaaatctccctcatcttctagtgccattctcctctctgttcaggtaaatgtcacactgtgcccagaatggatgaccaggaaccttaaagagtggctgaaaagattgcagagttatcataataaattgctaacttgcgtatttcct

SEQ ID NO: 194744 - DNA, 3206 bp, Homo sapiens
  Payload ID: 18477
  Gene Name: tripartite motif containing 16
  Uniprot ID: O95361
  ENST ID: ENST00000578237
  CDS Start-End: 857-2551
ctttctctggaggatctccgcgcgtggcgagtctgtgtcctccctgtcccccagagcagacaccctctctgtgtctggaccggggaggagcagacgctggacaggtttctggtagaatgctggcaatttccaggaagatacgtggagaacggaaaggttgctacacccaaatagtgaagcaaaggctatgattatggaggattggacctgcaaactccagaacagagcaaccttgtaaaatgtgtgtgggcagcacagagaacttgggcaagttaacagtttcctcatctgtgaatactgatttatggaaagcacctggtgcgtgttctgccctctgaggaccctgccctttcccaaaaggggtatcttaagaaggaaaatatggctgctctttgccggacagcagagtcccagtaggatttccattttccaaacctggtatcatctcctagttggaagaagtggtaagcccacgaacacaaatgcaggagggagaggtgccaagaagcagcggtacacagcaggcacagagacacgtggtcttcagcagagcctatggggttcagatgattcacataagaatagaagtttcagggctggacctggggaggcagcctgagcctgagccggctgtcctgagcctgagtactctagctgccttgtcgtcatcgcatctggctgccatccagcgccagcacacagtaatgagtggccgagcttcctctgggagggaggaaacagttaaaatcttgcagcagctgcaatcatctaggcgtggttctcttgtctgacttgggctgcacagatcctgggccaagggacagaagaaagacagcctaggagcagagcctcccagatggctgagttggatctaatggctccagggccactgcccagggccactgctcagcccccagcccctctcagcccagactctgggtcacccagcccagattctgggtcagccagcccagtggaagaagaggacgtgggctcctcggagaagcttggcagggagacggaggaacaggacagcgactctgcagagcagggggatcctgctggtgaggggaaagaggtcctgtgtgacttctgccttgatgacaccagaagagtgaaggcagtgaagtcctgtctaacctgcatggtgaattactgtgaagagcacttgcagccgcatcaggtgaacatcaaactgcaaagccacctgctgaccgagccagtgaaggaccacaactggcgatactgccctgcccaccacagcccactgtctgccttctgctgccctgatcagcagtgcatctgccaggactgttgccaggagcacagtggccacaccatagtctccctggatgcagcccgcagggacaaggaggctgaactccagtgcacccagttagacttggagcggaaactcaagttgaatgaaaatgccatctccaggctccaggctaaccaaaagtctgttctggtgtcggtgtcagaggtcaaagcggtggctgaaatgcagtttggggaactccttgctgctgtgaggaaggcccaggccaatgtgatgctcttcttagaggagaaggagcaagctgcgctgagccaggccaacggtatcaaggcccacctggagtacaggagtgccgagatggagaagagcaagcaggagctggagaggatggcggccatcagcaacactgtccagttcttggaggagtactgcaagtttaagaacactgaagacatcaccttccctagtgtttacgtagggctgaaggataaactctcgggcatccgcaaagttatcacggaatccactgtacacttaatccagttgctggagaactataagaaaaagctccaggagttttccaaggaagaggagtatgacatcagaactcaagtgtctgccgttgttcagcgcaaatattggacttccaaacctgagcccagcaccagggaacagttcctccaatatgcgtatgacatcacgtttgacccggacacagcacacaagtatctccggctgcaggaggagaaccgcaaggtcaccaacaccacgccctgggagcatccctacccggacctccccagcaggttcctgcactggcggcaggtgctgtcccagcagagtctgtacctgcacaggtactattttgaggtggagatcttcggggcaggcacctatgttggcctgacctgcaaaggcatcgaccggaaaggggaggagcgcaacagttgcatttccggaaacaacttctcctggagcctccaatggaacgggaaggagttcacggcctggtacagtgacatggagaccccactcaaagctggccctttccggaggctcggggtctatatcgacttcccgggagggatcctttccttctatggcgtagagtatgataccatgactctggttcacaagtttgcctgcaaattttcagaaccagtctatgctgccttctggctttccaagaaggaaaacgccatccggattgtagatctgggagaggaacccgagaagccagcaccgtccttggtggggactgctccctagactccaggagccatatcccagacctttgccagctacagtgatgggatttgcattttagggtgatttgggggcagaaataactgctgatggtagctggcttttgaaatcctatggggtctctgaatgaaaacattctccagctgctctcttttgctccatatggtgctgttctctatgtgtttgcagtaattcttttttttttttttgagacggagtctcgcactgttgcccaggctggagagcagtggcgcgatcttggctcactgcaagctccgcctcccgagttcaagcaattctcctgcctcagcctcccgagtagctgggattacaggtgcctgccaccacacccagctaatgttttgtatttttagtagagatggggtttcaccatgttggccaggcagatctcaaactcctgacctcgtgatgcacccacctcggcctcccaaagtgctgggattacatgcgtgagccactgcgccctgcctgtttgtagtaatttttaggcaccaaatctccctcatcttctagtgccattctcctctctgttcaggtaaatgtcacactgtgcccagaatggatgaccaggaaccttaaagagtggctgaaaagattgcagagttatcataataaattgctaacttgcgtatttcct

SEQ ID NO: 194745 - DNA, 560 bp, Homo sapiens
  Payload ID: 18477
  Gene Name: tripartite motif containing 16
  ENST ID: ENST00000577372
  CDS Start-End: 216-560
gctgtatcagtaattccaaaagggaggaagttataatgagccatgtctgacctcccttcccatcatggcctgaactggtttttcaggctgaactccagtgcacccagttagacttggagcggaaactcaagttgaatgaaaatgccatctccaggctccaggctaaccaaaagtctgttctggtgtcggtgtcagaggtcaaagcggtggctgaaatgcagtttggggaactccttgctgctgtgaggaaggcccaggccaatgtgatgctcttcttagaggagaaggagcaagctgcgctgagccaggccaacggtatcaaggcccacctggagtacaggagtgccgagatggagaagagcaagcaggagctggagaggatggcggccatcagcaacactgtccagttcttggaggagtactgcaagtttaagaacactgaagacatcaccttccctagtgtttacgtagggctgaaggataaactctcgggcatccgcaaagttatcacggaatccactgtacacttaatccagttgctggagaactataagaaaaag

SEQ ID NO: 194746 - DNA, 486 bp, Homo sapiens
  Payload ID: 18477
  Gene Name: tripartite motif containing 16
  ENST ID: ENST00000581200
  CDS Start-End: 198-486
tttccggcccctttctctggaggatctccgcgcgtggcgagtctgtgtcctccctgtcccccagagcagacaccctctctgtgtctggaccggggaggagcagacgctggacaggtttctggtagaatgctggcaatttccaggaagatacgtggagaacggaaaggttgctacacccaaatagtgaagcaaaggctatgattatggaggattggacctgcaaactccagaacagagttctgccctctgaggaccctgccctttcccaaaaggggtatcttaagaaggaaaatatggctgctctttgccggacagcagagtcccaggctgaactccagtgcacccagttagacttggagcggaaactcaagttgaatgaaaatgccatctccaggctccaggctaaccaaaagtctgttctggtgtcggtgtcagaggtcaaagcggtggctgaaatgcagtttggggaactccttgctgctgtga

SEQ ID NO: 194747 - DNA, 999 bp, Homo sapiens
  Payload ID: 18477
  Gene Name: tripartite motif containing 16
  ENST ID: ENST00000579219
  CDS Start-End: 248-670
acagaagttaaacttctttccagggaagaagggcggggatgtcagggctggagagtgcccgtgtccttctgtgtgcattgggctccttcctccttaattctctgctttccacttttaggctgaactccagtgcacccagttagacttggagcggaaactcaagttgaatgaaaatgccatctccaggctccaggctaaccaaaagtctgttctggtgtcggtgtcagaggtcaaagcggtggctgaaatgcagtttggggaactccttgctgctgtgaggaaggcccaggccaatgtgatgctcttcttagaggagaaggagcaagctgcgctgagccaggccaacggtatcaaggcccacctggagtacaggagtgccgagatggagaagagcaagcaggagctggagaggatggcggccatcagcaacactgtccagttcttggagatgcgtatgacatcacgtttgacccggacacagcacacaagtatctccggctgcaggaggagaaccgcaaggtcaccaacaccacgccctgggagcatccctacccggacctccccagcaggttcctgcactggcggcaggtgctgtcccagcagagtctgtacctgcacaggtactattttgaggtggagatcttcggggcaggcacctatgttggcctgacctgcaaaggcatcgaccggaaaggggaggagcgcaacagttgcatttccggaaacaacttctcctggagcctccaatggaacgggaaggagttcacggcctggtacagtgacatggagaccccactcaaagctggccctttccggaggctcggggtctatatcgacttcccgggagggatcctttccttctatggcgtagagtatgataccatgactctggttcacaagtttgcctgcaaattttcagaaccagtctatgctgccttctggctttccaagaaggaaaacgccatccggattgtagatctgggagaggaacccgagaag

SEQ ID NO: 194748 - DNA, 580 bp, Homo sapiens
  Payload ID: 18477
  Gene Name: tripartite motif containing 16
  ENST ID: ENST00000580110
  CDS Start-End: 246-580
agaagttaaacttctttccagggaagaagggcggggatgtcagggctggagagtgcccgtgtccttctgtgtgcattgggctccttcctccttaattctctgctttccacttttaggctgaactccagtgcacccagttagacttggagcggaaactcaagttgaatgaaaatgccatctccaggctccaggctaaccaaaagtctgttctggtgtcggtgtcagaggtcaaagcggtggctgaaatgcagtttggggaactccttgctgctgtgaggaaggcccaggccaatgtgatgctcttcttagaggagaaggagcaagctgcgctgagccaggccaacggtatcaaggcccacctggagtacaggagtgccgagatggagaagagcaagcaggagctggagaggatggcggccatcagcaacactgtccagttcttggagaggagtatgacatcagaactcaagtgtctgccgttgttcagcgcaaatattggacttccaaacctgagcccagcaccagggaacagttcctccaatatgcgtatgacatcacgtttgacccggacacagcacac

SEQ ID NO: 194749 - DNA, 426 bp, Homo sapiens
  Payload ID: 18477
  Gene Name: tripartite motif containing 16
  ENST ID: ENST00000494759
  CDS Start-End: 1-168
gggtatcttaagaaggaaaatatggctgctctttgccggacagcagagtcccagaaccccatgcaggtgtttcagggctttatgtcattcaaggatgtggctgtgaacttcactaggaagaatggagagaactggaccttgctcagagagtcttgtacagggatgtaatgctggagaactataggaacctggtctccttggtaggatttccattttccaaacctggtatcatctcctagttggaagaagtggtaagcccacgaacacaaatgcaggagggagaggtgccaagaagcagcggtacacgagaaagacagggctggagaccagtttgctgatagtgaccccaaaccagaaagttcattgggcctgcacctccagtagaactggacctgaggcagctaggaataggatgcatgtttctga

SEQ ID NO: 194750 - DNA, 552 bp, Homo sapiens
  Payload ID: 18477
  Gene Name: tripartite motif containing 16
  ENST ID: ENST00000578744
  CDS Start-End: 1-552
ctttcccaaaaggggtatcttaagaaggaaaatatggctgctctttgccggacagcagagtcccaggagaaagacagggctggagaccagtttgctgatagtgaccccaaaccagaaagttcattgggcctgcacctccaggctgaactccagtgcacccagttagacttggagcggaaactcaagttgaatgaaaatgccatctccaggctccaggctaaccaaaagtctgttctggtgtcggtgtcagaggtcaaagcggtggctgaaatgcagtttggggaactccttgctgctgtgaggaaggcccaggccaatgtgatgctcttcttagaggagaaggagcaagctgcgctgagccaggccaacggtatcaaggcccacctggagtacaggagtgccgagatggagaagagcaagcaggagctggagaggatggcggccatcagcaacactgtccagttcttggaggagtactgcaagtttaagaacactgaagacatcaccttccctagtgtttacgtagggctgaaggataaactctcgggcatc

SEQ ID NO: 194751 - DNA, 791 bp, Homo sapiens
  Payload ID: 18477
  Gene Name: tripartite motif containing 16
  ENST ID: ENST00000577446
  CDS Start-End: 1-699
gccaacggtatcaaggcccacctggagtacaggagtgccgagatggagaagagcaagcaggagctggagaggatggcggccatcagcaacactgtccagttcttggaggagtactgcaagtttaagaacactgaagacatcaccttccctagtgtttacgtagggctgaaggataaactctcgggcatccgcaaagttatcacggaatccactgtacacttaatccagttgctggagaactataagaaaaagctccaggagttttccaaggaagaggagtatgacatcagaactcaagtgtctgccgttgttcagcgcaaatattggacttccaaacctgagcccagcaccagggaacagttcctccaatatgcgtatgacatcacgtttgacccggacacagcacacaagtatctccggctgcaggaggagaaccgcaaggtcaccaacaccacgccctgggagcatccctacccggacctccccagcaggttcctgcactggcggcaggtgctgtcccagcagagtctgtacctgcacaggtactattttgaggtggagatcttcggggcaggcacctatgttggcctgacctgcaaaggcatcgaccggaaaggggaggagcgcaacagttgcatttccggaaacaacttctcctggagcctccaatggaacgggaaggagttcacggcctggtaaatgtcacactgtgcccagaatggatgaccaggaaccttaaagagtggctgaaaagattgcagagttatcataataaattgctaacttgcgta

SEQ ID NO: 194752 - DNA, 2048 bp, Homo sapiens
  Payload ID: 18478
  Gene Name: tripartite motif containing 16-like
  Uniprot ID: Q309B1
  ENST ID: ENST00000395671
  CDS Start-End: 344-1390
actgtattttcgctgactcatgctgactgcagccccaggagggcacgggctcaccgccaacccttcgtgcctcccggctggtttctgagatcagccacagaagttaaacttctttccagggaagaagggcggggatgtcagggctggagagtgcccgtgtccttctgtgtgcattgggctccttcctccttaattctctgctttccacttttaggctgaactccagtgcacccagttagacttggagcggaaactcaagttgaatgaaaatgccatctccaggctccaggctaaccaaaagtctgttctggtgtcggtgtcagaggtcaaagcagtggctgaaatgcagtttggggaactccttgctgctgtgaggaaggcccaggccaatgtgatgctcttcttagaggagaaggagcaagctgcgctgagccaggccaacggtatcaaggcccacctggagtacaggagtgccgagatggagaagagtaagcaggagctggagacgatggcggccatcagcaacactgtccagttcttggaggagtactgcaagtttaagaacactgaagacatcaccttccctagtgtttacatagggctgaaggataaactctcgggcatccgcaaagttatcacggaatccactgtacacttaatccagttgctggagaactataagaaaaagctccaggagttttccaaggaagaggagtatgacatcagaactcaagtgtctgccattgttcagcgcaaatattggacttccaaacctgagcccagcaccagggaacagttcctccaatatgtgcatgacatcacgttcgacccggacacagcacacaagtatctccggctgcaggaggagaaccgcaaggtcaccaacaccacgccctgggagcatccctacccggacctccccagcaggttcctgcactggcggcaggtgctgtcccagcagagtctgtacctgcacaggtactattttgaggtggagatcttcggggcaggcacctatgttggcctgacctgcaaaggcatcgaccagaaaggggaggagcgcagcagttgcatttccggaaacaacttctcctggagcctccaatggaacgggaaggagttcacggcctggtacagtgacatggagaccccactcaaagctggccctttctggaggctcggggtctatattgacttcccaggagggatcctttccttctatggcgtagagtatgattccatgactctggttcacaagtttgcctgcaagttttcagaaccagtctatgctgccttctggctttccaagaaggaaaacgccatccggattgtagatctgggagaggaacccgagaagccagcaccgtccttggtggggactgctccctagactccaggagccatatcccagacctttgccagctacagtgatgggatttgcattttagggtgatttgggggcaaaaataactgctgatggtagctggcttttgaaatcctatggggtctctgaatgaaaacattctccagctgctctcttttgctccatatggtgctgttctctatgtgtttgcagtaattctttttttttttttttttgagacggagtctcgcactgttgcccaggctggagtgcagtggcgtgatcttggctcactgcaagctccgcctcccgagttcaagcaattctcctgcctcagcctcccgagtagctgggattacaggtgcctgccaccacacccagctaacgttttgtatttttagtagagatggggtttcaccatgttggccaggcagatctcaaacttctgacctcgtgatgcactcacctcggcctcccaaagtgctgggattacaggcgtgagccactgcgccctgcctgtttgtagtaatttttaggcaccaaatctccctcatcttctagtgccattctcctctctgttcaggtaaatgtcacactgtgcccagaatggatgaccaggaaccttcaagagtggctgaaaagattgcagagttatcataataaattgctaacttgcgtatttcct

SEQ ID NO: 194753 - DNA, 588 bp, Homo sapiens
  Payload ID: 18478
  Gene Name: tripartite motif containing 16-like
  ENST ID: ENST00000424146
  CDS Start-End: 246-588
agaagttaaacttctttccagggaagaagggcggggatgtcagggctggagagtgcccgtgtccttctgtgtgcattgggctccttcctccttaattctctgctttccacttttaggctgaactccagtgcacccagttagacttggagcggaaactcaagttgaatgaaaatgccatctccaggctccaggctaaccaaaagtctgttctggtgtcggtgtcagaggtcaaagcagtggctgaaatgcagtttggggaactccttgctgctgtgaggaaggcccaggccaatgtgatgctcttcttagaggagaaggagcaagctgcgctgagccaggccaacggtatcaaggcccacctggagtacaggagtgccgagatggagaagagtaagcaggagctggagacgatggcggccatcagcaacactgtccagttcttggagaggagtatgacatcagaactcaagtgtctgccattgttcagcgcaaatattggacttccaaacctgagcccagcaccagggaacagttcctccaatatgtgcatgacatcacgttcgacccggacacagcacacaagtatct

SEQ ID NO: 194754 - DNA, 999 bp, Homo sapiens
  Payload ID: 18478
  Gene Name: tripartite motif containing 16-like
  Uniprot ID: Q309B1
  ENST ID: ENST00000414850
  CDS Start-End: 248-670
acagaagttaaacttctttccagggaagaagggcggggatgtcagggctggagagtgcccgtgtccttctgtgtgcattgggctccttcctccttaattctctgctttccacttttaggctgaactccagtgcacccagttagacttggagcggaaactcaagttgaatgaaaatgccatctccaggctccaggctaaccaaaagtctgttctggtgtcggtgtcagaggtcaaagcagtggctgaaatgcagtttggggaactccttgctgctgtgaggaaggcccaggccaatgtgatgctcttcttagaggagaaggagcaagctgcgctgagccaggccaacggtatcaaggcccacctggagtacaggagtgccgagatggagaagagtaagcaggagctggagacgatggcggccatcagcaacactgtccagttcttggagatgtgcatgacatcacgttcgacccggacacagcacacaagtatctccggctgcaggaggagaaccgcaaggtcaccaacaccacgccctgggagcatccctacccggacctccccagcaggttcctgcactggcggcaggtgctgtcccagcagagtctgtacctgcacaggtactattttgaggtggagatcttcggggcaggcacctatgttggcctgacctgcaaaggcatcgaccagaaaggggaggagcgcagcagttgcatttccggaaacaacttctcctggagcctccaatggaacgggaaggagttcacggcctggtacagtgacatggagaccccactcaaagctggccctttctggaggctcggggtctatattgacttcccaggagggatcctttccttctatggcgtagagtatgattccatgactctggttcacaagtttgcctgcaagttttcagaaccagtctatgctgccttctggctttccaagaaggaaaacgccatccggattgtagatctgggagaggaacccgagaag

SEQ ID NO: 194755 - DNA, 560 bp, Homo sapiens
  Payload ID: 18478
  Gene Name: tripartite motif containing 16-like
  ENST ID: ENST00000573443
  CDS Start-End: 216-560
gctgtatcagtaattccaaaagggaggaagttataatgagccatgtctgacctcccttcccatcatggcctgaactggtttttcaggctgaactccagtgcacccagttagacttggagcggaaactcaagttgaatgaaaatgccatctccaggctccaggctaaccaaaagtctgttctggtgtcggtgtcagaggtcaaagcagtggctgaaatgcagtttggggaactccttgctgctgtgaggaaggcccaggccaatgtgatgctcttcttagaggagaaggagcaagctgcgctgagccaggccaacggtatcaaggcccacctggagtacaggagtgccgagatggagaagagtaagcaggagctggagacgatggcggccatcagcaacactgtccagttcttggaggagtactgcaagtttaagaacactgaagacatcaccttccctagtgtttacatagggctgaaggataaactctcgggcatccgcaaagttatcacggaatccactgtacacttaatccagttgctggagaactataagaaaaag

SEQ ID NO: 194756 - DNA, 791 bp, Homo sapiens
  Payload ID: 18478
  Gene Name: tripartite motif containing 16-like
  ENST ID: ENST00000574042
  CDS Start-End: 1-699
gccaacggtatcaaggcccacctggagtacaggagtgccgagatggagaagagtaagcaggagctggagacgatggcggccatcagcaacactgtccagttcttggaggagtactgcaagtttaagaacactgaagacatcaccttccctagtgtttacatagggctgaaggataaactctcgggcatccgcaaagttatcacggaatccactgtacacttaatccagttgctggagaactataagaaaaagctccaggagttttccaaggaagaggagtatgacatcagaactcaagtgtctgccattgttcagcgcaaatattggacttccaaacctgagcccagcaccagggaacagttcctccaatatgtgcatgacatcacgttcgacccggacacagcacacaagtatctccggctgcaggaggagaaccgcaaggtcaccaacaccacgccctgggagcatccctacccggacctccccagcaggttcctgcactggcggcaggtgctgtcccagcagagtctgtacctgcacaggtactattttgaggtggagatcttcggggcaggcacctatgttggcctgacctgcaaaggcatcgaccagaaaggggaggagcgcagcagttgcatttccggaaacaacttctcctggagcctccaatggaacgggaaggagttcacggcctggtaaatgtcacactgtgcccagaatggatgaccaggaaccttcaagagtggctgaaaagattgcagagttatcataataaattgctaacttgcgta

SEQ ID NO: 194757 - DNA, 1809 bp, Homo sapiens
  Payload ID: 18478
  Gene Name: tripartite motif containing 16-like
  Uniprot ID: Q309B1
  ENST ID: ENST00000572555
  CDS Start-End: 556-1602
gcttctggcccctttctctggaggagctccgcgcgtggcgagtctgtgtcctccctgtcccccagagcagagaaccctctctgtgtctggacgggggaggagcagacgctggacaggtttttggcaaaatgctggcaattcccaggaagatatgtggagaacggaaaggttgctacacccaaatagtggcgcaaaggctatgattatggaggattggacctgcaaactccagaacagagcaaccttgtaaaatgtgtgtgggcagcacagagaccttgggcaagttaacagtttcctcatctgtaaatactgatttatggaaagcacctggtgtatgttctgccctctgaggaccctgccctttcccaaaaggggtatcttaagaaggaaaatatggctgctctttgccggacagcagagtcccaggctgaactccagtgcacccagttagacttggagcggaaactcaagttgaatgaaaatgccatctccaggctccaggctaaccaaaagtctgttctggtgtcggtgtcagaggtcaaagcagtggctgaaatgcagtttggggaactccttgctgctgtgaggaaggcccaggccaatgtgatgctcttcttagaggagaaggagcaagctgcgctgagccaggccaacggtatcaaggcccacctggagtacaggagtgccgagatggagaagagtaagcaggagctggagacgatggcggccatcagcaacactgtccagttcttggaggagtactgcaagtttaagaacactgaagacatcaccttccctagtgtttacatagggctgaaggataaactctcgggcatccgcaaagttatcacggaatccactgtacacttaatccagttgctggagaactataagaaaaagctccaggagttttccaaggaagaggagtatgacatcagaactcaagtgtctgccattgttcagcgcaaatattggacttccaaacctgagcccagcaccagggaacagttcctccaatatgtgcatgacatcacgttcgacccggacacagcacacaagtatctccggctgcaggaggagaaccgcaaggtcaccaacaccacgccctgggagcatccctacccggacctccccagcaggttcctgcactggcggcaggtgctgtcccagcagagtctgtacctgcacaggtactattttgaggtggagatcttcggggcaggcacctatgttggcctgacctgcaaaggcatcgaccagaaaggggaggagcgcagcagttgcatttccggaaacaacttctcctggagcctccaatggaacgggaaggagttcacggcctggtacagtgacatggagaccccactcaaagctggccctttctggaggctcggggtctatattgacttcccaggagggatcctttccttctatggcgtagagtatgattccatgactctggttcacaagtttgcctgcaagttttcagaaccagtctatgctgccttctggctttccaagaaggaaaacgccatccggattgtagatctgggagaggaacccgagaagccagcaccgtccttggtggggactgctccctagactccaggagccatatcccagacctttgccagctacagtgatgggatttgcattttagggtgatttgggggcaaaaataactgctgatggtagctggcttttgaaatcctatggggtctctgaatgaaaacattctccagctgctctcttttgctccatatggtgctgttctctatgtgtttgcagtaattcttttttttttttttt

SEQ ID NO: 194758 - DNA, 984 bp, Homo sapiens
  Payload ID: 18478
  Gene Name: tripartite motif containing 16-like
  ENST ID: ENST00000571542
  CDS Start-End: 311-984
cacagaagttaaacttctttccagggaagaagggcggggatgtcagggctggagagtgcccgtgtccttctgtgtgcattgggctccttcctccttaattctctgctttccacttttaggctgaactccagtgcacccagttagacttggagcggaaactcaagttgaatgaaaatgccatctccaggctccaggctaaccaaaagtctgttctggctccttgaatgtattgaggcctctcctctctgtactatttctgcttgtcatcattttcgtggtgtcggtgtcagaggtcaaagcagtggctgaaatgcagtttggggaactccttgctgctgtgaggaaggcccaggccaatgtgatgctcttcttagaggagaaggagcaagctgcgctgagccaggccaacggtatcaaggcccacctggagtacaggagtgccgagatggagaagagtaagcaggagctggagacgatggcggccatcagcaacactgtccagttcttggaggagtactgcaagtttaagaacactgaagacatcaccttccctagtgtttacatagggctgaaggataaactctcgggcatccgcaaagttatcacggaatccactgtacacttaatccagttgctggagaactataagaaaaagctccaggagttttccaaggaagaggagtatgacatcagaactcaagtgtctgccattgttcagcgcaaatattggacttccaaacctgagcccagcaccagggaacagttcctccaatatgtgcatgacatcacgttcgacccggacacagcacacaagtatctccggctgcaggaggagaaccgcaaggtcaccaacaccacgccctgggagcatccctacccggacctccccagcaggttcctgcactggcggcaggtgctgtcccagcagagtctgtacctgcacaggtactattttgaggtggagatcttcggggcaggcaccta

SEQ ID NO: 194759 - DNA, 3189 bp, Homo sapiens
  Payload ID: 18478
  Gene Name: tripartite motif containing 16-like
  Uniprot ID: Q309B1
  ENST ID: ENST00000449552
  CDS Start-End: 1485-2531
tttctctggaggagctccgcgcgtggcgagtctgtgtcctccctgtcccccagagcagagaaccctctctgtgtctggacgggggaggagcagacgctggacagggtgtgtgtgttcagcagtggattgtcagacttggggtcccggctgctcccttttgggtctctccccgggcccgctgatctgactgtaattccttctgctggagctagggttcggccaccttgacgcgccccctctgcccccggagcgtgtctttgggttttgtgtgtgtgggagtggggtgtatgtgtgtttcttatccgagacacctccgggtcgtttgcttggaaaccggctgagggcccgcacagcctggagcatttggttggaaagtgaggcaggtagcgcccaaggctcctgtaccagggccaggttaggcaccaacgcgtcccttatgtctctgcagcctgcagtgcggtggaaccgttttatagactgacagtgtgaacgtgggaggggatggatatcagagacccgtttatccacattttcagagagtggtattgctccgatgtgagtgtaggcaggttactctctgtgtctcgtgttctttacctgtaatttgaggtttgttgtacctacttttaagtggtggttgtgaggattaaatggaattttgacatgcaacagttgacacagggccagacaccaagtaagggatcaatcagttgttgcttttattaatagtaggcatccatctgcccacttgtacgtaagaaggaaacacccaagaatgaaaagtagcttgttgtaggtcacccagccaactagcacataggggaaattagaatccaggcactcccagcagggcactttccaccaccctgcacttttgtattcatcaggcacaatatccttactgttgtctgtaactgtctatgttcccagtgtctgactctgcagggccctggtggtataaaggtactgagacttgcctgtgtttagggcttcctgaagattaaatggctgctgaagttcttgagtttagctttagctcaaaagatactgcgtcagactctgcgttctgagtagagtctcagacaatgaaaaaagaaatacaatgaaaaaggggaaaacttcaatccagaatctcttgccacagtttttggcaaaatgctggcaattcccaggaagatatgtggagaacggaaaggttgctacacccaaatagtggcgcaaaggctatgattatggaggattggacctgcaaactccagaacagagttctgccctctgaggaccctgccctttcccaaaaggggtatcttaagaaggaaaatatggctgctctttgccggacagcagagtcccaggctgaactccagtgcacccagttagacttggagcggaaactcaagttgaatgaaaatgccatctccaggctccaggctaaccaaaagtctgttctggtgtcggtgtcagaggtcaaagcagtggctgaaatgcagtttggggaactccttgctgctgtgaggaaggcccaggccaatgtgatgctcttcttagaggagaaggagcaagctgcgctgagccaggccaacggtatcaaggcccacctggagtacaggagtgccgagatggagaagagtaagcaggagctggagacgatggcggccatcagcaacactgtccagttcttggaggagtactgcaagtttaagaacactgaagacatcaccttccctagtgtttacatagggctgaaggataaactctcgggcatccgcaaagttatcacggaatccactgtacacttaatccagttgctggagaactataagaaaaagctccaggagttttccaaggaagaggagtatgacatcagaactcaagtgtctgccattgttcagcgcaaatattggacttccaaacctgagcccagcaccagggaacagttcctccaatatgtgcatgacatcacgttcgacccggacacagcacacaagtatctccggctgcaggaggagaaccgcaaggtcaccaacaccacgccctgggagcatccctacccggacctccccagcaggttcctgcactggcggcaggtgctgtcccagcagagtctgtacctgcacaggtactattttgaggtggagatcttcggggcaggcacctatgttggcctgacctgcaaaggcatcgaccagaaaggggaggagcgcagcagttgcatttccggaaacaacttctcctggagcctccaatggaacgggaaggagttcacggcctggtacagtgacatggagaccccactcaaagctggccctttctggaggctcggggtctatattgacttcccaggagggatcctttccttctatggcgtagagtatgattccatgactctggttcacaagtttgcctgcaagttttcagaaccagtctatgctgccttctggctttccaagaaggaaaacgccatccggattgtagatctgggagaggaacccgagaagccagcaccgtccttggtggggactgctccctagactccaggagccatatcccagacctttgccagctacagtgatgggatttgcattttagggtgatttgggggcaaaaataactgctgatggtagctggcttttgaaatcctatggggtctctgaatgaaaacattctccagctgctctcttttgctccatatggtgctgttctctatgtgtttgcagtaattctttttttttttttttttgagacggagtctcgcactgttgcccaggctggagtgcagtggcgtgatcttggctcactgcaagctccgcctcccgagttcaagcaattctcctgcctcagcctcccgagtagctgggattacaggtgcctgccaccacacccagctaacgttttgtatttttagtagagatggggtttcaccatgttggccaggcagatctcaaacttctgacctcgtgatgcactcacctcggcctcccaaagtgctgggattacaggcgtgagccactgcgccctgcctgtttgtagtaatttttaggcaccaaatctccctcatcttctagtgccattctcctctctgttcaggtaaatgtcacactgtgcccagaatggatgaccaggaaccttcaagagtggctgaaaagattgcagagttatcataataaattgctaacttgcgtatttcct

SEQ ID NO: 194760 - DNA, 526 bp, Homo sapiens
  Payload ID: 18478
  Gene Name: tripartite motif containing 16-like
  ENST ID: ENST00000577969
  CDS Start-End: 120-281
agtgcacccagttagacttggagcggaaactcaagttgaatgaaaatgccatctccaggctccaggctaaccaaaagtctgttctggtgtcggtgtcagaggtcaaagcagtggctgaaatgcagtttggggaactccttgctgctgtgaggaaggcccaggccaatgtgatgctcttcttagaggagaaggagcaagctgcgctgagccaggccaacggtatcaaggcccacctggagtacaggagtgccgagatggagaagagagtactgcaagtttaagaacactgaagacatcaccttccctagtgtttacatagggctgaaggataaactctcgggcatccgcaaagttatcacggaatccactgtacacttaatccagttgctggagaactataagaaaaagctccaggagttttccaaggaagaggagtatgacatcagaactcaagtgtctgccattgttcagcgcaaatattggacttccaaacctgagcccagcaccagggaacagttcctccaat

SEQ ID NO: 194761 - DNA, 1703 bp, Homo sapiens
  Payload ID: 18478
  Gene Name: tripartite motif containing 16-like
  Uniprot ID: Q309B1
  ENST ID: ENST00000571708
  CDS Start-End: 627-1673
ccaaatagtggcgcaaaggctatgattatggaggattggacctgcaaactccagaacagagcaaccttgtaaaatgtgtgtgggcagcacagagaccttgggcaagttaacagtttcctcatctgtaaatactgatttatggaaagcacctggtgtatgttctgccctctgaggaccctgccctttcccaaaaggggtatcttaagaaggaaaatatggctgctctttgccggacagcagagtcccagaaccccatgcaggtgtttcagggctttacgtcattcaaggatgtggctgtgaacttcactaggaagaatggagagtactggaccttgctcagagagtcttgtacagggatgtaatgctggagaactataggaacctggtctccttgggatttccattttccaaacctggtatcatctcctagttggaagaagtggtaggcccacgaacgcaaatgcaggagggagaggtgccaagaagcagctgtacacgctgaactccagtgcacccagttagacttggagcggaaactcaagttgaatgaaaatgccatctccaggctccaggctaaccaaaagtctgttctggtgtcggtgtcagaggtcaaagcagtggctgaaatgcagtttggggaactccttgctgctgtgaggaaggcccaggccaatgtgatgctcttcttagaggagaaggagcaagctgcgctgagccaggccaacggtatcaaggcccacctggagtacaggagtgccgagatggagaagagtaagcaggagctggagacgatggcggccatcagcaacactgtccagttcttggaggagtactgcaagtttaagaacactgaagacatcaccttccctagtgtttacatagggctgaaggataaactctcgggcatccgcaaagttatcacggaatccactgtacacttaatccagttgctggagaactataagaaaaagctccaggagttttccaaggaagaggagtatgacatcagaactcaagtgtctgccattgttcagcgcaaatattggacttccaaacctgagcccagcaccagggaacagttcctccaatatgtgcatgacatcacgttcgacccggacacagcacacaagtatctccggctgcaggaggagaaccgcaaggtcaccaacaccacgccctgggagcatccctacccggacctccccagcaggttcctgcactggcggcaggtgctgtcccagcagagtctgtacctgcacaggtactattttgaggtggagatcttcggggcaggcacctatgttggcctgacctgcaaaggcatcgaccagaaaggggaggagcgcagcagttgcatttccggaaacaacttctcctggagcctccaatggaacgggaaggagttcacggcctggtacagtgacatggagaccccactcaaagctggccctttctggaggctcggggtctatattgacttcccaggagggatcctttccttctatggcgtagagtatgattccatgactctggttcacaagtttgcctgcaagttttcagaaccagtctatgctgccttctggctttccaagaaggaaaacgccatccggattgtagatctgggagaggaacccgagaagccagcaccgtccttggtggggactgctccctagactccaggagccatatcccagacctttgcc

SEQ ID NO: 194762 - DNA, 1730 bp, Homo sapiens
  Payload ID: 18479
  Gene Name: tripartite motif containing 17
  Uniprot ID: Q9Y577
  ENST ID: ENST00000295033
  CDS Start-End: 132-1565
ccccaggtccccacgccccgggccgggccgcagcctcctgggcttcgtgggggcagacccagcctttcccggcagcgagcgctcggccaggtgcactaggcgctgtgcgggccccccttccccgcggagccatggaggctgtggaactcgccagaaaactgcaggaggaagctacgtgctccatctgtctggattacttcacagaccctgtgatgaccacctgtggccacaacttctgccgagcctgcatccagctgagctgggaaaaggcgaggggcaagaaggggaggcggaagcggaagggctccttcccctgccccgagtgcagagagatgtccccgcagaggaacctgctgcccaaccggctgctgaccaaggtggccgagatggcgcagcagcatcctggtctgcagaagcaagacctgtgccaggagcaccacgagcccctcaagcttttctgccagaaggaccagagccccatctgtgtggtgtgcagggagtcccgggagcaccggctgcacagggtgctgcccgccgaggaggcagtgcaggggtacaagttgaagctggaggaggacatggagtaccttcgggagcagatcaccaggacagggaatctgcaggccagggaggagcagagcttagccgagtggcagggcaaggtgaaggagcggagagaacgcattgtgctggagtttgagaagatgaacctctacctggtggaagaagagcagaggctcctccaggctctggagacggaagaagaggagactgccagcaggctccgggagagcgtggcctgcctggaccggcagggtcactctctggagctgctgctgctgcagctggaggagcggagcacacaggggcccctccagatgctgcaggacatgaaggaacccctgagcaggaagaacaacgtgagtgtgcagtgcccagaggttgcccccccaaccagacccaggactgtgtgcagagttcccggacagattgaagtgctaagaggctttctagaggatgtggtgcctgatgccacctccgcgtacccctacctcctcctgtatgagagccgccagaggcgctacctcggctcttcgccggagggcagtgggttctgcagcaaggaccgatttgtggcttacccctgtgctgtgggccagacggccttctcctctgggaggcactactgggaggtgggcatgaacatcaccggggacgcgttgtgggccctgggtgtgtgcagggacaacgtgagccggaaagacagggtccccaagtgccccgaaaacggcttctgggtggtgcagctgtccaaggggaccaagtacttatccaccttctctgccctaaccccggtcatgctgatggagcctcccagccacatgggcatcttcctggacttcgaagccggggaagtgtccttctacagtgtaagcgatgggtcccacctgcacacctactcccaggccaccttcccaggccccctgcagcctttcttctgcctgggggctccgaagtctggtcagatggtcatctccacagtgaccatgtgggtgaaaggatagacacagaccgggggactcgggcactgctcctggctctgcagaaggtgtgggccttctgcttactgcaggccacctgccagggttctctggcatcacgctggcagccattagacacacaggggggtttctcaaattctaaatataattgtgattagaactgtcaaa

SEQ ID NO: 194763 - DNA, 808 bp, Homo sapiens
  Payload ID: 18479
  Gene Name: tripartite motif containing 17
  ENST ID: ENST00000355586
  CDS Start-End: 283-808
ctgggcttcgtgggggcagacccagcctttcccggcagcgagcgctcggccaggtgcactaggcgctgtgcgggccccccttccccgcggtgagtagcccccaccccgccgcctaggctaccctcctgtggcgcctgggccacgacctaagcctaacccggtcctcctcgccctccaacgcccggccttcccgcctccgccggccgccgcgtccctggaggggctagcgcgcttcaacaagagtccctcaagcgggaacctgcctcgtgtctcccaggagccatggaggctgtggaactcgccagaaaactgcaggaggaagctacgtgctccatctgtctggattacttcacagaccctgtgatgaccacctgtggccacaacttctgccgagcctgcatccagctgagctgggaaaaggcgaggggcaagaaggggaggcggaagcggaagggctccttcccctgccccgagtgcagagagatgtccccgcagaggaacctgctgcccaaccggctgctgaccaaggtggccgagatggcgcagcagcatcctggtctgcagaagcaagacctgtgccaggagcaccacgagcccctcaagcttttctgccagaaggaccagagccccatctgtgtggtgtgcagggagtcccgggagcaccggctgcacagggtgctgcccgccgaggaggcagtgcaggggtacaagttgaagctggaggaggacatggagtaccttcgggagcagatcaccaggacagggaatctgcaggccagggaggagcagagcttagccgagtggcagg

SEQ ID NO: 194764 - DNA, 2652 bp, Homo sapiens
  Payload ID: 18479
  Gene Name: tripartite motif containing 17
  Uniprot ID: Q9Y577
  ENST ID: ENST00000366697
  CDS Start-End: 958-2391
agatctccactgcgtggggtcgcgagtgttgagattgcagggggcatctatgtgcatgcttgtgtgcctgtgcgtgtgtgcgcgcgtgtacctgtgtgtacatgcatgtatgtttaccgatatgtgcatctgtgcctgtgtgtgctgtgtttgtggatcagtgtttctgtgcgtacatgtttgtatttgtgtggtgtgtatgcgtgggtatgcgtgtgtgcacatgcacgtttgtatacatacatgggtatgtgtatgggtgttcgtctgtgcgtacatgcacacgcgtgttttttctgaaccccacctcactaccgaatggaagagagcttttttcctctgatagcccatcccttcttcctttggtgtacggggttttgttaaagaaaaaattctgacatttgaaaggctctttagtcaggctacttgcaatgggagagttgcgccagcaaagacagctggggatgtatgggggagttggagtggggatctgggtggggtcagtggatggaaagtgattaagggaaggctccaagggtaggggcttctccctaagctgacctagcaggcttctccagaaaggcaggttgaaggcctagccggcaacggtctgtcggggaggaggagctgatgagatgtggagctgggggtagccagcagcaggcggaagtggacgggtagggtccaggcccagtggagaggagaggcggaggggcctgcagagcattggtcagggagggtctgtgtagtttctggggaggcatctgtgtctgttgttgacaaggctaaaaatgatgactctggactctctaactggactgcagtcctagccctcctctgtaaagggaggctgtacaggacggttgcacactgccggcgcccagatcatcgggctgctccctccaactctctccagagtccctcaagcgggaacctgcctcgtgtctcccaggagccatggaggctgtggaactcgccagaaaactgcaggaggaagctacgtgctccatctgtctggattacttcacagaccctgtgatgaccacctgtggccacaacttctgccgagcctgcatccagctgagctgggaaaaggcgaggggcaagaaggggaggcggaagcggaagggctccttcccctgccccgagtgcagagagatgtccccgcagaggaacctgctgcccaaccggctgctgaccaaggtggccgagatggcgcagcagcatcctggtctgcagaagcaagacctgtgccaggagcaccacgagcccctcaagcttttctgccagaaggaccagagccccatctgtgtggtgtgcagggagtcccgggagcaccggctgcacagggtgctgcccgccgaggaggcagtgcaggggtacaagttgaagctggaggaggacatggagtaccttcgggagcagatcaccaggacagggaatctgcaggccagggaggagcagagcttagccgagtggcagggcaaggtgaaggagcggagagaacgcattgtgctggagtttgagaagatgaacctctacctggtggaagaagagcagaggctcctccaggctctggagacggaagaagaggagactgccagcaggctccgggagagcgtggcctgcctggaccggcagggtcactctctggagctgctgctgctgcagctggaggagcggagcacacaggggcccctccagatgctgcaggacatgaaggaacccctgagcaggaagaacaacgtgagtgtgcagtgcccagaggttgcccccccaaccagacccaggactgtgtgcagagttcccggacagattgaagtgctaagaggctttctagaggatgtggtgcctgatgccacctccgcgtacccctacctcctcctgtatgagagccgccagaggcgctacctcggctcttcgccggagggcagtgggttctgcagcaaggaccgatttgtggcttacccctgtgctgtgggccagacggccttctcctctgggaggcactactgggaggtgggcatgaacatcaccggggacgcgttgtgggccctgggtgtgtgcagggacaacgtgagccggaaagacagggtccccaagtgccccgaaaacggcttctgggtggtgcagctgtccaaggggaccaagtacttatccaccttctctgccctaaccccggtcatgctgatggagcctcccagccacatgggcatcttcctggacttcgaagccggggaagtgtccttctacagtgtaagcgatgggtcccacctgcacacctactcccaggccaccttcccaggccccctgcagcctttcttctgcctgggggctccgaagtctggtcagatggtcatctccacagtgaccatgtgggtgaaaggatagacacagaccgggggactcgggcactgctcctggctctgcagaaggtgtgggccttctgcttactgcaggccacctgccagggttctctggcatcacgctggcagccattagacacacaggggggtttctcaaattctaaatataattgtgattagaactgtcaaacattaagagggtatactgacagatgcttcctagaggaaacttttgaaagcccctgcgttctgagtggaccgatttctaaatccatacctacacacc

SEQ ID NO: 194765 - DNA, 1748 bp, Homo sapiens
  Payload ID: 18479
  Gene Name: tripartite motif containing 17
  Uniprot ID: Q9Y577
  ENST ID: ENST00000366698
  CDS Start-End: 150-1583
cgggccgggccgcagcctcctgggcttcgtgggggcagacccagcctttcccggcagcgagcgctcggccaggtgcactaggcgctgtgcgggccccccttccccgcgagtccctcaagcgggaacctgcctcgtgtctcccaggagccatggaggctgtggaactcgccagaaaactgcaggaggaagctacgtgctccatctgtctggattacttcacagaccctgtgatgaccacctgtggccacaacttctgccgagcctgcatccagctgagctgggaaaaggcgaggggcaagaaggggaggcggaagcggaagggctccttcccctgccccgagtgcagagagatgtccccgcagaggaacctgctgcccaaccggctgctgaccaaggtggccgagatggcgcagcagcatcctggtctgcagaagcaagacctgtgccaggagcaccacgagcccctcaagcttttctgccagaaggaccagagccccatctgtgtggtgtgcagggagtcccgggagcaccggctgcacagggtgctgcccgccgaggaggcagtgcaggggtacaagttgaagctggaggaggacatggagtaccttcgggagcagatcaccaggacagggaatctgcaggccagggaggagcagagcttagccgagtggcagggcaaggtgaaggagcggagagaacgcattgtgctggagtttgagaagatgaacctctacctggtggaagaagagcagaggctcctccaggctctggagacggaagaagaggagactgccagcaggctccgggagagcgtggcctgcctggaccggcagggtcactctctggagctgctgctgctgcagctggaggagcggagcacacaggggcccctccagatgctgcaggacatgaaggaacccctgagcaggaagaacaacgtgagtgtgcagtgcccagaggttgcccccccaaccagacccaggactgtgtgcagagttcccggacagattgaagtgctaagaggctttctagaggatgtggtgcctgatgccacctccgcgtacccctacctcctcctgtatgagagccgccagaggcgctacctcggctcttcgccggagggcagtgggttctgcagcaaggaccgatttgtggcttacccctgtgctgtgggccagacggccttctcctctgggaggcactactgggaggtgggcatgaacatcaccggggacgcgttgtgggccctgggtgtgtgcagggacaacgtgagccggaaagacagggtccccaagtgccccgaaaacggcttctgggtggtgcagctgtccaaggggaccaagtacttatccaccttctctgccctaaccccggtcatgctgatggagcctcccagccacatgggcatcttcctggacttcgaagccggggaagtgtccttctacagtgtaagcgatgggtcccacctgcacacctactcccaggccaccttcccaggccccctgcagcctttcttctgcctgggggctccgaagtctggtcagatggtcatctccacagtgaccatgtgggtgaaaggatagacacagaccgggggactcgggcactgctcctggctctgcagaaggtgtgggccttctgcttactgcaggccacctgccagggttctctggcatcacgctggcagccattagacacacaggggggtttctcaaattctaaatataattgtgattagaactgtcaaa

SEQ ID NO: 194766 - DNA, 575 bp, Homo sapiens
  Payload ID: 18479
  Gene Name: tripartite motif containing 17
  ENST ID: ENST00000457345
  CDS Start-End: 484-575
agtcagcacccgctgcgcctgtccccggctcgtccagagccttccaccccctgccgccttccttccccaagccacccccaacctctcctaagaggcgccgccccagtcccggccgccgaacactccctcgcccagcattcccctcccccgccgccccccagcccccgctgacgccacaaagtccctaggcctcccgaccccaggtccccacgccccgggccgggccgcagcctcctgggcttcgtgggggcagacccagcctttcccggcagcgagcgctcggccaggtgcactaggcgctgtgcgggccccccttccccgcggtgagtagcccccaccccgccgcctaggctaccctcctgtggcgcctgggccacgacctaagcctaacccggtcctcctcgccctccaacgcccggccttcccgcctccgccggccgccgcgtccctggaggggctagcgcgcttcaacaagaccctgtgatgaccacctgtggccacaacttctgccgagcctgcatccagctgagctgggaaaaggcgaggggcaagaaggggaggcggaagcggaaggg

SEQ ID NO: 194767 - DNA, 1731 bp, Homo sapiens
  Payload ID: 18479
  Gene Name: tripartite motif containing 17
  Uniprot ID: Q9Y577
  ENST ID: ENST00000456946
  CDS Start-End: 377-1408
agtcccggccgccgaacactccctcgcccagcattcccctcccccgccgccccccagcccccgctgacgccacaaagtccctaggcctcccgaccccaggtccccacgccccgggccgggccgcagcctcctgggcttcgtgggggcagacccagcctttcccggcagcgagcgctcggccaggtgcactaggcgctgtgcgggccccccttccccgcggtgagtagcccccaccccgccgcctaggctaccctcctgtggcgcctgggccacgacctaagcctaacccggtcctcctcgccctccaacgcccggccttcccgcctccgccggccgccgcgtccctggaggggctagcgcgcttcaacaaggagccatggaggctgtggaactcgccagaaaactgcaggaggaagctacgtgctccatctgtctggattacttcacagaccctgtgatgaccacctgtggccacaacttctgccgagcctgcatccagctgagctgggaaaaggcgaggggcaagaaggggaggcggaagcggaagggctccttcccctgccccgagtgcagagagatgtccccgcagaggaacctgctgcccaaccggctgctgaccaaggtggccgagatggcgcagcagcatcctggtctgcagaagcaagacctgtgccaggagcaccacgagcccctcaagcttttctgccagaaggaccagagccccatctgtgtggtgtgcagggagtcccgggagcaccggctgcacagggtgctgcccgccgaggaggcagtgcaggggtacaagttgaagctggaggaggacatggagtaccttcgggagcagatcaccaggacagggaatctgcaggccagggaggagcagagcttagccgagtggcagggcaaggtgaaggagcggagagaacgcattgtgctggagtttgagaagatgaacctctacctggtggaagaagagcagaggctcctccaggctctggagacggaagaagaggagactgccagcaggctccgggagagcgtggcctgcctggaccggcagggtcactctctggagctgctgctgctgcagctggaggagcggagcacacaggggcccctccagatgctgcaggacatgaaggaacccctgagcaggaagaacaacgtgagtgtgcagtgcccagaggttgcccccccaaccagacccaggactgtgtgcagagttcccggacagattgaagtgctaagaggctttctaggtaagtgggcacccagggccaggacctctgacccaggatctcttggcgatgccccactgtaccccctagcctcggaagccaccaatggggggggttctacaagtgcactgcctggtgacggtcactggctattcactgtgccttcgtagggcggcgttactggtggttctaattcatgggatgaatcttgttgagttcccagtggtctctctgcccagccccctgtaccttattgccaccaaggcccacacacaattggtgtgtggaagcatcaagtaaccccagattcacagcaggggaggcctctgcggagttaggggaccattggccacatccaccactagggcccggggactcccacctttgaccctgaatgccccacacctctccccatctctccaccaccacgcccatctacagaggatgtggtgcctgatgccacctccgcgtacccctacctcctcctgtatga

SEQ ID NO: 194768 - DNA, 551 bp, Homo sapiens
  Payload ID: 18479
  Gene Name: tripartite motif containing 17
  ENST ID: ENST00000520264
  CDS Start-End: 400-551
acgccccgggccgggccgcagcctcctgggcttcgtgggggcagacccagcctttcccggcagcgagcgctcggccaggtgcactaggcgctgtgcgggccccccttccccgcggtgagtagcccccaccccgccgcctaggctaccctcctgtggcgcctgggccacgacctaagcctaacccggtcctcctcgccctccaacgcccggccttcccgcctccgccggccgccgcgtccctggaggggctagcgcgcttcaacaagtcctagccctcctctgtaaagggaggctgtacaggacggttgcacactgccggcgcccagatcatcgggctgctccctccaactctctccagagtccctcaagcgggaacctgcctcgtgtctcccaggagccatggaggctgtggaactcgccagaaaactgcaggaggaagctacgtgctccatctgtctggattacttcacagaccctgtgatgaccacctgtggccacaacttctgccgagcctgcatccagctgagctgggaaaaggcgaggggcaagaa

SEQ ID NO: 194769 - DNA, 925 bp, Homo sapiens
  Payload ID: 18479
  Gene Name: tripartite motif containing 17
  ENST ID: ENST00000479800
  CDS Start-End: 124-925
cacgccccgggccgggccgcagcctcctgggcttcgtgggggcagacccagcctttcccggcagcgagcgctcggccaggtgcactaggcgctgtgcgggccccccttccccgcgaccctgtgatgaccacctgtggccacaacttctgccgagcctgcatccagctgagctgggaaaaggcgaggggcaagaaggggaggcggaagcggaagggctccttcccctgccccgagtgcagagagatgtccccgcagaggaacctgctgcccaaccggctgctgaccaaggtggccgagatggcgcagcagcatcctggtctgcagaagcaagacctgtgccaggagcaccacgagcccctcaagcttttctgccagaaggaccagagccccatctgtgtggtgtgcagggagtcccgggagcaccggctgcacagggtgctgcccgccgaggaggcagtgcaggggtacaagttgaagctggaggaggacatggagtaccttcgggagcagatcaccaggacagggaatctgcaggccagggaggagcagagcttagccgagtggcagggcaaggtgaaggagcggagagaacgcattgtgctggagtttgagaagatgaacctctacctggtggaagaagagcagaggctcctccaggctctggagacggaagaagaggagactgccagcaggctccgggagagcgtggcctgcctggaccggcagggtcactctctggagctgctgctgctgcagctggaggagcggagcacacaggggcccctccagatgctgcaggacatgaaggaacccctgagcaggaagaacaacgtgagtgtgcagtgcccagaggttgcccccccaaccagacccaggactgtgtgcagagttcccggacagattgaagtgctaagaggctttctag

SEQ ID NO: 194770 - DNA, 6735 bp, Homo sapiens
  Payload ID: 18480
  Gene Name: tripartite motif containing 2
  Uniprot ID: Q9C040
  ENST ID: ENST00000338700
  CDS Start-End: 66-2381
cccagttgtctgcgggctgcggggagctaagtccccagattggaggaggctggctctggtcttcgatgcacaggagtggccgttatggaacgcagcagcagcgtgcagggtcaaagacagccggccccccatgtcagtggtctaggatggccagtgaaggcaccaacatcccaagtcctgtggtgcgccagattgacaagcagtttctgatttgcagtatatgcctggaacggtacaagaatcccaaggttctcccctgtctgcacactttctgcgagaggtgcctgcagaactacattcctgcccacagtttaaccctctcctgcccagtgtgccgccagacctccatcctgcccgagaaaggggtggccgcgctccagaacaatttcttcatcacaaacctgatggacgtgctgcagcgaactccaggcagcaacgctgaggagtcttccatcctggagacagtcactgctgtggctgcgggaaagcctctctcttgcccaaaccacgatgggaatgtgatggaattttactgccagtcctgtgagactgccatgtgtcgggagtgcacggagggggagcacgcagagcaccccacagttccactcaaggatgtggtggaacagcacaaggcctcgctccaggtccagctggatgctgtcaacaaaaggctcccagaaatagattctgctcttcagttcatctctgaaatcattcatcagttaaccaaccaaaaggccagcatcgtggatgacattcattccacctttgatgagctccagaagactttaaatgtgcgcaagagtgtgctgcttatggaattggaggtcaactatggcctcaaacacaaagtcctccagtcgcagctggatactctgctccaggggcaggagagcattaagagctgcagcaacttcacagcgcaggccctcaaccatggcacggagaccgaggtcctactggtgaagaagcagatgagcgagaagctgaacgagctggccgaccaggacttccccttgcacccgcgggagaacgaccagctggatttcatcgtggaaaccgaggggctgaagaagtccatccacaacctcgggacgatcttaaccaccaacgccgttgcctcagagacagtggccacgggcgaggggctgcggcagaccatcatcgggcagcccatgtccgtcaccatcaccaccaaggacaaagacggtgagctgtgcaaaaccggcaacgcctacctcaccgccgaactgagcacccccgacgggagcgtggcagacggggagatcctggacaacaagaacggcacctatgagtttttgtacactgtccagaaggaaggggactttaccctgtctctgagactctatgaccagcacatccgaggcagcccgtttaagctgaaagtgatccgatccgctgatgtgtctcccaccacagaaggcgtgaagaggcgcgttaagtccccggggagcggccacgtcaagcagaaagctgtgaaaagacccgcaagcatgtacagcactggaaaacgaaaagagaatcccatcgaagacgatttgatctttcgagtgggtaccaaaggaagaaataaaggagagtttacaaatcttcagggggtagctgcatctacaaatggaaagatattaattgcagacagtaacaaccaatgtgtgcagatattttccaatgatggccagttcaaaagtcgttttggcatacggggacgctctccggggcagctgcagcggcccacaggagtggctgtacatcccagtggggacataatcattgccgattatgataataaatgggtcagcattttctcctccgatgggaaatttaagacaaaaattggatcaggaaagctgatgggacccaaaggagtttctgtggaccgcaatgggcacattattgttgtggacaacaaggcgtgctgcgtgtttatcttccagccaaacgggaaaatagtcaccaggtttggtagccgaggaaatggggacaggcagtttgcaggtccccattttgcagctgtaaatagcaataatgagattattattacagatttccataatcattctgtcaaggtgtttaatcaggaaggagaattcatgttgaagtttggctcaaatggagaaggaaatgggcagtttaatgctccaacaggtgtagcagtggattcaaatggaaacatcattgtggccgactggggaaacagcaggatccaggtttttgatgggagtggatcatttttgtcctacattaacacatctgctgacccactctatggcccccaaggcctggccctaacttcagatggtcatgttgtggttgcagactctggaaatcactgtttcaaagtctatcgatacttacagtaatggtgggcaggtggatacccgcttccatggtcttgcactataaactggaatggatttctcaatgcgggaccagattatgactagagtttttatgccagaaggaatcattggtgaactttccaaggttatttctgaatgtaacaatttccttaaaaatgacttatccaatttctgtatttcacctttagggttaaaaaaaactcttctactgaatctataaaaactgcagttttacatctgtgaactatggcttaagggacaggatttatgtagctaaactaattttgcaaatcaaacagacacttaaaaaactagcatatgtaaaggtattcgttaatcctgtgaatggtagcttttgcacagaacttccaaaagcaaaacaaaaacaaaatctattgtagttatatacttcatttaacctaggtcacaagacccagggaatcttctaacctcacttttacagtaggtattactcttgtgacatttttttggttatcaacaactaaatataaattactttggaaaaagtaaggctgtcttgcaaaatgatcccagctctgattagcagccctctggagttcagaacttaagtatcagtgcaaatttctcaacctttctgggttagacaaagatccttttttgtgtgttcttttcaccacccctttggctcaccttgtatcagcaaacaaagtacttcttcagggaaacctgaaatttctaatgccttgaaaagcatattacaaaagtaatgctaccttttgggaaacaaactgccccgttaactccagatcattgcactggaatgtaatcaagaaagttagtcatgttttatgtaccatgttttcacacgtgtctcttctcttcgacttcctgaaagcgaaagctttacctcctgcaaatgtcagcacatgtagtaggacaccagtatcctaggacagagagccataagtagccctttggaggactgatggtgtcaaccaaaggcatgtgattgattaatgattcccccttagaaagcaagtgttaccaaagttgtgttatcttgaaagcattacaggtaagggcatgttatggttatttatcattgtttaatgaatagtagaggtgtcaagggactatgtatacatgattagggtaagatagaatgtattatatatatatatatatacacacacacatatatatagctgaatctttggtgtattgaaataggcagcactctgaaagacagaagcttcgtccagccactcttcagcacattcctttactaagcagtttaaagccgtcctagtggagcaagccctaaagcagatttaatttttgccattttccaagaatgacggtggtggcttttagtcagaaaatggccttctgtgctttcaaaaaaaaaaacaaaaaaaaaaccacacacacacataaaaaacccaacaggtcaaaataaaagttgaacttgagttacatttaatttaaatataaatgcattttgagaaatgttaagaacaatttagtcaatcgttcatctgtcattggtactgtaaaataagctgtggtctatttccactgtttaattttctactcagttctaccaaataggatgtcatgtttgacatttttgatagtgactttggggtcttcttcactgaaagcaccttagaactgtactataagaaaacatttcccctatgtataattatatgaatgtgatgtttattgcttattaatttataattcagtcattctctatataggacttcttaaaatttagaagggaaatctagctacttcaaattgtctgttaaatttattatgcccaaatcaacctctgaaaaaaggtttttccaggaagatttacatttaggtttaatatttttttagttaggtagagttttaaaaaatacttgagcctgtccgtgataaagctataaaattcaataactttttagaatgttaaatgaagacactgtttcctaacatcagtgagatacatctttgaatttaaacattcatatttactgagtacctactaggtaccaagtactcttttaggcactggaaatacagtgatggacaaaacaggtaaaaaatcgctgccccctcagagctgacattctggggtgggaatttcattttgccacgtactaacgttctgcacaaaagacaggctagactcttgtctagattgtttaaaagaaacttttcaaattggttacattaattttagtttattttcacaagtaaaaatggctttttatttagattctttctgtcccaggctgttgatcttaaaactagttgatttaaagagtttttttgcacaacatttcaattatatttgtgaacttagaaattaacttacaatctaaccagccatcatatcatatcctatcaggctagatatctcaatagtagactgaatacaaagctaattttttttacatgtcaatattggcacaaactggaatgaaagaatagtttgattcagacctgctccactatgtgttgctaaaacacatgctatgagcactccaggaaacactatattttttccaaaaaatatgtgattatatatgttaaagtatagataacatttcacacttggatacatatgtgcatttactgtatttcttggtaagcatatttttgggggaaagtgctgctgatatgatacaagtagacaaaatttaaatgaaattttgtcacattctatggaaaatggtttctggtaaactgagaaggatattaaaataagtggcttttttctgggctaccattattgtttgatttctctttgtcaagtgtatagaacctgtcatacattcatgataagtagcactgaaaaattactcattcaaatttcccctgggcacgtaaggcaaaatattgccggttgggatttcaaggtcagtgacgacgcatttcctcccagtacagaccccccagccccccttgctggacatggggaggcagagagtcacttgaccatccagaaatacatgactacaagtcctttatgactgtttgccattttttttaatggtacttagtattttgatcaaactttagtctccagaactaaacaagtccctaagtttccttattttaatttactgtgactagatttgaagcaaataaatactccagatccatgcagctagaacacacttgcttccactactaaatatacagggtatgtcctaacatggagttaactggaatagcagtacactagcaagtatctgtgaatccttagcactgacgggttaacagaaatgctttggtaatacctacttagttaattggaggaagtagtaaataaacattaggtaatctgcagattacttcaaatgggaaaaatctttttgtagactctatagtaccctctctattcactagcttctgaaaagggaggagtatttttagtttgacaatttaataatttaaaaacaagacatctccaggtaggaaaaaatgaaagctatttcatgcaaacattatctaatttagcttaaaagtgaaagtggtaatactgttggtttctgtaaatgttgcagggttttaaactttataattactttaatatttttgataactagaaatctagtattgccataaaggaaactaagtgcccatcaaagatttgtttggtataaataaagaattatttgttttgttttcaatgacagtaagctacaaatcatgatgcttaaaaactttctaaagatgaattgtgtggcagtgattggtctgtttgtggagaatgtatgaaagctattaatattctagaatagattaataaattggctatgttgttccaatgaatgtacagcacttccattaacttttgaaagcaacacagccttaaactcaatgcttttgctttatgacatgggaatgttctgtcatcaatggagtgtattcttgtaatagaattctttatatcgttctcaattctatagactttcaagcctatgtatgaatatgaaggggttttttttttttgctttgttttctttttagattttgtacattccatctttataggtctgtttcatatgttttatgtatagaacactaagtcttgcactctctgacattgatactgatatattctcgtcatttgttcttttatgaatcaaaatgttgactgcctatttaaagaaaagaatgaacgctgtgcatcaaagtgtttgtatgttcgtagctacatacgtaccacagtattttggatgctttagtctacaatgaaactttcaattaattctgtcttgaaacataggagaaacaggattcatgtgtatctctttaccatgcacaaaatctcaaatcattataataaagcttgttttctccattt

SEQ ID NO: 194771 - DNA, 654 bp, Homo sapiens
  Payload ID: 18480
  Gene Name: tripartite motif containing 2
  ENST ID: ENST00000433687
  CDS Start-End: 323-654
gtcctgtaagatcaagaccgattggtgtgaatactgaagggggtcttccacttgttaatgacccagaaacattcctgccgacttccagccttctctcatttcctccatttttctcttcctctgttctgtgcatgaactggcacatcactacttagagcagaagatatgctgggcttctgatgatggctgcactgcatggtgcctgcagaactacattcctgcccacagtttaaccctctcctgcccagtgtgccgccagacctccatcctgcccgagaaaggggtggccgcgctccagaacaatttcttcatcacaaacctgatggacgtgctgcagcgaactccaggcagcaacgctgaggagtcttccatcctggagacagtcactgctgtggctgcgggaaagcctctctcttgcccaaaccacgatgggaatgtgatggaattttactgccagtcctgtgagactgccatgtgtcgggagtgcacggagggggagcacgcagagcaccccacagttccactcaaggatgtggtggaacagcacaaggcctcgctccaggtccagctggatgctgtcaacaaaaggctcccagaaatagattctgctcttcagttcatctctgaaatcattcatcagttaaccaaccaaaa

SEQ ID NO: 194772 - DNA, 583 bp, Homo sapiens
  Payload ID: 18480
  Gene Name: tripartite motif containing 2
  ENST ID: ENST00000441616
  CDS Start-End: 169-583
ttgcaaaacagaaccactgattccttcctgcttgacaagattgagtcgctatcaaggagctgcccgtgctttggaaatggtccaaatcgacgaggaactgccaaggagccccctcagacacagcgtgcagggtcaaagacagccggccccccatgtcagtggtctaggatggccagtgaaggcaccaacatcccaagtcctgtggtgcgccagattgacaagcagtttctgatttgcagtatatgcctggaacggtacaagaatcccaaggttctcccctgtctgcacactttctgcgagaggtgcctgcagaactacattcctgcccacagtttaaccctctcctgcccagtgtgccgccagacctccatcctgcccgagaaaggggtggccgcgctccagaacaatttcttcatcacaaacctgatggacgtgctgcagcgaactccaggcagcaacgctgaggagtcttccatcctggagacagtcactgctgtggctgcgggaaagcctctctcttgcccaaaccacgatgggaatgtgatggaattttactgccagtcctgtgagactgccatgtgtc

SEQ ID NO: 194773 - DNA, 3832 bp, Homo sapiens
  Payload ID: 18480
  Gene Name: tripartite motif containing 2
  Uniprot ID: Q9C040
  ENST ID: ENST00000437508
  CDS Start-End: 202-2436
agcattttgagtgagcttgcagaaaatgaggggctttcagctggtcgcctgcttgtcacctctcgctgcctgaaaggcagctctcagagccctttcctgtccttctaattacagcggcgggggcagtgcgcgcttcgggacgcaattggaaaccagcgtgcagggtcaaagacagccggccccccatgtcagtggtctaggatggccagtgaaggcaccaacatcccaagtcctgtggtgcgccagattgacaagcagtttctgatttgcagtatatgcctggaacggtacaagaatcccaaggttctcccctgtctgcacactttctgcgagaggtgcctgcagaactacattcctgcccacagtttaaccctctcctgcccagtgtgccgccagacctccatcctgcccgagaaaggggtggccgcgctccagaacaatttcttcatcacaaacctgatggacgtgctgcagcgaactccaggcagcaacgctgaggagtcttccatcctggagacagtcactgctgtggctgcgggaaagcctctctcttgcccaaaccacgatgggaatgtgatggaattttactgccagtcctgtgagactgccatgtgtcgggagtgcacggagggggagcacgcagagcaccccacagttccactcaaggatgtggtggaacagcacaaggcctcgctccaggtccagctggatgctgtcaacaaaaggctcccagaaatagattctgctcttcagttcatctctgaaatcattcatcagttaaccaaccaaaaggccagcatcgtggatgacattcattccacctttgatgagctccagaagactttaaatgtgcgcaagagtgtgctgcttatggaattggaggtcaactatggcctcaaacacaaagtcctccagtcgcagctggatactctgctccaggggcaggagagcattaagagctgcagcaacttcacagcgcaggccctcaaccatggcacggagaccgaggtcctactggtgaagaagcagatgagcgagaagctgaacgagctggccgaccaggacttccccttgcacccgcgggagaacgaccagctggatttcatcgtggaaaccgaggggctgaagaagtccatccacaacctcgggacgatcttaaccaccaacgccgttgcctcagagacagtggccacgggcgaggggctgcggcagaccatcatcgggcagcccatgtccgtcaccatcaccaccaaggacaaagacggtgagctgtgcaaaaccggcaacgcctacctcaccgccgaactgagcacccccgacgggagcgtggcagacggggagatcctggacaacaagaacggcacctatgagtttttgtacactgtccagaaggaaggggactttaccctgtctctgagactctatgaccagcacatccgaggcagcccgtttaagctgaaagtgatccgatccgctgatgtgtctcccaccacagaaggcgtgaagaggcgcgttaagtccccggggagcggccacgtcaagcagaaagctgtgaaaagacccgcaagcatgtacagcactggaaaacgaaaagagaatcccatcgaagacgatttgatctttcgagtgggtaccaaaggaagaaataaaggagagtttacaaatcttcagggggtagctgcatctacaaatggaaagatattaattgcagacagtaacaaccaatgtgtgcagatattttccaatgatggccagttcaaaagtcgttttggcatacggggacgctctccggggcagctgcagcggcccacaggagtggctgtacatcccagtggggacataatcattgccgattatgataataaatgggtcagcattttctcctccgatgggaaatttaagacaaaaattggatcaggaaagctgatgggacccaaaggagtttctgtggaccgcaatgggcacattattgttgtggacaacaaggcgtgctgcgtgtttatcttccagccaaacgggaaaatagtcaccaggtttggtagccgaggaaatggggacaggcagtttgcaggtccccattttgcagctgtaaatagcaataatgagattattattacagatttccataatcattctgtcaaggtgtttaatcaggaaggagaattcatgttgaagtttggctcaaatggagaaggaaatgggcagtttaatgctccaacaggtgtagcagtggattcaaatggaaacatcattgtggccgactggggaaacagcaggatccaggtttttgatgggagtggatcatttttgtcctacattaacacatctgctgacccactctatggcccccaaggcctggccctaacttcagatggtcatgttgtggttgcagactctggaaatcactgtttcaaagtctatcgatacttacagtaatggtgggcaggtggatacccgcttccatggtcttgcactataaactggaatggatttctcaatgcgggaccagattatgactagagtttttatgccagaaggaatcattggtgaactttccaaggttatttctgaatgtaacaatttccttaaaaatgacttatccaatttctgtatttcacctttagggttaaaaaaaactcttctactgaatctataaaaactgcagttttacatctgtgaactatggcttaagggacaggatttatgtagctaaactaattttgcaaatcaaacagacacttaaaaaactagcatatgtaaaggtattcgttaatcctgtgaatggtagcttttgcacagaacttccaaaagcaaaacaaaaacaaaatctattgtagttatatacttcatttaacctaggtcacaagacccagggaatcttctaacctcacttttacagtaggtattactcttgtgacatttttttggttatcaacaactaaatataaattactttggaaaaagtaaggctgtcttgcaaaatgatcccagctctgattagcagccctctggagttcagaacttaagtatcagtgcaaatttctcaacctttctgggttagacaaagatccttttttgtgtgttcttttcaccacccctttggctcaccttgtatcagcaaacaaagtacttcttcagggaaacctgaaatttctaatgccttgaaaagcatattacaaaagtaatgctaccttttgggaaacaaactgccccgttaactccagatcattgcactggaatgtaatcaagaaagttagtcatgttttatgtaccatgttttcacacgtgtctcttctcttcgacttcctgaaagcgaaagctttacctcctgcaaatgtcagcacatgtagtaggacaccagtatcctaggacagagagccataagtagccctttggaggactgatggtgtcaaccaaaggcatgtgattgattaatgattcccccttagaaagcaagtgttaccaaagttgtgttatcttgaaagcattacaggtaagggcatgttatggttatttatcattgtttaatgaatagtagaggtgtcaagggactatgtatacatgattagggtaagatagaatgtattatatatatatatatatacacacacacatatatatagctgaatctttggtgtattgaaataggcagcactctgaaagacagaagcttcgtccagccactcttcagcacattcctttactaagcagtttaaagccgtcctagtggagcaagccctaaagcagatttaatttttgccattttccaagaatgacggtggtggcttttagtcagaaaatggccttctgtgctttcaaaaaaaaaaacaaa

SEQ ID NO: 194774 - DNA, 773 bp, Homo sapiens
  Payload ID: 18480
  Gene Name: tripartite motif containing 2
  ENST ID: ENST00000482578
  CDS Start-End: 257-667
aaaagatgtcctgtaagatcaagaccgattggtgtgaatactgaagggggtcttccacttgttaatgacccagaaacattcctgccgacttccagccttctctcatttcctccatttttctcttcctctgttctgtgcatgaactggcacatcactacttagagcagaagatatgctgggcttctgatgatggctgcactgcatgcagcagcgtgcagggtcaaagacagccggccccccatgtcagtggtctaggatggccagtgaaggcaccaacatcccaagtcctgtggtgcgccagattgacaagcagtttctgatttgcagtatatgcctggaacggtacaagaatcccaaggttctcccctgtctgcacactttctgcgagaggtgcctgcagaactacattcctgcccacagtttaaccctctcctgcccagtgtgccgccagacctccatcctgcccgagaaaggggtggccgcgctccagaacaatttcttcatcacaaacctgatggacgtgctgcagcgaactccaggcagcaacgctgaggagtcttccatcctggagacagtcactgctgtggctgcgggaaagcctctctcttgcccaaaccacgatgggaatgtaagtggctgggatggcagatactgcccgggagcatgactactgtggccttggggaggctttgggtacatcagagattacagattgaaacagaactccatgtggaaaaatcagtaattaaaaaagatttttaccagccctcaga

SEQ ID NO: 194775 - DNA, 656 bp, Homo sapiens
  Payload ID: 18480
  Gene Name: tripartite motif containing 2
  ENST ID: ENST00000632856
  CDS Start-End: 147-557
ctggctgggcgcgcagcgaggcccaggcccgaggggtgaggcccaggccactccggagcgcgcgctgttcccgcgaagcgagtcgccgtctcgtacagcagcgtgcagggtcaaagacagccggccccccatgtcagtggtctaggatggccagtgaaggcaccaacatcccaagtcctgtggtgcgccagattgacaagcagtttctgatttgcagtatatgcctggaacggtacaagaatcccaaggttctcccctgtctgcacactttctgcgagaggtgcctgcagaactacattcctgcccacagtttaaccctctcctgcccagtgtgccgccagacctccatcctgcccgagaaaggggtggccgcgctccagaacaatttcttcatcacaaacctgatggacgtgctgcagcgaactccaggcagcaacgctgaggagtcttccatcctggagacagtcactgctgtggctgcgggaaagcctctctcttgcccaaaccacgatgggaatgtaagtggctgggatggcagatactgcccgggagcatgactactgtggccttggggaggctttgggtacatcagagattacagattgaaacagaactccatgtggaaaaatcagtaattaaaaaagatttttaccagc

SEQ ID NO: 194776 - DNA, 2202 bp, Homo sapiens
  Payload ID: 18480
  Gene Name: tripartite motif containing 2
  ENST ID: ENST00000494872
  CDS Start-End: 167-1747
agcttgatgactataatgggcccagttgtctgcgggctgcggggagctaagtccccagattggaggaggctggctctggtcttcgatgcacaggagtggccgttatggaacgcagcagcagcgtgcagggtcaaagacagccggccccccatgtcagtggtctaggatggccagtgaaggcaccaacatcccaagtcctgtggtgcgccagattgacaagcagtttctgatttgcagtatatgcctggaacggtacaagaatcccaaggttctcccctgtctgcacactttctgcgagaggtgcctgcagaactacattcctgcccacagtttaaccctctcctgcccagtgtgccgccagacctccatcctgcccgagaaaggggtggccgcgctccagaacaatttcttcatcacaaacctgatggacgtgctgcagcgaactccaggcagcaacgctgaggagtcttccatcctggagacagtcactgctgtggctgcgggaaagcctctctcttgcccaaaccacgatgggaatgtgatggaattttactgccagtcctgtgagactgccatgtgtcgggagtgcacggagggggagcacgcagagcaccccacagttccactcaaggatgtggtggaacagcacaaggcctcgctccaggtccagctggatgctgtcaacaaaaggctcccagaaatagattctgctcttcagttcatctctgaaatcattcatcagttaaccaaccaaaaggccagcatcgtggatgacattcattccacctttgatgagctccagaagactttaaatgtgcgcaagagtgtgctgcttatggaattggaggtcaactatggcctcaaacacaaagtcctccagtcgcagctggatactctgctccaggggcaggagagcattaagagctgcagcaacttcacagcgcaggccctcaaccatggcacggagaccgaggtcctactggtgaagaagcagatgagcgagaagctgaacgagctggccgaccaggacttccccttgcacccgcgggagaacgaccagctggatttcatcgtggaaaccgaggggctgaagaagtccatccacaacctcgggacgatcttaaccaccaacgccgttgcctcagagacagtggccacgggcgaggggctgcggcagaccatcatcgggcagcccatgtccgtcaccatcaccaccaaggacaaagacggtgagctgtgcaaaaccggcaacgcctacctcaccgccgaactgagcacccccgacgggagcgtggcagacggggagatcctggacaacaagaacggcacctatgagtttttgtacactgtccagaaggaaggggactttaccctgtctctgagactctatgaccagcacatccgaggcagcccgtttaagctgaaagtgatccgatccgctgatgtgtctcccaccacagaaggcgtgaagaggcgcgttaagtccccggggagcggccacgtcaagcagaaagctgtgaaaagacccgcaagcatgtacagcactggaaaacgaaaagagaatcccatcgaagacgatttgatctttcgagtggatggagtcttgcaggctgaagtacagtggcatgatctcagcccactgcaaccactgcctcctgggttcaaacaattctcctgcctcggcctcctgagtagctgggattacaggcatgcgccaccatgctcagctaattttttgtatttttagtagtagggatggggtttcattatgttggccaggctggtcttaaattcctgacctcaagtgatccacccaccttggcctcccaaagtgctgggattacaggtgtaagccattgtgcccggccagcattaatttcatattaagttggagtgggtggtgagaggaaatctgcatttattgatcccctatttcagtctaagggttcaccttatgtaatcttcctggaggggtaggtggaagtgaccaggaagaatatgggtgagaagctgttgaattaaaaattcattttgtgcttcataggctagacttgcatctggaaaaacaaaatgatttaattatggaattatagaataattgttaaattgattataattactttaaaaattcttgttattcattctactagctaatatgtaaccatcaaatgaaatcttttacattaaagtagatagaaaaat

SEQ ID NO: 194777 - DNA, 570 bp, Homo sapiens
  Payload ID: 18480
  Gene Name: tripartite motif containing 2
  ENST ID: ENST00000502281
  CDS Start-End: 437-570
cttttcaacagacgctcagtgagaaaaagatgtcctgtaagatcaagaccgattggtgtgaatactgaagggggtcttccacttgttaatgacccagaaacattcctgccgacttccagccttctctcatttcctccatttttctcttcctctgttctgtgcatgaactggcacatcactacttagagcagaagatatgctgggcttctgatgatggctgcactgcatggtagggaattttaaccagtctctttgcatggtgcttcccaacttgaagtgttagcagaaacgtgcgttgttcttttggattgccgcgtagctgcagcgacagacttgggaggatttaattctttgcctcgttggttagtctgtttgtcttcagaaatggcagcgtgcagggtcaaagacagccggccccccatgtcagtggtctaggatggccagtgaaggcaccaacatcccaagtcctgtggtgcgccagattgacaagcagtttctgatttgcagtatatgcctggaacggtacaagaatcccaaggttctcccctgtctgcacactttctgcgagag

SEQ ID NO: 194778 - DNA, 580 bp, Homo sapiens
  Payload ID: 18480
  Gene Name: tripartite motif containing 2
  ENST ID: ENST00000460908
  CDS Start-End: 1-343
aaaaattggatcaggaaagctgatgggacccaaaggagtttctgtggaccgcaatgggcacattattgttgtggacaacaaggcgtgctgcgtgtttatcttccagccaaacgggaaaatagtcaccaggtttggtagccgaggaaatggggacaggcagtttgcaggtccccattttgcagctgtaaatagcaataatgagattattattacagatttccataatcattctgtcaaggtactacaagcacatgagttgttgttaacttttaactgcttttatggagaaattggtctgcgagaaaataatgcaatacttacatatggcaccaaagggagttaaccagcagagtagactttgttctgctcaaagatgccggttttaacttggacttacagaccttggaaagtcaggaaattgaataaaatgtggtggcaataagttgcttaatttgaaactggtgcaaatgaagaggacttgaaaattaaattttaaaaagcaattcgttgaacttagaggcagaactttctgaagcttaatgttttgtggctagtcaataaattaaaatcactttttcaa

SEQ ID NO: 194779 - DNA, 1924 bp, Homo sapiens
  Payload ID: 18481
  Gene Name: tripartite motif containing 21
  Uniprot ID: P19474
  ENST ID: ENST00000254436
  CDS Start-End: 114-1541
gcttctgagcggaaactgaaagtgaaatagggagctggctaccagcgttgagtcccctgtaaagccaaaccccctaaaggtctccacactgctgtttaacggcacacttgacaatggcttcagcagcacgcttgacaatgatgtgggaggaggtcacatgccctatctgcctggaccccttcgtggagcctgtgagcatcgagtgtggccacagcttctgccaggaatgcatctctcaggttgggaaaggtgggggcagcgtctgtcctgtgtgccggcagcgctttctgctcaagaatctccggcccaatcgacagctagccaacatggtgaacaaccttaaagaaatcagccaggaggccagagagggcacacagggggaacggtgtgcagtgcatggagagagacttcacctgttctgtgagaaagatgggaaggccctttgctgggtatgtgcccagtctcggaaacaccgtgaccacgccatggtccctcttgaggaggctgcacaggagtaccaggagaagctccaggtggcattaggggaactgagaagaaagcaggagttggctgagaagttggaagtggaaattgcaataaagagagcagactggaagaaaacagtggaaacacagaaatctaggattcacgcagagtttgtgcagcaaaaaaacttcctggttgaagaagaacagaggcagctgcaggagctggagaaggatgagagggagcagctgagaatcctgggggagaaagaggccaagctggcccagcagagccaggccctacaggagctcatctcagagctagatcgaaggtgccacagctcagcactggaactgctgcaggaggtgataattgtcctggaaaggagtgagtcctggaacctgaaggacctggatattacctctccagaactcaggagtgtgtgccatgtgccagggctgaagaagatgctgaggacatgtgcagtccacatcactctggatccagacacagccaatccgtggctgatactttcagaagatcggagacaagtgaggcttggagacacccagcagagcatacctggaaatgaagagagatttgatagttatcctatggtcctgggtgcccagcactttcactctggaaaacattactgggaggtagatgtgacaggaaaggaggcctgggacctgggtgtctgcagagactctgtgcgcaggaaggggcactttttgcttagttccaagagtggcttctggacaatttggttgtggaacaaacaaaaatatgaggctggcacctacccccagactcccctccaccttcaggtgcctccatgccaagttgggattttcctggactatgaggctggcatggtctccttctacaacatcactgaccatggctccctcatctactccttctctgaatgtgcctttacaggacctctgcggcccttcttcagtcctggtttcaatgatggaggaaaaaacacagcccctctaaccctctgtccactgaatattggatcacaaggatccactgactattgatggctttctctggacactgccactctccccattggcaccgcttctcagccacaaaccctgcctcttttccccatgaactctgaaccacctttgtctctgcagaggcatccggatcccagcaagcgagctttagcagggaagtcacttcaccatcaacattcctgccccagatggctttgtgattccctccagtgaagcagcctccttatatttggcccaaactcatcttgatcaaccaaaaacatgtttctgccttctttatgggacttaagttttttttttctcctctccatctctaggatgtcgtctttggtgagatctctattatatcttgtatggtttgcaaaagggcttcctaaaaataaaaaataaaatttaaaaaa

SEQ ID NO: 194780 - DNA, 706 bp, Homo sapiens
  Payload ID: 18481
  Gene Name: tripartite motif containing 21
  ENST ID: ENST00000533692
  CDS Start-End: 1-271
agggctgaagaagatgctgaggacatgtgcagtccacatcactctggatccagacacagccaatccgtggctgatactttcagaagatcggagacaagtgaggcttggagacacccagcagagcatacctggaaatgaagagagatttgatagttatcctatggtcctgggtgcccagcactttcactctggaaaacattactgggaggacctctgcggcccttcttcagtcctggtttcaatgatggaggaaaaaacacagcccctctaaccctctgtccactgaatattggatcacaaggatccactgactattgatggctttctctggacactgccactctccccattggcaccgcttctcagccacaaaccctgcctcttttccccatgaactctgaaccacctttgtctctgcagaggcatccggatcccagcaagcgagctttagcagggaagtcacttcaccatcaacattcctgccccagatggctttgtgattccctccagtgaagcagcctccttatatttggcccaaactcatcttgatcaaccaaaaacatgtttctgccttctttatgggacttaagttttttttttctcctctccatctctaggatgtcgtctttggtgagatctctattatatcttgtatggtttgcaaaagggcttcctaaaaataaaaaataaaatttaaaaaactgtg

SEQ ID NO: 194781 - DNA, 2989 bp, Homo sapiens
  Payload ID: 18482
  Gene Name: tripartite motif containing 22
  Uniprot ID: Q8IYM9
  ENST ID: ENST00000379965
  CDS Start-End: 278-1774
cagggtttattgttatgtaagttcttgttcagcttcctttgttttctttcacttctgagaatttaactttcgtttctcactcagctcctgtggggaaactcatttgtggagaccagccctctggcttggtgagtgaatctggtttacaccggctcctgccctgccttcactcttctcccctgattcaagactcctctgctttggactgaagcactgcaggagtttgtgaccaagaacttcaagagtcaagacagaaggaagccaagggagcagtgcaatggatttctcagtaaaggtagacatagagaaggaggtgacctgccccatctgcctggagctcctgacagaacctctgagcctagattgtggccacagcttctgccaagcctgcatcactgcaaagatcaaggagtcagtgatcatctcaagaggggaaagcagctgtcctgtgtgtcagaccagattccagcctgggaacctccgacctaatcggcatctggccaacatagttgagagagtcaaagaggtcaagatgagcccacaggaggggcagaagagagatgtctgtgagcaccatggaaaaaaactccagatcttctgtaaggaggatggaaaagtcatttgctgggtttgtgaactgtctcaggaacaccaaggtcaccaaacattccgcataaacgaggtggtcaaggaatgtcaggaaaagctgcaggtagccctgcagaggctgataaaggaggatcaagaggctgagaagctggaagatgacatcagacaagagagaaccgcctggaagaattatatccagatcgagagacagaagattctgaaagggttcaatgaaatgagagtcatcttggacaatgaggagcagagagagctgcaaaagctggaggaaggtgaggtgaatgtgctggataacctggcagcagctacagaccagctggtccagcagaggcaggatgccagcacgctcatctcagatctccagcggaggttgaggggatcgtcagtagagatgctgcaggatgtgattgacgtcatgaaaaggagtgaaagctggacattgaagaagccaaaatctgtttccaagaaactaaagagtgtattccgagtaccagatctgagtgggatgctgcaagttcttaaagagctgacagatgtccagtactactgggtggacgtgatgctgaatccaggcagtgccacttcgaatgttgctatttctgtggatcagagacaagtgaaaactgtacgcacctgcacatttaagaattcaaatccatgtgatttttctgcttttggtgtcttcggctgccaatatttctcttcggggaaatattactgggaagtagatgtgtctggaaagattgcctggatcctgggcgtacacagtaaaataagtagtctgaataaaaggaagagctctgggtttgcttttgatccaagtgtaaattattcaaaagtttactccagatatagacctcaatatggctactgggttataggattacagaatacatgtgaatataatgcttttgaggactcctcctcttctgatcccaaggttttgactctctttatggctgtgcctccctgtcgtattggggttttcctagactatgaggcaggcattgtctcatttttcaatgtcacaaaccacggagcactcatctacaagttctctggatgtcgcttttctcgacctgcttatccgtatttcaatccttggaactgcctagtccccatgactgtgtgcccaccgagctcctgagtgttctcattcctttacccacttctgcatagtagcccttgtgctgagactcagattctgcacctgagttcatctctactgagaccatctcttcctttctttccccttcttttacttagaatgtctttgtattcatttgctagggcttccatagcaaagcatcatagattgctgatttaaactgtaattgtattgccgtactgtgggctggaaatcccaaatctagattccagcagagttggttctttctgaggtctgcaaggaagggctctgttccatgcctctctccttggcttgtagaaggcatcttgtccctatgactcttcacattgtctttatgtacatctctgtgcccaagttttccctttttattaagacaccagtcatactggctcagggcccaccgctaatgccttaatgaaatcattttaacattatattctctacaaagaccttatttccaaataagataatatttggaggtattgggaataaaaactccaacatataaatttgaggaaggcacgatttcactcataacaatcttaccctttcttgcaagagatgcttgtacattattttcctaataccttggtttcactagtagtaaacattattattttttttatatttgcaaaggaaacatatctaatccttcctatagaaagaacagtattgctgtaattccttttcttttcttcctcatttcctctgccccttaaaagattgaagaaagagaaacttgtcaactcatatccacgttatctagcaaagtacataagaatctatcactaagtaatgtatccttcagaatgtgttggtttaccagtgacaccccatattcatcacaaaattaaagcaagaagtccatagtaatttatttgctaatagtggatttttaatgctcagagtttctgaggtcaaattttatcttttcacttacaagctctatgatcttaaataatttacttaatgtattttggtgtattttcctcaaattaatattggtgttcaagactatatctaattcctctgatcactttgagaaacaaacttttattaaatgtaaggcacttttctatgaattttaaatataaaaataaatattgttctgattattactgaaaagatgtcagccatttcaatgtcttgggaaacaattttttgtttttgttctgttttctttttgcttcaataaaacaatagctggctcta

SEQ ID NO: 194782 - DNA, 655 bp, Homo sapiens
  Payload ID: 18482
  Gene Name: tripartite motif containing 22
  ENST ID: ENST00000414897
  CDS Start-End: 1-430
ggggcagaagagagatgtctgtgagcaccatggaaaaaaactccagatcttctgtaaggaggatggaaaagtcatttgctgggtttgtgaactgtctcaggaacaccaaggtcaccaaacattccgcataaacgaggtggtcaaggaatgtcaggaaaagctgcaggtagccctgcagaggctgataaaggaggatcaagaggctgagaagctggaagatgacatcagacaagagagaaccgcctggaagaattatatccagatcgagagacagaagattctgaaagggttcaatgaaatgagagtcatcttggacaatgaggagcagagagagctgcaaaagctggaggaaggatgccagcacgctcatctcagatctccagcggaggttgaggggatcgtcagtagagatgctgcaggatgtgattgacgtcatgaaaaggagtgaaagctggacattgaagaagccaaaatctgtttccaagaaactaaagagtgtattccgagtaccagatctgagtgggatgctgcaagttcttaaagagctgacagatgtccagtactactgggtggacgtgatgctgaatccaggcagtgccacttcgaatgttgctatttctgtggatcagagacaagtgaaaactgtacgcacctg

SEQ ID NO: 194783 - DNA, 1002 bp, Homo sapiens
  Payload ID: 18482
  Gene Name: tripartite motif containing 22
  ENST ID: ENST00000454828
  CDS Start-End: 87-1002
tcctctgctttggactgaagcactgcaggagtttgtgaccaagaacttcaagagtcaagacagaaggaagccaagggagcagtgcaatggatttctcagtaaaggtagacatagagaaggaggtgacctgccccatctgcctggagctcctgacagaacctctgagcctagattgtggccacagcttctgccaagcctgcatcactgcaaagatcaaggagtcagtgatcatctcaagaggggaaagcagctgtcctgtgtgtcagaccagattccagcctgggaacctccgacctaatcggcatctggccaacatagttgagagagtcaaagaggtcaagatgagcccacaggaggggcagaagagagatgtctgtgagcaccatggaaaaaaactccagatcttctgtaaggaggatggaaaagtcatttgctgggtttgtgaactgtctcaggaacaccaaggtcaccaaacattccgcataaacgaggtggtcaaggaatgtcagaattatatccagatcgagagacagaagattctgaaagggttcaatgaaatgagagtcatcttggacaatgaggagcagagagagctgcaaaagctggaggaaggtgaggtgaatgtgctggataacctggcagcagctacagaccagctggtccagcagaggcaggatgccagcacgctcatctcagatctccagcggaggttgaggggatcgtcagtagagatgctgcaggatgtgattgacgtcatgaaaaggagtgaaagctggacattgaagaagccaaaatctgtttccaagaaactaaagagtgtattccgagtaccagatctgagtgggatgctgcaagttcttaaagagctgacagatgtccagtactactgggtggacgtgatgctgaatccaggcagtgccacttcgaatgttgctatttctgtggatcagagacaagtgaaaactgtacgcacctgcacatttaagaattcaaatccatgtg

SEQ ID NO: 194784 - DNA, 897 bp, Homo sapiens
  Payload ID: 18482
  Gene Name: tripartite motif containing 22
  ENST ID: ENST00000414641
  CDS Start-End: 217-897
gacgggcagactgctgctcatctctgcagctccactttggtctcttgtctctgaaggtccagtcacagggaacttgttcttctgagtacccacagcttactcttcctttgtagcaggaccagccacagaaaaaactcctcagacaccgagcactgcaggagtttgtgaccaagaacttcaagagtcaagacagaaggaagccaagggagcagtgcaatggatttctcagtaaaggtagacatagagaaggaggtgacctgccccatctgcctggagctcctgacagaacctctgagcctagattgtggccacagcttctgccaagcctgcatcactgcaaagatcaaggagtcagtgatcatctcaagaggggaaagcagctgtcctgtgtgtcagaccagattccagcctgggaacctccgacctaatcggcatctggccaacatagttgagagagtcaaagaggtcaagatgagcccacaggaggggcagaagagagatgtctgtgagcaccatggaaaaaaactccagatcttctgtaaggaggatggaaaagtcatttgctgggtttgtgaactgtctcaggaacaccaaggtcaccaaacattccgcataaacgaggtggtcaaggaatgtcaggaaaagctgcaggtagccctgcagaggctgataaaggaggatcaagaggctgagaagctggaagatgacatcagacaagagagaaccgcctggaagaattatatccagatcgagagacagaagattctgaaagggttcaatgaaatgagagtcatcttggacaatgaggagcagagagagctgcaaaagctggaggaaggtgaggtgaatgtgctggataacctggcagcagctacagaccagctggtccagcagagg

SEQ ID NO: 194785 - DNA, 812 bp, Homo sapiens
  Payload ID: 18482
  Gene Name: tripartite motif containing 22
  ENST ID: ENST00000425490
  CDS Start-End: 202-812
attgttatctcctgtggggaaactcatttgtggagaccagccctctggcttggtgagtgaatctggtttacaccggctcctgccctgccttcactcttctcccctgattcaagactcctctgctttggactgaagcactgcaggagtttgtgaccaagaacttcaagagtcaagacagaaggaagccaagggagcagtgcaatggatttctcagtaaaggtagacatagagaaggaggtgacctgccccatctgcctggagctcctgacagaacctctgagcctagattgtggccacagcttctgccaagcctgcatcactgcaaagatcaaggagtcagtgatcatctcaagaggggaaagcagctgtcctgtgtgtcagaccagattccagcctgggaacctccgacctaatcggcatctggccaacatagttgagagagtcaaagaggtcaagatgagcccacaggaggggcagaagagagatgtctgtgagcaccatggaaaaaaactccagatcttctgtaaggaggatggaaaagtcatttgctgggtttgtgaactgtctcaggaacaccaaggtcaccaaacattccgcataaacgaggtggtcaaggaatgtcaggaaaagctgcaggtagccctgcagaggctgataaaggaggatcaagaggctgagaagctggaagatgacatcagacaagagagaaccgcctggaagaattatatccagatcgagagacagaagattctgaaagggttcaatgaaatgagagtcatcttggacaatgaggagcagagagagctgcaaaa

SEQ ID NO: 194786 - DNA, 1244 bp, Homo sapiens
  Payload ID: 18482
  Gene Name: tripartite motif containing 22
  ENST ID: ENST00000444844
  CDS Start-End: 1-116
tttccaagaaactaaagagtgtattccgagtaccagatctgagtgggatgctgcaagttcttaaagagctgacagatgtccagtactactgggtagaaaacttctgccacgcctaggatcccagactgtgagtctgtgttcataagcaaggttctctaagattcaactataaaaaaacttactaaggtatgtcttcattatatgacttctcatatggagaaattcagccataatcactaacttccttttaagctactcttttgcaacctcctcagaagtgcatacaaaatagaacatgaaagaaaactatccccaaatcctcaatataatttatttctggaaacctttacaagtccatgatatcaaaattttgaaaggctatgtaagacgttaatggacatctatatcaacttgaaatgatgtagctataaatttcatctcccataattcttcatttaaaaaatctagttattattagttaataaacctctgcatcaagtcaagtaacactgagataaatatgaagaaaacaagcacatccatttaatctatataatttctaaagagatgaagaaaggcttagaaaaatactacaattttatttctgtggtggttccaacctgtgataactgagaacaatacaaatagagatttgaaattcatgttgaatcatgaatcatatgtctgcatctctcaaaatctccaatagctccaaattccaggtctctgagttcatcctgctgggattcccgggcattcacagctggcaacactggctatctctgcccctggcactactgtatctctcagcacttgctgcaaacaccctcatcctcatcatcatctggcagaacccttctttacagcagcccatgtatattttccttggcatcctctgtatggtagacatgggtctggccactactatcatccctaagatcctggccatcttctggtttgatgccaaggttattagcctccctgagtgctttgctcagatttatgccattcacttctttgtgggcatggagtctggtatcctactctgcatggcttttgatagatatgtggctatttgtcaccctcttcgctatccatcaattgtcaccagttccttaatcttaaaagctaccctgttcatggtgctgagaaatggcttatttgtcactccagtgcctgtgcttgcagcacagcgtgattattgctccaagaatgaaattgaacactgcctgtgctctaacctt

SEQ ID NO: 194787 - DNA, 508 bp, Homo sapiens
  Payload ID: 18482
  Gene Name: tripartite motif containing 22
  ENST ID: ENST00000450670
  CDS Start-End: 1-192
gatgtgattgacgtcatgaaaaggagtgaaagctggacattgaagaagccaaaatctgtttccaagaaactaaagagtgtattccgagtaccagatctgagtgggatgctgcaagttcttaaagagctgacagatgtccagtactactgggtctaccatcagagaatactacaaacacctctatggaaataaactagaaaatctagaagaaatggataaattcctcgacacatacaccctcccaagactaaaccaggaagaagttgaatctctgaatagaccaataacaggagctgaaattgtggcaataatcaatagcttaccaaccaaaaagagtccaggaccagaaggattcacagctgaattctaccagaggtacaaggaggaactggtaccattccttctgaaactattccaatcaatagaaaaagagggaaacctccctaactcattttatgaggccagcatcatgctgataccaaagccgggcagagacacaaccaaaaaa

SEQ ID NO: 194788 - DNA, 1241 bp, Homo sapiens
  Payload ID: 18482
  Gene Name: tripartite motif containing 22
  ENST ID: ENST00000429063
  CDS Start-End: 1-113
tttccaagaaactaaagagtgtattccgagtaccagatctgagtgggatgctgcaagttcttaaagagctgacagatgtccagtactactgggaaaacttctgccacgcctaggatcccagactgtgagtctgtgttcataagcaaggttctctaagattcaactataaaaaaacttactaaggtatgtcttcattatatgacttctcatatggagaaattcagccataatcactaacttccttttaagctactcttttgcaacctcctcagaagtgcatacaaaatagaacatgaaagaaaactatccccaaatcctcaatataatttatttctggaaacctttacaagtccatgatatcaaaattttgaaaggctatgtaagacgttaatggacatctatatcaacttgaaatgatgtagctataaatttcatctcccataattcttcatttaaaaaatctagttattattagttaataaacctctgcatcaagtcaagtaacactgagataaatatgaagaaaacaagcacatccatttaatctatataatttctaaagagatgaagaaaggcttagaaaaatactacaattttatttctgtggtggttccaacctgtgataactgagaacaatacaaatagagatttgaaattcatgttgaatcatgaatcatatgtctgcatctctcaaaatctccaatagctccaaattccaggtctctgagttcatcctgctgggattcccgggcattcacagctggcaacactggctatctctgcccctggcactactgtatctctcagcacttgctgcaaacaccctcatcctcatcatcatctggcagaacccttctttacagcagcccatgtatattttccttggcatcctctgtatggtagacatgggtctggccactactatcatccctaagatcctggccatcttctggtttgatgccaaggttattagcctccctgagtgctttgctcagatttatgccattcacttctttgtgggcatggagtctggtatcctactctgcatggcttttgatagatatgtggctatttgtcaccctcttcgctatccatcaattgtcaccagttccttaatcttaaaagctaccctgttcatggtgctgagaaatggcttatttgtcactccagtgcctgtgcttgcagcacagcgtgattattgctccaagaatgaaattgaacactgcctgtgctctaacctt

SEQ ID NO: 194789 - DNA, 4186 bp, Homo sapiens
  Payload ID: 18483
  Gene Name: tripartite motif containing 23
  Uniprot ID: P36406
  ENST ID: ENST00000231524
  CDS Start-End: 373-2097
agatgcccgtaccccctcaccgccctcagttcacgccctggctggtttggattcgagaggaaaaatcattaaaggatctggagttttcaccccaaaactttaatcgttttgtcccttctttttttttcttgtctttcctccagcagctgcagactacataatgaaaaataacaaaagtgcccatgcgcgaggctgtgcaactaaccacccgacgattgcggggaggaggagtaagagtcggctaagcggcgcccagtgtcctactgcgcctgtgcgccggtggcgtgcgcagaggcctctgggtaggtggctcaaccccgcctctcagttgaggactctgaaggctgtttctgtggcgcttcccctgcgaggatggctaccctggttgtaaacaagctcggagcgggagtagacagtggccggcagggcagccgggggacagctgtagtgaaggtgctagagtgtggagtttgtgaagatgtcttttctttgcaaggagacaaagttccccgtcttttgctttgtggccataccgtctgtcatgactgtctcactcgcctacctcttcatggaagagcaatccgttgcccatttgatcgacaagtaacagacctaggtgattcaggtgtctggggattgaaaaaaaattttgctttattggagcttttggaacgactgcagaatgggcctattggtcagtatggagctgcagaagaatccattgggatatctggagagagcatcattcgttgtgatgaagatgaagctcaccttgcctctgtatattgcactgtgtgtgcaactcatttgtgctctgagtgttctcaagttactcattctacaaagacattagcaaagcacaggcgagttcctctagctgataaacctcatgagaaaactatgtgctctcagcaccaggtgcatgccattgagtttgtttgcttggaagaaggttgtcaaactagcccactcatgtgctgtgtctgcaaagaatatggaaaacaccagggtcacaagcattcagtattggaaccagaagctaatcagatccgagcatcaattttagatatggctcactgcatacggaccttcacagaggaaatctcagattattccagaaaattagttggaattgtgcagcacattgaaggaggagaacaaatcgtggaagatggaattggaatggctcacacagaacatgtaccagggactgcagagaatgcccggtcatgtattcgagcttatttttatgatctacatgaaactctgtgtcgtcaagaagaaatggctctaagtgttgttgatgctcatgttcgtgaaaaattgatttggctcaggcagcaacaagaagatatgactattttgttgtcagaggtttctgcagcctgcctccactgtgaaaagactttgcagcaggatgattgtagagttgtcttggcaaaacaggaaattacaaggttactggaaacattgcagaaacagcagcagcagtttacagaagttgcagatcacattcagttggatgccagcatccctgtcacttttacaaaggataatcgagttcacattggaccaaaaatggaaattcgggtcgttacgttaggattggatggtgctggaaaaactactatcttgtttaagttaaaacaggatgaattcatgcagcccattccaacaattggttttaacgtggaaactgtagaatataaaaatctaaaattcactatttgggatgtaggtggaaaacacaaattaagaccattgtggaaacattattacctcaatactcaagctgttgtgtttgttgtagatagcagtcatagagacagaattagtgaagcacacagcgaacttgcaaagttgttaacggaaaaagaactccgagatgctctgctcctgatttttgctaacaaacaggatgttgctggagcactgtcagtagaagaaatcactgaactactcagtctccataaattatgctgtggccgtagctggtatattcagggctgtgatgctcgaagtggtatgggactgtatgaagggttggactggctctcacggcaacttgtagctgctggagtattggatgttgcttgattttaaaggcagcagttgtttgaagttttgtggttaaaagtaactttgcacatagtatgttttaagaaattatacatctcaaaagatggtaatttaggatgcatatatatatatatatatataaaggaatcttggattgggaattcagtactttgctttaaaaaaattttgtggcagaattaaatttctaattgagcagattagattgaattaaatagaaacttattgaatatacattcttttaaaaagtatatttgttatttaagtttttcagataatatgtgaccaatatactgggaaagaggtagtcacagagaaagggtaagtgaaggtttattctttcagtgaaaaaagaatagccaattgagtgcctaatgagacctctgtgtgaagcaagtgaagtatagctgcttcttttaacctgccttttcactgaatgttggcagcatttagtagtagaaatgacagttgcttaatgaaatagaatccaaactacatatttggataataggattactttatgtttatgttcagagttaacagaacacctttaatgctaagaactataaggtacagaaaattaatactttatatagtgttttattaactttctcctacagcattttgtataaaacacaatgagggagtgaaatgttacccaattaggcttgtcaggttagtaataaactgaacagtaataaaactgtggaagtaattggatctgaatttatgaaagacccatttccaggactgaacctaggtcagagctctaaattggtccttctatttttcaacaaatttaaagtaatatttctttctaatataatattgcatcctttgtgggaatgactataggtaaaatgtagtaagtaacgcagaaccagggttggctttatttaaaagctagtgacctaaatagaaagcgaacttcaagagaagttgtaagtacagtggcaaatgcttattacttacttcaaactgtttcccaaaataagtgcatttattttgacaataaaacttaaggctgttcatgagaaggccttgaaaagttactctagaggaaaaatgtctaaagaaaaaaaaaattcaaaaagtttacattaattattcagtgttgtgagtaaataaaaatgtgtgctctttactgtttttcatttttaaagaatattattatggaagcacgatttatttaaataggtacattgagacttttttttttttaatgttctgatacattaggatgaagttaaatcttaaatcttattagttgaattgttgtaaggacagtgatgtctggtaacaagatgtgactttttggtagcactgttgtggttcattcttttcaaatctatttttgtttaaaaacaatacaagttttagaaaacaaagcattaaaaaaaaagcctatcagtattatgggcaatatgtaaataaataaatgtaatatttcatcctttatttttcaggtaaaaggtcatgctgttacaggtgtagtttgtgtgcataaataatacttccgaattaaattatttaatatttgactgatttcaataactgtgaaaaataaaaaaggtgttgtattgcttgtgagaacttgaactgtttactagttaattgaagaaaaagtgtaacactaaggtgaacttgcttcccttttcactaattttgctaaactttgtaatgcacattcttagcatataactgaacacagttgaaaaattgtgcctgattataatgtatgtataatggtaggtgtttgtgtgtgattcatttttaaagaaatatttttctcaagctcctattactatttgtggttgtattatttcactaatcattagttaagactgtgctagtcttccctgggaaactaagaagagagcttttttatatacagtatattagaattttcctagtagctgaatttctgtattaggtctaaatattactgtatgttatataaagcaggtatgtcaagtgtatagccgtagtctataattcaggaatgctttataaccatcagaagccattatttgcactacatatatgataagtatagacagcaataaaatgttaagatcatttttaagaa

SEQ ID NO: 194790 - DNA, 1829 bp, Homo sapiens
  Payload ID: 18483
  Gene Name: tripartite motif containing 23
  Uniprot ID: P36406
  ENST ID: ENST00000274327
  CDS Start-End: 26-1666
tttctgtggcgcttcccctgcgaggatggctaccctggttgtaaacaagctcggagcgggagtagacagtggccggcagggcagccgggggacagctgtagtgaaggtgctagagtgtggagtttgtgaagatgtcttttctttgcaaggagacaaagttccccgtcttttgctttgtggccataccgtctgtcatgactgtctcactcgcctacctcttcatggaagagcaatccgttgcccatttgatcgacaagtaacagacctaggtgattcaggtgtctggggattgaaaaaaaattttgctttattggagcttttggaacgactgcagaatgggcctattggtcagtatggagctgcagaagaatccattgggatatctggagagagcatcattcgttgtgatgaagatgaagctcaccttgcctctgtatattgcactgtgtgtgcaactcatttgtgctctgagtgttctcaagttactcattctacaaagacattagcaaagcacaggcgagttcctctagctgataaacctcatgagaaaactatgtgctctcagcaccaggtgcatgccattgagtttgtttgcttggaagaaggttgtcaaactagcccactcatgtgctgtgtctgcaaagaatatggaaaacaccagggtcacaagcattcagtattggaaccagaagctaatcagatccgagcatcaattttagatatggctcactgcatacggaccttcacagaggaaatctcagattattccagaaaattagttggaattgtgcagcacattgaaggaggagaacaaatcgtggaagatggaattggaatggctcacacagaacatgtaccagggactgcagagaatgcccggtcatgtattcgagcttatttttatgatctacatgaaactctgtgtcgtcaagaagaaatggctctaagtgttgttgatgctcatgttcgtgaaaaattgatttggctcaggcagcaacaagaagatatgactattttgttgtcagaggtttctgcagcctgcctccactgtgaaaagactttgcagcaggatgattgtagagttgtcttggcaaaacaggaaattacaaggttactggaaacattgcagaaacagcagcagcagtttacagaagttgcagatcacattcagttggatgccagcatccctgtcacttttacaaaggataatcgagttcacattggaccaaaaatggaaattcgggtcgttacgttaggattggatggtgctggaaaaactactatcttgtttaagttaaaacaggatgaattcatgcagcccattccaacaattggttttaacgtggaaactgtagaatataaaaatctaaaattcactatttgggatgtaggtggaaaacacaaattaagaccattgtggaaacattattacctcaatactcaagctgttgtgtttgttgtagatagcagtcatagagacagaattagtgaagcacacagcgaacttgcaaagttgttaacggaaaaagaactccgagatgctctgctcctgatttttgctaacaaacaggatgttgctggagcactgtcagtagaagaaatcactgaactactcagtctccataaattatgctgtggccgtagctgtttttcagataatatgtgaccaatatactgggaaagaggtagtcacagagaaagggtaaaaggtcatgctgttacaggtgtagtttgtgtgcataaataatacttccgaattaaattatttaatatttgactgatttcaataactgtgaaaaataaaaaaggtgttgtattgcttgtgagaa

SEQ ID NO: 194791 - DNA, 1855 bp, Homo sapiens
  Payload ID: 18483
  Gene Name: tripartite motif containing 23
  Uniprot ID: P36406
  ENST ID: ENST00000381018
  CDS Start-End: 23-1732
ctgtggcgcttcccctgcgaggatggctaccctggttgtaaacaagctcggagcgggagtagacagtggccggcagggcagccgggggacagctgtagtgaaggtgctagagtgtggagtttgtgaagatgtcttttctttgcaaggagacaaagttccccgtcttttgctttgtggccataccgtctgtcatgactgtctcactcgcctacctcttcatggaagagcaatccgttgcccatttgatcgacaagtaacagacctaggtgattcaggtgtctggggattgaaaaaaaattttgctttattggagcttttggaacgactgcagaatgggcctattggtcagtatggagctgcagaagaatccattgggatatctggagagagcatcattcgttgtgatgaagatgaagctcaccttgcctctgtatattgcactgtgtgtgcaactcatttgtgctctgagtgttctcaagttactcattctacaaagacattagcaaagcacaggcgagttcctctagctgataaacctcatgagaaaactatgtgctctcagcaccaggtgcatgccattgagtttgtttgcttggaagaaggttgtcaaactagcccactcatgtgctgtgtctgcaaagaatatggaaaacaccagggtcacaagcattcagtattggaaccagaagctaatcagatccgagcatcaattttagatatggctcactgcatacggaccttcacagaggaaatctcagattattccagaaaattagttggaattgtgcagcacattgaaggaggagaacaaatcgtggaagatggaattggaatggctcacacagaacatgtaccagggactgcagagaatgcccggtcatgtattcgagcttatttttatgatctacatgaaactctgtgtcgtcaagaagaaatggctctaagtgttgttgatgctcatgttcgtgaaaaattgatttggctcaggcagcaacaagaagatatgactattttgttgtcagaggtttctgcagcctgcctccactgtgaaaagactttgcagcaggatgattgtagagttgtcttggcaaaacaggaaattacaaggttactggaaacattgcagaaacagcagcagcagtttacagaagttgcagatcacattcagttggatgccagcatccctgtcacttttacaaaggataatcgagttcacattggaccaaaaatggaaattcgggtcgttacgttaggattggatggtgctggaaaaactactatcttgtttaagttaaaacaggatgaattcatgcagcccattccaacaattggttttaacgtggaaactgtagaatataaaaatctaaaattcactatttgggatgtaggtggaaaacacaaattaagaccattgtggaaacattattacctcaatactcaagctgttgtgtttgttgtagatagcagtcatagagacagaattagtgaagcacacagcgaacttgcaaagttgttaacggaaaaagaactccgagatgctctgctcctgatttttgctaacaaacaggatgttgctggagcactgtcagtagaagaaatcactgaactactcagtctccataaattatgctgtggccgtagctggtatattcagggctgtgatgctcgaagtgtttttcagataatatgtgaccaatatactgggaaagaggtagtcacagagaaagggtaaaaggtcatgctgttacaggtgtagtttgtgtgcataaataatacttccgaattaaattatttaatatttgactgatttcaataactgtgaaaaataaaaaaggtgttgtattgcttgtgagaa

SEQ ID NO: 194792 - DNA, 574 bp, Homo sapiens
  Payload ID: 18483
  Gene Name: tripartite motif containing 23
  ENST ID: ENST00000513794
  CDS Start-End: 470-574
gatgactacatcataatgggaaggataaggcgttcctcaaaatggatgccataagtaaagggaagctgaagcctgattaacttcgtcagtgccacaggaagaaacaagagacagaaggaaaaagcactttggatgcccgctgtaattcacagagatctccacggtaggagcgggacgtcagcttctgcggctaaaatctcgtgactgaagcagcacagatcagaaagaacgatttaccagcagctgcagactacataatgaaaaataacaaaagtgcccatgcgcgaggctgtgcaactaaccacccgacgattgcggggaggaggagtaagagtcggctaagcggcgcccagtgtcctactgcgcctgtgcgccggtggcgtgcgcagaggcctctgggtaggtggctcaaccccgcctctcagttgaggactctgaaggctgtttctgtggcgcttcccctgcgaggatggctaccctggttgtaaacaagctcggagcgggagtagacagtggccggcagggcagccgggggacagctgtagtgaaggtgctagagtgtggagtttgtgaa

SEQ ID NO: 194793 - DNA, 793 bp, Homo sapiens
  Payload ID: 18483
  Gene Name: tripartite motif containing 23
  ENST ID: ENST00000505205
  CDS Start-End: 87-467
gcgcagaggcctctgggtaggtggctcaaccccgcctctcagttgaggactctgaaggctgtttctgtggcgcttcccctgcgaggatggctaccctggttgtaaacaagctcggagcgggagtagacagtggccggcagggcagccgggggacagctgtagtgaaggtgctagagtgtggagtttgtgaagatgtcttttctttgcaaggagacaaagttccccgtcttttgctttgtggccataccgtctgtcatgactgtctcactcgcctacctcttcatggaagagcaatccgttgcccatttgatcgacaagtaacagacctaggtgattcaggtgtctggggattgaaaaaaaattttgctttattggagcttttggaacgactgcagaatgggcctattggtcagtatggagctgcagaagaatccattgggatatctggagagttctaccaagaataaagtgaaaagaggaagaagattatggaatagtaagaaagatatgtaagcaacagtagagaagaggatgcaaaagtagtcaacagtaaaactcaatgagagaaagaaaaactcgatagcatcattcgttgtgatgaagatgaagctcaccttgcctctgtatattgcactgtgtgtgcaactcatttgtgctctgagtgttctcaagttactcattctacaaagacattagcaaagcacaggcgagttcctctagctgataaacctcatgagaaaactatgtgctctcagcaccaggtgcatgccattgagtttgtttgcttggaaga

SEQ ID NO: 194794 - DNA, 556 bp, Homo sapiens
  Payload ID: 18483
  Gene Name: tripartite motif containing 23
  ENST ID: ENST00000506400
  CDS Start-End: 47-151
agttgaggactctgaaggctgtttctgtggcgcttcccctgcgaggatggctaccctggttgtaaacaagctcggagcgggagtagacagtggccggcagggcagccgggggacagctgtagtgaaggtgattcaggtgtctggggattgaaaaaaaattttgctttattggagcttttggaacgactgcagaatgggcctattggtcagtatggagctgcagaagaatccattgggatatctggagagagcatcattcgttgtgatgaagatgaagctcaccttgcctctgtatattgcactgtgtgtgcaactcatttgtgctctgagtgttctcaagttactcattctacaaagacattagcaaagcacagcattcagtattggaaccagaagctaatcagatccgagcatcaattttagatatggctcactgcatacggaccttcacagaggaaatctcagattattccagaaaattagttggaattgtgcagcacattgaaggaggagaacaaatcgtggaagatggaattggaatggctcacacagaaca

SEQ ID NO: 194795 - DNA, 8410 bp, Homo sapiens
  Payload ID: 18484
  Gene Name: tripartite motif containing 24
  Uniprot ID: O15164
  ENST ID: ENST00000343526
  CDS Start-End: 216-3368
gacagataccctccttccggccgcgccactcgggaggcggatcccgtgggcctgaggaggcttcccccgcccggtttgctttccctccctcgctggcgctgccgcgagtccaccgagcggcctctgaggagcagccgcaggaggaggaggaggtcgtcgggggcggcgggcggagaccgcgctctcgcttccccggcggcggcaagggcaggacaatggaggtggcggtggagaaggcggtggcggcggcggcagcggcctcggctgcggcctccggggggccctcggcggcgccgagcggggagaacgaggccgagagtcggcagggcccggactcggagcgcggcggcgaggcggcccggctcaacctgttggacacttgcgccgtgtgccaccagaacatccagagccgggcgcccaagctgctgccctgcctgcactctttctgccagcgctgcctgcccgcgccccagcgctacctcatgctgcccgcgcccatgctgggctcggccgagaccccgccacccgtccctgcccccggctcgccggtcagcggctcgtcgccgttcgccacccaagttggagtcattcgttgcccagtttgcagccaagaatgtgcagagagacacatcatagataacttttttgtgaaggacactactgaggttcccagcagtacagtagaaaagtcaaatcaggtatgtacaagctgtgaggacaacgcagaagccaatgggttttgtgtagagtgtgttgaatggctctgcaagacgtgtatcagagctcatcagagggtaaagttcacaaaagaccacactgtcagacagaaagaggaagtatctccagaggcagttggtgtcaccagccagcgaccagtgttttgtccttttcataaaaaggagcagctgaagctgtactgtgagacatgtgacaaactgacatgtcgagactgtcagttgttagaacataaagagcatagataccaatttatagaagaagcttttcagaatcagaaagtgatcatagatacactaatcaccaaactgatggaaaaaacaaaatacataaaattcacaggaaatcagatccaaaacagaattattgaagtaaatcaaaatcaaaagcaggtggaacaggatattaaagttgctatatttacactgatggtagaaataaataaaaaaggaaaagctctactgcatcagttagagagccttgcaaaggaccatcgcatgaaacttatgcaacaacaacaggaagtggctggactctctaaacaattggagcatgtcatgcatttttctaaatgggcagtttccagtggcagcagtacagcattactttatagcaaacgactgattacataccggttacggcacctccttcgtgcaaggtgtgatgcatccccagtgaccaacaacaccatccaatttcactgtgatcctagtttctgggctcaaaatatcatcaacttaggttctttagtaatcgaggataaagagagccagccacaaatgcctaagcagaatcctgtcgtggaacagaattcacagccaccaagtggtttatcatcaaaccagttatccaagttcccaacacagatcagcctagctcaattacggctccagcatatgcagcaacaggtaatggctcagaggcaacaggtgcaacggaggccagcacctgtgggtttaccaaaccctagaatgcaggggcccatccagcaaccttccatctctcatcagcaaccgcctccacgtttgataaactttcagaatcacagccccaaacccaatggaccagttcttcctcctcatcctcaacaactgagatatccaccaaaccagaacataccacgacaagcaataaagccaaaccccctacagatggctttcttggctcaacaagccataaaacagtggcagatcagcagtggacagggaaccccatcaactaccaacagcacatcctctactccttccagccccacgattactagtgcagcaggatatgatggaaaggcttttggttcacctatgatcgatttgagctcaccagtgggagggtcttataatcttccctctcttccggatattgactgttcaagtactattatgctggacaatattgtgaggaaagatactaatatagatcatggccagccaagaccaccctcaaacagaacggtccagtcaccaaattcatcagtgccatctccaggccttgcaggacctgttactatgactagtgtacaccccccaatacgttcacctagtgcctccagcgttggaagccgaggaagctctggctcttccagcaaaccagcaggagctgactctacacacaaagtcccagtggtcatgctggagccaattcgaataaaacaagaaaacagtggaccaccggaaaattatgatttccctgttgttatagtgaagcaagaatcagatgaagaatctaggcctcaaaatgccaattatccaagaagcatactcacctccctgctcttaaatagcagtcagagctctacttctgaggagactgtgctaagatcagatgcccctgatagtacaggagatcaacctggacttcaccaggacaattcctcaaatggaaagtctgaatggttggatccttcccagaagtcacctcttcatgttggagagacaaggaaagaggatgaccccaatgaggactggtgtgcagtttgtcaaaacggaggggaactcctctgctgtgaaaagtgccccaaagtattccatctttcttgtcatgtgcccacattgacaaattttccaagtggagagtggatttgcactttctgccgagacttatctaaaccagaagttgaatatgattgtgatgctcccagtcacaactcagaaaaaaagaaaactgaaggccttgttaagttaacacctatagataaaaggaagtgtgagcgcctacttttatttctttactgccatgaaatgagcctggcttttcaagaccctgttcctctaactgtgcctgattattacaaaataattaaaaatccaatggatttgtcaaccatcaagaaaagactacaagaagattattccatgtactcaaaacctgaagattttgtagctgattttagattgatctttcaaaactgtgctgaattcaatgagcctgattcagaagtagccaatgctggtataaaacttgaaaattattttgaagaacttctaaagaacctctatccagaaaaaaggtttcccaaaccagaattcaggaatgaatcagaagataataaatttagtgatgattcagatgatgactttgtacagccccggaagaaacgcctcaaaagcattgaagaacgccagttgcttaaataatatgcagcaccactagcttgtgctggtttttagatttttttgttttcaaaaaaacatttgtcagtaatttaacatcactacaaaaagaagagtttgtgactattctcatctctgttttggacgtttactagactttgatttccttaatagcccatttctgttaacctcttatcactaagaaagaaaggaaagaaggagatgaatagaagaaagaaaatggaaagaaggaaaaaaggaggatagaaaaaggatggaagaaagaagcattgaaaacaaagacattcttcccacttcttggatttttaaaccacagtctggagtgatagctactgtagaaaggaaatagactttgtatgaactctttaagttgaaaagtaaaaaatatatgtggtttggatgtgtgctttaattcagctttagaaattaataccactacccgtgaattatatggcctgacaatatgaattaggtgtactgtactgaagaacagtactccacaaacatgggtggtaacaagagttccatcccaggaggccaaacggtgcaacagaagggtaggttagatgctattaagaaggcacttaatagtacatcatgtaagatggcaactgtattaaagaaaaatccggaaaacaaatgtttgatttttgtttttgtttttatcttgtctgtagaggtattttggtatagcaggttttcaaggccattttttatacatttctagatctagattttcaacttcttccactgagggaagtatatacatttgggtttgctgtgtgtctatgtgaggtttaattgtacaggtgatccttttacaacaagcctcattgtttgcagtatagcttttagtggaactacccaaaatataaatacagcagcgtgcactgtatttgatgtgagggttcttcatcatataccctactgggcattaaatataagttcctctgaaagggactcgtttttgtggttttcatctgtctataatttggaatgaaaatgtgttgtaggattttgggagcaggcagctggggggaattaatagtgattttttttttttcctgaagcatctatctcatgtttttcttttgagagtcagaacatcaaacttaatctttgatctgacttctgattttattcttctgattgattgatagaggtacaaaagacttatcttctgaggacaagcatattcttaatgtgccagacctacccggttcagctgatatagatagatagatagatagaagaaaattgctgtgccatacattaatccagcatttgacacaatatctaaatggtttgccgaagttaatctgtatttataaaacattaactggagtaaatttttctccttaggatgatagaataaaaagagctcacttgaaagaaggctattatttgcattatatcacctgccataaatttaacatagaagacttggttttatctacatggctttacttcttaaagtggaaaatatcctgtggctaattcattgggttttcaggtactgctaaagataaaatacagggagaaaataacttgttagcaatagatccccattgtttatatatataggtcttgttcataatatgtcaattatgtattgttaaaaagtcctactcacttttcaaatatgtgttacatggtaatgtttgtcattgttgttttaaagttgcatttgacatttgttctccaaagagtgtttgaacagattttgataacagtgcatacaccttttgtctttttttgctccagcattttatttttagcacagcagctgtggagcttttgctgataattttattgttggtatcttagaatactgttcgtctgacagtttattcttccatacttgtctcccaagttaaaacagagcaaaacagataaattattttgagaatcatcacaaaagggagttagaacttgtgagactaaaactataatttcctaaatgtgactaatgaaccccaaactgtcactattacattcagtgccatatttatctttcaaaacagtatttgtttcaccctaaccatctttggctgaatgaaaggcagttgagaaccatcttttggtcatacataatataattatattaaaagtaaagatcggggctgggcgcagtggctcacacctgcaatcccaccagcactttgggaggccaaggtgggcggatcacaaagtcaagagttcgagatcagcctggccaacattgtgaaaccccgcctctacaaaaaatacaaaaattagccggacatggtggcgtgcaactgtaatcccaactactcaggaggctgagacaggagaatcacttgaacgcaggaggcagaagttgcagtgagccaagatctcaccattgcactccagcctgagtgacagagactcagtctcaaaaacaaaaagtaaaggtcttgggtttctctctgtaaatagcctttgtgtaatggtctttagattaatatcctttgactttattaataagtacctgtgtgcccaggtggatctcagctaagtcatccttaaattctgttcaaatagaaataaaccataaaatgagcctaactataacccacactcacttatcaagcattcccccaaaagttcagtgcgattcaggtaaccttgacctaaacttgtacactccggtgtacatctttgaccataaactctgggagatttccctctggatttgggatcaggagcccagtagggccccattgctgaatgtttatcacacttctggctagggcttatggatgagcagaccacgtaggagctaggatttactcagttccacctcactgacagcttttctaggtgccaagcaactgacttttcctgtgtaaggaagcccaagtacttgaccagtgatatatatggccatggcaaaagtataaatggatggatgtagaccatattcaacgcagaatacattttagatcggtatctggcattgtaatcattttgtcttttgaattaacatgccctgcttgtcttttctgaatggaagggtaggaaagtggaaggtactaaaaaggaaaatgtagttttagtttcttttctaagctaaagaactggctttactactgctatattttactaccacatagtagtgtagatgtagtataacttgcttaggaatgctttcaaaaaggttacctccatagtcaaaaaaagggggagtatacagctgattgttgcatttatgaaactgcatttcaatatgctatgctgttactgtgcttagacacttccttacgtttgagttccaaggagagagagtgagaagaggaactccttttgctgagctctggtccaaattaatgtgaatccccaaagtaaattgctgcatatgaacaacaggttttaggtttaaattgaagatacattcattttatatgtatttgttgtgaatgagagaaattgagtgatctgattggccattaaaattatggtgaatgggtcgggcgcagtggctcacgcctgtaatcccagcactttgggaggccgaggtgggtagatacctgaggtcaggagtttgagaccagcctgaccaacatggtgaaaccccatctctactaaaaataccaaaatcaccagggtgtggtggcccatgcctgtaatcctagctactcgggaggctgaggcaggagaatcggcttgaacccaggaggcagaggttgcagtgagctgagatcgcaccactgtagtccagcctgggtgtcagagcaagactctgtcacaaaaagaaaaattatggggaatggccgggcgcggtggctcacacctgtaatcccagcactttgggaggccgaggtgggtggatcacctgaagtcaggagctcaagaccagcctggccaacatggtgaaaccccacctcaacagaatatacaaaaaaattagctgggtgtggtggcgggtgcctgtaatctcagctactttgggatgctgaggcaggagaatagcttgaacccaggaggtggaggttgcagtgagtcgagattgcaccattgcactccagcctgggcaacaagagcaaaactctgtctcaaaaaaaaaaaaaaatggtgaccatgcgttcaaccatataatttcttactgaaattgagctcctccttttgaataaccatgtacatatttttaaaagtattttatagccctatgtaaattaatagttgatgtctttttataaatgtttattgcatattcatcttgaatgtgaatttactgttgtaattcacatactggtgtcatgtttctgagtgagaataatgctagtcagtcagatcacagatttttctccatgaaggttttacttattgagagggacatctgaggcagtagtcttcgtctttaatttttgggggcagattggtgctttggttttaataaaaactaactttgatggatttttactgtcaatattttaccacaaggattttttaatagaaaaattactgaatgttacttcagcagagttctatctactttgagtctccattactactactgttgttcccctagctgtaacattgatccatataggggcaagctactagtccataaatagctgtaataggaaaacagttttttaaaattctaacacgtgtatttcaccagccttaaaagatttaaaaaaaaatctgacaggaaggaaagcgggtggtaagtatcttggattattctgcctcataccagccactcccaaagtaggaggaccaaagatgccatgaagacttctagttgtctggaagttatttggggaaggggggaaagacacagagtggggacctttggaagtcattttaaaaatttagctatgttaattccacttgtaaagtttgaaaggttttgattcttgtaatttctgagaattactatgttttaaatttactattggatatttaacagatctttcatggggccaacctatttgcttccttaattttcaaattaagtcctaatttgagtcctaaaaaaatctttccttgttagttgcaagttaaacatttaataaaattattttcccacgttt

SEQ ID NO: 194796 - DNA, 3799 bp, Homo sapiens
  Payload ID: 18484
  Gene Name: tripartite motif containing 24
  Uniprot ID: O15164
  ENST ID: ENST00000415680
  CDS Start-End: 115-3165
ccgcgagtccaccgagcggcctctgaggagcagccgcaggaggaggaggaggtcgtcgggggcggcgggcggagaccgcgctctcgcttccccggcggcggcaagggcaggacaatggaggtggcggtggagaaggcggtggcggcggcggcagcggcctcggctgcggcctccggggggccctcggcggcgccgagcggggagaacgaggccgagagtcggcagggcccggactcggagcgcggcggcgaggcggcccggctcaacctgttggacacttgcgccgtgtgccaccagaacatccagagccgggcgcccaagctgctgccctgcctgcactctttctgccagcgctgcctgcccgcgccccagcgctacctcatgctgcccgcgcccatgctgggctcggccgagaccccgccacccgtccctgcccccggctcgccggtcagcggctcgtcgccgttcgccacccaagttggagtcattcgttgcccagtttgcagccaagaatgtgcagagagacacatcatagataacttttttgtgaaggacactactgaggttcccagcagtacagtagaaaagtcaaatcaggtatgtacaagctgtgaggacaacgcagaagccaatgggttttgtgtagagtgtgttgaatggctctgcaagacgtgtatcagagctcatcagagggtaaagttcacaaaagaccacactgtcagacagaaagaggaagtatctccagaggcagttggtgtcaccagccagcgaccagtgttttgtccttttcataaaaaggagcagctgaagctgtactgtgagacatgtgacaaactgacatgtcgagactgtcagttgttagaacataaagagcatagataccaatttatagaagaagcttttcagaatcagaaagtgatcatagatacactaatcaccaaactgatggaaaaaacaaaatacataaaattcacaggaaatcagatccaaaacagaattattgaagtaaatcaaaatcaaaagcaggtggaacaggatattaaagttgctatatttacactgatggtagaaataaataaaaaaggaaaagctctactgcatcagttagagagccttgcaaaggaccatcgcatgaaacttatgcaacaacaacaggaagtggctggactctctaaacaattggagcatgtcatgcatttttctaaatgggcagtttccagtggcagcagtacagcattactttatagcaaacgactgattacataccggttacggcacctccttcgtgcaaggtgtgatgcatccccagtgaccaacaacaccatccaatttcactgtgatcctagtttctgggctcaaaatatcatcaacttaggttctttagtaatcgaggataaagagagccagccacaaatgcctaagcagaatcctgtcgtggaacagaattcacagccaccaagtggtttatcatcaaaccagttatccaagttcccaacacagatcagcctagctcaattacggctccagcatatgcagcaacagcaaccgcctccacgtttgataaactttcagaatcacagccccaaacccaatggaccagttcttcctcctcatcctcaacaactgagatatccaccaaaccagaacataccacgacaagcaataaagccaaaccccctacagatggctttcttggctcaacaagccataaaacagtggcagatcagcagtggacagggaaccccatcaactaccaacagcacatcctctactccttccagccccacgattactagtgcagcaggatatgatggaaaggcttttggttcacctatgatcgatttgagctcaccagtgggagggtcttataatcttccctctcttccggatattgactgttcaagtactattatgctggacaatattgtgaggaaagatactaatatagatcatggccagccaagaccaccctcaaacagaacggtccagtcaccaaattcatcagtgccatctccaggccttgcaggacctgttactatgactagtgtacaccccccaatacgttcacctagtgcctccagcgttggaagccgaggaagctctggctcttccagcaaaccagcaggagctgactctacacacaaagtcccagtggtcatgctggagccaattcgaataaaacaagaaaacagtggaccaccggaaaattatgatttccctgttgttatagtgaagcaagaatcagatgaagaatctaggcctcaaaatgccaattatccaagaagcatactcacctccctgctcttaaatagcagtcagagctctacttctgaggagactgtgctaagatcagatgcccctgatagtacaggagatcaacctggacttcaccaggacaattcctcaaatggaaagtctgaatggttggatccttcccagaagtcacctcttcatgttggagagacaaggaaagaggatgaccccaatgaggactggtgtgcagtttgtcaaaacggaggggaactcctctgctgtgaaaagtgccccaaagtattccatctttcttgtcatgtgcccacattgacaaattttccaagtggagagtggatttgcactttctgccgagacttatctaaaccagaagttgaatatgattgtgatgctcccagtcacaactcagaaaaaaagaaaactgaaggccttgttaagttaacacctatagataaaaggaagtgtgagcgcctacttttatttctttactgccatgaaatgagcctggcttttcaagaccctgttcctctaactgtgcctgattattacaaaataattaaaaatccaatggatttgtcaaccatcaagaaaagactacaagaagattattccatgtactcaaaacctgaagattttgtagctgattttagattgatctttcaaaactgtgctgaattcaatgagcctgattcagaagtagccaatgctggtataaaacttgaaaattattttgaagaacttctaaagaacctctatccagaaaaaaggtttcccaaaccagaattcaggaatgaatcagaagataataaatttagtgatgattcagatgatgactttgtacagccccggaagaaacgcctcaaaagcattgaagaacgccagttgcttaaataatatgcagcaccactagcttgtgctggtttttagatttttttgttttcaaaaaaacatttgtcagtaatttaacatcactacaaaaagaagagtttgtgactattctcatctctgttttggacgtttactagactttgatttccttaatagcccatttctgttaacctcttatcactaagaaagaaaggaaagaaggagatgaatagaagaaagaaaatggaaagaaggaaaaaaggaggatagaaaaaggatggaagaaagaagcattgaaaacaaagacattcttcccacttcttggatttttaaaccacagtctggagtgatagctactgtagaaaggaaatagactttgtatgaactctttaagttgaaaagtaaaaaatatatgtggtttggatgtgtgctttaattcagctttagaaattaataccactacccgtgaattatatggcctgacaatatgaattaggtgtactgtactgaagaacagtactccacaaacatgggtggtaacaagagttccatcccaggaggccaaacggtgcaacagaagggtaggttagatgctattaagaaggcacttaatagtacatcatgtaagatggcaactgtattaaagaaaaatccggaaaac

SEQ ID NO: 194797 - DNA, 3039 bp, Homo sapiens
  Payload ID: 18484
  Gene Name: tripartite motif containing 24
  ENST ID: ENST00000620194
  CDS Start-End: 1-3039
atggaggtggcggtggagaaggcggtggcggcggcggcacggctcggctgccctccggggggccctcggggcagcggggagaacgaggccgagagtcggcagggcccggactcggagcgcggcggcgaggcggcccggctcaacctgttggacacttgcgccgtgtgccaccagaacatccagagccgggcgcccaagctgctgccctgcctgcactctttctgccagcgctgcctgcccgcgccccagcgctacctcatgctgcccgcgcccatgctgggctcggccgagaccccgccacccgtccctgccccggctcgccggtcagcgtcgtcgccgttcgccacccaagttggagtcattcgttgcccagtttgcagccaagaatgtgcagagagacacatcatagataacttttttgtgaaggacactactgaggttcccagcagtacagtagaaaagtcaaatcaggtatgtacaagctgtgaggacaacgcagaagccaatgggttttgtgtagagtgtgttgaatggctctgcaagacgtgtatcagagctcatcagagggtaaagttcacaaaagaccacactgtcagacagaaagaggaagtatctccagaggcagttggtgtcaccagccagcgaccagtgttttgtccttttcataaaaaggagcagctgaagctgtactgtgagacatgtgacaaactgacatgtcgagactgtcagttgttagaacataaagagcatagataccaatttatagaagaagcttttcagaatcagaaagtgatcatagatacactaatcaccaaactgatggaaaaaacaaaatacataaaattcacaggaaatcagatccaaaacagaattattgaagtaaatcaaaatcaaaagcaggtggaacaggatattaaagttgctatatttacactgatggtagaaataaataaaaaaggaaaagctctactgcatcagttagagagccttgcaaaggaccatcgcatgaaacttatgcaacaacaacaggaagtggctggactctctaaacaattggagcatgtcatgcatttttctaaatgggcagtttccagtggcagcagtacagcattactttatagcaaacgactgattacataccggttacggcacctccttcgtgcaaggtgtgatgcatccccagtgaccaacaacaccatccaatttcactgtgatcctagtttctgggctcaaaatatcatcaacttaggttctttagtaatcgaggataaagagagccagccacaaatgcctaagcagaatcctgtcgtggaacagaattcacagccaccaagtggtttatcatcaaaccagttatccaagttcccaacacagatcagcctagctcaattacggctccagcatatgcagcaacagcaaccgcctccacgtttgataaactttcagaatcacagccccaaacccaatggaccagttcttcctcctcatcctcaacaactgagatatccaccaaaccagaacataccacgacaagcaataaagccaaaccccctacagatggctttcttggctcaacaagccataaaacagtggcagatcagcagtggacagggaaccccatcaactaccaacagcacatcctctactccttccagccccacgattactagtgcagcaggatatgatggaaaggcttttggttcacctatgatcgatttgagctcaccagtgggagggtcttataatcttccctctcttccggatattgactgttcaagtactattatgctggacaatattgtgaggaaagatactaatatagatcatggccagccaagaccaccctcaaacagaacggtccagtcaccaaattcatcagtgccatctccaggccttgcaggacctgttactatgactagtgtacaccccccaatacgttcacctagtgcctccagcgttggaagccgaggaagctctggctcttccagcaaaccagcaggagctgactctacacacaaagtcccagtggtcatgctggagccaattcgaataaaacaagaaaacagtggaccaccggaaaattatgatttccctgttgttatagtgaagcaagaatcagatgaagaatctaggcctcaaaatgccaattatccaagaagcatactcacctccctgctcttaaatagcagtcagagctctacttctgaggagactgtgctaagatcagatgcccctgatagtacaggagatcaacctggacttcaccaggacaattcctcaaatggaaagtctgaatggttggatccttcccagaagtcacctcttcatgttggagagacaaggaaagaggatgaccccaatgaggactggtgtgcagtttgtcaaaacggaggggaactcctctgctgtgaaaagtgccccaaagtattccatctttcttgtcatgtgcccacattgacaaattttccaagtggagagtggatttgcactttctgccgagacttatctaaaccagaagttgaatatgattgtgatgctcccagtcacaactcagaaaaaaagaaaactgaaggccttgttaagttaacacctatagataaaaggaagtgtgagcgcctacttttatttctttactgccatgaaatgagcctggcttttcaagaccctgttcctctaactgtgcctgattattacaaaataattaaaaatccaatggatttgtcaaccatcaagaaaagactacaagaagattattccatgtactcaaaacctgaagattttgtagctgattttagattgatctttcaaaactgtgctgaattcaatgagcctgattcagaagtagccaatgctggtataaaacttgaaaattattttgaagaacttctaaagaacctctatccagaaaaaaggtttcccaaaccagaattcaggaatgaatcagaagataataaatttagtgatgattcagatgatgactttgtacagccccggaagaaacgcctcaaaagcattgaagaacgccagttgcttaaataa

SEQ ID NO: 194798 - DNA, 5734 bp, Homo sapiens
  Payload ID: 18485
  Gene Name: tripartite motif containing 25
  Uniprot ID: Q14258
  ENST ID: ENST00000316881
  CDS Start-End: 51-1943
cggcctcggagcgcgggtgcagcagttgtgtcccgacccctgggagcgccatggcagagctgtgccccctggccgaggagctgtcgtgctccatctgcctggagcccttcaaggagccggtcaccactccgtgcggccacaacttctgcgggtcgtgcctgaatgagacgtgggcagtccagggctcgccatacctgtgcccgcagtgccgcgccgtctaccaggcgcgaccgcagctgcacaagaacacggtgctgtgcaacgtggtggagcagttcctgcaggccgacctggcccgggagccacccgccgacgtctggacgccgcccgcccgcgcctctgcacccagcccgaatgcccaggtggcctgcgaccactgcctgaaggaggccgccgtgaagacgtgcttggtgtgcatggcctccttctgtcaggagcacctgcagccgcacttcgacagccccgccttccaggaccacccgctgcagccgcccgttcgcgacctgttgcgccgcaaatgttcccagcacaatcggctgcgggaatttttctgccccgagcacagcgagtgcatctgccacatctgcctggtggagcataagacctgctctcccgcgtccctgagccaggccagcgccgacctggaggccaccctgaggcacaaactaactgtcatgtacagtcagatcaacggggcgtcgagagcactggatgatgtgagaaacaggcagcaggatgtgcggatgactgcaaacagaaaggtggagcagctacaacaagaatacacggaaatgaaggctctcttggacgcctcagagaccacctcgacaaggaagataaaggaagaggagaagagggtcaacagcaagtttgacaccatttatcagattctcctcaagaagaagagtgagatccagaccttgaaggaggagattgaacagagcctgaccaagagggatgagttcgagtttctggagaaagcatcaaaactgcgaggaatctcaacaaagccagtctacatccccgaggtggaactgaaccacaagctgataaaaggcatccaccagagcaccatagacctcaaaaacgagctgaagcagtgcatcgggcggctccaggagcccacccccagttcaggtgaccctggagagcatgacccagcgtccacacacaaatccacacgccctgtgaagaaggtctccaaagaggaaaagaaatccaagaaacctccccctgtccctgccttacccagcaagcttcccacgtttggagccccggaacagttagtggatttaaaacaagctggcttggaggctgcagccaaagccaccagctcacatccgaactcaacatctctcaaggccaaggtgctggagaccttcctggccaagtccagacctgagctcctggagtattacattaaagtcatcctggactacaacaccgcccacaacaaagtggctctgtcagagtgctatacagtagcttctgtggctgagatgcctcagaactaccggccgcatccccagaggttcacatactgctctcaggtgctgggcctgcactgctacaagaaggggatccactactgggaggtggagctgcagaagaacaacttctgtggggtaggcatctgctacggaagcatgaaccggcagggcccagaaagcaggctcggccgcaacagcgcctcctggtgcgtggagtggttcaacaccaagatctctgcctggcacaataacgtggagaaaaccctgccctccaccaaggccacgcgggtgggcgtgcttctcaactgtgaccacggctttgtcatcttcttcgctgttgccgacaaggtccacctgatgtataagttcagggtggactttactgaggctttgtacccggctttctgggtattttctgctggtgccacactctccatctgctcccccaagtaggcaggctgtaggcacttgggctgactgcctgcagaagtcccaagaccctagtgaaaatacagcaggcagaactctccttggataattccccaagaggtcccaaggattgggagcatgggaggggagctggcgggagggtgggaggtgggatttagccaggaaaggggtgagagtgattgtgttgtgggcgaggaggcgtttccaccccctggtgcctatcagggcagggtgacctactccccattgttctggaaatctccaggctgctgggcagctgggcagagctctgggaagtgaagtcatgagtgcccgattcctcttagagaaaatccatagctactgtaggttctgtcttgggccacttggatctgaaggctgcccctttgctctctggggtagccttcagatcttggtgttttgaattcttactatagatgtttttaaagttccaaagtcattgagtttcaatgttacataaactccattacccgcatgttggggcttgatctcctggttattatctgtgcttgaggaaacacccacagcagtctctacccagaacagtttcctaaagaggcataccctcttcctccactggaaaatagtgcgttcccttcctaccctgcacacccatcgcccccacattgatggttttcaaacagcaaacttttcagctaaagcttcaaaccatgattggaatcagcctgtgttggatttgtgattcagggtcatggtgaccctgatccagtttgggtggaaatccttcctaagtatcataagaagcatcttggcagagatgctttggtggcagccatgagctttgctggaggccttgcttcccatagccttggctgtggggcaaggaactctgccaggcgagggggatgctgccctggatcaacagaagcctggtgggtttgctcgtgttagagtgtcctgccttcttactgacaactcttctcggtgatagcctctcttccctggattgtgacatatggaatgacagtgcaggtaccaccgaggctagcacagtcaagcctccagctaagctggatccctgaagcctgctatcatgcagacaggctatgcggctgcctcggaccatgctaggccacttgctggggtgtcaacctaccaccaaaggggtcttttagcaaacctcatggggaacaggaacattcctgttcatccctggccacaggctgcagacccagcactggcccttgcgtgagtcagagcctggggctggccctagccccttctactgacttcctcatttaagccaattatataagctcacattgatcagggagggagggaaagagctaaagagggtcacacaagtggctattttccctgcagtgtttctgtgtggtgaaaataacccagtccactaaggggcgggagtgaatggatggctggattttccccaagctccttatagcctaatgttgtcaggatgtgagtatgaggaatttagcctcttatagtgaaatgagtccaactctgggctttgcttagaggagagctcctgtcaggcttcctataatatgaaaagaagtcaccattggggaactagagaccccagaccttttcatatggatatttgagaatgtaatgcatctcaggcctcgtgctggaactctagggcactctaggcaggctcagaacacttgatattcctgacagctacacacctgacatgcaggtacatacctgatcggtgtcatctcctaacaaggattttcagttcctcgggagagcaataatctttgtaggaaagacatccctgcaataggtgatatgtggtccttagaagttttattcctttactacttggaagaaaagttctttggtgattcttctctgcttttgaagatgatcaaaagcatcttcattgattttctgaaacgaaagccttgtctgaaaccaattaatacttgggaaacagctgggcttggaggagtagaatgccagagataaatccatggctcctgctctggctctcttctgcagaaatgagggcaacagtgaggccacttccctggcaaatgtgcagctcaggatagggaagcataagaccctctgtttaaaagagagtcaagtaggtaaccaaagccaagctctgtgcaaggtgctttggagttgtaaattgaggagtgcatccttgctgtcttgaaccattctgtttgcaatggtgagaccttacataacctagccttgcagggccgccacacaaccctggagtcctagagttggaggaacctttgtatccatctgacttctcattttgcagaatatgatgagaaagtagaggatcgctctgttcaccactcttgctattccattagtggggagatgcctgctagcatgtgtgaggggaacactctgatacactgggaagtatcggaaattcccagaaacacaaacataaaataactctcctagacccaggtactggggactgtctcagtccgtgtggcatgataaataaaaggttaggatcaagtctttgtatttttcaagatgtggtagctgattattcctgttttaagtactctgaaattgatctgtgatcaataatactaatatgttatcttttaccgtattctgcctctcactattgattttaattagttaggagtatttgagctgttatttcttgagcttaatatttttttagagttaactctttaaggagataatcatggctgtagacaaggccagggctggctgacgtgccttagaaggtttgaatgcaataaagcggtgtttggcgttctcctgcattgtagtgcgggtacaaaatgctatttgttcgtcatactgttgtcagcagatgagccgcccactacagacggctactgcccagggacctgcccaggccccacccaagggctcccaagggttgagatttctgcagacctatagccagcacacttagtcctgccctatatagagttcctcttcgggaagcttttgataaggaattctcagaccgataggatgtctgtctgggctttgctgcgggacagtctaactgtgggggctaggggaaagcaggagagtatcgatcaaagagtaagccacacacggataatcagttactagggatggaggtgtgagggttcattatattattcattttactgttgtatatgtttgaaaatgtctataataaaaagctttaaaaaaaaaaaagaaacaaaaatagttcaggccagcaatgggccctccatgttcagtggattttatccttgtttcaattggggtaggagttccaggaggtgtggattggaggttgtctaaagaattgaactggcctttgtccctgcttcctgggagggagactttcagtccttgacatttccagggtaataggagtgtctttgttatttgtgaggccatgggatcacacctgagcttatgctaaaaggtgggatgactcagagctggggctggtcaccagacagactgaccatgtgattagaggtttgaggctttgagtcagcctgacctatggggcgggggactggaggctgagtttaatcatctggccagtgctttaatcagtacatcatgaaaccctaataaaaactctggacactaaagctcagcatagcttcctgggtggtgaagctgtggctatgccggcagggcagtgtgccctaattccacgaagagggggcatgggagcactgtgctcaagacccttccagacctttccctgtgtcttccttggcttgtggagctgatttgtatcctttataataaaactaatcataagtata

SEQ ID NO: 194799 - DNA, 2906 bp, Homo sapiens
  Payload ID: 18485
  Gene Name: tripartite motif containing 25
  Uniprot ID: Q14258
  ENST ID: ENST00000537230
  CDS Start-End: 45-1937
cggagcgcgggtgcagcagttgtgtcccgacccctgggagcgccatggcagagctgtgccccctggccgaggagctgtcgtgctccatctgcctggagcccttcaaggagccggtcaccactccgtgcggccacaacttctgcgggtcgtgcctgaatgagacgtgggcagtccagggctcgccatacctgtgcccgcagtgccgcgccgtctaccaggcgcgaccgcagctgcacaagaacacggtgctgtgcaacgtggtggagcagttcctgcaggccgacctggcccgggagccacccgccgacgtctggacgccgcccgcccgcgcctctgcacccagcccgaatgcccaggtggcctgcgaccactgcctgaaggaggccgccgtgaagacgtgcttggtgtgcatggcctccttctgtcaggagcacctgcagccgcacttcgacagccccgccttccaggaccacccgctgcagccgcccgttcgcgacctgttgcgccgcaaatgttcccagcacaatcggctgcgggaatttttctgccccgagcacagcgagtgcatctgccacatctgcctggtggagcataagacctgctctcccgcgtccctgagccaggccagcgccgacctggaggccaccctgaggcacaaactaactgtcatgtacagtcagatcaacggggcgtcgagagcactggatgatgtgagaaacaggcagcaggatgtgcggatgactgcaaacagaaaggtggagcagctacaacaagaatacacggaaatgaaggctctcttggacgcctcagagaccacctcgacaaggaagataaaggaagaggagaagagggtcaacagcaagtttgacaccatttatcagattctcctcaagaagaagagtgagatccagaccttgaaggaggagattgaacagagcctgaccaagagggatgagttcgagtttctggagaaagcatcaaaactgcgaggaatctcaacaaagccagtctacatccccgaggtggaactgaaccacaagctgataaaaggcatccaccagagcaccatagacctcaaaaacgagctgaagcagtgcatcgggcggctccaggagcccacccccagttcaggtgaccctggagagcatgacccagcgtccacacacaaatccacacgccctgtgaagaaggtctccaaagaggaaaagaaatccaagaaacctccccctgtccctgccttacccagcaagcttcccacgtttggagccccggaacagttagtggatttaaaacaagctggcttggaggctgcagccaaagccaccagctcacatccgaactcaacatctctcaaggccaaggtgctggagaccttcctggccaagtccagacctgagctcctggagtattacattaaagtcatcctggactacaacaccgcccacaacaaagtggctctgtcagagtgctatacagtagcttctgtggctgagatgcctcagaactaccggccgcatccccagaggttcacatactgctctcaggtgctgggcctgcactgctacaagaaggggatccactactgggaggtggagctgcagaagaacaacttctgtggggtaggcatctgctacggaagcatgaaccggcagggcccagaaagcaggctcggccgcaacagcgcctcctggtgcgtggagtggttcaacaccaagatctctgcctggcacaataacgtggagaaaaccctgccctccaccaaggccacgcgggtgggcgtgcttctcaactgtgaccacggctttgtcatcttcttcgctgttgccgacaaggtccacctgatgtataagttcagggtggactttactgaggctttgtacccggctttctgggtattttctgctggtgccacactctccatctgctcccccaagtaggcaggctgtaggcacttgggctgactgcctgcagaagtcccaagaccctagtgaaaatacagcaggcagaactctccttggataattccccaagaggtcccaaggattgggagcatgggaggggagctggcgggagggtgggaggtgggatttagccaggaaaggggtgagagtgattgtgttgtgggcgaggaggcgtttccaccccctggtgcctatcagggcagggtgacctactccccattgttctggaaatctccaggctgctgggcagctgggcagagctctgggaagtgaagtcatgagtgcccgattcctcttagagaaaatccatagccttcagatcttggtgttttgaattcttactatagatgtttttaaagttccaaagtcattgagtttcaatgttacataaactccattacccgcatgttggggcttgatctcctggttattatctgtgcttgaggaaacacccacagcagtctctacccagaacagtttcctaaagaggcataccctcttcctccactggaaaatagtgcgttcccttcctaccctgcacacccatcgcccccacattgatggttttcaaacagcaaacttttcagctaaagcttcaaaccatgattggaatcagcctgtgttggatttgtgattcagggtcatggtgaccctgatccagtttgggtggaaatccttcctaagtatcataagaagcatcttggcagagatgctttggtggcagccatgagctttgctggaggccttgcttcccatagccttggctgtggggcaaggaactctgccaggcgagggggatgctgccctggatcaacagaagcctggtgggtttgctcgtgttagagtgtcctgccttcttactgacaactcttctcggtgatagcctctcttccctggattgtgacatatggaatgacagtgcaggtaccaccgaggctagcacag

SEQ ID NO: 194800 - DNA, 1555 bp, Homo sapiens
  Payload ID: 18485
  Gene Name: tripartite motif containing 25
  ENST ID: ENST00000572021
  CDS Start-End: 1-132
gagtgcatctgccacatctgcctggtggagcataagacctgctctcccgcgtccctgagccaggccagcgccgacctggagcaccttcagggagaacaagacccgtcttcgtgttgtcagaggagacagtagcctgagcaaggccaccctgaggcacaaactaactgtcatgtacagtcagatcaacggggcgtcgagagcactggatgatgtgagaaacaggcagcaggatgtgcggatgactgcaaacagaaaggtggagcagctacaacaagaatacacggaaatgaaggctctcttggacgcctcagagaccacctcgacaaggaagataaaggaagaggagaagagggtcaacagcaagtttgacaccatttatcagattctcctcaagaagaagagtgagatccagaccttgaaggaggagattgaacagagcctgaccaagagggatgagttcgagtttctggagaaagcatcaaaactgcgaggaatctcaacaaagccagtctacatccccgaggtggaactgaaccacaagctgataaaaggcatccaccagagcaccatagacctcaaaaacgagctgaagcagtgcatcgggcggctccaggagcccacccccagttcaggtgaccctggagagcatgacccagcgtccacacacaaatccacacgccctgtgaagaaggtctccaaagaggaaaagaaatccaagaaacctccccctgtccctgccttacccagcaagcttcccacgtttggagccccggaacagttagtggatttaaaacaagctggcttggaggctgcagccaaagccaccagctcacatccgaactcaacatctctcaaggccaaggtgctggagaccttcctggccaagtccagacctgagctcctggagtattacattaaagtcatcctggactacaacaccgcccacaacaaagtggctctgtcagagtgctatacagtagcttctgtggctgagatgcctcagaactaccggccgcatccccagaggttcacatactgctctcaggtgctgggcctgcactgctacaagaaggggatccactactgggaggtggagctgcagaagaacaacttctgtggggtaggcatctgctacggaagcatgaaccggcagggcccagaaagcaggctcggccgcaacagcgcctcctggtgcgtggagtggttcaacaccaagatctctgcctggcacaataacgtggagaaaaccctgccctccaccaaggccacgcgggtgggcgtgcttctcaactgtgaccacggctttgtcatcttcttcgctgttgccgacaaggtccacctgatgtataagttcagggtggactttactgaggctttgtacccggctttctgggtattttctgctggtgccacactctccatctgctcccccaagtaggcaggctgtaggcacttgggctgactgcctgcagaagtcccaagaccctagtgaaaatacagcaggcagaactctccttggataattccccaagaggtcccaaggattgggagcatg

SEQ ID NO: 194801 - DNA, 3478 bp, Homo sapiens
  Payload ID: 18486
  Gene Name: tripartite motif containing 26
  Uniprot ID: Q12899
  ENST ID: ENST00000327357
  CDS Start-End: 438-2057
aacagaccgccgtgagagaggaggggtgccggccgggattcgcggcccggagctcgggaccggagtcaggaatggagagaagggtaatggttttacctcttattgtggaaacctgttgagatcacagagaatatactgacggcataaaagggcagaaccatagcagggtgcggttgcttcattccagcctcgcagtcacctctgtgccctgctggttgtcttcccagcgctgctgtagttgccttccatggatctataggagagcaagtcctccaggagctggtggtgtctgtcgattgactgagtgctggagctggcagccctgtgcaggctgccacctttgcccctttactgtgcttgctcctgactctatgtcgcgtcttcaaggagaagaagtcctcaccagtgaacggagacctctctgaactaaggataccatggccacgtcagccccactacggagcctggaagaggaggtgacctgctccatctgtcttgattacctgcgggaccctgtgaccattgactgtggccacgtcttctgccgcagctgcaccacagacgtccgccccatctcagggagccgccccgtctgcccactctgcaagaagccttttaagaaggagaacatccgacccgtgtggcaactggccagcctggtggagaacattgagcggctgaaggtggacaagggcaggcagccgggagaggtgacccgggagcagcaggatgcaaagttgtgcgagcgacaccgagagaagctgcactactactgtgaggacgacgggaagctgctgtgcgtgatgtgccgggagtcccgggagcacaggccccacacggccgtcctcatggagaaggccgcccagccccacagggaaaaaatcctgaaccacctgagtaccctaaggagggacagagacaaaattcagggcttccaggcaaagggagaagctgatatcctggccgcgctgaagaagctccaggaccagaggcagtacattgtggctgagtttgagcagggtcatcagttcctgagggagcgggaggaacacctgctggaacagctggcgaagctggagcaggagctcacggagggcagggagaagttcaagagccggggcgtcggggagcttgcccggctggccctggtcatctccgaactggagggcaaggcgcagcagccagctgcagagctcatgcaggacacgagagacttcctaaacaggtatccacggaagaagttctgggttgggaaacccattgctcgagtggttaaaaaaaagaccggagaattctcagataaactcctctctctgcaacgaggcctgagggaattccaggggaagctgctgagagacttggaatataagacagtgagcgtcaccctggacccacagtcggccagtgggtacctgcagctgtcagaggactggaagtgcgtgacctacaccagcctgtacaagagtgcctacctgcacccccagcagtttgactgtgagcctggggtgctaggcagcaagggcttcacctggggcaaggtctactgggaagtggaagtggagagggagggctggtctgaggatgaagaagagggggatgaggaggaagagggagaagaggaggaggaggaagaggaggccggctatggggatggatatgacgactgggaaacggacgaagatgaggaatcgttgggcgatgaagaggaagaagaggaggaggaagaggaggaagttctggaaagctgcatggtgggggtggctagagactctgtgaagaggaagggagacctctccctgcggccagaggatggcgtgtgggcgctgcgcctctcctcctccggcatctgggccaacaccagccccgaggctgagcttttcccagcactgcggccccggagagtgggcatcgccctggattatgaagggggcaccgtgactttcaccaacgcagagtcacaggaactcatctacaccttcactgccaccttcacccggcgcctggtccccttcctgtggctcaagtggccaggaacacgcctcctgctaagaccctgagccctgacatctgcccccagccccaaccctcagatgcttcacttctttggaattccaggactctcaatggggggacgggatgcctggcctaagcacctggagcaggggaccccatatccactggtagccacctccccattgctgtggccccctgaaatctcactcagtgctgttgctccatctactgccctaatggggctcttttcccacctcctgctggtttcccgagggaacttctgaccctggagtccatgagggctcctttcctttttgaccacgaccttggccccagctctgcactctctggaataagggcccgatgcagcattttcttgcccagtgtggcaagacctcagaaaaaccagtcaattacgcctaagatcattttgctgtccttaaaccccccaggttccttcttgcacaaatccactctgctgcccaccttccctggcattttaaacagacctaccccaccccaactcagagttaagcatacatggcaatgctgaaaataaacaaaatccactgaggcttcccaggccatttaaagcctggagtaccagcgcatatcatctcatggggtccagagtggagtccaggcttctctgaaaccagggctgagcatatttccatagccaaggaggtgggactccctggagctatctgtggtcttagggaaggatccagacatacacggctttggggtacaagctgtgatcactgatcaataaattatctctagattggtccttgtgaggggagttttaagaatccagaacatcttgctcttgatcagcacatccaaaaacaccaagacaaacatccagtggagcagaacctctcctgcctcgggagttctgaccgggttccccagcagggtgttaagcctctgtctctggccctaccagcatccaggttccactttcctaggagagagtggagatgggaagacagggaaaggaaggcagcaggaggccacaagcccaccaggtcttcatgtcaagagagggagtaacatgtcttctcattgcccacggacccaacctctgtccaggtgcccctcatcatcacagtttaacacaagctcccctgctccagccaaattgatctcccagtcttgtccttacccattccaagtgctctgccagcccctgttcatccaagttttaagtcctccaccctgttctaagagactgttccaacggctctgggcctcagtggtcacttgaccaccattgtctcagagctgcccactttgtgtgtgtcacatgctgcctgagtcacatgtacatcttatttctgcctctagttttgtaagctcctggagggcggataacatcttatactactcttgtattctcatggcacctagtgcagtgctgggcacagagtaggtgctcaataaagacttgttgaatgaa

SEQ ID NO: 194802 - DNA, 3247 bp, Homo sapiens
  Payload ID: 18486
  Gene Name: tripartite motif containing 26
  Uniprot ID: Q12899
  ENST ID: ENST00000383607
  CDS Start-End: 207-1826
tcaggaatggagagaagggtaatggttttacctcttattgtggaaacctgttgagatcacagagaatatactgacggcataaaagggcagaaccatagcagggtgcgcgctgctgtagttgccttccatggatctataggagagcaagtcctccaggagaagaagtcctcaccagtgaacggagacctctctgaactaaggataccatggccacgtcagccccactacggagcctggaagaggaggtgacctgctccatctgtcttgattacctgcgggaccctgtgaccattgactgtggccacgtcttctgccgcagctgcaccacagacgtccgccccatctcagggagccgccccgtctgcccactctgcaagaagccttttaagaaggagaacatccgacccgtgtggcaactggccagcctggtggagaacattgagcggctgaaggtggacaagggcaggcagccgggagaggtgacccgggagcagcaggatgcaaagttgtgcgagcgacaccgagagaagctgcactactactgtgaggacgacgggaagctgctgtgcgtgatgtgccgggagtcccgggagcacaggccccacacggccgtcctcatggagaaggccgcccagccccacagggaaaaaatcctgaaccacctgagtaccctaaggagggacagagacaaaattcagggcttccaggcaaagggagaagctgatatcctggccgcgctgaagaagctccaggaccagaggcagtacattgtggctgagtttgagcagggtcatcagttcctgagggagcgggaggaacacctgctggaacagctggcgaagctggagcaggagctcacggagggcagggagaagttcaagagccggggcgtcggggagcttgcccggctggccctggtcatctccgaactggagggcaaggcgcagcagccagctgcagagctcatgcaggacacgagagacttcctaaacaggtatccacggaagaagttctgggttgggaaacccattgctcgagtggttaaaaaaaagaccggagaattctcagataaactcctctctctgcaacgaggcctgagggaattccaggggaagctgctgagagacttggaatataagacagtgagcgtcaccctggacccacagtcggccagtgggtacctgcagctgtcagaggactggaagtgcgtgacctacaccagcctgtacaagagtgcctacctgcacccccagcagtttgactgtgagcctggggtgctaggcagcaagggcttcacctggggcaaggtctactgggaagtggaagtggagagggagggctggtctgaggatgaagaagagggggatgaggaggaagagggagaagaggaggaggaggaagaggaggccggctatggggatggatatgacgactgggaaacggacgaagatgaggaatcgttgggcgatgaagaggaagaagaggaggaggaagaggaggaagttctggaaagctgcatggtgggggtggctagagactctgtgaagaggaagggagacctctccctgcggccagaggatggcgtgtgggcgctgcgcctctcctcctccggcatctgggccaacaccagccccgaggctgagcttttcccagcactgcggccccggagagtgggcatcgccctggattatgaagggggcaccgtgactttcaccaacgcagagtcacaggaactcatctacaccttcactgccaccttcacccggcgcctggtccccttcctgtggctcaagtggccaggaacacgcctcctgctaagaccctgagccctgacatctgcccccagccccaaccctcagatgcttcacttctttggaattccaggactctcaatggggggacgggatgcctggcctaagcacctggagcaggggaccccatatccactggtagccacctccccattgctgtggccccctgaaatctcactcagtgctgttgctccatctactgccctaatggggctcttttcccacctcctgctggtttcccgagggaacttctgaccctggagtccatgagggctcctttcctttttgaccacgaccttggccccagctctgcactctctggaataagggcccgatgcagcattttcttgcccagtgtggcaagacctcagaaaaaccagtcaattacgcctaagatcattttgctgtccttaaaccccccaggttccttcttgcacaaatccactctgctgcccaccttccctggcattttaaacagacctaccccaccccaactcagagttaagcatacatggcaatgctgaaaataaacaaaatccactgaggcttcccaggccatttaaagcctggagtaccagcgcatatcatctcatggggtccagagtggagtccaggcttctctgaaaccagggctgagcatatttccatagccaaggaggtgggactccctggagctatctgtggtcttagggaaggatccagacatacacggctttggggtacaagctgtgatcactgatcaataaattatctctagattggtccttgtgaggggagttttaagaatccagaacatcttgctcttgatcagcacatccaaaaacaccaagacaaacatccagtggagcagaacctctcctgcctcgggagttctgaccgggttccccagcagggtgttaagcctctgtctctggccctaccagcatccaggttccactttcctaggagagagtggagatgggaagacagggaaaggaaggcagcaggaggccacaagcccaccaggtcttcatgtcaagagagggagtaacatgtcttctcattgcccacggacccaacctctgtccaggtgcccctcatcatcacagtttaacacaagctcccctgctccagccaaattgatctcccagtcttgtccttacccattccaagtgctctgccagcccctgttcatccaagttttaagtcctccaccctgttctaagagactgttccaacggctctgggcctcagtggtcacttgaccaccattgtctcagagctgcccactttgtgtgtgtcacatgctgcctgagtcacatgtacatcttatttctgcctctagttttgtaagctcctggagggcggataacatcttatactactcttgtattctcatggcacctagtgcagtgctgggcacagagtaggtgctcaataaagacttgttgaatgaa

SEQ ID NO: 194803 - DNA, 3318 bp, Homo sapiens
  Payload ID: 18486
  Gene Name: tripartite motif containing 26
  Uniprot ID: Q12899
  ENST ID: ENST00000396558
  CDS Start-End: 278-1897
gggagattacggggcggggacgagctgtcgcgctggttgctcgtgcaggagcgggacccggaacagaccgccgtgagagaggaggggtgccggccgggattcgcggcccggagctcgggaccggttgcttcattccagcctcgcagtcacctctgtgccctgctggttgtcttcccagcgctgctgtagttgccttccatggatctataggagagcaagtcctccaggagaagaagtcctcaccagtgaacggagacctctctgaactaaggataccatggccacgtcagccccactacggagcctggaagaggaggtgacctgctccatctgtcttgattacctgcgggaccctgtgaccattgactgtggccacgtcttctgccgcagctgcaccacagacgtccgccccatctcagggagccgccccgtctgcccactctgcaagaagccttttaagaaggagaacatccgacccgtgtggcaactggccagcctggtggagaacattgagcggctgaaggtggacaagggcaggcagccgggagaggtgacccgggagcagcaggatgcaaagttgtgcgagcgacaccgagagaagctgcactactactgtgaggacgacgggaagctgctgtgcgtgatgtgccgggagtcccgggagcacaggccccacacggccgtcctcatggagaaggccgcccagccccacagggaaaaaatcctgaaccacctgagtaccctaaggagggacagagacaaaattcagggcttccaggcaaagggagaagctgatatcctggccgcgctgaagaagctccaggaccagaggcagtacattgtggctgagtttgagcagggtcatcagttcctgagggagcgggaggaacacctgctggaacagctggcgaagctggagcaggagctcacggagggcagggagaagttcaagagccggggcgtcggggagcttgcccggctggccctggtcatctccgaactggagggcaaggcgcagcagccagctgcagagctcatgcaggacacgagagacttcctaaacaggtatccacggaagaagttctgggttgggaaacccattgctcgagtggttaaaaaaaagaccggagaattctcagataaactcctctctctgcaacgaggcctgagggaattccaggggaagctgctgagagacttggaatataagacagtgagcgtcaccctggacccacagtcggccagtgggtacctgcagctgtcagaggactggaagtgcgtgacctacaccagcctgtacaagagtgcctacctgcacccccagcagtttgactgtgagcctggggtgctaggcagcaagggcttcacctggggcaaggtctactgggaagtggaagtggagagggagggctggtctgaggatgaagaagagggggatgaggaggaagagggagaagaggaggaggaggaagaggaggccggctatggggatggatatgacgactgggaaacggacgaagatgaggaatcgttgggcgatgaagaggaagaagaggaggaggaagaggaggaagttctggaaagctgcatggtgggggtggctagagactctgtgaagaggaagggagacctctccctgcggccagaggatggcgtgtgggcgctgcgcctctcctcctccggcatctgggccaacaccagccccgaggctgagcttttcccagcactgcggccccggagagtgggcatcgccctggattatgaagggggcaccgtgactttcaccaacgcagagtcacaggaactcatctacaccttcactgccaccttcacccggcgcctggtccccttcctgtggctcaagtggccaggaacacgcctcctgctaagaccctgagccctgacatctgcccccagccccaaccctcagatgcttcacttctttggaattccaggactctcaatggggggacgggatgcctggcctaagcacctggagcaggggaccccatatccactggtagccacctccccattgctgtggccccctgaaatctcactcagtgctgttgctccatctactgccctaatggggctcttttcccacctcctgctggtttcccgagggaacttctgaccctggagtccatgagggctcctttcctttttgaccacgaccttggccccagctctgcactctctggaataagggcccgatgcagcattttcttgcccagtgtggcaagacctcagaaaaaccagtcaattacgcctaagatcattttgctgtccttaaaccccccaggttccttcttgcacaaatccactctgctgcccaccttccctggcattttaaacagacctaccccaccccaactcagagttaagcatacatggcaatgctgaaaataaacaaaatccactgaggcttcccaggccatttaaagcctggagtaccagcgcatatcatctcatggggtccagagtggagtccaggcttctctgaaaccagggctgagcatatttccatagccaaggaggtgggactccctggagctatctgtggtcttagggaaggatccagacatacacggctttggggtacaagctgtgatcactgatcaataaattatctctagattggtccttgtgaggggagttttaagaatccagaacatcttgctcttgatcagcacatccaaaaacaccaagacaaacatccagtggagcagaacctctcctgcctcgggagttctgaccgggttccccagcagggtgttaagcctctgtctctggccctaccagcatccaggttccactttcctaggagagagtggagatgggaagacagggaaaggaaggcagcaggaggccacaagcccaccaggtcttcatgtcaagagagggagtaacatgtcttctcattgcccacggacccaacctctgtccaggtgcccctcatcatcacagtttaacacaagctcccctgctccagccaaattgatctcccagtcttgtccttacccattccaagtgctctgccagcccctgttcatccaagttttaagtcctccaccctgttctaagagactgttccaacggctctgggcctcagtggtcacttgaccaccattgtctcagagctgcccactttgtgtgtgtcacatgctgcctgagtcacatgtacatcttatttctgcctctagttttgtaagctcctggagggcggataacatcttatactactcttgtattctcatggcacctagtgcagtgctgggcacagagtaggtgctcaataaagacttgttgaatgaa

SEQ ID NO: 194804 - DNA, 603 bp, Homo sapiens
  Payload ID: 18486
  Gene Name: tripartite motif containing 26
  ENST ID: ENST00000418026
  CDS Start-End: 132-603
gtgcaggagcgggacccggaacagaccgccgtgagagaggaggggtgccggccgggattcgcggcccggagctcgggaccggagaagaagtcctcaccagtgaacggagacctctctgaactaaggataccatggccacgtcagccccactacggagcctggaagaggaggtgacctgctccatctgtcttgattacctgcgggaccctgtgaccattgactgtggccacgtcttctgccgcagctgcaccacagacgtccgccccatctcagggagccgccccgtctgcccactctgcaagaagccttttaagaaggagaacatccgacccgtgtggcaactggccagcctggtggagaacattgagcggctgaaggtggacaagggcaggcagccgggagaggtgacccgggagcagcaggatgcaaagttgtgcgagcgacaccgagagaagctgcactactactgtgaggacgacgggaagctgctgtgcgtgatgtgccgggagtcccgggagcacaggccccacacggccgtcctcatggagaaggccgcccagccccacagggaaaaaatcctgaaccacctgagtaccctaagga

SEQ ID NO: 194805 - DNA, 582 bp, Homo sapiens
  Payload ID: 18486
  Gene Name: tripartite motif containing 26
  ENST ID: ENST00000431641
  CDS Start-End: 217-582
aacagaccgccgtgagagaggaggggcgccggccgggattcgcggcccggagctcgggaccggagtcaggaatggagagaagggtaatggtgttacctcttattgtggaaacctgttgagatcacagagaatatactgacggcataaaagggcagaaccatagcagggtgcgaagtcctcaccagtgaacggagacctctctgaactaaggataccatggccacgtcagccccactacggagcctggaagaggaggtgacctgctccatctgtcttgattacctgcgggaccctgtgaccattgactgtggccacgtcttctgccgcagctgcaccacagacgtccgccccatctcagggagccgccccgtctgcccactctgcaagaagccttttaagaaggagaacatccgacccgtgtggcaactggccagcctggtggagaacattgagcggctgaaggtggacaagggcaggcagccgggagaggtgacccgggagcagcaggatgcaaagttgtgcgagcgacaccgagagaagctgcactactactgtgaggacgacgggaagctgctgtgcgtg

SEQ ID NO: 194806 - DNA, 3478 bp, Homo sapiens; identical to SEQ ID NO: 194801
  Payload ID: 18486
  Gene Name: tripartite motif containing 26
  Uniprot ID: Q12899
  ENST ID: ENST00000439094
  CDS Start-End: 438-2057

SEQ ID NO: 194807 - DNA, 1041 bp, Homo sapiens
  Payload ID: 18486
  Gene Name: tripartite motif containing 26
  ENST ID: ENST00000449136
  CDS Start-End: 297-1041
ggccgggattcgcggcccggagctcgggaccggagtcaggaatggagagaagggtaatggttttacctcttattgtggaaacctgttgagatcacagagaatatactgacggcataaaagggcagaaccatagcagggtgcggttgcttcattccagcctcgcagtcacctctgtgccctgctggttgtcttcccagcgctgctgtagttgccttccatggatctataggagagcaagtcctccaggagaagaagtcctcaccagtgaacggagacctctctgaactaaggataccatggccacgtcagccccactacggagcctggaagaggaggtgacctgctccatctgtcttgattacctgcgggaccctgtgaccattgactgtggccacgtcttctgccgcagctgcaccacagacgtccgccccatctcagggagccgccccgtctgcccactctgcaagaagccttttaagaaggagaacatccgacccgtgtggcaactggccagcctggtggagaacattgagcggctgaaggtggacaagggcaggcagccgggagaggtgacccgggagcagcaggatgcaaagttgtgcgagcgacaccgagagaagctgcactactactgtgaggacgacgggaagctgctgtgcgtgatgtgccgggagtcccgggagcacaggccccacacggccgtcctcatggagaaggccgcccagccccacagggaaaaaatcctgaaccacctgagtaccctaaggagggacagagacaaaattcagggcttccaggcaaagggagaagctgatatcctggccgcgctgaagaagctccaggaccagaggcagtacattgtggctgagtttgagcagggtcatcagttcctgagggagcgggaggaacacctgctggaacagctggcgaagctggagcaggagctcacggagggcagggagaagttcaagagccggggcgtcggggagcttgcccggctggccctggtcatctccgaactggagggcaaggcgcagcagc

SEQ ID NO: 194808 - DNA, 3318 bp, Homo sapiens
  Payload ID: 18486
  Gene Name: tripartite motif containing 26
  Uniprot ID: Q12899
  ENST ID: ENST00000436219
  CDS Start-End: 278-1897
gggagattacggggcggggacgagctgtcgcgctggttgctcgtgcaggagcgggacccggaacagaccgccgtgagagaggaggggcgccggccgggattcgcggcccggagctcgggaccggttgcttcattccagcctcgcagtcacctctgtgccctgctggttgtcttcccagcgctgctgtagttgccttccatggatctataggagagcaagtcctccaggagaagaagtcctcaccagtgaacggagacctctctgaactaagaataccatggccacgtcagccccactacggagcctggaagaggaggtgacctgctccatctgtcttgattacctgcgggaccctgtgaccattgactgtggccacgtcttctgccgcagctgcaccacagacgtccgccccatctcagggagccgccccgtctgcccactctgcaagaagccttttaagaaggagaacatccgacccgtgtggcaactggccagcctggtggagaacattgagcggctgaaggtggacaagggcaggcagccgggagaggtgacccgggagcagcaggatgcaaagttgtgcgagcgacaccgagagaagctgcactactactgtgaggacgacgggaagctgctgtgcgtgatgtgccgggagtcccgggagcacaggccccacacggccgtcctcatggagaaggccgcccagccccacagggaaaaaatcctgaaccacctgagtaccctaaggagagacagagacaaaattcagggcttccaggcaaagggagaagctgatatcctggccgcgctgaagaagctccaggaccagaggcagtacattgtggctgagtttgagcagggtcatcagttcctgagggagcgggaggaacacctgctggaacagctggcgaagctggagcaggagctcacggagggcagggagaagttcaagagccggggcgtcggggagcttgcccggctggccctggtcatctccgaactggagggcaaggcgcagcagccagctgcagagctcatgcaggacacgagagacttcctaaacaggtatccacggaagaagttctgggttgggaaacccattgctcgagtggttaaaaaaaagaccggagaattctcagataaactcctctctctgcaacgaggcctgagggaattccaggggaagctgctgagagacttggaatataagacagtgagcgtcaccctggacccacagtcggccagtgggtacctgcagctgtcagaggactggaagtgcgtgacctacaccagcctgtacaagagtgcctacctgcacccccagcagtttgactgtgagcctggggtgctgggcagcaagggcttcacctggggcaaggtctactgggaagtggaagtggagagggagggctggtctgaggatgaagaagagggggatgaggaggaagagggagaagaggaggaggaggaagaggaggccggctatggggatggatatgacgactgggaaacggacgaagatgaggaatcgttgggcgatgaagaggaagaagaggaggaggaagaggaggaagttctggaaagctgcatggtgggggtggctagagactctgtgaagaggaagggagacctctccctgcggccagaggatggcgtgtgggcgctgcgcctctcctcctccggcatctgggccaacaccagccccgaggctgagcttttcccagcactgcggccccggagagtgggcatcgccctggattatgaagggggcaccgtgactttcaccaacgcagagtcacaggaactcatctacaccttcactgccaccttcacccggcgcctggtccccttcctgtggctcaagtggccaggaacacgcctcctgctaagaccctgagccctgacatctgcccccagccccaaccctcagatgcttcacttctttggaattccaggactctcaatggggggacgggatgcctggcctaagcacctggagcaggggaccccatatccactggtagccacctccccattgctgtggccccctgaaatctcactcagtgctgttgctccatctactgccctaatggggctcttttcccacctcctgctggtttcccgagggaacttctgaccctggagtccatgagggctcctttcctttttgaccacgaccttggccctagctctgcactctctggaataagggcccgatgcagcattttcttgcccagtgtggcaagacctcagaaaaaccagtcaattacgcctaagatcattttgctgtccttaaaccccccaggttccttcttgcacaaatccactctgctgcccaccttccctggcattttaaacagacctaccccaccccaactcagagttaagcatacatggcaatgctgaaaataaacaaaatccactgaggcttcccaggccatttaaagcctggagtaccagcgcatatcatctcatggggtccagagtggagtccaggcttctctgaaaccagggctgagcatatttccatagccaaggaggtgggactccctggagctatctgtggtcttagggaaggatccagacatacacggctttggggtacaagctgtgatcactgatcaataaattatctctagattggtccttgtgaggggagttttaagaatccagaacatcttgctcttgatcagcacatccaaaaacaccaagacaaacatccagtggagcagaacctctcctgcctcgggagttctgaccgggttccccagcagggtgttaagcctctgtctctggccctaccagcatccaggttccactttcctaggagagagtggagatgggaagacagggaaaggaaggcagcaggaggccacaagcccaccaggtcttcatgtcaagagagggagtaacatgtcttctcattgcccacggacccaacctctgtccaggtgcccctcatcatcacagtttaacacaagctcccctgctccagccaaattgatctcccagtcttgtccttacccattccaagtgctctgccagcccctgttcatccaagttttaagtcctccaccctgttataagagactgttccaacggctctgggcctcagtggtcacttgaccaccattgtctcagagctgcccactttgtgtgtgtcacatgctgcctgagtcacatgtacatcttatttctgcctctagttttgtaagctcctggagggcggataacatcttatactactcttgtattctcatggcacctagtgcagtgctgggcacagagtaggtgctcaataaagacttgttgaatgaa

SEQ ID NO: 194809 - DNA, 1124 bp, Homo sapiens
  Payload ID: 18486
  Gene Name: tripartite motif containing 26
  ENST ID: ENST00000412755
  CDS Start-End: 380-1124
acggggcggggacgagctgtcgcgctggttgctcgtgcaggagcgggacccggaacagaccgccgtgagagaggaggggtgccggccgggattcgcggcccggagctcgggaccggagtcaggaatggagagaagggtaatggttttacctcttattgtggaaacctgttgagatcacagagaatatactgacggcataaaagggcagaaccatagcagggtgcggttgcttcattccagcctcgcagtcacctctgtgccctgctggttgtcttcccagcgctgctgtagttgccttccatggatctataggagagcaagtcctccaggagaagaagtcctcaccagtgaacggagacctctctgaactaaggataccatggccacgtcagccccactacggagcctggaagaggaggtgacctgctccatctgtcttgattacctgcgggaccctgtgaccattgactgtggccacgtcttctgccgcagctgcaccacagacgtccgccccatctcagggagccgccccgtctgcccactctgcaagaagccttttaagaaggagaacatccgacccgtgtggcaactggccagcctggtggagaacattgagcggctgaaggtggacaagggcaggcagccgggagaggtgacccgggagcagcaggatgcaaagttgtgcgagcgacaccgagagaagctgcactactactgtgaggacgacgggaagctgctgtgcgtgatgtgccgggagtcccgggagcacaggccccacacggccgtcctcatggagaaggccgcccagccccacagggaaaaaatcctgaaccacctgagtaccctaaggagggacagagacaaaattcagggcttccaggcaaagggagaagctgatatcctggccgcgctgaagaagctccaggaccagaggcagtacattgtggctgagtttgagcagggtcatcagttcctgagggagcgggaggaacacctgctggaacagctggcgaagctggagcaggagctcacggagggcagggagaagttcaagagccggggcgtcggggagcttgcccggctggccctggtcatctccgaactggagggcaaggcgcagcagc

SEQ ID NO: 194810 - DNA, 603 bp, Homo sapiens
  Payload ID: 18486
  Gene Name: tripartite motif containing 26
  ENST ID: ENST00000433361
  CDS Start-End: 132-603
gtgcaggagcgggacccggaacagaccgccgtgagagaggaggggcgccggccgggattcgcggcccggagctcgggaccggagaagaagtcctcaccagtgaacggagacctctctgaactaaggataccatggccacgtcagccccactacggagcctggaagaggaggtgacctgctccatctgtcttgattacctgcgggaccctgtgaccattgactgtggccacgtcttctgccgcagctgcaccacagacgtccgccccatctcagggagccgccccgtctgcccactctgcaagaagccttttaagaaggagaacatccgacccgtgtggcaactggccagcctggtggagaacattgagcggctgaaggtggacaagggcaggcagccgggagaggtgacccgggagcagcaggatgcaaagttgtgcgagcgacaccgagagaagctgcactactactgtgaggacgacgggaagctgctgtgcgtgatgtgccgggagtcccgggagcacaggccccacacggccgtcctcatggagaaggccgcccagccccacagggaaaaaatcctgaaccacctgagtaccctaagga

SEQ ID NO: 194811 - DNA, 1124 bp, Homo sapiens
  Payload ID: 18486
  Gene Name: tripartite motif containing 26
  ENST ID: ENST00000446540
  CDS Start-End: 380-1124
acggggcggggacgagctgtcgcgctggttgctcgtgcaggagcgggacccggaacagaccgccgtgagagaggaggggcgccggccgggattcgcggcccggagctcgggaccggagtcaggaatggagagaagggtaatggtgttacctcttattgtggaaacctgttgagatcacagagaatatactgacggcataaaagggcagaaccatagcagggtgcggttgcttcattccagcctcgcagtcacctctgtgccctgctggttgtcttcccagcgctgctgtagttgccttccatggatctataggagagcaagtcctccaggagaagaagtcctcaccagtgaacggagacctctctgaactaaggataccatggccacgtcagccccactacggagcctggaagaggaggtgacctgctccatctgtcttgattacctgcgggaccctgtgaccattgactgtggccacgtcttctgccgcagctgcaccacagacgtccgccccatctcagggagccgccccgtctgcccactctgcaagaagccttttaagaaggagaacatccgacccgtgtggcaactggccagcctggtggagaacattgagcggctgaaggtggacaagggcaggcagccgggagaggtgacccgggagcagcaggatgcaaagttgtgcgagcgacaccgagagaagctgcactactactgtgaggacgacgggaagctgctgtgcgtgatgtgccgggagtcccgggagcacaggccccacacggccgtcctcatggagaaggccgcccagccccacagggaaaaaatcctgaaccacctgagtaccctaaggagagacagagacaaaattcagggcttccaggcaaagggagaagctgatatcctggccgcgctgaagaagctccaggaccagaggcagtacattgtggctgagtttgagcagggtcatcagttcctgagggagcgggaggaacacctgctggaacagctggcgaagctggagcaggagctcacggagggcagggagaagttcaagagccggggcgtcggggagcttgcccggctggccctggtcatctccgaactggagggcaaggcgcagcagc

SEQ ID NO: 194812 - DNA, 3318 bp, Homo sapiens; identical to SEQ ID NO: 194803
  Payload ID: 18486
  Gene Name: tripartite motif containing 26
  Uniprot ID: Q12899
  ENST ID: ENST00000453195
  CDS Start-End: 278-1897

SEQ ID NO: 194813 - DNA, 3478 bp, Homo sapiens
  Payload ID: 18486
  Gene Name: tripartite motif containing 26
  Uniprot ID: Q12899
  ENST ID: ENST00000455000
  CDS Start-End: 438-2057
aacagaccgccgtgagagaggaggggcgccggccgggattcgcggcccggagctcgggaccggagtcaggaatggagagaagggtaatggtgttacctcttattgtggaaacctgttgagatcacagagaatatactgacggcataaaagggcagaaccatagcagggtgcggttgcttcattccagcctcgcagtcacctctgtgccctgctggttgtcttcccagcgctgctgtagttgccttccatggatctataggagagcaagtcctccaggagctggtggtgtctgtcgattgactgagtgctggagctggcagccctgtgcaggctgccacctttgcccctttactgtgcttgctcctgactctatgtcgcgtctccaaggagaagaagtcctcaccagtgaacggagacctctctgaactaagaataccatggccacgtcagccccactacggagcctggaagaggaggtgacctgctccatctgtcttgattacctgcgggaccctgtgaccattgactgtggccacgtcttctgccgcagctgcaccacagacgtccgccccatctcagggagccgccccgtctgcccactctgcaagaagccttttaagaaggagaacatccgacccgtgtggcaactggccagcctggtggagaacattgagcggctgaaggtggacaagggcaggcagccgggagaggtgacccgggagcagcaggatgcaaagttgtgcgagcgacaccgagagaagctgcactactactgtgaggacgacgggaagctgctgtgcgtgatgtgccgggagtcccgggagcacaggccccacacggccgtcctcatggagaaggccgcccagccccacagggaaaaaatcctgaaccacctgagtaccctaaggagagacagagacaaaattcagggcttccaggcaaagggagaagctgatatcctggccgcgctgaagaagctccaggaccagaggcagtacattgtggctgagtttgagcagggtcatcagttcctgagggagcgggaggaacacctgctggaacagctggcgaagctggagcaggagctcacggagggcagggagaagttcaagagccggggcgtcggggagcttgcccggctggccctggtcatctccgaactggagggcaaggcgcagcagccagctgcagagctcatgcaggacacgagagacttcctaaacaggtatccacggaagaagttctgggttgggaaacccattgctcgagtggttaaaaaaaagaccggagaattctcagataaactcctctctctgcaacgaggcctgagggaattccaggggaagctgctgagagacttggaatataagacagtgagcgtcaccctggacccacagtcggccagtgggtacctgcagctgtcagaggactggaagtgcgtgacctacaccagcctgtacaagagtgcctacctgcacccccagcagtttgactgtgagcctggggtgctgggcagcaagggcttcacctggggcaaggtctactgggaagtggaagtggagagggagggctggtctgaggatgaagaagagggggatgaggaggaagagggagaagaggaggaggaggaagaggaggccggctatggggatggatatgacgactgggaaacggacgaagatgaggaatcgttgggcgatgaagaggaagaagaggaggaggaagaggaggaagttctggaaagctgcatggtgggggtggctagagactctgtgaagaggaagggagacctctccctgcggccagaggatggcgtgtgggcgctgcgcctctcctcctccggcatctgggccaacaccagccccgaggctgagcttttcccagcactgcggccccggagagtgggcatcgccctggattatgaagggggcaccgtgactttcaccaacgcagagtcacaggaactcatctacaccttcactgccaccttcacccggcgcctggtccccttcctgtggctcaagtggccaggaacacgcctcctgctaagaccctgagccctgacatctgcccccagccccaaccctcagatgcttcacttctttggaattccaggactctcaatggggggacgggatgcctggcctaagcacctggagcaggggaccccatatccactggtagccacctccccattgctgtggccccctgaaatctcactcagtgctgttgctccatctactgccctaatggggctcttttcccacctcctgctggtttcccgagggaacttctgaccctggagtccatgagggctcctttcctttttgaccacgaccttggccctagctctgcactctctggaataagggcccgatgcagcattttcttgcccagtgtggcaagacctcagaaaaaccagtcaattacgcctaagatcattttgctgtccttaaaccccccaggttccttcttgcacaaatccactctgctgcccaccttccctggcattttaaacagacctaccccaccccaactcagagttaagcatacatggcaatgctgaaaataaacaaaatccactgaggcttcccaggccatttaaagcctggagtaccagcgcatatcatctcatggggtccagagtggagtccaggcttctctgaaaccagggctgagcatatttccatagccaaggaggtgggactccctggagctatctgtggtcttagggaaggatccagacatacacggctttggggtacaagctgtgatcactgatcaataaattatctctagattggtccttgtgaggggagttttaagaatccagaacatcttgctcttgatcagcacatccaaaaacaccaagacaaacatccagtggagcagaacctctcctgcctcgggagttctgaccgggttccccagcagggtgttaagcctctgtctctggccctaccagcatccaggttccactttcctaggagagagtggagatgggaagacagggaaaggaaggcagcaggaggccacaagcccaccaggtcttcatgtcaagagagggagtaacatgtcttctcattgcccacggacccaacctctgtccaggtgcccctcatcatcacagtttaacacaagctcccctgctccagccaaattgatctcccagtcttgtccttacccattccaagtgctctgccagcccctgttcatccaagttttaagtcctccaccctgttataagagactgttccaacggctctgggcctcagtggtcacttgaccaccattgtctcagagctgcccactttgtgtgtgtcacatgctgcctgagtcacatgtacatcttatttctgcctctagttttgtaagctcctggagggcggataacatcttatactactcttgtattctcatggcacctagtgcagtgctgggcacagagtaggtgctcaataaagacttgttgaatgaa

SEQ ID NO: 194814 - DNA, 3318 bp, Homo sapiens; identical to SEQ ID NO: 194803
  Payload ID: 18486
  Gene Name: tripartite motif containing 26
  Uniprot ID: Q12899
  ENST ID: ENST00000425523
  CDS Start-End: 278-1897

SEQ ID NO: 194815 - DNA, 682 bp, Homo sapiens
  Payload ID: 18486
  Gene Name: tripartite motif containing 26
  ENST ID: ENST00000451189
  CDS Start-End: 206-682
ggaaacctgttgagatcacagagaatatactgacggcataaaagggcagaaccatagcagggtgcgcctcgcagtcacctctgtgccctgctggttgtcttcccagcgctgctgtagttgccttccatggatctataggagagcaagtcctccaggagaagaagtcctcaccagtgaacggagacctctctgaactaagaataccatggccacgtcagccccactacggagcctggaagaggaggtgacctgctccatctgtcttgattacctgcgggaccctgtgaccattgactgtggccacgtcttctgccgcagctgcaccacagacgtccgccccatctcagggagccgccccgtctgcccactctgcaagaagccttttaagaaggagaacatccgacccgtgtggcaactggaaaaaatcctgaaccacctgagtaccctaaggagagacagagacaaaattcagggcttccaggcaaagggagaagctgatatcctggccgcgctgaagaagctccaggaccagaggcagtacattgtggctgagtttgagcagggtcatcagttcctgagggagcgggaggaacacctgctggaacagctggcgaagctggagcaggagctcacggagggcagggagaagttcaagagccggggcgtcggggagcttgcccgg

SEQ ID NO: 194816 - DNA, 582 bp, Homo sapiens
  Payload ID: 18486
  Gene Name: tripartite motif containing 26
  ENST ID: ENST00000429583
  CDS Start-End: 217-582
aacagaccgccgtgagagaggaggggtgccggccgggattcgcggcccggagctcgggaccggagtcaggaatggagagaagggtaatggttttacctcttattgtggaaacctgttgagatcacagagaatatactgacggcataaaagggcagaaccatagcagggtgcgaagtcctcaccagtgaacggagacctctctgaactaaggataccatggccacgtcagccccactacggagcctggaagaggaggtgacctgctccatctgtcttgattacctgcgggaccctgtgaccattgactgtggccacgtcttctgccgcagctgcaccacagacgtccgccccatctcagggagccgccccgtctgcccactctgcaagaagccttttaagaaggagaacatccgacccgtgtggcaactggccagcctggtggagaacattgagcggctgaaggtggacaagggcaggcagccgggagaggtgacccgggagcagcaggatgcaaagttgtgcgagcgacaccgagagaagctgcactactactgtgaggacgacgggaagctgctgtgcgtg

SEQ ID NO: 194817 - DNA, 3227 bp, Homo sapiens
  Payload ID: 18486
  Gene Name: tripartite motif containing 26
  Uniprot ID: Q12899
  ENST ID: ENST00000425831
  CDS Start-End: 187-1806
ggccgggattcgcggcccggagctcgggaccggttgcttcattccagcctcgcagtcacctctgtgccctgctggttgtcttcccagcgctgctgtagttgccttccatggatctataggagagcaagtcctccaggagaagaagtcctcaccagtgaacggagacctctctgaactaaggataccatggccacgtcagccccactacggagcctggaagaggaggtgacctgctccatctgtcttgattacctgcgggaccctgtgaccattgactgtggccacgtcttctgccgcagctgcaccacagacgtccgccccatctcagggagccgccccgtctgcccactctgcaagaagccttttaagaaggagaacatccgacccgtgtggcaactggccagcctggtggagaacattgagcggctgaaggtggacaagggcaggcagccgggagaggtgacccgggagcagcaggatgcaaagttgtgcgagcgacaccgagagaagctgcactactactgtgaggacgacgggaagctgctgtgcgtgatgtgccgggagtcccgggagcacaggccccacacggccgtcctcatggagaaggccgcccagccccacagggaaaaaatcctgaaccacctgagtaccctaaggagggacagagacaaaattcagggcttccaggcaaagggagaagctgatatcctggccgcgctgaagaagctccaggaccagaggcagtacattgtggctgagtttgagcagggtcatcagttcctgagggagcgggaggaacacctgctggaacagctggcgaagctggagcaggagctcacggagggcagggagaagttcaagagccggggcgtcggggagcttgcccggctggccctggtcatctccgaactggagggcaaggcgcagcagccagctgcagagctcatgcaggacacgagagacttcctaaacaggtatccacggaagaagttctgggttgggaaacccattgctcgagtggttaaaaaaaagaccggagaattctcagataaactcctctctctgcaacgaggcctgagggaattccaggggaagctgctgagagacttggaatataagacagtgagcgtcaccctggacccacagtcggccagtgggtacctgcagctgtcagaggactggaagtgcgtgacctacaccagcctgtacaagagtgcctacctgcacccccagcagtttgactgtgagcctggggtgctgggcagcaagggcttcacctggggcaaggtctactgggaagtggaagtggagagggagggctggtctgaggatgaagaagagggggatgaggaggaagagggagaagaggaggaggaggaagaggaggccggctatggggatggatatgacgactgggaaacggacgaagatgaggaatcgttgggcgatgaagaggaagaagaggaggaggaagaggaggaagttctggaaagctgcatggtgggggtggctagagactctgtgaagaggaagggagacctctccctgcggccagaggatggcgtgtgggcgctgcgcctctcctcctccggcatctgggccaacaccagccccgaggctgagcttttcccagcactgcggccccggagagtgggcatcgccctggattatgaagggggcaccgtgactttcaccaacgcagagtcacaggaactcatctacaccttcactgccaccttcacccggcgcctggtccccttcctgtggctcaagtggccaggaacacgcctcctgctaagaccctgagccctgacatctgcccccagccccaaccctcagatgcttcacttctttggaattccaggactctcaatggggggacgggatgcctggcctaagcacctggagcaggggaccccatatccactggtagccacctccccattgctgtggccccctgaaatctcactcagtgctgttgctccatctactgccctaatggggctcttttcccacctcctgctggtttcccgagggaacttctgaccctggagtccatgagggctcctttcctttttgaccacgaccttggccccagctctgcactctctggaataagggcccgatgcagcattttcttgcccagtgtggcaagacctcagaaaaaccagtcaattacgcctaagatcattttgctgtccttaaaccccccaggttccttcttgcacaaatccactctgctgcccaccttccctggcattttaaacagacctaccccaccccaactcagagttaagcatacatggcaatgctgaaaataaacaaaatccactgaggcttcccaggccatttaaagcctggagtaccagcgcatatcatctcatggggtccagagtggagtccaggcttctctgaaaccagggctgagcatatttccatagccaaggaggtgggactccctggagctatctgtggtcttagggaaggatccagacatacacggctttggggtacaagctgtgatcactgatcaataaattatctctagattggtccttgtgaggggagttttaagaatccagaacatcttgctcttgatcagcacatccaaaaacaccaagacaaacatccagtggagcagaacctctcctgcctcgggagttctgaccaggttccccagcagggtgttaagcctctgtctctggccctaccagcatccaggttccactttcctaggagagagtggagatgggaagacagggaaaggaaggcagcaggaggccacaagcccaccaggtcttcatgtcaagagagggagtaacatgtcttctcattgcccacggacccaacctctgtccaggtgcccctcatcatcacagtttaacacaagctcccctgctccagccaaattgatctcccagtcttgtccttacccattccaagtgctctgccagcccctgttcatccaagttttaagtcctccaccctgttctaagagactgttccaacggctctgggcctcagtggtcacttgaccaccattgtctcagagctgcccactttgtgtgtgtcacatgctgcctgagtcacacgtacatcttatttctgcctctagttttgtaagctcctggagggcggataacatcttatactactcttgtattctcatggcacctagtgcagtgctgggcacagagtaggtgctcaataaagacttgttgaatgaa

SEQ ID NO: 194818 - DNA, 3250 bp, Homo sapiens
  Payload ID: 18486
  Gene Name: tripartite motif containing 26
  Uniprot ID: Q12899
  ENST ID: ENST00000450392
  CDS Start-End: 210-1829
gagtcaggaatggagagaagggtaatggtgttacctcttattgtggaaacctgttgagatcacagagaatatactgacggcataaaagggcagaaccatagcagggtgcgcgctgctgtagttgccttccatggatctataggagagcaagtcctccaggagaagaagtcctcaccagtgaacggagacctctctgaactaaggataccatggccacgtcagccccactacggagcctggaagaggaggtgacctgctccatctgtcttgattacctgcgggaccctgtgaccattgactgtggccacgtcttctgccgcagctgcaccacagacgtccgccccatctcagggagccgccccgtctgcccactctgcaagaagccttttaagaaggagaacatccgacccgtgtggcaactggccagcctggtggagaacattgagcggctgaaggtggacaagggcaggcagccgggagaggtgacccgggagcagcaggatgcaaagttgtgcgagcgacaccgagagaagctgcactactactgtgaggacgacgggaagctgctgtgcgtgatgtgccgggagtcccgggagcacaggccccacacggccgtcctcatggagaaggccgcccagccccacagggaaaaaatcctgaaccacctgagtaccctaaggagagacagagacaaaattcagggcttccaggcaaagggagaagctgatatcctggccgcgctgaagaagctccaggaccagaggcagtacattgtggctgagtttgagcagggtcatcagttcctgagggagcgggaggaacacctgctggaacagctggcgaagctggagcaggagctcacggagggcagggagaagttcaagagccggggcgtcggggagcttgcccggctggccctggtcatctccgaactggagggcaaggcgcagcagccagctgcagagctcatgcaggacacgagagacttcctaaacaggtatccacggaagaagttctgggttgggaaacccattgctcgagtggttaaaaaaaagaccggagaattctcagataaactcctctctctgcaacgaggcctgagggaattccaggggaagctgctgagagacttggaatataagacagtgagcgtcaccctggacccacagtcggccagtgggtacctgcagctgtcagaggactggaagtgcgtgacctacaccagcctgtacaagagtgcctacctgcacccccagcagtttgactgtgagcctggggtgctgggcagcaagggcttcacctggggcaaggtctactgggaagtggaagtggagagggagggctggtctgaggatgaagaagagggggatgaggaggaagagggagaagaggaggaggaggaagaggaggccggctatggggatggatatgacgactgggaaacggacgaagatgaggaatcgttgggcgatgaagaggaagaagaggaggaggaagaggaggaagttctggaaagctgcatggtgggggtggctagagactctgtgaagaggaagggagacctctccctgcggccagaggatggcgtgtgggcgctgcgcctctcctcctccggcatctgggccaacaccagccccgaggctgagcttttcccagcactgcggccccggagagtgggcatcgccctggattatgaagggggcaccgtgactttcaccaacgcagagtcacaggaactcatctacaccttcactgccaccttcacccggcgcctggtccccttcctgtggctcaagtggccaggaacacgcctcctgctaagaccctgagccctgacatctgcccccagccccaaccctcagatgcttcacttctttggaattccaggactctcaatggggggacgggatgcctggcctaagcacctggagcaggggaccccatatccactggtagccacctccccattgctgtggccccctgaaatctcactcagtgctgttgctccatctactgccctaatggggctcttttcccacctcctgctggtttcccgagggaacttctgaccctggagtccatgagggctcctttcctttttgaccacgaccttggccccagctctgcactctctggaataagggcccgatgcagcattttcttgcccagtgtggcaagacctcagaaaaaccagtcaattacgcctaagatcattttgctgtccttaaaccccccaggttccttcttgcacaaatccactctgctgcccaccttctctggcattttaaacagacctaccccaccccaactcagagttaagcatacatggcaatgctgaaaataaacaaaatccactgaggcttcccaggccatttaaagcctggagtaccagcgcatatcatctcatggggtccagagtggagtccaggcttctctgaaaccagggctgagcatatttccatagccaaggaggtgggactccctggagctatctgtggtcttagggaaggatccagacatacacggctttggggtacaagctgtgatcactgatcaataaattatctctagattggtccttgtgaggggagttttaagaatccagaacatcttgctcttgatcagcacatccaaaaacaccaagacaaacatccagtggagcagaacctctcctgcctcgggagttctgaccgggttccccagcagggtgttaagcctctgtctctggccctaccagcatccaggttccactttcctaggagagagtggagatgggaagacagggaaaggaaggcagcaggaggccacaagcccaccaggtcttcatgtcaagagagggagtaacatgtcttctcattgcccacggacccaacctctgtccaggtgcccctcatcatcacagtttaacacaagctcccctgctccagccaaattgatctcccagtcttgtccttacccattccaagtgctctgccagcccctgttcatccaagttttaagtcctccaccctgttctaagagactgttccaacggctctgggcctcagtggtcacttgaccaccattgtctcagagctgcccactttgtgtgtgtcacatgctgcctgagtcacatgtacatcttatttctgcctctagttttgtaagctcctggagggcggataacatcttatactactcttgtattctcatggcacctagtgcagtgctgggcacagagtaggtgctcaataaagacttgttgaatgaa

SEQ ID NO: 194819 - DNA, 3250 bp, Homo sapiens
  Payload ID: 18486
  Gene Name: tripartite motif containing 26
  Uniprot ID: Q12899
  ENST ID: ENST00000437089
  CDS Start-End: 210-1829
gagtcaggaatggagagaagggtaatggttttacctcttattgtggaaacctgttgagatcacagagaatatactgacggcataaaagggcagaaccatagcagggtgcgcgctgctgtagttgccttccatggatctataggagagcaagtcctccaggagaagaagtcctcaccagtgaacggagacctctctgaactaaggataccatggccacgtcagccccactacggagcctggaagaggaggtgacctgctccatctgtcttgattacctgcgggaccctgtgaccattgactgtggccacgtcttctgccgcagctgcaccacagacgtccgccccatctcagggagccgccccgtctgcccactctgcaagaagccttttaagaaggagaacatccgacccgtgtggcaactggccagcctggtggagaacattgagcggctgaaggtggacaagggcaggcagccgggagaggtgacccgggagcagcaggatgcaaagttgtgcgagcgacaccgagagaagctgcactactactgtgaggacgacgggaagctgctgtgcgtgatgtgccgggagtcccgggagcacaggccccacacggccgtcctcatggagaaggccgcccagccccacagggaaaaaatcctgaaccacctgagtaccctaaggagggacagagacaaaattcagggcttccaggcaaagggagaagctgatatcctggccgcgctgaagaagctccaggaccagaggcagtacattgtggctgagtttgagcagggtcatcagttcctgagggagcgggaggaacacctgctggaacagctggcgaagctggagcaggagctcacggagggcagggagaagttcaagagccggggcgtcggggagcttgcccggctggccctggtcatctccgaactggagggcaaggcgcagcagccagctgcagagctcatgcaggacacgagagacttcctaaacaggtatccacggaagaagttctgggttgggaaacccattgctcgagtggttaaaaaaaagaccggagaattctcagataaactcctctctctgcaacgaggcctgagggaattccaggggaagctgctgagagacttggaatataagacagtgagcgtcaccctggacccacagtcggccagtgggtacctgcagctgtcagaggactggaagtgcgtgacctacaccagcctgtacaagagtgcctacctgcacccccagcagtttgactgtgagcctggggtgctaggcagcaagggcttcacctggggcaaggtctactgggaagtggaagtggagagggagggctggtctgaggatgaagaagagggggatgaggaggaagagggagaagaggaggaggaggaagaggaggccggctatggggatggatatgacgactgggaaacggacgaagatgaggaatcgttgggcgatgaagaggaagaagaggaggaggaagaggaggaagttctggaaagctgcatggtgggggtggctagagactctgtgaagaggaagggagacctctccctgcggccagaggatggcgtgtgggcgctgcgcctctcctcctccggcatctgggccaacaccagccccgaggctgagcttttcccagcactgcggccccggagagtgggcatcgccctggattatgaagggggcaccgtgactttcaccaacgcagagtcacaggaactcatctacaccttcactgccaccttcacccggcgcctggtccccttcctgtggctcaagtggccaggaacacgcctcctgctaagaccctgagccctgacatctgcccccagccccaaccctcagatgcttcacttctttggaattccaggactctcaatggggggacgggatgcctggcctaagcacctggagcaggggaccccatatccactggtagccacctccccattgctgtggccccctgaaatctcactcagtgctgttgctccatctactgccctaatggggctcttttcccacctcctgctggtttcccgagggaacttctgaccctggagtccatgagggctcctttcctttttgaccacgaccttggccccagctctgcactctctggaataagggcccgatgcagcattttcttgcccagtgtggcaagacctcagaaaaaccagtcaattacgcctaagatcattttgctgtccttaaaccccccaggttccttcttgcacaaatccactctgctgcccaccttccctggcattttaaacagacctaccccaccccaactcagagttaagcatacatggcaatgctgaaaataaacaaaatccactgaggcttcccaggccatttaaagcctggagtaccagcgcatatcatctcatggggtccagagtggagtccaggcttctctgaaaccagggctgagcatatttccatagccaaggaggtgggactccctggagctatctgtggtcttagggaaggatccagacatacacggctttggggtacaagctgtgatcactgatcaataaattatctctagattggtccttgtgaggggagttttaagaatccagaacatcttgctcttgatcagcacatccaaaaacaccaagacaaacatccagtggagcagaacctctcctgcctcgggagttctgaccgggttccccagcagggtgttaagcctctgtctctggccctaccagcatccaggttccactttcctaggagagagtggagatgggaagacagggaaaggaaggcagcaggaggccacaagcccaccaggtcttcatgtcaagagagggagtaacatgtcttctcattgcccacggacccaacctctgtccaggtgcccctcatcatcacagtttaacacaagctcccctgctccagccaaattgatctcccagtcttgtccttacccattccaagtgctctgccagcccctgttcatccaagttttaagtcctccaccctgttctaagagactgttccaacggctctgggcctcagtggtcacttgaccaccattgtctcagagctgcccactttgtgtgtgtcacatgctgcctgagtcacatgtacatcttatttctgcctctagttttgtaagctcctggagggcggataacatcttatactactcttgtattctcatggcacctagtgcagtgctgggcacagagtaggtgctcaataaagacttgttgaatgaa

SEQ ID NO: 194820 - DNA, 1124 bp, Homo sapiens
  Payload ID: 18486
  Gene Name: tripartite motif containing 26
  ENST ID: ENST00000423901
  CDS Start-End: 380-1124
acggggcggggacgagctgtcgcgctggttgctcgtgcaggagcgggacccggaacagaccgccgtgagagaggaggggcgccggccgggattcgcggcccggagctcgggaccggagtcaggaatggagagaagggtaatggttttacctcttattgtggaaacctgttgagatcacagagaatatactgacggcataaaagggcagaaccatagcagggtgcggttgcttcattccagcctcgcagtcacctctgtgccctgctggttgtcttcccagcgctgctgtagttgccttccatggatctataggagagcaagtcctccaggagaagaagtcctcaccagtgaacggagacctctctgaactaaggataccatggccacgtcagccccactacggagcctggaagaggaggtgacctgctccatctgtcttgattacctgcgggaccctgtgaccattgactgtggccacgtcttctgccgcagctgcaccacagacgtccgccccatctcagggagccgccccgtctgcccactctgcaagaagccttttaagaaggagaacatccgacccgtgtggcaactggccagcctggtggagaacattgagcggctgaaggtggacaagggcaggcagccgggagaggtgacccgggagcagcaggatgcaaagttgtgcgagcgacaccgagagaagctgcactactactgtgaggacgacgggaagctgctgtgcgtgatgtgccgggagtcccgggagcacaggccccacacggccgtcctcatggagaaggccgcccagccccacagggaaaaaatcctgaaccacctgagtaccctaaggagggacagagacaaaattcagggcttccaggcaaagggagaagctgatatcctggccgcgctgaagaagctccaggaccagaggcagtacattgtggctgagtttgagcagggtcatcagttcctgagggagcgggaggaacacctgctggaacagctggcgaagctggagcaggagctcacggagggcagggagaagttcaagagccggggcgtcggggagcttgcccggctggccctggtcatctccgaactggagggcaaggcgcagcagc

SEQ ID NO: 194821 - DNA, 582 bp, Homo sapiens
  Payload ID: 18486
  Gene Name: tripartite motif containing 26
  ENST ID: ENST00000447942
  CDS Start-End: 217-582
aacagaccgccgtgagagaggaggggcgccggccgggattcgcggcccggagctcgggaccggagtcaggaatggagagaagggtaatggttttacctcttattgtggaaacctgttgagatcacagagaatatactgacggcataaaagggcagaaccatagcagggtgcgaagtcctcaccagtgaacggagacctctctgaactaaggataccatggccacgtcagccccactacggagcctggaagaggaggtgacctgctccatctgtcttgattacctgcgggaccctgtgaccattgactgtggccacgtcttctgccgcagctgcaccacagacgtccgccccatctcagggagccgccccgtctgcccactctgcaagaagccttttaagaaggagaacatccgacccgtgtggcaactggccagcctggtggagaacattgagcggctgaaggtggacaagggcaggcagccgggagaggtgacccgggagcagcaggatgcaaagttgtgcgagcgacaccgagagaagctgcactactactgtgaggacgacgggaagctgctgtgcgtg

SEQ ID NO: 194822 - DNA, 3250 bp, Homo sapiens
  Payload ID: 18486
  Gene Name: tripartite motif containing 26
  Uniprot ID: Q12899
  ENST ID: ENST00000422349
  CDS Start-End: 210-1829
gagtcaggaatggagagaagggtaatggttttacctcttattgtggaaacctgttgagatcacagagaatatactgacggcataaaagggcagaaccatagcagggtgcgcgctgctgtagttgccttccatggatctataggagagcaagtcctccaggagaagaagtcctcaccagtgaacggagacctctctgaactaaggataccatggccacgtcagccccactacggagcctggaagaggaggtgacctgctccatctgtcttgattacctgcgggaccctgtgaccattgactgtggccacgtcttctgccgcagctgcaccacagacgtccgccccatctcagggagccgccccgtctgcccactctgcaagaagccttttaagaaggagaacatccgacccgtgtggcaactggccagcctggtggagaacattgagcggctgaaggtggacaagggcaggcagccgggagaggtgacccgggagcagcaggatgcaaagttgtgcgagcgacaccgagagaagctgcactactactgtgaggacgacgggaagctgctgtgcgtgatgtgccgggagtcccgggagcacaggccccacacggccgtcctcatggagaaggccgcccagccccacagggaaaaaatcctgaaccacctgagtaccctaaggagggacagagacaaaattcagggcttccaggcaaagggagaagctgatatcctggccgcgctgaagaagctccaggaccagaggcagtacattgtggctgagtttgagcagggtcatcagttcctgagggagcgggaggaacacctgctggaacagctggcgaagctggagcaggagctcacggagggcagggagaagttcaagagccggggcgtcggggagcttgcccggctggccctggtcatctccgaactggagggcaaggcgcagcagccagctgcagagctcatgcaggacacgagagacttcctaaacaggtatccacggaagaagttctgggttgggaaacccattgctcgagtggttaaaaaaaagaccggagaattctcagataaactcctctctctgcaacgaggcctgagggaattccaggggaagctgctgagagacttggaatataagacagtgagcgtcaccctggacccacagtcggccagtgggtacctgcagctgtcagaggactggaagtgcgtgacctacaccagcctgtacaagagtgcctacctgcacccccagcagtttgactgtgagcctggggtgctgggcagcaagggcttcacctggggcaaggtctactgggaagtggaagtggagagggagggctggtctgaggatgaagaagagggggatgaggaggaagagggagaagaggaggaggaggaagaggaggccggctatggggatggatatgacgactgggaaacggacgaagatgaggaatcgttgggcgatgaagaggaagaagaggaggaggaagaggaggaagttctggaaagctgcatggtgggggtggctagagactctgtgaagaggaagggagacctctccctgcggccagaggatggcgtgtgggcgctgcgcctctcctcctccggcatctgggccaacaccagccccgaggctgagcttttcccagcactgcggccccggagagtgggcatcgccctggattatgaagggggcaccgtgactttcaccaacgcagagtcacaggaactcatctacaccttcactgccaccttcacccggcgcctggtccccttcctgtggctcaagtggccaggaacacgcctcctgctaagaccctgagccctgacatctgcccccagccccaaccctcagatgcttcacttctttggaattccaggactctcaatggggggacgggatgcctggcctaagcacctggagcaggggaccccatatccactggtagccacctccccattgctgtggccccctgaaatctcactcagtgctgttgctccatctactgccctaatggggctcttttcccacctcctgctggtttcccgagggaacttctgaccctggagtccatgagggctcctttcctttttgaccacgaccttggccccagctctgcactctctggaataagggcccgatgcagcattttcttgcccagtgtggcaagacctcagaaaaaccagtcaattacgcctaagatcattttgctgtccttaaaccccccaggttccttcttgcacaaatccactctgctgcccaccttccctggcattttaaacagacctaccccaccccaactcagagttaagcatacatggcaatgctgaaaataaacaaaatccactgaggcttcccaggccatttaaagcctggagtaccagcgcatatcatctcatggggtccagagtggagtccaggcttctctgaaaccagggctgagcatatttccatagccaaggaggtgggactccctggagctatctgtggtcttagggaaggatccagacatacacggctttggggtacaagctgtgatcactgatcaataaattatctctagattggtccttgtgaggggagttttaagaatccagaacatcttgctcttgatcagcacatccaaaaacaccaagacaaacatccagtggagcagaacctctcctgcctcgggagttctgaccaggttccccagcagggtgttaagcctctgtctctggccctaccagcatccaggttccactttcctaggagagagtggagatgggaagacagggaaaggaaggcagcaggaggccacaagcccaccaggtcttcatgtcaagagagggagtaacatgtcttctcattgcccacggacccaacctctgtccaggtgcccctcatcatcacagtttaacacaagctcccctgctccagccaaattgatctcccagtcttgtccttacccattccaagtgctctgccagcccctgttcatccaagttttaagtcctccaccctgttctaagagactgttccaacggctctgggcctcagtggtcacttgaccaccattgtctcagagctgcccactttgtgtgtgtcacatgctgcctgagtcacacgtacatcttatttctgcctctagttttgtaagctcctggagggcggataacatcttatactactcttgtattctcatggcacctagtgcagtgctgggcacagagtaggtgctcaataaagacttgttgaatgaa

SEQ ID NO: 194823 - DNA, 1124 bp, Homo sapiens; identical to SEQ ID NO: 194809
  Payload ID: 18486
  Gene Name: tripartite motif containing 26
  ENST ID: ENST00000438785
  CDS Start-End: 380-1124

SEQ ID NO: 194824 - DNA, 3318 bp, Homo sapiens
  Payload ID: 18486
  Gene Name: tripartite motif containing 26
  Uniprot ID: Q12899
  ENST ID: ENST00000427535
  CDS Start-End: 278-1897
gggagattacggggcggggacgagctgtcgcgctggttgctcgtgcaggagcgggacccggaacagaccgccgtgagagaggaggggcgccggccgggattcgcggcccggagctcgggaccggttgcttcattccagcctcgcagtcacctctgtgccctgctggttgtcttcccagcgctgctgtagttgccttccatggatctataggagagcaagtcctccaggagaagaagtcctcaccagtgaacggagacctctctgaactaaggataccatggccacgtcagccccactacggagcctggaagaggaggtgacctgctccatctgtcttgattacctgcgggaccctgtgaccattgactgtggccacgtcttctgccgcagctgcaccacagacgtccgccccatctcagggagccgccccgtctgcccactctgcaagaagccttttaagaaggagaacatccgacccgtgtggcaactggccagcctggtggagaacattgagcggctgaaggtggacaagggcaggcagccgggagaggtgacccgggagcagcaggatgcaaagttgtgcgagcgacaccgagagaagctgcactactactgtgaggacgacgggaagctgctgtgcgtgatgtgccgggagtcccgggagcacaggccccacacggccgtcctcatggagaaggccgcccagccccacagggaaaaaatcctgaaccacctgagtaccctaaggagggacagagacaaaattcagggcttccaggcaaagggagaagctgatatcctggccgcgctgaagaagctccaggaccagaggcagtacattgtggctgagtttgagcagggtcatcagttcctgagggagcgggaggaacacctgctggaacagctggcgaagctggagcaggagctcacggagggcagggagaagttcaagagccggggcgtcggggagcttgcccggctggccctggtcatctccgaactggagggcaaggcgcagcagccagctgcagagctcatgcaggacacgagagacttcctaaacaggtatccacggaagaagttctgggttgggaaacccattgctcgagtggttaaaaaaaagaccggagaattctcagataaactcctctctctgcaacgaggcctgagggaattccaggggaagctgctgagagacttggaatataagacagtgagcgtcaccctggacccacagtcggccagtgggtacctgcagctgtcagaggactggaagtgcgtgacctacaccagcctgtacaagagtgcctacctgcacccccagcagtttgactgtgagcctggggtgctgggcagcaagggcttcacctggggcaaggtctactgggaagtggaagtggagagggagggctggtctgaggatgaagaagagggggatgaggaggaagagggagaagaggaggaggaggaagaggaggccggctatggggatggatatgacgactgggaaacggacgaagatgaggaatcgttgggcgatgaagaggaagaagaggaggaggaagaggaggaagttctggaaagctgcatggtgggggtggctagagactctgtgaagaggaagggagacctctccctgcggccagaggatggcgtgtgggcgctgcgcctctcctcctccggcatctgggccaacaccagccccgaggctgagcttttcccagcactgcggccccggagagtgggcatcgccctggattatgaagggggcaccgtgactttcaccaacgcagagtcacaggaactcatctacaccttcactgccaccttcacccggcgcctggtccccttcctgtggctcaagtggccaggaacacgcctcctgctaagaccctgagccctgacatctgcccccagccccaaccctcagatgcttcacttctttggaattccaggactctcaatggggggacgggatgcctggcctaagcacctggagcaggggaccccatatccactggtagccacctccccattgctgtggccccctgaaatctcactcagtgctgttgctccatctactgccctaatggggctcttttcccacctcctgctggtttcccgagggaacttctgaccctggagtccatgagggctcctttcctttttgaccacgaccttggccccagctctgcactctctggaataagggcccgatgcagcattttcttgcccagtgtggcaagacctcagaaaaaccagtcaattacgcctaagatcattttgctgtccttaaaccccccaggttccttcttgcacaaatccactctgctgcccaccttccctggcattttaaacagacctaccccaccccaactcagagttaagcatacatggcaatgctgaaaataaacaaaatccactgaggcttcccaggccatttaaagcctggagtaccagcgcatatcatctcatggggtccagagtggagtccaggcttctctgaaaccagggctgagcatatttccatagccaaggaggtgggactccctggagctatctgtggtcttagggaaggatccagacatacacggctttggggtacaagctgtgatcactgatcaataaattatctctagattggtccttgtgaggggagttttaagaatccagaacatcttgctcttgatcagcacatccaaaaacaccaagacaaacatccagtggagcagaacctctcctgcctcgggagttctgaccaggttccccagcagggtgttaagcctctgtctctggccctaccagcatccaggttccactttcctaggagagagtggagatgggaagacagggaaaggaaggcagcaggaggccacaagcccaccaggtcttcatgtcaagagagggagtaacatgtcttctcattgcccacggacccaacctctgtccaggtgcccctcatcatcacagtttaacacaagctcccctgctccagccaaattgatctcccagtcttgtccttacccattccaagtgctctgccagcccctgttcatccaagttttaagtcctccaccctgttctaagagactgttccaacggctctgggcctcagtggtcacttgaccaccattgtctcagagctgcccactttgtgtgtgtcacatgctgcctgagtcacacgtacatcttatttctgcctctagttttgtaagctcctggagggcggataacatcttatactactcttgtattctcatggcacctagtgcagtgctgggcacagagtaggtgctcaataaagacttgttgaatgaa

SEQ ID NO: 194825 - DNA, 682 bp, Homo sapiens
  Payload ID: 18486
  Gene Name: tripartite motif containing 26
  ENST ID: ENST00000424124
  CDS Start-End: 206-682
ggaaacctgttgagatcacagagaatatactgacggcataaaagggcagaaccatagcagggtgcgcctcgcagtcacctctgtgccctgctggttgtcttcccagcgctgctgtagttgccttccatggatctataggagagcaagtcctccaggagaagaagtcctcaccagtgaacggagacctctctgaactaaggataccatggccacgtcagccccactacggagcctggaagaggaggtgacctgctccatctgtcttgattacctgcgggaccctgtgaccattgactgtggccacgtcttctgccgcagctgcaccacagacgtccgccccatctcagggagccgccccgtctgcccactctgcaagaagccttttaagaaggagaacatccgacccgtgtggcaactggaaaaaatcctgaaccacctgagtaccctaaggagggacagagacaaaattcagggcttccaggcaaagggagaagctgatatcctggccgcgctgaagaagctccaggaccagaggcagtacattgtggctgagtttgagcagggtcatcagttcctgagggagcgggaggaacacctgctggaacagctggcgaagctggagcaggagctcacggagggcagggagaagttcaagagccggggcgtcggggagcttgcccgg

SEQ ID NO: 194826 - DNA, 582 bp, Homo sapiens; identical to SEQ ID NO: 194816
  Payload ID: 18486
  Gene Name: tripartite motif containing 26
  ENST ID: ENST00000434785
  CDS Start-End: 217-582

SEQ ID NO: 194827 - DNA, 1124 bp, Homo sapiens
  Payload ID: 18486
  Gene Name: tripartite motif containing 26
  ENST ID: ENST00000446196
  CDS Start-End: 380-1124
acggggcggggacgagctgtcgcgctggttgctcgtgcaggagcgggacccggaacagaccgccgtgagagaggaggggcgccggccgggattcgcggcccggagctcgggaccggagtcaggaatggagagaagggtaatggtgttacctcttattgtggaaacctgttgagatcacagagaatatactgacggcataaaagggcagaaccatagcagggtgcggttgcttcattccagcctcgcagtcacctctgtgccctgctggttgtcttcccagcgctgctgtagttgccttccatggatctataggagagcaagtcctccaggagaagaagtcctcaccagtgaacggagacctctctgaactaagaataccatggccacgtcagccccactacggagcctggaagaggaggtgacctgctccatctgtcttgattacctgcgggaccctgtgaccattgactgtggccacgtcttctgccgcagctgcaccacagacgtccgccccatctcagggagccgccccgtctgcccactctgcaagaagccttttaagaaggagaacatccgacccgtgtggcaactggccagcctggtggagaacattgagcggctgaaggtggacaagggcaggcagccgggagaggtgacccgggagcagcaggatgcaaagttgtgcgagcgacaccgagagaagctgcactactactgtgaggacgacgggaagctgctgtgcgtgatgtgccgggagtcccgggagcacaggccccacacggccgtcctcatggagaaggccgcccagccccacagggaaaaaatcctgaaccacctgagtaccctaaggagagacagagacaaaattcagggcttccaggcaaagggagaagctgatatcctggccgcgctgaagaagctccaggaccagaggcagtacattgtggctgagtttgagcagggtcatcagttcctgagggagcgggaggaacacctgctggaacagctggcgaagctggagcaggagctcacggagggcagggagaagttcaagagccggggcgtcggggagcttgcccggctggccctggtcatctccgaactggagggcaaggcgcagcagc

SEQ ID NO: 194828 - DNA, 3250 bp, Homo sapiens; identical to SEQ ID NO: 194819
  Payload ID: 18486
  Gene Name: tripartite motif containing 26
  Uniprot ID: Q12899
  ENST ID: ENST00000433314
  CDS Start-End: 210-1829

SEQ ID NO: 194829 - DNA, 682 bp, Homo sapiens; identical to SEQ ID NO: 194825
  Payload ID: 18486
  Gene Name: tripartite motif containing 26
  ENST ID: ENST00000415966
  CDS Start-End: 206-682

SEQ ID NO: 194830 - DNA, 603 bp, Homo sapiens; identical to SEQ ID NO: 194804
  Payload ID: 18486
  Gene Name: tripartite motif containing 26
  ENST ID: ENST00000433836
  CDS Start-End: 132-603

SEQ ID NO: 194831 - DNA, 682 bp, Homo sapiens; identical to SEQ ID NO: 194825
  Payload ID: 18486
  Gene Name: tripartite motif containing 26
  ENST ID: ENST00000444979
  CDS Start-End: 206-682

SEQ ID NO: 194832 - DNA, 552 bp, Homo sapiens
  Payload ID: 18486
  Gene Name: tripartite motif containing 26
  ENST ID: ENST00000445457
  CDS Start-End: 187-552
ggccgggattcgcggcccggagctcgggaccggagtcaggaatggagagaagggtaatggttttacctcttattgtggaaacctgttgagatcacagagaatatactgacggcataaaagggcagaaccatagcagggtgcgaagtcctcaccagtgaacggagacctctctgaactaaggataccatggccacgtcagccccactacggagcctggaagaggaggtgacctgctccatctgtcttgattacctgcgggaccctgtgaccattgactgtggccacgtcttctgccgcagctgcaccacagacgtccgccccatctcagggagccgccccgtctgcccactctgcaagaagccttttaagaaggagaacatccgacccgtgtggcaactggccagcctggtggagaacattgagcggctgaaggtggacaagggcaggcagccgggagaggtgacccgggagcagcaggatgcaaagttgtgcgagcgacaccgagagaagctgcactactactgtgaggacgacgggaagctgctgtgcgtg

SEQ ID NO: 194833 - DNA, 582 bp, Homo sapiens; identical to SEQ ID NO: 194816
  Payload ID: 18486
  Gene Name: tripartite motif containing 26
  ENST ID: ENST00000440149
  CDS Start-End: 217-582

SEQ ID NO: 194834 - DNA, 582 bp, Homo sapiens; identical to SEQ ID NO: 194816
  Payload ID: 18486
  Gene Name: tripartite motif containing 26
  ENST ID: ENST00000427612
  CDS Start-End: 217-582

SEQ ID NO: 194835 - DNA, 554 bp, Homo sapiens
  Payload ID: 18486
  Gene Name: tripartite motif containing 26
  ENST ID: ENST00000419401
  CDS Start-End: 83-554
ggccgggattcgcggcccggagctcgggaccggagaagaagtcctcaccagtgaacggagacctctctgaactaaggataccatggccacgtcagccccactacggagcctggaagaggaggtgacctgctccatctgtcttgattacctgcgggaccctgtgaccattgactgtggccacgtcttctgccgcagctgcaccacagacgtccgccccatctcagggagccgccccgtctgcccactctgcaagaagccttttaagaaggagaacatccgacccgtgtggcaactggccagcctggtggagaacattgagcggctgaaggtggacaagggcaggcagccgggagaggtgacccgggagcagcaggatgcaaagttgtgcgagcgacaccgagagaagctgcactactactgtgaggacgacgggaagctgctgtgcgtgatgtgccgggagtcccgggagcacaggccccacacggccgtcctcatggagaaggccgcccagccccacagggaaaaaatcctgaaccacctgagtaccctaagga

SEQ ID NO: 194836 - DNA, 682 bp, Homo sapiens; identical to SEQ ID NO: 194825
  Payload ID: 18486
  Gene Name: tripartite motif containing 26
  ENST ID: ENST00000438064
  CDS Start-End: 206-682

SEQ ID NO: 194837 - DNA, 582 bp, Homo sapiens
  Payload ID: 18486
  Gene Name: tripartite motif containing 26
  ENST ID: ENST00000435387
  CDS Start-End: 217-582
aacagaccgccgtgagagaggaggggcgccggccgggattcgcggcccggagctcgggaccggagtcaggaatggagagaagggtaatggtgttacctcttattgtggaaacctgttgagatcacagagaatatactgacggcataaaagggcagaaccatagcagggtgcgaagtcctcaccagtgaacggagacctctctgaactaagaataccatggccacgtcagccccactacggagcctggaagaggaggtgacctgctccatctgtcttgattacctgcgggaccctgtgaccattgactgtggccacgtcttctgccgcagctgcaccacagacgtccgccccatctcagggagccgccccgtctgcccactctgcaagaagccttttaagaaggagaacatccgacccgtgtggcaactggccagcctggtggagaacattgagcggctgaaggtggacaagggcaggcagccgggagaggtgacccgggagcagcaggatgcaaagttgtgcgagcgacaccgagagaagctgcactactactgtgaggacgacgggaagctgctgtgcgtg

SEQ ID NO: 194838 - DNA, 3318 bp, Homo sapiens; identical to SEQ ID NO: 194803
  Payload ID: 18486
  Gene Name: tripartite motif containing 26
  Uniprot ID: Q12899
  ENST ID: ENST00000456093
  CDS Start-End: 278-1897

SEQ ID NO: 194839 - DNA, 603 bp, Homo sapiens; identical to SEQ ID NO: 194810
  Payload ID: 18486
  Gene Name: tripartite motif containing 26
  ENST ID: ENST00000415789
  CDS Start-End: 132-603

SEQ ID NO: 194840 - DNA, 3478 bp, Homo sapiens
  Payload ID: 18486
  Gene Name: tripartite motif containing 26
  Uniprot ID: Q12899
  ENST ID: ENST00000445259
  CDS Start-End: 438-2057
aacagaccgccgtgagagaggaggggcgccggccgggattcgcggcccggagctcgggaccggagtcaggaatggagagaagggtaatggttttacctcttattgtggaaacctgttgagatcacagagaatatactgacggcataaaagggcagaaccatagcagggtgcggttgcttcattccagcctcgcagtcacctctgtgccctgctggttgtcttcccagcgctgctgtagttgccttccatggatctataggagagcaagtcctccaggagctggtggtgtctgtcgattgactgagtgctggagctggcagccctgtgcaggctgccacctttgcccctttactgtgcttgctcctgactctatgtcgcgtctccaaggagaagaagtcctcaccagtgaacggagacctctctgaactaaggataccatggccacgtcagccccactacggagcctggaagaggaggtgacctgctccatctgtcttgattacctgcgggaccctgtgaccattgactgtggccacgtcttctgccgcagctgcaccacagacgtccgccccatctcagggagccgccccgtctgcccactctgcaagaagccttttaagaaggagaacatccgacccgtgtggcaactggccagcctggtggagaacattgagcggctgaaggtggacaagggcaggcagccgggagaggtgacccgggagcagcaggatgcaaagttgtgcgagcgacaccgagagaagctgcactactactgtgaggacgacgggaagctgctgtgcgtgatgtgccgggagtcccgggagcacaggccccacacggccgtcctcatggagaaggccgcccagccccacagggaaaaaatcctgaaccacctgagtaccctaaggagggacagagacaaaattcagggcttccaggcaaagggagaagctgatatcctggccgcgctgaagaagctccaggaccagaggcagtacattgtggctgagtttgagcagggtcatcagttcctgagggagcgggaggaacacctgctggaacagctggcgaagctggagcaggagctcacggagggcagggagaagttcaagagccggggcgtcggggagcttgcccggctggccctggtcatctccgaactggagggcaaggcgcagcagccagctgcagagctcatgcaggacacgagagacttcctaaacaggtatccacggaagaagttctgggttgggaaacccattgctcgagtggttaaaaaaaagaccggagaattctcagataaactcctctctctgcaacgaggcctgagggaattccaggggaagctgctgagagacttggaatataagacagtgagcgtcaccctggacccacagtcggccagtgggtacctgcagctgtcagaggactggaagtgcgtgacctacaccagcctgtacaagagtgcctacctgcacccccagcagtttgactgtgagcctggggtgctgggcagcaagggcttcacctggggcaaggtctactgggaagtggaagtggagagggagggctggtctgaggatgaagaagagggggatgaggaggaagagggagaagaggaggaggaggaagaggaggccggctatggggatggatatgacgactgggaaacggacgaagatgaggaatcgttgggcgatgaagaggaagaagaggaggaggaagaggaggaagttctggaaagctgcatggtgggggtggctagagactctgtgaagaggaagggagacctctccctgcggccagaggatggcgtgtgggcgctgcgcctctcctcctccggcatctgggccaacaccagccccgaggctgagcttttcccagcactgcggccccggagagtgggcatcgccctggattatgaagggggcaccgtgactttcaccaacgcagagtcacaggaactcatctacaccttcactgccaccttcacccggcgcctggtccccttcctgtggctcaagtggccaggaacacgcctcctgctaagaccctgagccctgacatctgcccccagccccaaccctcagatgcttcacttctttggaattccaggactctcaatggggggacgggatgcctggcctaagcacctggagcaggggaccccatatccactggtagccacctccccattgctgtggccccctgaaatctcactcagtgctgttgctccatctactgccctaatggggctcttttcccacctcctgctggtttcccgagggaacttctgaccctggagtccatgagggctcctttcctttttgaccacgaccttggccccagctctgcactctctggaataagggcccgatgcagcattttcttgcccagtgtggcaagacctcagaaaaaccagtcaattacgcctaagatcattttgctgtccttaaaccccccaggttccttcttgcacaaatccactctgctgcccaccttccctggcattttaaacagacctaccccaccccaactcagagttaagcatacatggcaatgctgaaaataaacaaaatccactgaggcttcccaggccatttaaagcctggagtaccagcgcatatcatctcatggggtccagagtggagtccaggcttctctgaaaccagggctgagcatatttccatagccaaggaggtgggactccctggagctatctgtggtcttagggaaggatccagacatacacggctttggggtacaagctgtgatcactgatcaataaattatctctagattggtccttgtgaggggagttttaagaatccagaacatcttgctcttgatcagcacatccaaaaacaccaagacaaacatccagtggagcagaacctctcctgcctcgggagttctgaccaggttccccagcagggtgttaagcctctgtctctggccctaccagcatccaggttccactttcctaggagagagtggagatgggaagacagggaaaggaaggcagcaggaggccacaagcccaccaggtcttcatgtcaagagagggagtaacatgtcttctcattgcccacggacccaacctctgtccaggtgcccctcatcatcacagtttaacacaagctcccctgctccagccaaattgatctcccagtcttgtccttacccattccaagtgctctgccagcccctgttcatccaagttttaagtcctccaccctgttctaagagactgttccaacggctctgggcctcagtggtcacttgaccaccattgtctcagagctgcccactttgtgtgtgtcacatgctgcctgagtcacacgtacatcttatttctgcctctagttttgtaagctcctggagggcggataacatcttatactactcttgtattctcatggcacctagtgcagtgctgggcacagagtaggtgctcaataaagacttgttgaatgaa

SEQ ID NO: 194841 - DNA, 3448 bp, Homo sapiens
  Payload ID: 18486
  Gene Name: tripartite motif containing 26
  Uniprot ID: Q12899
  ENST ID: ENST00000432326
  CDS Start-End: 408-2027
ggccgggattcgcggcccggagctcgggaccggagtcaggaatggagagaagggtaatggttttacctcttattgtggaaacctgttgagatcacagagaatatactgacggcataaaagggcagaaccatagcagggtgcggttgcttcattccagcctcgcagtcacctctgtgccctgctggttgtcttcccagcgctgctgtagttgccttccatggatctataggagagcaagtcctccaggagctggtggtgtctgtcgattgactgagtgctggagctggcagccctgtgcaggctgccacctttgcccctttactgtgcttgctcctgactctatgtcgcgtctccaaggagaagaagtcctcaccagtgaacggagacctctctgaactaaggataccatggccacgtcagccccactacggagcctggaagaggaggtgacctgctccatctgtcttgattacctgcgggaccctgtgaccattgactgtggccacgtcttctgccgcagctgcaccacagacgtccgccccatctcagggagccgccccgtctgcccactctgcaagaagccttttaagaaggagaacatccgacccgtgtggcaactggccagcctggtggagaacattgagcggctgaaggtggacaagggcaggcagccgggagaggtgacccgggagcagcaggatgcaaagttgtgcgagcgacaccgagagaagctgcactactactgtgaggacgacgggaagctgctgtgcgtgatgtgccgggagtcccgggagcacaggccccacacggccgtcctcatggagaaggccgcccagccccacagggaaaaaatcctgaaccacctgagtaccctaaggagggacagagacaaaattcagggcttccaggcaaagggagaagctgatatcctggccgcgctgaagaagctccaggaccagaggcagtacattgtggctgagtttgagcagggtcatcagttcctgagggagcgggaggaacacctgctggaacagctggcgaagctggagcaggagctcacggagggcagggagaagttcaagagccggggcgtcggggagcttgcccggctggccctggtcatctccgaactggagggcaaggcgcagcagccagctgcagagctcatgcaggacacgagagacttcctaaacaggtatccacggaagaagttctgggttgggaaacccattgctcgagtggttaaaaaaaagaccggagaattctcagataaactcctctctctgcaacgaggcctgagggaattccaggggaagctgctgagagacttggaatataagacagtgagcgtcaccctggacccacagtcggccagtgggtacctgcagctgtcagaggactggaagtgcgtgacctacaccagcctgtacaagagtgcctacctgcacccccagcagtttgactgtgagcctggggtgctgggcagcaagggcttcacctggggcaaggtctactgggaagtggaagtggagagggagggctggtctgaggatgaagaagagggggatgaggaggaagagggagaagaggaggaggaggaagaggaggccggctatggggatggatatgacgactgggaaacggacgaagatgaggaatcgttgggcgatgaagaggaagaagaggaggaggaagaggaggaagttctggaaagctgcatggtgggggtggctagagactctgtgaagaggaagggagacctctccctgcggccagaggatggcgtgtgggcgctgcgcctctcctcctccggcatctgggccaacaccagccccgaggctgagcttttcccagcactgcggccccggagagtgggcatcgccctggattatgaagggggcaccgtgactttcaccaacgcagagtcacaggaactcatctacaccttcactgccaccttcacccggcgcctggtccccttcctgtggctcaagtggccaggaacacgcctcctgctaagaccctgagccctgacatctgcccccagccccaaccctcagatgcttcacttctttggaattccaggactctcaatggggggacgggatgcctggcctaagcacctggagcaggggaccccatatccactggtagccacctccccattgctgtggccccctgaaatctcactcagtgctgttgctccatctactgccctaatggggctcttttcccacctcctgctggtttcccgagggaacttctgaccctggagtccatgagggctcctttcctttttgaccacgaccttggccccagctctgcactctctggaataagggcccgatgcagcattttcttgcccagtgtggcaagacctcagaaaaaccagtcaattacgcctaagatcattttgctgtccttaaaccccccaggttccttcttgcacaaatccactctgctgcccaccttccctggcattttaaacagacctaccccaccccaactcagagttaagcatacatggcaatgctgaaaataaacaaaatccactgaggcttcccaggccatttaaagcctggagtaccagcgcatatcatctcatggggtccagagtggagtccaggcttctctgaaaccagggctgagcatatttccatagccaaggaggtgggactccctggagctatctgtggtcttagggaaggatccagacatacacggctttggggtacaagctgtgatcactgatcaataaattatctctagattggtccttgtgaggggagttttaagaatccagaacatcttgctcttgatcagcacatccaaaaacaccaagacaaacatccagtggagcagaacctctcctgcctcgggagttctgaccaggttccccagcagggtgttaagcctctgtctctggccctaccagcatccaggttccactttcctaggagagagtggagatgggaagacagggaaaggaaggcagcaggaggccacaagcccaccaggtcttcatgtcaagagagggagtaacatgtcttctcattgcccacggacccaacctctgtccaggtgcccctcatcatcacagtttaacacaagctcccctgctccagccaaattgatctcccagtcttgtccttacccattccaagtgctctgccagcccctgttcatccaagttttaagtcctccaccctgttctaagagactgttccaacggctctgggcctcagtggtcacttgaccaccattgtctcagagctgcccactttgtgtgtgtcacatgctgcctgagtcacacgtacatcttatttctgcctctagttttgtaagctcctggagggcggataacatcttatactactcttgtattctcatggcacctagtgcagtgctgggcacagagtaggtgctcaataaagacttgttgaatgaa

SEQ ID NO: 194842 - DNA, 3478 bp, Homo sapiens; identical to SEQ ID NO: 194801
  Payload ID: 18486
  Gene Name: tripartite motif containing 26
  Uniprot ID: Q12899
  ENST ID: ENST00000447711
  CDS Start-End: 438-2057

SEQ ID NO: 194843 - DNA, 3250 bp, Homo sapiens
  Payload ID: 18486
  Gene Name: tripartite motif containing 26
  Uniprot ID: Q12899
  ENST ID: ENST00000438908
  CDS Start-End: 210-1829
gagtcaggaatggagagaagggtaatggtgttacctcttattgtggaaacctgttgagatcacagagaatatactgacggcataaaagggcagaaccatagcagggtgcgcgctgctgtagttgccttccatggatctataggagagcaagtcctccaggagaagaagtcctcaccagtgaacggagacctctctgaactaagaataccatggccacgtcagccccactacggagcctggaagaggaggtgacctgctccatctgtcttgattacctgcgggaccctgtgaccattgactgtggccacgtcttctgccgcagctgcaccacagacgtccgccccatctcagggagccgccccgtctgcccactctgcaagaagccttttaagaaggagaacatccgacccgtgtggcaactggccagcctggtggagaacattgagcggctgaaggtggacaagggcaggcagccgggagaggtgacccgggagcagcaggatgcaaagttgtgcgagcgacaccgagagaagctgcactactactgtgaggacgacgggaagctgctgtgcgtgatgtgccgggagtcccgggagcacaggccccacacggccgtcctcatggagaaggccgcccagccccacagggaaaaaatcctgaaccacctgagtaccctaaggagagacagagacaaaattcagggcttccaggcaaagggagaagctgatatcctggccgcgctgaagaagctccaggaccagaggcagtacattgtggctgagtttgagcagggtcatcagttcctgagggagcgggaggaacacctgctggaacagctggcgaagctggagcaggagctcacggagggcagggagaagttcaagagccggggcgtcggggagcttgcccggctggccctggtcatctccgaactggagggcaaggcgcagcagccagctgcagagctcatgcaggacacgagagacttcctaaacaggtatccacggaagaagttctgggttgggaaacccattgctcgagtggttaaaaaaaagaccggagaattctcagataaactcctctctctgcaacgaggcctgagggaattccaggggaagctgctgagagacttggaatataagacagtgagcgtcaccctggacccacagtcggccagtgggtacctgcagctgtcagaggactggaagtgcgtgacctacaccagcctgtacaagagtgcctacctgcacccccagcagtttgactgtgagcctggggtgctgggcagcaagggcttcacctggggcaaggtctactgggaagtggaagtggagagggagggctggtctgaggatgaagaagagggggatgaggaggaagagggagaagaggaggaggaggaagaggaggccggctatggggatggatatgacgactgggaaacggacgaagatgaggaatcgttgggcgatgaagaggaagaagaggaggaggaagaggaggaagttctggaaagctgcatggtgggggtggctagagactctgtgaagaggaagggagacctctccctgcggccagaggatggcgtgtgggcgctgcgcctctcctcctccggcatctgggccaacaccagccccgaggctgagcttttcccagcactgcggccccggagagtgggcatcgccctggattatgaagggggcaccgtgactttcaccaacgcagagtcacaggaactcatctacaccttcactgccaccttcacccggcgcctggtccccttcctgtggctcaagtggccaggaacacgcctcctgctaagaccctgagccctgacatctgcccccagccccaaccctcagatgcttcacttctttggaattccaggactctcaatggggggacgggatgcctggcctaagcacctggagcaggggaccccatatccactggtagccacctccccattgctgtggccccctgaaatctcactcagtgctgttgctccatctactgccctaatggggctcttttcccacctcctgctggtttcccgagggaacttctgaccctggagtccatgagggctcctttcctttttgaccacgaccttggccctagctctgcactctctggaataagggcccgatgcagcattttcttgcccagtgtggcaagacctcagaaaaaccagtcaattacgcctaagatcattttgctgtccttaaaccccccaggttccttcttgcacaaatccactctgctgcccaccttccctggcattttaaacagacctaccccaccccaactcagagttaagcatacatggcaatgctgaaaataaacaaaatccactgaggcttcccaggccatttaaagcctggagtaccagcgcatatcatctcatggggtccagagtggagtccaggcttctctgaaaccagggctgagcatatttccatagccaaggaggtgggactccctggagctatctgtggtcttagggaaggatccagacatacacggctttggggtacaagctgtgatcactgatcaataaattatctctagattggtccttgtgaggggagttttaagaatccagaacatcttgctcttgatcagcacatccaaaaacaccaagacaaacatccagtggagcagaacctctcctgcctcgggagttctgaccgggttccccagcagggtgttaagcctctgtctctggccctaccagcatccaggttccactttcctaggagagagtggagatgggaagacagggaaaggaaggcagcaggaggccacaagcccaccaggtcttcatgtcaagagagggagtaacatgtcttctcattgcccacggacccaacctctgtccaggtgcccctcatcatcacagtttaacacaagctcccctgctccagccaaattgatctcccagtcttgtccttacccattccaagtgctctgccagcccctgttcatccaagttttaagtcctccaccctgttataagagactgttccaacggctctgggcctcagtggtcacttgaccaccattgtctcagagctgcccactttgtgtgtgtcacatgctgcctgagtcacatgtacatcttatttctgcctctagttttgtaagctcctggagggcggataacatcttatactactcttgtattctcatggcacctagtgcagtgctgggcacagagtaggtgctcaataaagacttgttgaatgaa

SEQ ID NO: 194844 - DNA, 3478 bp, Homo sapiens
  Payload ID: 18486
  Gene Name: tripartite motif containing 26
  Uniprot ID: Q12899
  ENST ID: ENST00000454678
  CDS Start-End: 438-2057
aacagaccgccgtgagagaggaggggtgccggccgggattcgcggcccggagctcgggaccggagtcaggaatggagagaagggtaatggttttacctcttattgtggaaacctgttgagatcacagagaatatactgacggcataaaagggcagaaccatagcagggtgcggttgcttcattccagcctcgcagtcacctctgtgccctgctggttgtcttcccagcgctgctgtagttgccttccatggatctataggagagcaagtcctccaggagctggtggtgtctgtcgattgactgagtgctggagctggcagccctgtgcaggctgccacctttgcccctttactgtgcttgctcctgactctatgtcgcgtctccaaggagaagaagtcctcaccagtgaacggagacctctctgaactaaggataccatggccacgtcagccccactacggagcctggaagaggaggtgacctgctccatctgtcttgattacctgcgggaccctgtgaccattgactgtggccacgtcttctgccgcagctgcaccacagacgtccgccccatctcagggagccgccccgtctgcccactctgcaagaagccttttaagaaggagaacatccgacccgtgtggcaactggccagcctggtggagaacattgagcggctgaaggtggacaagggcaggcagccgggagaggtgacccgggagcagcaggatgcaaagttgtgcgagcgacaccgagagaagctgcactactactgtgaggacgacgggaagctgctgtgcgtgatgtgccgggagtcccgggagcacaggccccacacggccgtcctcatggagaaggccgcccagccccacagggaaaaaatcctgaaccacctgagtaccctaaggagggacagagacaaaattcagggcttccaggcaaagggagaagctgatatcctggccgcgctgaagaagctccaggaccagaggcagtacattgtggctgagtttgagcagggtcatcagttcctgagggagcgggaggaacacctgctggaacagctggcgaagctggagcaggagctcacggagggcagggagaagttcaagagccggggcgtcggggagcttgcccggctggccctggtcatctccgaactggagggcaaggcgcagcagccagctgcagagctcatgcaggacacgagagacttcctaaacaggtatccacggaagaagttctgggttgggaaacccattgctcgagtggttaaaaaaaagaccggagaattctcagataaactcctctctctgcaacgaggcctgagggaattccaggggaagctgctgagagacttggaatataagacagtgagcgtcaccctggacccacagtcggccagtgggtacctgcagctgtcagaggactggaagtgcgtgacctacaccagcctgtacaagagtgcctacctgcacccccagcagtttgactgtgagcctggggtgctaggcagcaagggcttcacctggggcaaggtctactgggaagtggaagtggagagggagggctggtctgaggatgaagaagagggggatgaggaggaagagggagaagaggaggaggaggaagaggaggccggctatggggatggatatgacgactgggaaacggacgaagatgaggaatcgttgggcgatgaagaggaagaagaggaggaggaagaggaggaagttctggaaagctgcatggtgggggtggctagagactctgtgaagaggaagggagacctctccctgcggccagaggatggcgtgtgggcgctgcgcctctcctcctccggcatctgggccaacaccagccccgaggctgagcttttcccagcactgcggccccggagagtgggcatcgccctggattatgaagggggcaccgtgactttcaccaacgcagagtcacaggaactcatctacaccttcactgccaccttcacccggcgcctggtccccttcctgtggctcaagtggccaggaacacgcctcctgctaagaccctgagccctgacatctgcccccagccccaaccctcagatgcttcacttctttggaattccaggactctcaatggggggacgggatgcctggcctaagcacctggagcaggggaccccatatccactggtagccacctccccattgctgtggccccctgaaatctcactcagtgctgttgctccatctactgccctaatggggctcttttcccacctcctgctggtttcccgagggaacttctgaccctggagtccatgagggctcctttcctttttgaccacgaccttggccccagctctgcactctctggaataagggcccgatgcagcattttcttgcccagtgtggcaagacctcagaaaaaccagtcaattacgcctaagatcattttgctgtccttaaaccccccaggttccttcttgcacaaatccactctgctgcccaccttccctggcattttaaacagacctaccccaccccaactcagagttaagcatacatggcaatgctgaaaataaacaaaatccactgaggcttcccaggccatttaaagcctggagtaccagcgcatatcatctcatggggtccagagtggagtccaggcttctctgaaaccagggctgagcatatttccatagccaaggaggtgggactccctggagctatctgtggtcttagggaaggatccagacatacacggctttggggtacaagctgtgatcactgatcaataaattatctctagattggtccttgtgaggggagttttaagaatccagaacatcttgctcttgatcagcacatccaaaaacaccaagacaaacatccagtggagcagaacctctcctgcctcgggagttctgaccgggttccccagcagggtgttaagcctctgtctctggccctaccagcatccaggttccactttcctaggagagagtggagatgggaagacagggaaaggaaggcagcaggaggccacaagcccaccaggtcttcatgtcaagagagggagtaacatgtcttctcattgcccacggacccaacctctgtccaggtgcccctcatcatcacagtttaacacaagctcccctgctccagccaaattgatctcccagtcttgtccttacccattccaagtgctctgccagcccctgttcatccaagttttaagtcctccaccctgttctaagagactgttccaacggctctgggcctcagtggtcacttgaccaccattgtctcagagctgcccactttgtgtgtgtcacatgctgcctgagtcacatgtacatcttatttctgcctctagttttgtaagctcctggagggcggataacatcttatactactcttgtattctcatggcacctagtgcagtgctgggcacagagtaggtgctcaataaagacttgttgaatgaa

SEQ ID NO: 194845 - DNA, 603 bp, Homo sapiens; identical to SEQ ID NO: 194804
  Payload ID: 18486
  Gene Name: tripartite motif containing 26
  ENST ID: ENST00000419171
  CDS Start-End: 132-603

SEQ ID NO: 194846 - DNA, 603 bp, Homo sapiens
  Payload ID: 18486
  Gene Name: tripartite motif containing 26
  ENST ID: ENST00000422881
  CDS Start-End: 132-603
gtgcaggagcgggacccggaacagaccgccgtgagagaggaggggcgccggccgggattcgcggcccggagctcgggaccggagaagaagtcctcaccagtgaacggagacctctctgaactaagaataccatggccacgtcagccccactacggagcctggaagaggaggtgacctgctccatctgtcttgattacctgcgggaccctgtgaccattgactgtggccacgtcttctgccgcagctgcaccacagacgtccgccccatctcagggagccgccccgtctgcccactctgcaagaagccttttaagaaggagaacatccgacccgtgtggcaactggccagcctggtggagaacattgagcggctgaaggtggacaagggcaggcagccgggagaggtgacccgggagcagcaggatgcaaagttgtgcgagcgacaccgagagaagctgcactactactgtgaggacgacgggaagctgctgtgcgtgatgtgccgggagtcccgggagcacaggccccacacggccgtcctcatggagaaggccgcccagccccacagggaaaaaatcctgaaccacctgagtaccctaagga

SEQ ID NO: 194847 - DNA, 1124 bp, Homo sapiens; identical to SEQ ID NO: 194809
  Payload ID: 18486
  Gene Name: tripartite motif containing 26
  ENST ID: ENST00000422802
  CDS Start-End: 380-1124

SEQ ID NO: 194848 - DNA, 1124 bp, Homo sapiens; identical to SEQ ID NO: 194809
  Payload ID: 18486
  Gene Name: tripartite motif containing 26
  ENST ID: ENST00000416596
  CDS Start-End: 380-1124

SEQ ID NO: 194849 - DNA, 3318 bp, Homo sapiens
  Payload ID: 18486
  Gene Name: tripartite motif containing 26
  Uniprot ID: Q12899
  ENST ID: ENST00000428486
  CDS Start-End: 278-1897
gggagattacggggcggggacgagctgtcgcgctggttgctcgtgcaggagcgggacccggaacagaccgccgtgagagaggaggggcgccggccgggattcgcggcccggagctcgggaccggttgcttcattccagcctcgcagtcacctctgtgccctgctggttgtcttcccagcgctgctgtagttgccttccatggatctataggagagcaagtcctccaggagaagaagtcctcaccagtgaacggagacctctctgaactaaggataccatggccacgtcagccccactacggagcctggaagaggaggtgacctgctccatctgtcttgattacctgcgggaccctgtgaccattgactgtggccacgtcttctgccgcagctgcaccacagacgtccgccccatctcagggagccgccccgtctgcccactctgcaagaagccttttaagaaggagaacatccgacccgtgtggcaactggccagcctggtggagaacattgagcggctgaaggtggacaagggcaggcagccgggagaggtgacccgggagcagcaggatgcaaagttgtgcgagcgacaccgagagaagctgcactactactgtgaggacgacgggaagctgctgtgcgtgatgtgccgggagtcccgggagcacaggccccacacggccgtcctcatggagaaggccgcccagccccacagggaaaaaatcctgaaccacctgagtaccctaaggagagacagagacaaaattcagggcttccaggcaaagggagaagctgatatcctggccgcgctgaagaagctccaggaccagaggcagtacattgtggctgagtttgagcagggtcatcagttcctgagggagcgggaggaacacctgctggaacagctggcgaagctggagcaggagctcacggagggcagggagaagttcaagagccggggcgtcggggagcttgcccggctggccctggtcatctccgaactggagggcaaggcgcagcagccagctgcagagctcatgcaggacacgagagacttcctaaacaggtatccacggaagaagttctgggttgggaaacccattgctcgagtggttaaaaaaaagaccggagaattctcagataaactcctctctctgcaacgaggcctgagggaattccaggggaagctgctgagagacttggaatataagacagtgagcgtcaccctggacccacagtcggccagtgggtacctgcagctgtcagaggactggaagtgcgtgacctacaccagcctgtacaagagtgcctacctgcacccccagcagtttgactgtgagcctggggtgctgggcagcaagggcttcacctggggcaaggtctactgggaagtggaagtggagagggagggctggtctgaggatgaagaagagggggatgaggaggaagagggagaagaggaggaggaggaagaggaggccggctatggggatggatatgacgactgggaaacggacgaagatgaggaatcgttgggcgatgaagaggaagaagaggaggaggaagaggaggaagttctggaaagctgcatggtgggggtggctagagactctgtgaagaggaagggagacctctccctgcggccagaggatggcgtgtgggcgctgcgcctctcctcctccggcatctgggccaacaccagccccgaggctgagcttttcccagcactgcggccccggagagtgggcatcgccctggattatgaagggggcaccgtgactttcaccaacgcagagtcacaggaactcatctacaccttcactgccaccttcacccggcgcctggtccccttcctgtggctcaagtggccaggaacacgcctcctgctaagaccctgagccctgacatctgcccccagccccaaccctcagatgcttcacttctttggaattccaggactctcaatggggggacgggatgcctggcctaagcacctggagcaggggaccccatatccactggtagccacctccccattgctgtggccccctgaaatctcactcagtgctgttgctccatctactgccctaatggggctcttttcccacctcctgctggtttcccgagggaacttctgaccctggagtccatgagggctcctttcctttttgaccacgaccttggccccagctctgcactctctggaataagggcccgatgcagcattttcttgcccagtgtggcaagacctcagaaaaaccagtcaattacgcctaagatcattttgctgtccttaaaccccccaggttccttcttgcacaaatccactctgctgcccaccttctctggcattttaaacagacctaccccaccccaactcagagttaagcatacatggcaatgctgaaaataaacaaaatccactgaggcttcccaggccatttaaagcctggagtaccagcgcatatcatctcatggggtccagagtggagtccaggcttctctgaaaccagggctgagcatatttccatagccaaggaggtgggactccctggagctatctgtggtcttagggaaggatccagacatacacggctttggggtacaagctgtgatcactgatcaataaattatctctagattggtccttgtgaggggagttttaagaatccagaacatcttgctcttgatcagcacatccaaaaacaccaagacaaacatccagtggagcagaacctctcctgcctcgggagttctgaccgggttccccagcagggtgttaagcctctgtctctggccctaccagcatccaggttccactttcctaggagagagtggagatgggaagacagggaaaggaaggcagcaggaggccacaagcccaccaggtcttcatgtcaagagagggagtaacatgtcttctcattgcccacggacccaacctctgtccaggtgcccctcatcatcacagtttaacacaagctcccctgctccagccaaattgatctcccagtcttgtccttacccattccaagtgctctgccagcccctgttcatccaagttttaagtcctccaccctgttctaagagactgttccaacggctctgggcctcagtggtcacttgaccaccattgtctcagagctgcccactttgtgtgtgtcacatgctgcctgagtcacatgtacatcttatttctgcctctagttttgtaagctcctggagggcggataacatcttatactactcttgtattctcatggcacctagtgcagtgctgggcacagagtaggtgctcaataaagacttgttgaatgaa

SEQ ID NO: 194850 - DNA, 3250 bp, Homo sapiens; identical to SEQ ID NO: 194819
  Payload ID: 18486
  Gene Name: tripartite motif containing 26
  Uniprot ID: Q12899
  ENST ID: ENST00000456770
  CDS Start-End: 210-1829

SEQ ID NO: 194851 - DNA, 3478 bp, Homo sapiens
  Payload ID: 18486
  Gene Name: tripartite motif containing 26
  Uniprot ID: Q12899
  ENST ID: ENST00000415923
  CDS Start-End: 438-2057
aacagaccgccgtgagagaggaggggcgccggccgggattcgcggcccggagctcgggaccggagtcaggaatggagagaagggtaatggtgttacctcttattgtggaaacctgttgagatcacagagaatatactgacggcataaaagggcagaaccatagcagggtgcggttgcttcattccagcctcgcagtcacctctgtgccctgctggttgtcttcccagcgctgctgtagttgccttccatggatctataggagagcaagtcctccaggagctggtggtgtctgtcgattgactgagtgctggagctggcagccctgtgcaggctgccacctttgcccctttactgtgcttgctcctgactctacgtcgcgtctccaaggagaagaagtcctcaccagtgaacggagacctctctgaactaaggataccatggccacgtcagccccactacggagcctggaagaggaggtgacctgctccatctgtcttgattacctgcgggaccctgtgaccattgactgtggccacgtcttctgccgcagctgcaccacagacgtccgccccatctcagggagccgccccgtctgcccactctgcaagaagccttttaagaaggagaacatccgacccgtgtggcaactggccagcctggtggagaacattgagcggctgaaggtggacaagggcaggcagccgggagaggtgacccgggagcagcaggatgcaaagttgtgcgagcgacaccgagagaagctgcactactactgtgaggacgacgggaagctgctgtgcgtgatgtgccgggagtcccgggagcacaggccccacacggccgtcctcatggagaaggccgcccagccccacagggaaaaaatcctgaaccacctgagtaccctaaggagagacagagacaaaattcagggcttccaggcaaagggagaagctgatatcctggccgcgctgaagaagctccaggaccagaggcagtacattgtggctgagtttgagcagggtcatcagttcctgagggagcgggaggaacacctgctggaacagctggcgaagctggagcaggagctcacggagggcagggagaagttcaagagccggggcgtcggggagcttgcccggctggccctggtcatctccgaactggagggcaaggcgcagcagccagctgcagagctcatgcaggacacgagagacttcctaaacaggtatccacggaagaagttctgggttgggaaacccattgctcgagtggttaaaaaaaagaccggagaattctcagataaactcctctctctgcaacgaggcctgagggaattccaggggaagctgctgagagacttggaatataagacagtgagcgtcaccctggacccacagtcggccagtgggtacctgcagctgtcagaggactggaagtgcgtgacctacaccagcctgtacaagagtgcctacctgcacccccagcagtttgactgtgagcctggggtgctgggcagcaagggcttcacctggggcaaggtctactgggaagtggaagtggagagggagggctggtctgaggatgaagaagagggggatgaggaggaagagggagaagaggaggaggaggaagaggaggccggctatggggatggatatgacgactgggaaacggacgaagatgaggaatcgttgggcgatgaagaggaagaagaggaggaggaagaggaggaagttctggaaagctgcatggtgggggtggctagagactctgtgaagaggaagggagacctctccctgcggccagaggatggcgtgtgggcgctgcgcctctcctcctccggcatctgggccaacaccagccccgaggctgagcttttcccagcactgcggccccggagagtgggcatcgccctggattatgaagggggcaccgtgactttcaccaacgcagagtcacaggaactcatctacaccttcactgccaccttcacccggcgcctggtccccttcctgtggctcaagtggccaggaacacgcctcctgctaagaccctgagccctgacatctgcccccagccccaaccctcagatgcttcacttctttggaattccaggactctcaatggggggacgggatgcctggcctaagcacctggagcaggggaccccatatccactggtagccacctccccattgctgtggccccctgaaatctcactcagtgctgttgctccatctactgccctaatggggctcttttcccacctcctgctggtttcccgagggaacttctgaccctggagtccatgagggctcctttcctttttgaccacgaccttggccccagctctgcactctctggaataagggcccgatgcagcattttcttgcccagtgtggcaagacctcagaaaaaccagtcaattacgcctaagatcattttgctgtccttaaaccccccaggttccttcttgcacaaatccactctgctgcccaccttctctggcattttaaacagacctaccccaccccaactcagagttaagcatacatggcaatgctgaaaataaacaaaatccactgaggcttcccaggccatttaaagcctggagtaccagcgcatatcatctcatggggtccagagtggagtccaggcttctctgaaaccagggctgagcatatttccatagccaaggaggtgggactccctggagctatctgtggtcttagggaaggatccagacatacacggctttggggtacaagctgtgatcactgatcaataaattatctctagattggtccttgtgaggggagttttaagaatccagaacatcttgctcttgatcagcacatccaaaaacaccaagacaaacatccagtggagcagaacctctcctgcctcgggagttctgaccgggttccccagcagggtgttaagcctctgtctctggccctaccagcatccaggttccactttcctaggagagagtggagatgggaagacagggaaaggaaggcagcaggaggccacaagcccaccaggtcttcatgtcaagagagggagtaacatgtcttctcattgcccacggacccaacctctgtccaggtgcccctcatcatcacagtttaacacaagctcccctgctccagccaaattgatctcccagtcttgtccttacccattccaagtgctctgccagcccctgttcatccaagttttaagtcctccaccctgttctaagagactgttccaacggctctgggcctcagtggtcacttgaccaccattgtctcagagctgcccactttgtgtgtgtcacatgctgcctgagtcacatgtacatcttatttctgcctctagttttgtaagctcctggagggcggataacatcttatactactcttgtattctcatggcacctagtgcagtgctgggcacagagtaggtgctcaataaagacttgttgaatgaa

SEQ ID NO: 194852 - DNA, 682 bp, Homo sapiens
  Payload ID: 18486
  Gene Name: tripartite motif containing 26
  ENST ID: ENST00000450103
  CDS Start-End: 206-682
ggaaacctgttgagatcacagagaatatactgacggcataaaagggcagaaccatagcagggtgcgcctcgcagtcacctctgtgccctgctggttgtcttcccagcgctgctgtagttgccttccatggatctataggagagcaagtcctccaggagaagaagtcctcaccagtgaacggagacctctctgaactaaggataccatggccacgtcagccccactacggagcctggaagaggaggtgacctgctccatctgtcttgattacctgcgggaccctgtgaccattgactgtggccacgtcttctgccgcagctgcaccacagacgtccgccccatctcagggagccgccccgtctgcccactctgcaagaagccttttaagaaggagaacatccgacccgtgtggcaactggaaaaaatcctgaaccacctgagtaccctaaggagagacagagacaaaattcagggcttccaggcaaagggagaagctgatatcctggccgcgctgaagaagctccaggaccagaggcagtacattgtggctgagtttgagcagggtcatcagttcctgagggagcgggaggaacacctgctggaacagctggcgaagctggagcaggagctcacggagggcagggagaagttcaagagccggggcgtcggggagcttgcccgg

SEQ ID NO: 194853 - DNA, 603 bp, Homo sapiens; identical to SEQ ID NO: 194804
  Payload ID: 18486
  Gene Name: tripartite motif containing 26
  ENST ID: ENST00000453442
  CDS Start-End: 132-603

SEQ ID NO: 194854 - DNA, 3250 bp, Homo sapiens; identical to SEQ ID NO: 194822
  Payload ID: 18486
  Gene Name: tripartite motif containing 26
  Uniprot ID: Q12899
  ENST ID: ENST00000438384
  CDS Start-End: 210-1829

SEQ ID NO: 194855 - DNA, 2686 bp, Homo sapiens
  Payload ID: 18487
  Gene Name: tripartite motif containing 27
  Uniprot ID: P14373
  ENST ID: ENST00000377194
  CDS Start-End: 357-1433
tttacgctgccgccggcatccgctcggacgcggccacgttgtcttgcgcgctttgcccgcctggccctgggactctgaccctcggctaccctttcctgccccactagcgtggccgcgagcctcggtgagccggccgtattcccgctctcgcttagggggcacaggcgcaggcatcggcccggccactccaagccttcggtgcgcgggcgcgtctgggatacgggcccgggaggcgccgccctccgtccgcccggtgcctctcaggaacagcgaaccggagagagcgccggagagttgggctcagtgcagagctcggcgccggggcccatgcccgtgcgcccccgcaggccggcgccatggcctccgggagtgtggccgagtgcctgcagcaggagaccacctgccccgtgtgcctgcagtacttcgcagagcccatgatgctcgactgcggccataacatctgttgcgcgtgcctcgcccgctgctggggcacggcagagactaacgtgtcgtgcccgcagtgccgggagaccttcccgcagaggcacatgcggcccaaccggcacctggccaacgtgacccaactggtaaagcagctgcgcaccgagcggccgtcggggcccggcggcgagatgggcgtgtgcgagaagcaccgcgagcccctgaagctgtactgcgaggaggaccagatgcccatctgcgtggtgtgcgaccgctcccgcgagcaccgcggccacagcgtgctgccgctcgaggaggcggtggagggcttcaaggagcaaatccagaaccagctcgaccatttaaaaagagtgaaagatttaaagaagagacgtcgggcccagggggaacaggcacgagctgaactcttgagcctaacccagatggagagggagaagattgtttgggagtttgagcagctgtatcactccttaaaggagcatgagtatcgcctcctggcccgccttgaggagctagacttggccatctacaatagcatcaatggtgccatcacccagttctcttgcaacatctcccacctcagcagcctgatcgctcagctagaagagaagcagcagcagcccaccagggagctcctgcaggacattggggacacattgagcagggctgaaagaatcaggattcctgaaccttggatcacacctccagatttgcaagagaaaatccacatttttgcccaaaaatgtctattcttgacggagagtctaaagcagttcacagaaaaaatgcagtcagatatggagaaaatccaagaattaagagaggctcagttatactcagtggacgtgactctggacccagacacggcctaccccagcctgatcctctctgataatctgcggcaagtgcggtacagttacctccaacaggacctgcctgacaaccccgagaggtctccttctacaacgtgacagagaggtgtcacaccttcactttctctcatgctaccttttgtgggcctgtccggccctacttcagtctgagttactcgggagggaaaagtgcagctcctctgatcatctgccccatgagtgggatagatgggttttctggccatgttgggaatcatggtcattccatggagacctccccttgaggaggtgaattcaggccaaaagggctgttggctgtaatcctacgccaggcacaaggcatcttgttgccttgccacgtcctgtcacagctgggtatccttaccatgttccacgcccttgcagtgggagacaggatgtccatgttctctaccatccttttccttcccatgcagattgtgaaatgtaatgagatgtatcaagatatcctagaaataaaaaccagatgtccacctccagtgtttcatactttctggttttacacatcgctggagggataaagagtatggataatctttggatttggagagccgttcaagatacttccagcttcttggctcagcctggcttcctctggttcagccccacataatgattatggctatttgctgtcatttctgggctagggctcctttctaacaacctagactggaataaggccctgtcagcatggctccctttatcccagttttccgtctgggaacagtacctctgcccctgattcccaatgtgccatagttttattaactccattaaagaagcctgtatgtgttttggttagttacagttattttacaataatggtgggtaatggccccacctctgttatgagataatgttctaatcaatgtctctgcctttgtatcttttctgagggctttgtctgttctcttcattctaatgaaaggtgtattctagtgctgggtgcatatcatccaggataatattctgcccaactccatcctctgttactagatcccttaccagtcacatttgtggactggtggccagtcgtataccatccctggaaggattctgggacaatattccagggattcattgacttcttggctccttttctccatttcctttgggggaagggggaattgaccatgcttaagtgcatcctatcaaggggcagctccgtccccatggccattggatcatgagacactctgaagtcagaaggctggggcagatcacttcaagcaagcccccatgatggttctcagtcctgcttctctgtgggtacgtgcccctctgtttaaaaataaactgaatatggatgttta

SEQ ID NO: 194856 - DNA, 2967 bp, Homo sapiens
  Payload ID: 18487
  Gene Name: tripartite motif containing 27
  Uniprot ID: P14373
  ENST ID: ENST00000377199
  CDS Start-End: 358-1899
gtttacgctgccgccggcatccgctcggacgcggccacgttgtcttgcgcgctttgcccgcctggccctgggactctgaccctcggctaccctttcctgccccactagcgtggccgcgagcctcggtgagccggccgtattcccgctctcgcttagggggcacaggcgcaggcatcggcccggccactccaagccttcggtgcgcgggcgcgtctgggatacgggcccgggaggcgccgccctccgtccgcccggtgcctctcaggaacagcgaaccggagagagcgccggagagttgggctcagtgcagagctcggcgccggggcccatgcccgtgcgcccccgcaggccggcgccatggcctccgggagtgtggccgagtgcctgcagcaggagaccacctgccccgtgtgcctgcagtacttcgcagagcccatgatgctcgactgcggccataacatctgttgcgcgtgcctcgcccgctgctggggcacggcagagactaacgtgtcgtgcccgcagtgccgggagaccttcccgcagaggcacatgcggcccaaccggcacctggccaacgtgacccaactggtaaagcagctgcgcaccgagcggccgtcggggcccggcggcgagatgggcgtgtgcgagaagcaccgcgagcccctgaagctgtactgcgaggaggaccagatgcccatctgcgtggtgtgcgaccgctcccgcgagcaccgcggccacagcgtgctgccgctcgaggaggcggtggagggcttcaaggagcaaatccagaaccagctcgaccatttaaaaagagtgaaagatttaaagaagagacgtcgggcccagggggaacaggcacgagctgaactcttgagcctaacccagatggagagggagaagattgtttgggagtttgagcagctgtatcactccttaaaggagcatgagtatcgcctcctggcccgccttgaggagctagacttggccatctacaatagcatcaatggtgccatcacccagttctcttgcaacatctcccacctcagcagcctgatcgctcagctagaagagaagcagcagcagcccaccagggagctcctgcaggacattggggacacattgagcagggctgaaagaatcaggattcctgaaccttggatcacacctccagatttgcaagagaaaatccacatttttgcccaaaaatgtctattcttgacggagagtctaaagcagttcacagaaaaaatgcagtcagatatggagaaaatccaagaattaagagaggctcagttatactcagtggacgtgactctggacccagacacggcctaccccagcctgatcctctctgataatctgcggcaagtgcggtacagttacctccaacaggacctgcctgacaaccccgagaggttcaatctgtttccctgtgtcttgggctctccatgcttcatcgccgggagacattattgggaggtagaggtgggagataaagccaagtggaccataggtgtctgtgaagactcagtgtgcagaaaaggtggagtaacctcagccccccagaatggattctgggcagtgtctttgtggtatgggaaagaatattgggctcttacctccccaatgactgccctacccctgcggaccccgctccagcgggtggggattttcttggactatgatgctggtgaggtctccttctacaacgtgacagagaggtgtcacaccttcactttctctcatgctaccttttgtgggcctgtccggccctacttcagtctgagttactcgggagggaaaagtgcagctcctctgatcatctgccccatgagtgggatagatgggttttctggccatgttgggaatcatggtcattccatggagacctccccttgaggaggtgaattcaggccaaaagggctgttggctgtaatcctacgccaggcacaaggcatcttgttgccttgccacgtcctgtcacagctgggtatccttaccatgttccacgcccttgcagtgggagacaggatgtccatgttctctaccatccttttccttcccatgcagattgtgaaatgtaatgagatgtatcaagatatcctagaaataaaaaccagatgtccacctccagtgtttcatactttctggttttacacatcgctggagggataaagagtatggataatctttggatttggagagccgttcaagatacttccagcttcttggctcagcctggcttcctctggttcagccccacataatgattatggctatttgctgtcatttctgggctagggctcctttctaacaacctagactggaataaggccctgtcagcatggctccctttatcccagttttccgtctgggaacagtacctctgcccctgattcccaatgtgccatagttttattaactccattaaagaagcctgtatgtgttttggttagttacagttattttacaataatggtgggtaatggccccacctctgttatgagataatgttctaatcaatgtctctgcctttgtatcttttctgagggctttgtctgttctcttcattctaatgaaaggtgtattctagtgctgggtgcatatcatccaggataatattctgcccaactccatcctctgttactagatcccttaccagtcacatttgtggactggtggccagtcgtataccatccctggaaggattctgggacaatattccagggattcattgacttcttggctccttttctccatttcctttgggggaagggggaattgaccatgcttaagtgcatcctatcaaggggcagctccgtccccatggccattggatcatgagacactctgaagtcagaaggctggggcagatcacttcaagcaagcccccatgatggttctcagtcctgcttctctgtgggtacgtgcccctctgtttaaaaataaactgaatatggatgttta

SEQ ID NO: 194857 - DNA, 2967 bp, Homo sapiens; identical to SEQ ID NO: 194856
  Payload ID: 18487
  Gene Name: tripartite motif containing 27
  Uniprot ID: P14373
  ENST ID: ENST00000400720
  CDS Start-End: 358-1899

SEQ ID NO: 194858 - DNA, 2686 bp, Homo sapiens
  Payload ID: 18487
  Gene Name: tripartite motif containing 27
  Uniprot ID: P14373
  ENST ID: ENST00000427689
  CDS Start-End: 357-1433
tttacgctgccgccggcatccgctcggacgcggccacgttgtcttgcgcgctttgcccgcctggccctgggactctgaccctcggctaccctttcctgccccactagcgtggccgcgagcctcggtgagccggccgtattcccgctctcgcttagggggcacaggcgcaggcatcggcccggccactccaagccttcggtgcgcgggcgcgtctgggatacgggcccgggaggcgccgccctccgtccgcccggtgcctctcaggaacagcgaaccggagagagcgccggagagttgggctcagtgcagagctcggcgccggggcccatgcccgtgcgcccccgcaggccggcgccatggcctccgggagtgtggccgagtgcctgcagcaggagaccacctgccccgtgtgcctgcagtacttcgcagagcccatgatgctcgactgcggccataacatctgttgcgcgtgcctcgcccgctgctggggcacggcagagactaacgtgtcgtgcccgcagtgccgggagaccttcccgcagaggcacatgcggcccaaccggcacctggccaacgtgacccaactggtgaagcagctgcgcaccgagcggccgtcggggcccggcggcgagatgggcgtgtgcgagaagcaccgcgagcccctgaagctgtactgcgaggaggaccagatgcccatctgcgtggtgtgcgaccgctcccgcgagcaccgcggccacagcgtgctgccgctcgaggaggcggtggagggcttcaaggagcaaatccagaaccagctcgaccatttaaaaagagtgaaagatttaaagaagagacgtcgggcccagggggaacaggcacgagctgaactcttgagcctaacccagatggagagggagaagattgtttgggagtttgagcagctgtatcactccttaaaggagcatgagtatcgcctcctggcccgccttgaggagctagacttggccatctacaatagcatcaatggtgccatcacccagttctcttgcaacatctcccacctcagcagcctgatcgctcagctagaagagaagcagcagcagcccaccagggagctcctgcaggacattggggacacattgagcagggctgaaagaatcaggattcctgaaccttggatcacacctccagatttgcaagagaaaatccacatttttgcccaaaaatgtctattcttgacggagagtctaaagcagttcacagaaaaaatgcagtcagatatggagaaaatccaagaattaagagaggctcagttatactcagtggacgtgactctggacccagacacggcctaccccagcctgatcctctctgataatctgcggcaagtgcggtacagttacctccaacaggacctgcctgacaaccccgagaggtctccttctacaacgtgacagagaggtgtcacaccttcactttctctcatgctaccttttgtgggcctgtccggccctacttcagtctgagttactcgggagggaaaagtgcagctcctctgatcatctgccccatgagtgggatagatgggttttctggccatgttgggaatcatggtcattccatggagacctccccttgaggaggtgaattcaggccaaaagggctgttggctgtaatcctacgccaggcacaaggcatcttgttgccttgccacgtcctgtcacagctgggtatccttaccatgttccacgcccttgcagtgggagacaggatgtccatgttctctaccatccttttccttcccatgcagattgtgaaatgtaatgagatgtatcaagatatcctagaaataaaaaccagatgtccacctccagtgtttcatactttctggttttacacatcgctggagggataaagagtatggataatctttggatttggagagccgttcaagatacttccagcttcttggctcagcctggcttcctctggttcagccccacataatgattatggctatttgctgtcatttctgggctagggctcctttctaacaacctagactggaataaggccctgtcagcatggctccctttatcccagttttccgtctgggaacagtacctctgcccctgattcccaatgtgccatagttttattaactccattaaagaagcctgtatgtgttttggttagttacagttattttacaataatggtgggtaatggccccacctctgttatgagataatgttctaatcaatgtctctgcctttgtatcttttctgagggctttgtctgttctcttcattctaatgaaaggtgtattctagtgctgggtgcatatcatccaggataatattctgcccaactccatcctctgttactagatcccttaccagtcacatttgtggactggtggccagtcgtataccatccctggaaggattctgggacaatattccagggattcattgacttcttggctccttttctccatttcctttgggggaagggggaattgaccatgcttaagtgcatcctatcaaggggcagctccgtccccatggccattggatcatgagacactctgaagtcagaaggctggggcagatcacttcaagcaagcccccatgatggttctcagtcctgcttctctgtgggtacgtgcccctctgtttaaaaataaactgaatatggatgttta

SEQ ID NO: 194859 - DNA, 2967 bp, Homo sapiens; identical to SEQ ID NO: 194856
  Payload ID: 18487
  Gene Name: tripartite motif containing 27
  Uniprot ID: P14373
  ENST ID: ENST00000437160
  CDS Start-End: 358-1899

SEQ ID NO: 194860 - DNA, 1813 bp, Homo sapiens
  Payload ID: 18487
  Gene Name: tripartite motif containing 27
  ENST ID: ENST00000453610
  CDS Start-End: 1-745
tctaaagcagttcacagaaaaaatgcagtcagatatggagaaaatccaagaatcagctgactcactggaaggtggaattcttgatcttggctcagttttatcccatattctaccagtctcagaattaagagaggctcagttatactcagtggacgtgactctggacccagacacggcctaccccagcctgatcctctctgataatctgcggcaagtgcggtacagttacctccaacaggacctgcctgacaaccccgagaggttcaatctgtttccctgtgtcttgggctctccatgcttcatcgccgggagacattattgggaggtagaggtgggagataaagccaagtggaccataggtgtctgtgaagactcagtgtgcagaaaaggtggagtaacctcagccccccagaatggattctgggcagtgtctttgtggtatgggaaagaatattgggctcttacctccccaatgactgccctacccctgcggaccccgctccagcgggtggggattttcttggactatgatgctggtgaggtctccttctacaacgtgacagagaggtgtcacaccttcactttctctcatgctaccttttgtgggcctgtccggccctacttcagtctgagttactcgggagggaaaagtgcagctcctctgatcatctgccccatgagtgggatagatgggttttctggccatgttgggaatcatggtcattccatggagacctccccttgaggaggtgaattcaggccaaaagggctgttggctgtaatcctacgccaggcacaaggcatcttgttgccttgccacgtcctgtcacagctgggtatccttaccatgttccacgcccttgcagtgggagacaggatgtccatgttctctaccatccttttccttcccatgcagattgtgaaatgtaatgagatgtatcaagatatcctagaaataaaaaccagatgtccacctccagtgtttcatactttctggttttacacatcgctggagggataaagagtatggataatctttggatttggagagccgttcaagatacttccagcttcttggctcagcctggcttcctctggttcagccccacataatgattatggctatttgctgtcatttctgggctagggctcctttctaacaacctagactggaataaggccctgtcagcatggctccctttatcccagttttccgtctgggaacagtacctctgcccctgattcccaatgtgccatagttttattaactccattaaagaagcctgtatgtgttttggttagttacagttattttacaataatggtgggtaatggccccacctctgttatgagataatgttctaatcaatgtctctgcctttgtatcttttctgagggctttgtctgttctcttcattctaatgaaaggtgtattctagtgctgggtgcatatcatccaggataatattctgcccaactccatcctctgttactagatcccttaccagtcacatttgtggactggtggccagtcgtataccatccctggaaggattctgggacaatattccagggattcattgacttcttggctccttttctccatttcctttgggggaagggggaattgaccatgcttaagtgcatcctatcaaggggcagctccgtccccatggccattggatcatgagacactctgaagtcagaaggctggggcagatcacttcaagcaagcccccatgatggttctcagtcctgcttctctgtgggtacgtgcccctctgtttaaaaataaactgaatatggatgttta

SEQ ID NO: 194861 - DNA, 1103 bp, Homo sapiens
  Payload ID: 18487
  Gene Name: tripartite motif containing 27
  ENST ID: ENST00000430891
  CDS Start-End: 357-1103
tttacgctgccgccggcatccgctcggacgcggccacgttgtcttgcgcgctttgcccgcctggccctgggactctgaccctcggctaccctttcctgccccactagcgtggccgcgagcctcggtgagccggccgtattcccgctctcgcttagggggcacaggcgcaggcatcggcccggccactccaagccttcggtgcgcgggcgcgtctgggatacgggcccgggaggcgccgccctccgtccgcccggtgcctctcaggaacagcgaaccggagagagcgccggagagttgggctcagtgcggagctcggcgccggggcccatgcccgtgcgcccccgcaggccggcgccatggcctccgggagtgtggccgagtgcctgcagcaggagaccacctgccccgtgtgcctgcagtacttcgcagagcccatgatgctcgactgcggccataacatctgttgcgcgtgcctcgcccgctgctggggcacggcagagactaacgtgtcgtgcccgcagtgccgggagaccttcccgcagaggcacatgcggcccaaccggcacctggccaacgtgacccaactggtaaagcagctgcgcaccgagcggccgtcggggcccggcggcgagatgggcgtgtgcgagaagcaccgcgagcccctgaagctgtactgcgaggaggaccagatgcccatctgcgtggtgtgcgaccgctcccgcgagcaccgcggccacagcgtgctgccgctcgaggaggcggtggagggcttcaaggagcaaatccagaaccagctcgaccatttaaaaagagtgaaagatttaaagaagagacgtcgggcccagggggaacaggcacgagctgaactcttgagcctaacccagatggagagggagaagattgtttgggagtttgagcagctgtatcactccttaaaggagcatgagtatcgcctcctggcccgccttgaggagctagacttggccatctacaatagcatcaatggtgccatcacccagttctcttgcaacatctcccacctcagcagcctgatcgctcagctagaagagaagcagcagcagcccaccagggagctcctgcag

SEQ ID NO: 194862 - DNA, 1813 bp, Homo sapiens; identical to SEQ ID NO: 194860
  Payload ID: 18487
  Gene Name: tripartite motif containing 27
  ENST ID: ENST00000417993
  CDS Start-End: 1-745

SEQ ID NO: 194863 - DNA, 1691 bp, Homo sapiens
  Payload ID: 18487
  Gene Name: tripartite motif containing 27
  ENST ID: ENST00000445968
  CDS Start-End: 1-623
aattaagagaggctcagttatactcagtggacgtgactctggacccagacacggcctaccccagcctgatcctctctgataatctgcggcaagtgcggtacagttacctccaacaggacctgcctgacaaccccgagaggttcaatctgtttccctgtgtcttgggctctccatgcttcatcgccgggagacattattgggaggtagaggtgggagataaagccaagtggaccataggtgtctgtgaagactcagtgtgcagaaaaggtggagtaacctcagccccccagaatggattctgggcagtgtctttgtggtatgggaaagaatattgggctcttacctccccaatgactgccctacccctgcggaccccgctccagcgggtggggattttcttggactatgatgctggtgaggtctccttctacaacgtgacagagaggtgtcacaccttcactttctctcatgctaccttttgtgggcctgtccggccctacttcagtctgagttactcgggagggaaaagtgcagctcctctgatcatctgccccatgagtgggatagatgggttttctggccatgttgggaatcatggtcattccatggagacctccccttgaggaggtgaattcaggccaaaagggctgttggctgtaatcctacgccaggcacaaggcatcttgttgccttgccacgtcctgtcacagctgggtatccttaccatgttccacgcccttgcagtgggagacaggatgtccatgttctctaccatccttttccttcccatgcagattgtgaaatgtaatgagatgtatcaagatatcctagaaataaaaaccagatgtccacctccagtgtttcatactttctggttttacacatcgctggagggataaagagtatggataatctttggatttggagagccgttcaagatacttccagcttcttggctcagcctggcttcctctggttcagccccacataatgattatggctatttgctgtcatttctgggctagggctcctttctaacaacctagactggaataaggccctgtcagcatggctccctttatcccagttttccgtctgggaacagtacctctgcccctgattcccaatgtgccatagttttattaactccattaaagaagcctgtatgtgttttggttagttacagttattttacaataatggtgggtaatggccccacctctgttatgagataatgttctaatcaatgtctctgcctttgtatcttttctgagggctttgtctgttctcttcattctaatgaaaggtgtattctagtgctgggtgcatatcatccaggataatattctgcccaactccatcctctgttactagatcccttaccagtcacatttgtggactggtggccagtcgtataccatccctggaaggattctgggacaatattccagggattcattgacttcttggctccttttctccatttcctttgggggaagggggaattgaccatgcttaagtgcatcctatcaaggggcagctccgtccccatggccattggatcatgagacactctgaagtcagaaggctggggcagatcacttcaagcaagcccccatgatggttctcagtcctgcttctctgtgggtacgtgcccctctgtttaaaaataaactgaatatggatgttta

SEQ ID NO: 194864 - DNA, 1813 bp, Homo sapiens; identical to SEQ ID NO: 194860
  Payload ID: 18487
  Gene Name: tripartite motif containing 27
  ENST ID: ENST00000414543
  CDS Start-End: 1-745

SEQ ID NO: 194865 - DNA, 1813 bp, Homo sapiens; identical to SEQ ID NO: 194860
  Payload ID: 18487
  Gene Name: tripartite motif containing 27
  ENST ID: ENST00000430208
  CDS Start-End: 1-745

SEQ ID NO: 194866 - DNA, 1104 bp, Homo sapiens
  Payload ID: 18487
  Gene Name: tripartite motif containing 27
  ENST ID: ENST00000455861
  CDS Start-End: 358-1104
gtttacgctgccgccggcatccgctcggacgcggccacgttgtcttgcgcgctttgcccgcctggccctgggactctgaccctcggctaccctttcctgccccactagcgtggccgcgagcctcggtgagccggccgtattcccgctctcgcttagggggcacaggcgcaggcatcggcccggccactccaagccttcggtgcgcgggcgcgtctgggatacgggcccgggaggcgccgccctccgtccgcccggtgcctctcaggaacagcgaaccggagagagcgccggagagttgggctcagtgcggagctcggcgccggggcccatgcccgtgcgcccccgcaggccggcgccatggcctccgggagtgtggccgagtgcctgcagcaggagaccacctgccccgtgtgcctgcagtacttcgcagagcccatgatgctcgactgcggccataacatctgttgcgcgtgcctcgcccgctgctggggcacggcagagactaacgtgtcgtgcccgcagtgccgggagaccttcccgcagaggcacatgcggcccaaccggcacctggccaacgtgacccaactggtaaagcagctgcgcaccgagcggccgtcggggcccggcggcgagatgggcgtgtgcgagaagcaccgcgagcccctgaagctgtactgcgaggaggaccagatgcccatctgcgtggtgtgcgaccgctcccgcgagcaccgcggccacagcgtgctgccgctcgaggaggcggtggagggcttcaaggagcaaatccagaaccagctcgaccatttaaaaagagtgaaagatttaaagaagagacgtcgggcccagggggaacaggcacgagctgaactcttgagcctaacccagatggagagggagaagattgtttgggagtttgagcagctgtatcactccttaaaggagcatgagtatcgcctcctggcccgccttgaggagctagacttggccatctacaatagcatcaatggtgccatcacccagttctcttgcaacatctcccacctcagcagcctgatcgctcagctagaagagaagcagcagcagcccaccagggagctcctgcag

SEQ ID NO: 194867 - DNA, 2967 bp, Homo sapiens
  Payload ID: 18487
  Gene Name: tripartite motif containing 27
  Uniprot ID: P14373
  ENST ID: ENST00000435528
  CDS Start-End: 358-1899
gtttacgctgccgccggcatccgctcggacgcggccacgttgtcttgcgcgctttgcccgcctggccctgggactctgaccctcggctaccctttcctgccccactagcgtggccgcgagcctcggtgagccggccgtattcccgctctcgcttagggggcacaggcgcaggcatcggcccggccactccaagccttcggtgcgcgggcgcgtctgggatacgggcccgggaggcgccgccctccgtccgcccggtgcctctcaggaacagcgaaccggagagagcgccggagagttgggctcagtgcagagctcggcgccggggcccatgcccgtgcgcccccgcaggccggcgccatggcctccgggagtgtggccgagtgcctgcagcaggagaccacctgccccgtgtgcctgcagtacttcgcagagcccatgatgctcgactgcggccataacatctgttgcgcgtgcctcgcccgctgctggggcacggcagagactaacgtgtcgtgcccgcagtgccgggagaccttcccgcagaggcacatgcggcccaaccggcacctggccaacgtgacccaactggtgaagcagctgcgcaccgagcggccgtcggggcccggcggcgagatgggcgtgtgcgagaagcaccgcgagcccctgaagctgtactgcgaggaggaccagatgcccatctgcgtggtgtgcgaccgctcccgcgagcaccgcggccacagcgtgctgccgctcgaggaggcggtggagggcttcaaggagcaaatccagaaccagctcgaccatttaaaaagagtgaaagatttaaagaagagacgtcgggcccagggggaacaggcacgagctgaactcttgagcctaacccagatggagagggagaagattgtttgggagtttgagcagctgtatcactccttaaaggagcatgagtatcgcctcctggcccgccttgaggagctagacttggccatctacaatagcatcaatggtgccatcacccagttctcttgcaacatctcccacctcagcagcctgatcgctcagctagaagagaagcagcagcagcccaccagggagctcctgcaggacattggggacacattgagcagggctgaaagaatcaggattcctgaaccttggatcacacctccagatttgcaagagaaaatccacatttttgcccaaaaatgtctattcttgacggagagtctaaagcagttcacagaaaaaatgcagtcagatatggagaaaatccaagaattaagagaggctcagttatactcagtggacgtgactctggacccagacacggcctaccccagcctgatcctctctgataatctgcggcaagtgcggtacagttacctccaacaggacctgcctgacaaccccgagaggttcaatctgtttccctgtgtcttgggctctccatgcttcatcgccgggagacattattgggaggtagaggtgggagataaagccaagtggaccataggtgtctgtgaagactcagtgtgcagaaaaggtggagtaacctcagccccccagaatggattctgggcagtgtctttgtggtatgggaaagaatattgggctcttacctccccaatgactgccctacccctgcggaccccgctccagcgggtggggattttcttggactatgatgctggtgaggtctccttctacaacgtgacagagaggtgtcacaccttcactttctctcatgctaccttttgtgggcctgtccggccctacttcagtctgagttactcgggagggaaaagtgcagctcctctgatcatctgccccatgagtgggatagatgggttttctggccatgttgggaatcatggtcattccatggagacctccccttgaggaggtgaattcaggccaaaagggctgttggctgtaatcctacgccaggcacaaggcatcttgttgccttgccacgtcctgtcacagctgggtatccttaccatgttccacgcccttgcagtgggagacaggatgtccatgttctctaccatccttttccttcccatgcagattgtgaaatgtaatgagatgtatcaagatatcctagaaataaaaaccagatgtccacctccagtgtttcatactttctggttttacacatcgctggagggataaagagtatggataatctttggatttggagagccgttcaagatacttccagcttcttggctcagcctggcttcctctggttcagccccacataatgattatggctatttgctgtcatttctgggctagggctcctttctaacaacctagactggaataaggccctgtcagcatggctccctttatcccagttttccgtctgggaacagtacctctgcccctgattcccaatgtgccatagttttattaactccattaaagaagcctgtatgtgttttggttagttacagttattttacaataatggtgggtaatggccccacctctgttatgagataatgttctaatcaatgtctctgcctttgtatcttttctgagggctttgtctgttctcttcattctaatgaaaggtgtattctagtgctgggtgcatatcatccaggataatattctgcccaactccatcctctgttactagatcccttaccagtcacatttgtggactggtggccagtcgtataccatccctggaaggattctgggacaatattccagggattcattgacttcttggctccttttctccatttcctttgggggaagggggaattgaccatgcttaagtgcatcctatcaaggggcagctccgtccccatggccattggatcatgagacactctgaagtcagaaggctggggcagatcacttcaagcaagcccccatgatggttctcagtcctgcttctctgtgggtacgtgcccctctgtttaaaaataaactgaatatggatgttta

SEQ ID NO: 194868 - DNA, 1763 bp, Homo sapiens
  Payload ID: 18487
  Gene Name: tripartite motif containing 27
  ENST ID: ENST00000443804
  CDS Start-End: 1-695
aatcagctgactcactggaaggtggaattcttgatcttggctcagttttatcccatattctaccagtctcagaattaagagaggctcagttatactcagtggacgtgactctggacccagacacggcctaccccagcctgatcctctctgataatctgcggcaagtgcggtacagttacctccaacaggacctgcctgacaaccccgagaggttcaatctgtttccctgtgtcttgggctctccatgcttcatcgccgggagacattattgggaggtagaggtgggagataaagccaagtggaccataggtgtctgtgaagactcagtgtgcagaaaaggtggagtaacctcagccccccagaatggattctgggcagtgtctttgtggtatgggaaagaatattgggctcttacctccccaatgactgccctacccctgcggaccccgctccagcgggtggggattttcttggactatgatgctggtgaggtctccttctacaacgtgacagagaggtgtcacaccttcactttctctcatgctaccttttgtgggcctgtccggccctacttcagtctgagttactcgggagggaaaagtgcagctcctctgatcatctgccccatgagtgggatagatgggttttctggccatgttgggaatcatggtcattccatggagacctccccttgaggaggtgaattcaggccaaaagggctgttggctgtaatcctacgccaggcacaaggcatcttgttgccttgccacgtcctgtcacagctgggtatccttaccatgttccacgcccttgcagtgggagacaggatgtccatgttctctaccatccttttccttcccatgcagattgtgaaatgtaatgagatgtatcaagatatcctagaaataaaaaccagatgtccacctccagtgtttcatactttctggttttacacatcgctggagggataaagagtatggataatctttggatttggagagccgttcaagatacttccagcttcttggctcagcctggcttcctctggttcagccccacataatgattatggctatttgctgtcatttctgggctagggctcctttctaacaacctagactggaataaggccctgtcagcatggctccctttatcccagttttccgtctgggaacagtacctctgcccctgattcccaatgtgccatagttttattaactccattaaagaagcctgtatgtgttttggttagttacagttattttacaataatggtgggtaatggccccacctctgttatgagataatgttctaatcaatgtctctgcctttgtatcttttctgagggctttgtctgttctcttcattctaatgaaaggtgtattctagtgctgggtgcatatcatccaggataatattctgcccaactccatcctctgttactagatcccttaccagtcacatttgtggactggtggccagtcgtataccatccctggaaggattctgggacaatattccagggattcattgacttcttggctccttttctccatttcctttgggggaagggggaattgaccatgcttaagtgcatcctatcaaggggcagctccgtccccatggccattggatcatgagacactctgaagtcagaaggctggggcagatcacttcaagcaagcccccatgatggttctcagtcctgcttctctgtgggtacgtgcccctctgtttaaaaataaactgaatatggatgttta

SEQ ID NO: 194869 - DNA, 1104 bp, Homo sapiens
  Payload ID: 18487
  Gene Name: tripartite motif containing 27
  ENST ID: ENST00000437415
  CDS Start-End: 358-1104
gtttacgctgccgccggcatccgctcggacgcggccacgttgtcttgcgcgctttgcccgcctggccctgggactctgaccctcggctaccctttcctgccccactagcgtggccgcgagcctcggtgagccggccgtattcccgctctcgcttagggggcacaggcgcaggcatcggcccggccactccaagccttcggtgcgcgggcgcgtctgggatacgggcccgggaggcgccgccctccgtccgcccggtgcctctcaggaacagcgaaccggagagagcgccggagagttgggctcagtgcagagctcggcgccggggcccatgcccgtgcgcccccgcaggccggcgccatggcctccgggagtgtggccgagtgcctgcagcaggagaccacctgccccgtgtgcctgcagtacttcgcagagcccatgatgctcgactgcggccataacatctgttgcgcgtgcctcgcccgctgctggggcacggcagagactaacgtgtcgtgcccgcagtgccgggagaccttcccgcagaggcacatgcggcccaaccggcacctggccaacgtgacccaactggtaaagcagctgcgcaccgagcggccgtcggggcccggcggcgagatgggcgtgtgcgagaagcaccgcgagcccctgaagctgtactgcgaggaggaccagatgcccatctgcgtggtgtgcgaccgctcccgcgagcaccgcggccacagcgtgctgccgctcgaggaggcggtggagggcttcaaggagcaaatccagaaccagctcgaccatttaaaaagagtgaaagatttaaagaagagacgtcgggcccagggggaacaggcacgagctgaactcttgagcctaacccagatggagagggagaagattgtttgggagtttgagcagctgtatcactccttaaaggagcatgagtatcgcctcctggcccgccttgaggagctagacttggccatctacaatagcatcaatggtgccatcacccagttctcttgcaacatctcccacctcagcagcctgatcgctcagctagaagagaagcagcagcagcccaccagggagctcctgcag

SEQ ID NO: 194870 - DNA, 1411 bp, Homo sapiens
  Payload ID: 18487
  Gene Name: tripartite motif containing 27
  ENST ID: ENST00000440169
  CDS Start-End: 1-158
aattaagagaggctcagttatactcagtggacgtgactctggacccagacacggcctaccccagcctgatcctctctgataatctgcggcaagtgcggtacagttacctccaacaggacctgcctgacaaccccgagaggtctccttctacaacgtgacagagaggtgtcacaccttcactttctctcatgctaccttttgtgggcctgtccggccctacttcagtctgagttactcgggagggaaaagtgcagctcctctgatcatctgccccatgagtgggatagatgggttttctggccatgttgggaatcatggtcattccatggagacctccccttgaggaggtgaattcaggccaaaagggctgttggctgtaatcctacgccaggcacaaggcatcttgttgccttgccacgtcctgtcacagctgggtatccttaccatgttccacgcccttgcagtgggagacaggatgtccatgttctctaccatccttttccttcccatgcagattgtgaaatgtaatgagatgtatcaagatatcctagaaataaaaaccagatgtccacctccagtgtttcatactttctggttttacacatcgctggagggataaagagtatggataatctttggatttggagagccgttcaagatacttccagcttcttggctcagcctggcttcctctggttcagccccacataatgattatggctatttgctgtcatttctgggctagggctcctttctaacaacctagactggaataaggccctgtcagcatggctccctttatcccagttttccgtctgggaacagtacctctgcccctgattcccaatgtgccatagttttattaactccattaaagaagcctgtatgtgttttggttagttacagttattttacaataatggtgggtaatggccccacctctgttatgagataatgttctaatcaatgtctctgcctttgtatcttttctgagggctttgtctgttctcttcattctaatgaaaggtgtattctagtgctgggtgcatatcatccaggataatattctgcccaactccatcctctgttactagatcccttaccagtcacatttgtggactggtggccagtcgtataccatccctggaaggattctgggacaatattccagggattcattgacttcttggctccttttctccatttcctttgggggaagggggaattgaccatgcttaagtgcatcctatcaaggggcagctccgtccccatggccattggatcatgagacactctgaagtcagaaggctggggcagatcacttcaagcaagcccccatgatggttctcagtcctgcttctctgtgggtacgtgcccctctgtttaaaaataaactgaatatggatgttta

SEQ ID NO: 194871 - DNA, 2686 bp, Homo sapiens; identical to SEQ ID NO: 194855
  Payload ID: 18487
  Gene Name: tripartite motif containing 27
  Uniprot ID: P14373
  ENST ID: ENST00000417660
  CDS Start-End: 357-1433

SEQ ID NO: 194872 - DNA, 2686 bp, Homo sapiens
  Payload ID: 18487
  Gene Name: tripartite motif containing 27
  Uniprot ID: P14373
  ENST ID: ENST00000452265
  CDS Start-End: 357-1433
tttacgctgccgccggcatccgctcggacgcggccacgttgtcttgcgcgctttgcccgcctggccctgggactctgaccctcggctaccctttcctgccccactagcgtggccgcgagcctcggtgagccggccgtattcccgctctcgcttagggggcacaggcgcaggcatcggcccggccactccaagccttcggtgcgcgggcgcgtctgggatacgggcccgggaggcgccgccctccgtccgcccggtgcctctcaggaacagcgaaccggagagagcgccggagagttgggctcagtgcggagctcggcgccggggcccatgcccgtgcgcccccgcaggccggcgccatggcctccgggagtgtggccgagtgcctgcagcaggagaccacctgccccgtgtgcctgcagtacttcgcagagcccatgatgctcgactgcggccataacatctgttgcgcgtgcctcgcccgctgctggggcacggcagagactaacgtgtcgtgcccgcagtgccgggagaccttcccgcagaggcacatgcggcccaaccggcacctggccaacgtgacccaactggtaaagcagctgcgcaccgagcggccgtcggggcccggcggcgagatgggcgtgtgcgagaagcaccgcgagcccctgaagctgtactgcgaggaggaccagatgcccatctgcgtggtgtgcgaccgctcccgcgagcaccgcggccacagcgtgctgccgctcgaggaggcggtggagggcttcaaggagcaaatccagaaccagctcgaccatttaaaaagagtgaaagatttaaagaagagacgtcgggcccagggggaacaggcacgagctgaactcttgagcctaacccagatggagagggagaagattgtttgggagtttgagcagctgtatcactccttaaaggagcatgagtatcgcctcctggcccgccttgaggagctagacttggccatctacaatagcatcaatggtgccatcacccagttctcttgcaacatctcccacctcagcagcctgatcgctcagctagaagagaagcagcagcagcccaccagggagctcctgcaggacattggggacacattgagcagggctgaaagaatcaggattcctgaaccttggatcacacctccagatttgcaagagaaaatccacatttttgcccaaaaatgtctattcttgacggagagtctaaagcagttcacagaaaaaatgcagtcagatatggagaaaatccaagaattaagagaggctcagttatactcagtggacgtgactctggacccagacacggcctaccccagcctgatcctctctgataatctgcggcaagtgcggtacagttacctccaacaggacctgcctgacaaccccgagaggtctccttctacaacgtgacagagaggtgtcacaccttcactttctctcatgctaccttttgtgggcctgtccggccctacttcagtctgagttactcgggagggaaaagtgcagctcctctgatcatctgccccatgagtgggatagatgggttttctggccatgttgggaatcatggtcattccatggagacctccccttgaggaggtgaattcaggccaaaagggctgttggctgtaatcctacgccaggcacaaggcatcttgttgccttgccacgtcctgtcacagctgggtatccttaccatgttccacgcccttgcagtgggagacaggatgtccatgttctctaccatccttttccttcccatgcagattgtgaaatgtaatgagatgtatcaagatatcctagaaataaaaaccagatgtccacctccagtgtttcatactttctggttttacacatcgctggagggataaagagtatggataatctttggatttggagagccgttcaagatacttccagcttcttggctcagcctggcttcctctggttcagccccacataatgattatggctatttgctgtcatttctgggctagggctcctttctaacaacctagactggaataaggccctgtcagcatggctccctttatcccagttttccgtctgggaacagtacctctgcccctgattcccaatgtgccatagttttattaactccattaaagaagcctgtatgtgttttggttagttacagttattttacaataatggtgggtaatggccccacctctgttatgagataatgttctaatcaatgtctctgcctttgtatcttttctgagggctttgtctgttctcttcattctaatgaaaggtgtattctagtgctgggtgcatatcatccaggataatattctgcccaactccatcctctgttactagatcccttaccagtcacatttgtggactggtggccagtcgtataccatccctggaaggattctgggacaatattccagggattcattgacttcttggctccttttctccatttcctttgggggaagggggaattgaccatgcttaagtgcatcctatcaaggggcagctccgtccccatggccattggatcatgagacactctgaagtcagaaggctggggcagatcacttcaagcaagcccccatgatggttctcagtcctgcttctctgtgggtacgtgcccctctgtttaaaaataaactgaatatggatgttta

SEQ ID NO: 194873 - DNA, 2901 bp, Homo sapiens
  Payload ID: 18487
  Gene Name: tripartite motif containing 27
  Uniprot ID: P14373
  ENST ID: ENST00000431123
  CDS Start-End: 292-1833
cctgggactctgaccctcggctaccctttcctgccccactagcgtggccgcgagcctcggtgagccggccgtattcccgctctcgcttagggggcacaggcgcaggcatcggcccggccactccaagccttcggtgcgcgggcgcgtctgggatacgggcccgggaggcgccgccctccgtccgcccggtgcctctcaggaacagcgaaccggagagagcgccggagagttgggctcagtgcggagctcggcgccggggcccatgcccgtgcgcccccgcaggccggcgccatggcctccgggagtgtggccgagtgcctgcagcaggagaccacctgccccgtgtgcctgcagtacttcgcagagcccatgatgctcgactgcggccataacatctgttgcgcgtgcctcgcccgctgctggggcacggcagagactaacgtgtcgtgcccgcagtgccgggagaccttcccgcagaggcacatgcggcccaaccggcacctggccaacgtgacccaactggtaaagcagctgcgcaccgagcggccgtcggggcccggcggcgagatgggcgtgtgcgagaagcaccgcgagcccctgaagctgtactgcgaggaggaccagatgcccatctgcgtggtgtgcgaccgctcccgcgagcaccgcggccacagcgtgctgccgctcgaggaggcggtggagggcttcaaggagcaaatccagaaccagctcgaccatttaaaaagagtgaaagatttaaagaagagacgtcgggcccagggggaacaggcacgagctgaactcttgagcctaacccagatggagagggagaagattgtttgggagtttgagcagctgtatcactccttaaaggagcatgagtatcgcctcctggcccgccttgaggagctagacttggccatctacaatagcatcaatggtgccatcacccagttctcttgcaacatctcccacctcagcagcctgatcgctcagctagaagagaagcagcagcagcccaccagggagctcctgcaggacattggggacacattgagcagggctgaaagaatcaggattcctgaaccttggatcacacctccagatttgcaagagaaaatccacatttttgcccaaaaatgtctattcttgacggagagtctaaagcagttcacagaaaaaatgcagtcagatatggagaaaatccaagaattaagagaggctcagttatactcagtggacgtgactctggacccagacacggcctaccccagcctgatcctctctgataatctgcggcaagtgcggtacagttacctccaacaggacctgcctgacaaccccgagaggttcaatctgtttccctgtgtcttgggctctccatgcttcatcgccgggagacattattgggaggtagaggtgggagataaagccaagtggaccataggtgtctgtgaagactcagtgtgcagaaaaggtggagtaacctcagccccccagaatggattctgggcagtgtctttgtggtatgggaaagaatattgggctcttacctccccaatgactgccctacccctgcggaccccgctccagcgggtggggattttcttggactatgatgctggtgaggtctccttctacaacgtgacagagaggtgtcacaccttcactttctctcatgctaccttttgtgggcctgtccggccctacttcagtctgagttactcgggagggaaaagtgcagctcctctgatcatctgccccatgagtgggatagatgggttttctggccatgttgggaatcatggtcattccatggagacctccccttgaggaggtgaattcaggccaaaagggctgttggctgtaatcctacgccaggcacaaggcatcttgttgccttgccacgtcctgtcacagctgggtatccttaccatgttccacgcccttgcagtgggagacaggatgtccatgttctctaccatccttttccttcccatgcagattgtgaaatgtaatgagatgtatcaagatatcctagaaataaaaaccagatgtccacctccagtgtttcatactttctggttttacacatcgctggagggataaagagtatggataatctttggatttggagagccgttcaagatacttccagcttcttggctcagcctggcttcctctggttcagccccacataatgattatggctatttgctgtcatttctgggctagggctcctttctaacaacctagactggaataaggccctgtcagcatggctccctttatcccagttttccgtctgggaacagtacctctgcccctgattcccaatgtgccatagttttattaactccattaaagaagcctgtatgtgttttggttagttacagttattttacaataatggtgggtaatggccccacctctgttatgagataatgttctaatcaatgtctctgcctttgtatcttttctgagggctttgtctgttctcttcattctaatgaaaggtgtattctagtgctgggtgcatatcatccaggataatattctgcccaactccatcctctgttactagatcccttaccagtcacatttgtggactggtggccagtcgtataccatccctggaaggattctgggacaatattccagggattcattgacttcttggctccttttctccatttcctttgggggaagggggaattgaccatgcttaagtgcatcctatcaaggggcagctccgtccccatggccattggatcatgagacactctgaagtcagaaggctggggcagatcacttcaagcaagcccccatgatggttctcagtcctgcttctctgtgggtacgtgcccctctgtttaaaaataaactgaatatggatgttta

SEQ ID NO: 194874 - DNA, 1812 bp, Homo sapiens
  Payload ID: 18487
  Gene Name: tripartite motif containing 27
  ENST ID: ENST00000437383
  CDS Start-End: 1-744
ctaaagcagttcacagaaaaaatgcagtcagatatggagaaaatccaagaatcagctgactcactggaaggtggaattcttgatcttggctcagttttatcccatattctaccagtctcagaattaagagaggctcagttatactcagtggacgtgactctggacccagacacggcctaccccagcctgatcctctctgataatctgcggcaagtgcggtacagttacctccaacaggacctgcctgacaaccccgagaggttcaatctgtttccctgtgtcttgggctctccatgcttcatcgccgggagacattattgggaggtagaggtgggagataaagccaagtggaccataggtgtctgtgaagactcagtgtgcagaaaaggtggagtaacctcagccccccagaatggattctgggcagtgtctttgtggtatgggaaagaatattgggctcttacctccccaatgactgccctacccctgcggaccccgctccagcgggtggggattttcttggactatgatgctggtgaggtctccttctacaacgtgacagagaggtgtcacaccttcactttctctcatgctaccttttgtgggcctgtccggccctacttcagtctgagttactcgggagggaaaagtgcagctcctctgatcatctgccccatgagtgggatagatgggttttctggccatgttgggaatcatggtcattccatggagacctccccttgaggaggtgaattcaggccaaaagggctgttggctgtaatcctacgccaggcacaaggcatcttgttgccttgccacgtcctgtcacagctgggtatccttaccatgttccacgcccttgcagtgggagacaggatgtccatgttctctaccatccttttccttcccatgcagattgtgaaatgtaatgagatgtatcaagatatcctagaaataaaaaccagatgtccacctccagtgtttcatactttctggttttacacatcgctggagggataaagagtatggataatctttggatttggagagccgttcaagatacttccagcttcttggctcagcctggcttcctctggttcagccccacataatgattatggctatttgctgtcatttctgggctagggctcctttctaacaacctagactggaataaggccctgtcagcatggctccctttatcccagttttccgtctgggaacagtacctctgcccctgattcccaatgtgccatagttttattaactccattaaagaagcctgtatgtgttttggttagttacagttattttacaataatggtgggtaatggccccacctctgttatgagataatgttctaatcaatgtctctgcctttgtatcttttctgagggctttgtctgttctcttcattctaatgaaaggtgtattctagtgctgggtgcatatcatccaggataatattctgcccaactccatcctctgttactagatcccttaccagtcacatttgtggactggtggccagtcgtataccatccctggaaggattctgggacaatattccagggattcattgacttcttggctccttttctccatttcctttgggggaagggggaattgaccatgcttaagtgcatcctatcaaggggcagctccgtccccatggccattggatcatgagacactctgaagtcagaaggctggggcagatcacttcaagcaagcccccatgatggttctcagtcctgcttctctgtgggtacgtgcccctctgtttaaaaataaactgaatatggatgttta

SEQ ID NO: 194875 - DNA, 2686 bp, Homo sapiens; identical to SEQ ID NO: 194855
  Payload ID: 18487
  Gene Name: tripartite motif containing 27
  Uniprot ID: P14373
  ENST ID: ENST00000412687
  CDS Start-End: 357-1433

SEQ ID NO: 194876 - DNA, 1103 bp, Homo sapiens
  Payload ID: 18487
  Gene Name: tripartite motif containing 27
  ENST ID: ENST00000436621
  CDS Start-End: 357-1103
tttacgctgccgccggcatccgctcggacgcggccacgttgtcttgcgcgctttgcccgcctggccctgggactctgaccctcggctaccctttcctgccccactagcgtggccgcgagcctcggtgagccggccgtattcccgctctcgcttagggggcacaggcgcaggcatcggcccggccactccaagccttcggtgcgcgggcgcgtctgggatacgggcccgggaggcgccgccctccgtccgcccggtgcctctcaggaacagcgaaccggagagagcgccggagagttgggctcagtgcagagctcggcgccggggcccatgcccgtgcgcccccgcaggccggcgccatggcctccgggagtgtggccgagtgcctgcagcaggagaccacctgccccgtgtgcctgcagtacttcgcagagcccatgatgctcgactgcggccataacatctgttgcgcgtgcctcgcccgctgctggggcacggcagagactaacgtgtcgtgcccgcagtgccgggagaccttcccgcagaggcacatgcggcccaaccggcacctggccaacgtgacccaactggtaaagcagctgcgcaccgagcggccgtcggggcccggcggcgagatgggcgtgtgcgagaagcaccgcgagcccctgaagctgtactgcgaggaggaccagatgcccatctgcgtggtgtgcgaccgctcccgcgagcaccgcggccacagcgtgctgccgctcgaggaggcggtggagggcttcaaggagcaaatccagaaccagctcgaccatttaaaaagagtgaaagatttaaagaagagacgtcgggcccagggggaacaggcacgagctgaactcttgagcctaacccagatggagagggagaagattgtttgggagtttgagcagctgtatcactccttaaaggagcatgagtatcgcctcctggcccgccttgaggagctagacttggccatctacaatagcatcaatggtgccatcacccagttctcttgcaacatctcccacctcagcagcctgatcgctcagctagaagagaagcagcagcagcccaccagggagctcctgcag

SEQ ID NO: 194877 - DNA, 2960 bp, Homo sapiens
  Payload ID: 18488
  Gene Name: tripartite motif containing 28
  Uniprot ID: Q13263
  ENST ID: ENST00000253024
  CDS Start-End: 290-2797
ggcgcgcgggcgagcggttgtgcttgtgcttgtggcgcgtggtgcgggtttcggcggcggctgaggaagaagcgcgggcggcgccttcgggaggcgagcaggcagcagttggccgtgccgtagcagcgtcccgcgcgcggcgggcagcggcccaggaggcgcgtggcggcgctcggcctcgcggcggcggcggcggcagcggcccagcagttggcggcgagcgcgtctgcgcctgcgcggcgggccccgcgcccctcctccccccctgggcgcccccggcggcgtgtgaatggcggcctccgcggcggcagcctcggcagcagcggcctcggccgcctctggcagcccgggcccgggcgagggctccgctggcggcgaaaagcgctccaccgccccttcggccgcagcctcggcctctgcctcagccgcggcgtcgtcgcccgcggggggcggcgccgaggcgctggagctgctggagcactgcggcgtgtgcagagagcgcctgcgacccgagagggagccccgcctgctgccctgtttgcactcggcctgtagtgcctgcttagggcccgcggcccccgccgccgccaacagctcgggggacggcggggcggcgggcgacggcaccgtggtggactgtcccgtgtgcaagcaacagtgcttctccaaagacatcgtggagaattatttcatgcgtgatagtggcagcaaggctgccaccgacgcccaggatgcgaaccagtgctgcactagctgtgaggataatgccccagccaccagctactgtgtggagtgctcggagcctctgtgtgagacctgtgtagaggcgcaccagcgggtgaagtacaccaaggaccatactgtgcgctctactgggccagccaagtctcgggatggtgaacgtactgtctattgcaacgtacacaagcatgaaccccttgtgctgttttgtgagagctgtgatactctcacctgccgagactgccagctcaatgcccacaaggaccaccagtaccagttcttagaggatgcagtgaggaaccagcgcaagctcctggcctcactggtgaagcgccttggggacaaacatgcaacattgcagaagagcaccaaggaggttcgcagctcaatccgccaggtgtctgacgtacagaagcgtgtgcaagtggatgtcaagatggccatcctgcagatcatgaaggagctgaataagcggggccgtgtgctggtcaatgatgcccagaaggtgactgaggggcagcaggagcgcctggagcggcagcactggaccatgaccaagatccagaagcaccaggagcacattctgcgctttgcctcttgggctctggagagtgacaacaacacagcccttttgctttctaagaagttgatctacttccagctgcaccgggccctcaagatgattgtggatcccgtggagccacatggcgagatgaagtttcagtgggacctcaatgcctggaccaagagtgccgaggcctttggcaagattgtggcagagcgtcctggcactaactcaacaggccctgcacccatggcccctccaagagccccagggcccctgagcaagcagggctctggcagcagccagcccatggaggtgcaggaaggctatggctttgggtcaggagatgatccctactcaagtgcagagccccatgtgtcaggtgtgaaacggtcccgctcaggtgagggcgaggtgagcggccttatgcgcaaggtgccacgagtgagccttgaacgcctggacctggacctcacagctgacagccagccacccgtcttcaaggtcttcccaggcagtaccactgaggactacaaccttattgttattgaacgtggcgctgccgctgcagctaccggccagccagggactgcgcctgcaggaacccctggtgccccacccctggctggcatggccattgtcaaggaggaggagacggaggctgccattggagcccctcctactgccactgagggccctgagaccaaacctgtgcttatggctcttgcggagggtcctggtgctgagggtccccgcctggcctcacctagtggcagcaccagctcagggctggaggtggtggctcctgagggtacctcagccccaggtggtggcccgggaaccctggatgacagtgccaccatttgccgtgtctgccagaagccaggcgatctggttatgtgcaaccagtgtgagttttgtttccacctggactgtcacctgccggccctgcaggatgtaccaggggaggagtggagctgctcactctgccatgtgctccctgacctgaaggaggaggatggcagcctcagcctggatggtgcagacagcactggcgtggtggccaagctctcaccagccaaccagcggaaatgtgagcgtgtactgctggccctattctgtcacgaaccctgccgccccctgcatcagctggctaccgactccaccttctccctggaccagcccggtggcaccctggatctgaccctgatccgtgcccgcctccaggagaagttgtcacctccctacagctccccacaggagtttgcccaggatgtgggccgcatgttcaagcaattcaacaagttaactgaggacaaggcagacgtgcagtccatcatcggcctgcagcgcttcttcgagacgcgcatgaacgaggccttcggtgacaccaagttctctgctgtgctggtggagcccccgccgatgagcctgcctggtgctggcctgagttcccaggagctgtctggtggccctggtgatggcccctgaggctggagcccccatggccagcccagcctggctctgttctctgtcctgtcaccccatccccactcccctggtggcctgactcccactccctggtggccccatcccccagttcctcacgatatggtttttacttctgtggatttaataaaaacttcaccagttc

SEQ ID NO: 194878 - DNA, 2709 bp, Homo sapiens
  Payload ID: 18488
  Gene Name: tripartite motif containing 28
  Uniprot ID: Q13263
  ENST ID: ENST00000341753
  CDS Start-End: 286-2547
cgcgggcgagcggttgtgcttgtgcttgtggcgcgtggtgcgggtttcggcggcggctgaggaagaagcgcgggcggcgccttcgggaggcgagcaggcagcagttggccgtgccgtagcagcgtcccgcgcgcggcgggcagcggcccaggaggcgcgtggcggcgctcggcctcgcggcggcggcggcggcagcggcccagcagttggcggcgagcgcgtctgcgcctgcgcggcgggccccgcgcccctcctccccccctgggcgcccccggcggcgtgtgaatggcggcctccgcggcggcagcctcggcagcagcggcctcggccgcctctggcagcccgggcccgggcgagggctccgctggcggcgaaaagcgctccaccgccccttcggccgcagcctcggcctctgcctcagccgcggcgtcgtcgcccgcggggggcggcgccgaggcgctggagctgctggagcactgcggcgtgtgcagagagcgcctgcgacccgagagggagccccgcctgctgccctgtttgcactcggcctgtagtgcctgcttagggcccgcggcccccgccgccgccaacagctcgggggacggcggggcggcgggcgacggcaccgggccagccaagtctcgggatggtgaacgtactgtctattgcaacgtacacaagcatgaaccccttgtgctgttttgtgagagctgtgatactctcacctgccgagactgccagctcaatgcccacaaggaccaccagtaccagttcttagaggatgcagtgaggaaccagcgcaagctcctggcctcactggtgaagcgccttggggacaaacatgcaacattgcagaagagcaccaaggaggttcgcagctcaatccgccaggtgtctgacgtacagaagcgtgtgcaagtggatgtcaagatggccatcctgcagatcatgaaggagctgaataagcggggccgtgtgctggtcaatgatgcccagaaggtgactgaggggcagcaggagcgcctggagcggcagcactggaccatgaccaagatccagaagcaccaggagcacattctgcgctttgcctcttgggctctggagagtgacaacaacacagcccttttgctttctaagaagttgatctacttccagctgcaccgggccctcaagatgattgtggatcccgtggagccacatggcgagatgaagtttcagtgggacctcaatgcctggaccaagagtgccgaggcctttggcaagattgtggcagagcgtcctggcactaactcaacaggccctgcacccatggcccctccaagagccccagggcccctgagcaagcagggctctggcagcagccagcccatggaggtgcaggaaggctatggctttgggtcaggagatgatccctactcaagtgcagagccccatgtgtcaggtgtgaaacggtcccgctcaggtgagggcgaggtgagcggccttatgcgcaaggtgccacgagtgagccttgaacgcctggacctggacctcacagctgacagccagccacccgtcttcaaggtcttcccaggcagtaccactgaggactacaaccttattgttattgaacgtggcgctgccgctgcagctaccggccagccagggactgcgcctgcaggaacccctggtgccccacccctggctggcatggccattgtcaaggaggaggagacggaggctgccattggagcccctcctactgccactgagggccctgagaccaaacctgtgcttatggctcttgcggagggtcctggtgctgagggtccccgcctggcctcacctagtggcagcaccagctcagggctggaggtggtggctcctgagggtacctcagccccaggtggtggcccgggaaccctggatgacagtgccaccatttgccgtgtctgccagaagccaggcgatctggttatgtgcaaccagtgtgagttttgtttccacctggactgtcacctgccggccctgcaggatgtaccaggggaggagtggagctgctcactctgccatgtgctccctgacctgaaggaggaggatggcagcctcagcctggatggtgcagacagcactggcgtggtggccaagctctcaccagccaaccagcggaaatgtgagcgtgtactgctggccctattctgtcacgaaccctgccgccccctgcatcagctggctaccgactccaccttctccctggaccagcccggtggcaccctggatctgaccctgatccgtgcccgcctccaggagaagttgtcacctccctacagctccccacaggagtttgcccaggatgtgggccgcatgttcaagcaattcaacaagttaactgaggacaaggcagacgtgcagtccatcatcggcctgcagcgcttcttcgagacgcgcatgaacgaggccttcggtgacaccaagttctctgctgtgctggtggagcccccgccgatgagcctgcctggtgctggcctgagttcccaggagctgtctggtggccctggtgatggcccctgaggctggagcccccatggccagcccagcctggctctgttctctgtcctgtcaccccatccccactcccctggtggcctgactcccactccctggtggccccatcccccagttcctcacgatatggtttttacttctgtggatttaataaaaacttcaccagtt

SEQ ID NO: 194879 - DNA, 504 bp, Homo sapiens
  Payload ID: 18488
  Gene Name: tripartite motif containing 28
  ENST ID: ENST00000597968
  CDS Start-End: 321-504
tgaggatgccacctgggcgagaggatgggggcccggacagggcacgggaaatactttctgggtcctgcatacgaacgtgggtttgtgctggccgctgagatgggacatctgactaaagttggagaaaagaaggctcggggaggggaggggctggttcgctgcgggataatggtcgggggcccacccagcaggggaatggtgggggccataacctgggtgggaacttgtaacagtctcccacatccctgcttctcgaagtggtggactgtcccgtgtgcaagcaacagtgcttctccaaagacatcgtggagaattatttcatgcgtgatagtggcagcaaggctgccaccgacgcccaggatgcgaaccagtgctgcactagctgtgaggataatgccccagccaccagctactgtgtggagtgctcggagcctctgtgtgagacctgtgtagaggcgcaccagcgggtgaagtacaccaaggaccatactgtgcgctctactg

SEQ ID NO: 194880 - DNA, 1552 bp, Homo sapiens
  Payload ID: 18488
  Gene Name: tripartite motif containing 28
  ENST ID: ENST00000597136
  CDS Start-End: 1-1383
atctacttccagctgcaccgggccctcaagatgattgtggatcccgtggagccacatggcgagatgaagtttcagtgggacctcaatgcctggaccaagagtgccgaggcctttggcaagattgtggcagagcgtcctggcactaactcaacaggccctgcacccatggcccctccaagagccccagggcccctgagcaagcagggctctggcagcagccagcccatggaggtgcaggaaggctatggctttgggtcagagccccatgtgtcaggtgtgaaacggtcccgctcaggtgagggcgaggtgagcggccttatgcgcaaggtgccacgagtgagccttgaacgcctggacctggacctcacagctgacagccagccacccgtcttcaaggtcttcccaggcagtaccactgaggactacaaccttattgttattgaacgtggcgctgccgctgcagctaccggccagccagggactgcgcctgcaggaacccctggtgccccacccctggctggcatggccattgtcaaggaggaggagacggaggctgccattggagcccctcctactgccactgagggccctgagaccaaacctgtgcttatggctcttgcggagggtcctggtgctgagggtccccgcctggcctcacctagtggcagcaccagctcagggctggaggtggtggctcctgagggtacctcagccccaggtggtggcccgggaaccctggatgacagtgccaccatttgccgtgtctgccagaagccaggcgatctggttatgtgcaaccagtgtgagttttgtttccacctggactgtcacctgccggccctgcaggatgtaccaggggaggagtggagctgctcactctgccatgtgctccctgacctgaaggaggaggatggcagcctcagcctggatggtgcagacagcactggcgtggtggccaagctctcaccagccaaccagcggaaatgtgagcgtgtactgctggccctattctgtcacgaaccctgccgccccctgcatcagctggctaccgactccaccttctccctggaccagcccggtggcaccctggatctgaccctgatccgtgcccgcctccaggagaagttgtcacctccctacagctccccacaggagtttgcccaggatgtgggccgcatgttcaagcaattcaacaagttaactgaggacaaggcagacgtgcagtccatcatcggcctgcagcgcttcttcgagacgcgcatgaacgaggccttcggtgacaccaagttctctgctgtgctggtggagcccccgccgatgagcctgcctggtgctggcctgagttcccaggagctgtctggtggccctggtgatggcccctgaggctggagcccccatggccagcccagcctggctctgttctctgtcctgtcaccccatccccactcccctggtggcctgactcccactccctggtggccccatcccccagttcctcacgatatggtttttacttctgtggatttaataaaaacttcaccagttcctcagg

SEQ ID NO: 194881 - DNA, 533 bp, Homo sapiens
  Payload ID: 18488
  Gene Name: tripartite motif containing 28
  ENST ID: ENST00000593582
  CDS Start-End: 46-533
acggcggcgaagagacgcgggttgaggaagagggacggattgcccatgcgcttgggcgcacagcggcccgcttctgtgtggtctggaggtggagctgagaggggaatcacactctataaagtggtggactgtcccgtgtgcaagcaacagtgcttctccaaagacatcgtggagaattatttcatgcgtgatagtggcagcaaggctgccaccgacgcccaggatgcgaaccagtgctgcactagctgtgaggataatgccccagccaccagctactgtgtggagtgctcggagcctctgtgtgagacctgtgtagaggcgcaccagcgggtgaagtacaccaaggaccatactgtgcgctctactgggccagccaagtctcgggatggtgaacgtactgtctattgcaacgtacacaagcatgaaccccttgtgctgttttgtgagagctgtgatactctcacctgccgagactgccagctcaatgcccacaaggaccaccagtaccagttcttagaggatgcagtgaggaa

SEQ ID NO: 194882 - DNA, 861 bp, Homo sapiens
  Payload ID: 18488
  Gene Name: tripartite motif containing 28
  ENST ID: ENST00000594806
  CDS Start-End: 328-861
tttctgcgagcgggcgcgcgggcgagcggttgtgcttgtgcttgtggcgcgtggtgcgggtttcggcggcggctgaggaagaagcgcgggcggcgccttcgggagctgctggagcactgcggcgtgtgcagagagcgcctgcgacccgagagggagccccgcctgctgccctgtttgcactcggcctgtagtgcctgcttagggcccgcggcccccgccgccgccaacagctcgggggacggcggggcggcgggcgacggcaccgtggtggactgtcccgtgtgcaagcaacagtgcttctccaaagacatcgtggagaattatttcatgcgtgatagtggcagcaaggctgccaccgacgcccaggatgcgaaccagtgctgcactagctgtgaggataatgccccagccaccagctactgtgtggagtgctcggagcctctgtgtgagacctgtgtagaggcgcaccagcgggtgaagtacaccaaggaccatactgtgcgctctactgggccagccaagtctcgggatggtgaacgtactgtctattgcaacgtacacaagcatgaaccccttgtgctgttttgtgagagctgtgatactctcacctgccgagactgccagctcaatgcccacaaggaccaccagtaccagttcttagaggatgcagtgaggaaccagcgcaagctcctggcctcactggtgaagcgccttggggacaaacatgcaacattgcagaagagcaccaaggaggttcgcagctcaatccgccaggtgtctgacgtacagaagcgtgtgcaagtggatgtcaagatggccatcctgcagatcatgaaggagctgaataagcggggccgtgtg

SEQ ID NO: 194883 - DNA, 3328 bp, Homo sapiens
  Payload ID: 18489
  Gene Name: tripartite motif containing 29
  Uniprot ID: Q14134
  ENST ID: ENST00000341846
  CDS Start-End: 423-2189
agtgaagcctgcccacttgtgaagacggagactccccgctccccggatgagaagcaagtgcgtcagagggaagcagcccaactggttgctgagttgtggaaaataagctgggggagaaaaaacacttcttttaaaaatcaggttagggatgaatgtgcagggcgtggttcctgtgcaattatctgctctgctggctgcggggctccctgcttctcccgggccgctgtgtcaggcttgtgcctgttgctcctcccctccactcctccccctcctcctcctccgcctcctccccctcctcctcctcacaggtgtgtctctagtcctcgtggttgcctgccccactccctgccgagacgcctgccagaaaggtcacctatcctgaaccccagcaagcctgaaacagctcagccaagcaccctgcgatggaagctgcagatgcctccaggagcaacgggtcgagcccagaagccagggatgcccggagcccgtcgggccccagtggcagcctggagaatggcaccaaggctgacggcaaggatgccaagaccaccaacgggcacggcggggaggcagctgagggcaagagcctgggcagcgccctgaagccaggggaaggtaggagcgccctgttcgcgggcaatgagtggcggcgacccatcatccagtttgtcgagtccggggacgacaagaactccaactacttcagcatggactctatggaaggcaagaggtcgccgtacgcagggctccagctgggggctgccaagaagccacccgttacctttgccgaaaagggcgagctgcgcaagtccattttctcggagtcccggaagcccacggtgtccatcatggagcccggggagacccggcggaacagctacccccgggccgacacgggccttttttcacggtccaagtccggctccgaggaggtgctgtgcgactcctgcatcggcaacaagcagaaggcggtcaagtcctgcctggtgtgccaggcctccttctgcgagctgcatctcaagccccacctggagggcgccgccttccgagaccaccagctgctcgagcccatccgggactttgaggcccgcaagtgtcccgtgcatggcaagacgatggagctcttctgccagaccgaccagacctgcatctgctacctttgcatgttccaggagcacaagaatcatagcaccgtgacagtggaggaggccaaggccgagaaggagacggagctgtcattgcaaaaggagcagctgcagctcaagatcattgagattgaggatgaagctgagaagtggcagaaggagaaggaccgcatcaagagcttcaccaccaatgagaaggccatcctggagcagaacttccgggacctggtgcgggacctggagaagcaaaaggaggaagtgagggctgcgctggagcagcgggagcaggatgctgtggaccaagtgaaggtgatcatggatgctctggatgagagagccaaggtgctgcatgaggacaagcagacccgggagcagctgcatagcatcagcgactctgtgttgtttctgcaggaatttggtgcattgatgagcaattactctctccccccacccctgcccacctatcatgtcctgctggagggggagggcctgggacagtcactaggcaacttcaaggacgacctgctcaatgtatgcatgcgccacgttgagaagatgtgcaaggcggacctgagccgtaacttcattgagaggaaccacatggagaacggtggtgaccatcgctatgtgaacaactacacgaacagcttcgggggtgagtggagtgcaccggacaccatgaagagatactccatgtacctgacacccaaaggtggggtccggacatcataccagccctcgtctcctggccgcttcaccaaggagaccacccagaagaatttcaacaatctctatggcaccaaaggtaactacacctcccgggtctgggagtactcctccagcattcagaactctgacaatgacctgcccgtcgtccaaggcagctcctccttctccctgaaaggctatccctccctcatgcggagccaaagccccaaggcccagccccagacttggaaatctggcaagcagactatgctgtctcactaccggccattctacgtcaacaaaggcaacgggattgggtccaacgaagccccatgagctcctggcggaaggaacgaggcgccacacccctgctcttcctcctgaccctgctgctcttgccttctaagctactgtgcttgtctgggtgggagggagcctggtcctgcacctgccctctgcagccctctgccagcctcttgggggcagttccggcctctccgacttccccactggccacactccattcagactcctttcctgccttgtgacctcagatggtcaccatcattcctgtgctcagaggccaacccatcacaggggtgagataggttggggcctgccctaacccgccagcctcctcctctcgggctggatctgggggctagcagtgagtacccgcatggtatcagcctgcctctcccgcccacgccctgctgtctccaggcctatagacgtttctctccaaggccctatcccccaatgttgtcagcagatgcctggacagcacagccacccatctcccattcacatggcccacctcctgcttcccagaggactggccctacgtgctctctctcgtcctacctatcaatgcccagcatggcagaacctgcagcccttggccactgcagatggaaacctctcagtgtcttgacatcaccctacccaggcggtgggtctccaccacagccactttgagtctgtggtccctggagggtggcttctcctgactggcaggatgaccttagccaagatattcctctgttccctctgctgagataaagaattcccttaacatgatataatccacccatgcaaatagctactggcccagctaccatttaccatttgcctacagaatttcattcagtctacactttggcattctctctggcgatggagtgtggctgggctgaccgcaaaaggtgccttacacactgcccccaccctcagccgttgccccatcagaggctgcctcctccttctgattaccccccatgttgcatatcagggtgctcaaggattggagaggagacaaaaccaggagcagcacagtggggacatctcccgtctcaacagccccaggcctatgggggctctggaaggatgggccagcttgcaggggttggggagggagacatccagcttgggctttcccctttggaataaaccattggtctgtcacttctcttgta

SEQ ID NO: 194884 - DNA, 549 bp, Homo sapiens
  Payload ID: 18489
  Gene Name: tripartite motif containing 29
  ENST ID: ENST00000529040
  CDS Start-End: 435-549
gaaattcagaacaggaggacacaagggcaggggaatgctgaggccaaggccttctcccaccacctgcctcctgcgggagtgattccacagtgcagagggagagccatttggaggtccggcacccgctctgcccatgcctatgcttcaggctctgtgagaaggctggactccttctggaacttcaggaccttggatgctcccctcctctgctcctgcctcccttcccccagccctggggtgtgtcagatgtgtgttttctcctggactcagctgaagcaaggtcagcccagctttcaaggggaggagcttccacactctaggtgtgtctctagtcctcgtggttgcctgccccactccctgccgagacgcctgccagaaaggtcacctatcctgaaccccagcaagcctgaaacagctcagccaagcaccctgcgatggaagctgcagatgcctccaggagcaacgggtcgagcccagaagccagggatgcccggagcccgtcgggccccagtggcagcctggagaatggcaccaaggctgacggcaagg

SEQ ID NO: 194885 - DNA, 535 bp, Homo sapiens
  Payload ID: 18489
  Gene Name: tripartite motif containing 29
  ENST ID: ENST00000531555
  CDS Start-End: 1-358
caactacacgaacagcttcgggggtgagtggagtgcaccggacaccatgaagagatactccatgtacctgacacccaaaggtggggtccggacatcataccagccctcgtctcctggccgcttcaccaaggagaccacccagaagaatttcaacaatctctatggcaccaaaggtaactacacctcccgggtctgggagtactcctccagcattcagaactctgacaatgacctgcccgtcgtccaaggcagctcctccttctccctgaaaggctatccctccctcatgcggagccaaagccccaaggcccagccccagacttggaaatctggcaagcagactatgctggtggtttaagcaaggtctgagcatccctcaagtcctgctgtggaccacacaaaggcaaggagctgaccaggaggtgtcagttccctgagagacagggccaaaggcagtgtacccttgagtctcactaccggccattctacgtcaacaaaggcaacgggattgggtccaacgaagccccatgagctc

SEQ ID NO: 194886 - DNA, 551 bp, Homo sapiens
  Payload ID: 18489
  Gene Name: tripartite motif containing 29
  ENST ID: ENST00000529495
  CDS Start-End: 267-551
gagaaattgggcctggcattttgagtgacttctgagattatctgaatctcacactttgctgacctctttttggagggcattgcctgtggcctggcccagagaggatgggcaggtgttttctgagtcacacagcagaccaagtgtggagacaggtgtgtctctagtcctcgtggttgcctgccccactccctgccgagacgcctgccagaaaggtcacctatcctgaaccccagcaagcctgaaacagctcagccaagcaccctgcgatggaagctgcagatgcctccaggagcaacgggtcgagcccagaagccagggatgcccggagcccgtcgggccccagtggcagcctggagaatggcaccaaggctgacggcaaggatgccaagaccaccaacgggcacggcggggaggcagctgagggcaagagcctgggcagcgccctgaagccaggggaaggtaggagcgccctgttcgcgggcaatgagtggcggcgacccatcatccagtttgtcgagtccggggacgacaagaactccaactacttcagc

SEQ ID NO: 194887 - DNA, 1702 bp, Homo sapiens
  Payload ID: 18489
  Gene Name: tripartite motif containing 29
  ENST ID: ENST00000475051
  CDS Start-End: 84-593
cactccctgccgagacgcctgccagaaaggtcacctatcctgaaccccagcaagcctgaaacagctcagccaagcaccctgcgatggaagctgcagatgcctccaggagcaacgggtcgagcccagaagccagggatgcccggagcccgtcgggccccagtggcagcctggagaatggcaccaaggctgacggcaaggatgccaagaccaccaacgggcacggcggggaggcagctgagggcaagagcctgggcagcgccctgaagccaggggaagaagccacccgttacctttgccgaaaagggcgagctgcgcaagtccattttctcggagtcccggaagcccacggtgtccatcatggagcccggggagacccggcggaacagctacccccgggccgacacgggccttttttcacggtccaagtccggctccgaggaggtgctgtgcgactcctgcatcggcaacaagcagaaggcggtcaagtcctgcctggtgtgccaggcctccttctgcgagctgcatctcaagccccacctggagggcgccgccttccgagaccaccagctgctcgagcccatccgggactttgaggcccgcaagtgtcccgtgcatggcaagacgatggagctcttctgccagaccgaccagacctgcatctgctacctttgcatgttccaggagcacaagaatcatagcaccgtgacagtggaggaggccaaggccgagaaggagacggagctgtcattgcaaaaggagcagctgcagctcaagatcattgagattgaggatgaagctgagaagtggcagaaggagaaggaccgcatcaagagcttcaccaccaatgagaaggccatcctggagcagaacttccgggacctggtgcgggacctggagaagcaaaaggaggaagtgagggctgcgctggagcagcgggagcaggatgctgtggaccaagtgaaggtgatcatggatgctctggatgagagagccaaggtgctgcatgaggacaagcagacccgggagcagctgcatagcatcagcgactctgtgttgtttctgcaggaatttggtgcattgatgagcaattactctctccccccacccctgcccacctatcatgtcctgctggagggggagggcctgggacagtcactaggcaacttcaaggacgacctgctcaatgtatgcatgcgccacgttgagaagatgtgcaaggcggacctgagccgtaacttcattgagaggaaccacatggagaacggtggtgaccatcgctatgtgaacaactacacgaacagcttcgggggtgagtggagtgcaccggacaccatgaagagatactccatgtacctgacacccaaaggtggggtccggacatcataccagccctcgtctcctggccgcttcaccaaggagaccacccagaagaatttcaacaatctctatggcaccaaaggtaactacacctcccgggtctgggagtactcctccagcattcagaactctgacaatgacctgcccgtcgtccaaggcagctcctccttctccctgaaaggctatccctccctcatgcggagccaaagccccaaggcccagccccagacttggaaatctggcaagcagactatgctgtctcactaccggccattctacgtcaacaaaggcaacgggattgggtccaacgaagccccatgagctc

SEQ ID NO: 194888 - DNA, 547 bp, Homo sapiens
  Payload ID: 18489
  Gene Name: tripartite motif containing 29
  ENST ID: ENST00000529011
  CDS Start-End: 256-547
agtgaagcctgcccacttgtgaagacggagactccccgctccccggatgagaagcaagtgcgtcagagggaagcagcccaactggttgctgagttgtggaaaataagctgggggagaaaaaacacttcttttaaaaatcaggtgtgtctctagtcctcgtggttgcctgccccactccctgccgagacgcctgccagaaaggtcacctatcctgaaccccagcaagcctgaaacagctcagccaagcaccctgcgatggaagctgcagatgcctccaggagcaacgggtcgagcccagaagccagggatgcccggagcccgtcgggccccagtggcagcctggagaatggcaccaaggctgacggcaaggatgccaagaccaccaacgggcacggcggggaggcagctgagggcaagagcctgggcagcgccctgaagccaggggaaggtaggagcgccctgttcgcgggcaatgagtggcggcgacccatcatccagtttgtcgagtccggggacgacaagaactccaactacttcagcatggact

SEQ ID NO: 194889 - DNA, 2217 bp, Homo sapiens
  Payload ID: 18489
  Gene Name: tripartite motif containing 29
  ENST ID: ENST00000528870
  CDS Start-End: 1848-2213
ccacccacccacccttcctcaggccgtttggactaggatacagggattctaaccctcctcctcctttgaacttgctgccaaagttatgcaactataggaagagacctccagagcagggacatcctgggcactggctccacaaatgcctcctctctgtgggttgtccatcaaactcagagactggtttcgttcagatctacatctaattgccgggcccagcccagcagctgtgtggatgctgccactagtatgggccagattccaaactggtggctttgcagactctagcagacgtgacctagaactgcagccatgcctggagggaggacttgcctgtcatcatggccatgctgagcagtgctgagcccagaggctggacttggcctgttgagctgggctggggacggtgggacacagtgtctctgtgactcaccagctcccttgaagtcagctcttcttctgagtcatgctgtcccctcagaggtcaactgaatcatctcacagaaaacctctgaacctgagaaacaacatcgtcaagtccttttccacccagtccctttagggcctgaagcctgggcactttccccaaggccccacccggtgtcccaggcgttgcacggggccttgagagtacagccttgttaatgactgctagacgtgaataccccaaaggaaaggacccctgattgctctccagacacagcatatgattctttgggggaggagaagggggtgagggggataaaagtgtgcagaagggttggggttcaggaggccatttgtgcaccttggcgatggcaatatcacatggtgtccctgtgaaatgtgggggacattcaatcacacacaaggacagataagccatttcagcaagacaatcatttggcttcaaacggcactcagatcccgaaatcctccttctaatgacaatagtgatgatgctaatggtgatggtgacagctgacaatgattgagtgctcgctcgatgccgggcatttcactgagcttctcacgcacattaccttattttccctgtggggtgtactgcattttacaggcgagaaggctgaggctcagagaagcatcctttcaaagggcgcactgctcggtagggggtacggcggggttgaacactctgctgttcagtctcccatgccctctcatctgagaagctgcggctggcggtggctgcagaagtggggttgaggagtgtgataatcatcgtccctggggtacaaactcggcagggcagcccctccggtgaggtccggccaggcctgggggatggcctagactggggtggggtgagccttgcagaaactgttcaggctcctggccgctcactgtcccatttctaggtcacaatgctggccacggcctctgtacaggtgtggccctgcgtcctgtacgaggtgtgtggcgaggtggcaagcaggagcagggatgggcactgctgattcagtagcccacacctgtgcctggggccgtgggggcggctcctctgcctctgtgttgttttttcgtgtggctgctgggagtgtgtctgctctaggaggtggtggccggtgagtcagacagtggagtgaccatccactcctccccgatgctagcctgcccaccagaccagggactcgtccacaccctcaaaggcccctgcgctaagagacaccaggccacttcatcctggactctgtggggcacagggctgggctaacacctaggagggcatttgtttattctttgagtatctgctgtgcaccaggacactgataggcgcaggtggtgaccatcgctatgtgaacaactacacgaacagcttcgggggtgagtggagtgcaccggacaccatgaagagatactccatgtacctgacacccaaaggtggggtccggacatcataccagccctcgtctcctggccgcttcaccaaggagaccacccagaagaatttcaacaatctctatggcaccaaaggtaactacacctcccgggtctgggagtactcctccagcattcagaactctgacaatgacctgcccgtcgtccaaggcagctcctccttctccctgaaaggctatccctccctcatgcggagccaaagccccaaggcccagccccagacttggaaatctggcaagcagactatgctgtctcactaccggccattctacgtcaacaaaggcaacgggattgggtccaacgaagccccatgagctc

SEQ ID NO: 194890 - DNA, 1233 bp, Homo sapiens
  Payload ID: 18489
  Gene Name: tripartite motif containing 29
  ENST ID: ENST00000529044
  CDS Start-End: 246-1229
gagacactccctgggctgggctgggctgagctgggctggatccccttcctttctcttcccattgtccccaggtccactgaaaagggcaagcaccctgtaaatgagtttccctcctgctcttgctgggtggaggagataggcagaggtttagcccttaaaaagacatggctaggatatccagccctagtggcctgagaatacagcaagatggtatttaacttactgctagatccttggcgactggcatggtgcctggcatatccgagacggagctgtcattgcaaaaggagcagctgcagctcaagatcattgagattgaggatgaagctgagaagtggcagaaggagaaggaccgcatcaagagcttcaccaccaatgagaaggccatcctggagcagaacttccgggacctggtgcgggacctggagaagcaaaaggaggaagtgagggctgcgctggagcagcgggagcaggatgctgtggaccaagtgaaggtgatcatggatgctctggatgagagagccaaggtgctgcatgaggacaagcagacccgggagcagctgcatagcatcagcgactctgtgttgtttctgcaggaatttggtgcattgatgagcaattactctctccccccacccctgcccacctatcatgtcctgctggagggggagggcctgggacagtcactaggcaacttcaaggacgacctgctcaatgtatgcatgcgccacgttgagaagatgtgcaaggcggacctgagccgtaacttcattgagaggaaccacatggagaacggtggtgaccatcgctatgtgaacaactacacgaacagcttcgggggtgagtggagtgcaccggacaccatgaagagatactccatgtacctgacacccaaaggtggggtccggacatcataccagccctcgtctcctggccgcttcaccaaggagaccacccagaagaatttcaacaatctctatggcaccaaaggtaactacacctcccgggtctgggagtactcctccagcattcagaactctgacaatgacctgcccgtcgtccaaggcagctcctccttctccctgaaaggctatccctccctcatgcggagccaaagccccaaggcccagccccagacttggaaatctggcaagcagactatgctgtctcactaccggccattctacgtcaacaaaggcaacgggattgggtccaacgaagccccatgagctc

SEQ ID NO: 194891 - DNA, 385 bp, Homo sapiens
  Payload ID: 18489
  Gene Name: tripartite motif containing 29
  ENST ID: ENST00000526881
  CDS Start-End: 103-385
ggcctctccaagtttatgctgatgctctctgcacggttactaacagagtccttctactctcaaaagcatgccaatttgggtgataaattagttgattgacttatgtcagacccaaaggacttctctcagtggtggaatccaggtggggtccggacatcataccagccctcgtctcctggccgcttcaccaaggagaccacccagaagaatttcaacaatctctatggcaccaaaggtaactacacctcccgggtctgggagtactcctccagcattcagaactctgacaatgacctgcccgtcgtccaaggcagctcctccttctccctgaaaggctatccctccctcatgcggagccaaagccccaaggcccagccccagactt

SEQ ID NO: 194892 - DNA, 555 bp, Homo sapiens
  Payload ID: 18489
  Gene Name: tripartite motif containing 29
  ENST ID: ENST00000532833
  CDS Start-End: 289-555
tttggaggtccggcacccgctctgcccatgcctatgcttcaggctctgtgagaaggctggactccttctggaacttcaggaccttggatgctcccctcctctgctcctgcctcccttcccccagccctggggtgtgtcagatgtgtgttttctcctggactcagctgaagcaaggtgtgtctctagtcctcgtggttgcctgccccactccctgccgagacgcctgccagaaaggtcacctatcctgaaccccagcaagcctgaaacagctcagccaagcaccctgcgatggaagctgcagatgcctccaggagcaacgggtcgagcccagaagccagggatgcccggagcccgtcgggccccagtggcagcctggagaatggcaccaaggctgacggcaaggatgccaagaccaccaacgggcacggcggggaggcagctgagggcaagagcctgggcagcgccctgaagccaggggaaggtaggagcgccctgttcgcgggcaatgagtggcggcgacccatcatccagtttgtcgagtccggggacgacaag

SEQ ID NO: 194893 - DNA, 514 bp, Homo sapiens
  Payload ID: 18489
  Gene Name: tripartite motif containing 29
  ENST ID: ENST00000533302
  CDS Start-End: 1-510
aactacacgaacagcttcgggggtgagtggagtgcaccggacaccatgaagagatactccatgtacctgacacccaaaggtggggtccggacatcataccagccctcgtctcctggccgcttcaccaaggagaccacccagaagaatttcaacaatctctatggcaccaaaggtaactacacctcccgggtctgggagtactcctccagcattcagaactctgacaatgacctgcccgtcgtccaaggcagctcctccttctccctgaaaggcactgggaaaaccccttatcagttcaccaccttgggacaggccactgcagagttttccaaaccactgggtcgcagtgggctgtctaaaaataatcccggctatccctccctcatgcggagccaaagccccaaggcccagccccagacttggaaatctggcaagcagactatgctgtctcactaccggccattctacgtcaacaaaggcaacgggattgggtccaacgaagccccatgagctc

SEQ ID NO: 194894 - DNA, 510 bp, Homo sapiens
  Payload ID: 18489
  Gene Name: tripartite motif containing 29
  ENST ID: ENST00000627238
  CDS Start-End: 1-510
atggaagctgcagatgcctccaggagcaacgggtcgagcccagaagccagggatgcccggagcccgtcgggccccagtggcagcctggagaatggcaccaaggctgacggcaaggatgccaagaccaccaacgggcacggcggggaggcagctgagggcaagagcctgggcagcgccctgaagccaggggaagaagccacccgttacctttgccgaaaagggcgagctgcgcaagtccattttctcggagtcccggaagcccacggtgtccatcatggagcccggggagacccggcggaacagctacccccgggccgacacgggccttttttcacggtccaagtccggctccgaggaggtgctgtgcgactcctgcatcggcaacaagcagaaggcggtcaagtcctgcctggtgtgccaggcctccttctgcgagctgcatctcaagccccacctggagggcgccgccttccgagaccaccagctgctcgagcccatccgggactttga

SEQ ID NO: 194895 - DNA, 2879 bp, Homo sapiens
  Payload ID: 18490
  Gene Name: tripartite motif containing 3
  Uniprot ID: O75382
  ENST ID: ENST00000345851
  CDS Start-End: 232-2466
cccccggccggtccgcagccccgccccggcccctccctccggcctgtgcggctagtccggcggcggcgccggcgcggggacaggcggaggcgcgggcagggccgggcggacgggcgctggcagcagtagcagcgccgcgggcccttcagagtggccgcagtccgagctttgccctcgcatcctgttccaacgcgaggctggtgtgagtggcgggagccatctgtgggcgccatggcaaagagggaggacagccctggcccagaggtccagccaatggacaagcagttcctggtatgcagcatctgcctggatcggtaccagtgccccaaggttcttccttgcctgcacaccttctgtgagagatgtctccaaaactatatccctgcccagagcctgacgctatcctgtccagtatgccggcagacgtccatcctcccagagcagggcgtctcggcactgcagaacaacttcttcatcagcagcctcatggaggcaatgcagcaggcacctgatggggcccacgacccggaggacccccaccccctcagtgtagtggctggccgccctctctcctgccccaaccatgaaggcaagacgatggagttttactgtgaggcctgtgagacggccatgtgtggtgagtgccgcgccggggagcatcgtgagcatggcacagtgctgctgagggatgtggtggagcagcacaaggcggccctgcagcgccagctcgaggctgtgcgtggccgattgccacagctgtccgcagcaattgccttagtcgggggcatcagccagcagctgcaggagcgcaaggcagaggccctggcccagatcagtgcagcgttcgaggacctggagcaagcactgcagcagcgcaagcaggctctggtcagcgacctggagaccatttgtggggccaaacagaaggtgttgcaaagccagctggacacactgcgccagggtcaggaacacatcggcagtagctgcagctttgcagagcaggcactgcgcctgggctcggccccggaggtgttgctggtgcgcaagcacatgcgagagcggctggctgcattggcggcacaggccttcccggagcggccacatgagaatgcacagctggaactggtccttgaggtggacggtctgcggcgatcggtgctcaatctgggcgcactgctcaccacgagcgccactgcacacgaaacggtggccacgggagagggcctgcgccaggcgctagtgggccagcctgcctcgctcactgtcactaccaaagacaaggacgggcggttggtgcgcacaggcagcgctgagctgcgtgcagagatcaccggcccggacggcacgcgccttccggtgccagtggtggaccacaagaatggcacatatgagctagtgtacacagcgcgcacggaaggcgagctgctcctctcggtgctgctctacggacagccagtgcgcggcagccccttccgcgtgcgtgccctgcgtccgggggacctgccaccttccccggacgatgtgaagcgccgtgtcaagtcccctggcggccccggcagccatgtgcgccagaaggcagtgcgtaggcccagctccatgtacagcacaggcggcaaacgaaaggacaacccaattgaggatgagctcgtcttccgtgttggcagtcgtggaagggagaaaggtgaattcaccaatttacaaggtgtgtccgcagccagcagcggccgcatcgtggtagcagacagcaacaaccagtgtattcaggttttctccaatgagggccagttcaagttccgttttggggtccgaggacgctcacctgggcagctgcagcgccccacaggtgtggcagtggacaccaatggagacataattgtggcagactatgacaaccgttgggtcagcatcttctcccctgagggcaagttcaagaccaagattggagctggccgcctcatgggccccaagggagtggccgtagaccggaatggacatatcattgtggtcgacaacaagtcttgctgcgtctttaccttccagcccaatggcaaactggttggccgttttgggggccgtggggccactgaccgccactttgcagggccccattttgtggctgtgaacaacaagaatgaaattgtagtaacggacttccataaccattcagtgaaggtgtacagtgccgatggagagttcctcttcaagtttggctcccatggcgagggcaatgggcagttcaatgcccccacaggagtagctgtggactccaatggaaacatcattgtggctgactggggcaacagccgcatccaggtattcgacagctctggctccttcctgtcctatatcaacacatctgcagaaccactgtatggtccacagggcctggcactgacctcggatggccatgtggtggtggctgatgctggcaaccactgctttaaagcctatcgctacctccagtagctgtacagaggccctgcctggcttgtggagggacagacattggggtgattggacaagagggtctggctgggaggtgggccagacctggcagcactgaatgtgggctgtgggcatgggtgcacccggtgccctccctctcctacccccacccccacggttgcactttatttattcggttcttgctttggtgactgggtgagcctggactgtggtcccaaggatgtgtgcagagcttcaccctacccttcttacacacctccccacccctgtcagtctgctccccatcccccagcctggggccagaacagcctaccccaggacaggagtccctctagttgtctccctaccaccctatacacactgacagagacagcaataccccaccccccatattaaataaatgtcttcaccaa

SEQ ID NO: 194896 - DNA, 3042 bp, Homo sapiens
  Payload ID: 18490
  Gene Name: tripartite motif containing 3
  Uniprot ID: O75382
  ENST ID: ENST00000359518
  CDS Start-End: 397-2631
cccccggccggtccgcagccccgccccggcccctccctccggcctgtgcggctagtccggcggcggcgccggcgcggggacaggcggaggcgcgggcagggccgggcggacgggcgctggcagcagtagcagcgccgcgggcccttcagagtggccgcagtccgagctttgccctcgcatcctgttccaacgcggaaaggacccctctggttctcctgtagcctgagccctgcctggaggaccccaggcccctccctggttctgacctcctcccttctgcaattggcttcagatcctgggctgcaaacctgcagggacagatggttgcaggttggaggggcaggctgcaccccagggagaggctggtgtgagtggcgggagccatctgtgggcgccatggcaaagagggaggacagccctggcccagaggtccagccaatggacaagcagttcctggtatgcagcatctgcctggatcggtaccagtgccccaaggttcttccttgcctgcacaccttctgtgagagatgtctccaaaactatatccctgcccagagcctgacgctatcctgtccagtatgccggcagacgtccatcctcccagagcagggcgtctcggcactgcagaacaacttcttcatcagcagcctcatggaggcaatgcagcaggcacctgatggggcccacgacccggaggacccccaccccctcagtgtagtggctggccgccctctctcctgccccaaccatgaaggcaagacgatggagttttactgtgaggcctgtgagacggccatgtgtggtgagtgccgcgccggggagcatcgtgagcatggcacagtgctgctgagggatgtggtggagcagcacaaggcggccctgcagcgccagctcgaggctgtgcgtggccgattgccacagctgtccgcagcaattgccttagtcgggggcatcagccagcagctgcaggagcgcaaggcagaggccctggcccagatcagtgcagcgttcgaggacctggagcaagcactgcagcagcgcaagcaggctctggtcagcgacctggagaccatttgtggggccaaacagaaggtgttgcaaagccagctggacacactgcgccagggtcaggaacacatcggcagtagctgcagctttgcagagcaggcactgcgcctgggctcggccccggaggtgttgctggtgcgcaagcacatgcgagagcggctggctgcattggcggcacaggccttcccggagcggccacatgagaatgcacagctggaactggtccttgaggtggacggtctgcggcgatcggtgctcaatctgggcgcactgctcaccacgagcgccactgcacacgaaacggtggccacgggagagggcctgcgccaggcgctagtgggccagcctgcctcgctcactgtcactaccaaagacaaggacgggcggttggtgcgcacaggcagcgctgagctgcgtgcagagatcaccggcccggacggcacgcgccttccggtgccagtggtggaccacaagaatggcacatatgagctagtgtacacagcgcgcacggaaggcgagctgctcctctcggtgctgctctacggacagccagtgcgcggcagccccttccgcgtgcgtgccctgcgtccgggggacctgccaccttccccggacgatgtgaagcgccgtgtcaagtcccctggcggccccggcagccatgtgcgccagaaggcagtgcgtaggcccagctccatgtacagcacaggcggcaaacgaaaggacaacccaattgaggatgagctcgtcttccgtgttggcagtcgtggaagggagaaaggtgaattcaccaatttacaaggtgtgtccgcagccagcagcggccgcatcgtggtagcagacagcaacaaccagtgtattcaggttttctccaatgagggccagttcaagttccgttttggggtccgaggacgctcacctgggcagctgcagcgccccacaggtgtggcagtggacaccaatggagacataattgtggcagactatgacaaccgttgggtcagcatcttctcccctgagggcaagttcaagaccaagattggagctggccgcctcatgggccccaagggagtggccgtagaccggaatggacatatcattgtggtcgacaacaagtcttgctgcgtctttaccttccagcccaatggcaaactggttggccgttttgggggccgtggggccactgaccgccactttgcagggccccattttgtggctgtgaacaacaagaatgaaattgtagtaacggacttccataaccattcagtgaaggtgtacagtgccgatggagagttcctcttcaagtttggctcccatggcgagggcaatgggcagttcaatgcccccacaggagtagctgtggactccaatggaaacatcattgtggctgactggggcaacagccgcatccaggtattcgacagctctggctccttcctgtcctatatcaacacatctgcagaaccactgtatggtccacagggcctggcactgacctcggatggccatgtggtggtggctgatgctggcaaccactgctttaaagcctatcgctacctccagtagctgtacagaggccctgcctggcttgtggagggacagacattggggtgattggacaagagggtctggctgggaggtgggccagacctggcagcactgaatgtgggctgtgggcatgggtgcacccggtgccctccctctcctacccccacccccacggttgcactttatttattcggttcttgctttggtgactgggtgagcctggactgtggtcccaaggatgtgtgcagagcttcaccctacccttcttacacacctccccacccctgtcagtctgctccccatcccccagcctggggccagaacagcctaccccaggacaggagtccctctagttgtctccctaccaccctatacacactgacagagacagcaataccccaccccccatattaaataaatgtcttcacc

SEQ ID NO: 194897 - DNA, 1117 bp, Homo sapiens
  Payload ID: 18490
  Gene Name: tripartite motif containing 3
  ENST ID: ENST00000528227
  CDS Start-End: 336-1117
ggcggcgccggcgcggggacaggcggaggcgcgggcagggccgggcggacgggcgctggcagcagtagcagcgccgcgggcccttcagagtggccgcagtccgagctttgccctcgcatcctgttccaacgcggaaaggacccctctggttctcctgtagcctgagccctgcctggaggaccccaggcccctccctggttctgacctcctcccttctgcaattggcttcagatcctgggctgcaaacctgcagggacagatggttgcaggttggaggggcaggctgcaccccagggagaggctggtgtgagtggcgggagccatctgtgggcgccatggcaaagagggaggacagccctggcccagaggtccagccaatggacaagcagttcctggtatgcagcatctgcctggatcggtaccagtgccccaaggttcttccttgcctgcacaccttctgtgagagatgtctccaaaactatatccctgcccagagcctgacgctatcctgtccagtatgccggcagacgtccatcctcccagagcagggcgtctcggcactgcagaacaacttcttcatcagcagcctcatggaggcaatgcagcaggcacctgatggggcccacgacccggaggacccccaccccctcagtgtagtggctggccgccctctctcctgccccaaccatgaaggcaagacgatggagttttactgtgaggcctgtgagacggccatgtgtggtgagtgccgcgccggggagcatcgtgagcatggcacagtgctgctgagggatgtggtggagcagcacaaggcggccctgcagcgccagctcgaggctgtgcgtggccgattgccacagctgtccgcagcaattgccttagtcgggggcatcagccagcagctgcaggagcgcaaggcagaggccctggcccagatcagtgcagcgttcgaggacctggagcaagcactgcagcagcgcaagcaggctctggtcagcgacctggagaccatttgtggggccaaacagaaggtgttgcaaagccagctggacacactgcgccagggtcaggaacacatcggcagtagctgcagctttgcagagcaggcactgcgcct

SEQ ID NO: 194898 - DNA, 3044 bp, Homo sapiens
  Payload ID: 18490
  Gene Name: tripartite motif containing 3
  Uniprot ID: O75382
  ENST ID: ENST00000525074
  CDS Start-End: 396-2630
ccttctcccagagttctgggtactgcccttctgccgcccagagatcgtgctgaggtacagacggtttctacgtcttcctggtcagccgatagactagcatattccataggagcactccaaggaagccggaaagggcgcctccaggaggcaggcggcccagacaggctcccagagtccgaaatccctgctgccccagctgccttttcttgacggagtctcatctcaatccctgagaccgactacaccgcccttcccggagccggaggcagctggcggagatccgggatccgagatccgggatccggctcgccggcccgccggctccctagcagcaccaaggaggcagcgtccgcaggagaggctggtgtgagtggcgggagccatctgtgggcgccatggcaaagagggaggacagccctggcccagaggtccagccaatggacaagcagttcctggtatgcagcatctgcctggatcggtaccagtgccccaaggttcttccttgcctgcacaccttctgtgagagatgtctccaaaactatatccctgcccagagcctgacgctatcctgtccagtatgccggcagacgtccatcctcccagagcagggcgtctcggcactgcagaacaacttcttcatcagcagcctcatggaggcaatgcagcaggcacctgatggggcccacgacccggaggacccccaccccctcagtgtagtggctggccgccctctctcctgccccaaccatgaaggcaagacgatggagttttactgtgaggcctgtgagacggccatgtgtggtgagtgccgcgccggggagcatcgtgagcatggcacagtgctgctgagggatgtggtggagcagcacaaggcggccctgcagcgccagctcgaggctgtgcgtggccgattgccacagctgtccgcagcaattgccttagtcgggggcatcagccagcagctgcaggagcgcaaggcagaggccctggcccagatcagtgcagcgttcgaggacctggagcaagcactgcagcagcgcaagcaggctctggtcagcgacctggagaccatttgtggggccaaacagaaggtgttgcaaagccagctggacacactgcgccagggtcaggaacacatcggcagtagctgcagctttgcagagcaggcactgcgcctgggctcggccccggaggtgttgctggtgcgcaagcacatgcgagagcggctggctgcattggcggcacaggccttcccggagcggccacatgagaatgcacagctggaactggtccttgaggtggacggtctgcggcgatcggtgctcaatctgggcgcactgctcaccacgagcgccactgcacacgaaacggtggccacgggagagggcctgcgccaggcgctagtgggccagcctgcctcgctcactgtcactaccaaagacaaggacgggcggttggtgcgcacaggcagcgctgagctgcgtgcagagatcaccggcccggacggcacgcgccttccggtgccagtggtggaccacaagaatggcacatatgagctagtgtacacagcgcgcacggaaggcgagctgctcctctcggtgctgctctacggacagccagtgcgcggcagccccttccgcgtgcgtgccctgcgtccgggggacctgccaccttccccggacgatgtgaagcgccgtgtcaagtcccctggcggccccggcagccatgtgcgccagaaggcagtgcgtaggcccagctccatgtacagcacaggcggcaaacgaaaggacaacccaattgaggatgagctcgtcttccgtgttggcagtcgtggaagggagaaaggtgaattcaccaatttacaaggtgtgtccgcagccagcagcggccgcatcgtggtagcagacagcaacaaccagtgtattcaggttttctccaatgagggccagttcaagttccgttttggggtccgaggacgctcacctgggcagctgcagcgccccacaggtgtggcagtggacaccaatggagacataattgtggcagactatgacaaccgttgggtcagcatcttctcccctgagggcaagttcaagaccaagattggagctggccgcctcatgggccccaagggagtggccgtagaccggaatggacatatcattgtggtcgacaacaagtcttgctgcgtctttaccttccagcccaatggcaaactggttggccgttttgggggccgtggggccactgaccgccactttgcagggccccattttgtggctgtgaacaacaagaatgaaattgtagtaacggacttccataaccattcagtgaaggtgtacagtgccgatggagagttcctcttcaagtttggctcccatggcgagggcaatgggcagttcaatgcccccacaggagtagctgtggactccaatggaaacatcattgtggctgactggggcaacagccgcatccaggtattcgacagctctggctccttcctgtcctatatcaacacatctgcagaaccactgtatggtccacagggcctggcactgacctcggatggccatgtggtggtggctgatgctggcaaccactgctttaaagcctatcgctacctccagtagctgtacagaggccctgcctggcttgtggagggacagacattggggtgattggacaagagggtctggctgggaggtgggccagacctggcagcactgaatgtgggctgtgggcatgggtgcacccggtgccctccctctcctacccccacccccacggttgcactttatttattcggttcttgctttggtgactgggtgagcctggactgtggtcccaaggatgtgtgcagagcttcaccctacccttcttacacacctccccacccctgtcagtctgctccccatcccccagcctggggccagaacagcctaccccaggacaggagtccctctagttgtctccctaccaccctatacacactgacagagacagcaataccccaccccccatattaaataaatgtcttcaccaag

SEQ ID NO: 194899 - DNA, 785 bp, Homo sapiens
  Payload ID: 18490
  Gene Name: tripartite motif containing 3
  ENST ID: ENST00000529529
  CDS Start-End: 496-785
ttctacgtcttcctggtcagccgatagactagcatattccataggagcactccaaggaagccggaaagggcgcctccaggaggcaggcggcccagacaggctcccagagtccgaaatccctgctgccccagctgccttttcttgacggagtctcatctcaatccctgagaccgactacaccgcccttcccggagccggaggcagctggcggagatccgggatccgagatccgggatccggctcgccggcccgccggctccctagcagcaccaaggaggcagcgtccgcaggaggaaaggacccctctggttctcctgtagcctgagccctgcctggaggaccccaggcccctccctggttctgacctcctcccttctgcaattggcttcagatcctgggctgcaaacctgcagggacagatggttgcaggttggaggggcaggctgcaccccagggagaggctggtgtgagtggcgggagccatctgtgggcgccatggcaaagagggaggacagccctggcccagaggtccagccaatggacaagcagttcctggtatgcagcatctgcctggatcggtaccagtgccccaaggttcttccttgcctgcacaccttctgtgagagatgtctccaaaactatatccctgcccagagcctgacgctatcctgtccagtatgccggcagacgtccatcctcccagagcagggcgtctcggcactgcagaacaacttcttcatcagcagcctcatggaggcaatgcagcaggcacctgatggggccca

SEQ ID NO: 194900 - DNA, 2704 bp, Homo sapiens
  Payload ID: 18490
  Gene Name: tripartite motif containing 3
  Uniprot ID: O75382
  ENST ID: ENST00000536344
  CDS Start-End: 416-2293
cccccggccggtccgcagccccgccccggcccctccctccggcctgtgcggctagtccggcggcggcgccggcgcggggacaggcggaggcgcgggcagggccgggcggacgggcgctggcagcagtagcagcgccgcgggcccttcagagtggccgcagtccgagctttgccctcgcatcctgttccaacgcgatgtctccaaaactatatccctgcccagagcctgacgctatcctgtccagtatgccggcagacgtccatcctcccagagcagggcgtctcggcactgcagaacaacttcttcatcagcagcctcatggaggcaatgcagcaggcacctgatggggcccacgacccggaggacccccaccccctcagtgtagtggctggccgccctctctcctgccccaaccatgaagacgatggagttttactgtgaggcctgtgagacggccatgtgtggtgagtgccgcgccggggagcatcgtgagcatggcacagtgctgctgagggatgtggtggagcagcacaaggcggccctgcagcgccagctcgaggctgtgcgtggccgattgccacagctgtccgcagcaattgccttagtcgggggcatcagccagcagctgcaggagcgcaaggcagaggccctggcccagatcagtgcagcgttcgaggacctggagcaagcactgcagcagcgcaagcaggctctggtcagcgacctggagaccatttgtggggccaaacagaaggtgttgcaaagccagctggacacactgcgccagggtcaggaacacatcggcagtagctgcagctttgcagagcaggcactgcgcctgggctcggccccggaggtgttgctggtgcgcaagcacatgcgagagcggctggctgcattggcggcacaggccttcccggagcggccacatgagaatgcacagctggaactggtccttgaggtggacggtctgcggcgatcggtgctcaatctgggcgcactgctcaccacgagcgccactgcacacgaaacggtggccacgggagagggcctgcgccaggcgctagtgggccagcctgcctcgctcactgtcactaccaaagacaaggacgggcggttggtgcgcacaggcagcgctgagctgcgtgcagagatcaccggcccggacggcacgcgccttccggtgccagtggtggaccacaagaatggcacatatgagctagtgtacacagcgcgcacggaaggcgagctgctcctctcggtgctgctctacggacagccagtgcgcggcagccccttccgcgtgcgtgccctgcgtccgggggacctgccaccttccccggacgatgtgaagcgccgtgtcaagtcccctggcggccccggcagccatgtgcgccagaaggcagtgcgtaggcccagctccatgtacagcacaggcggcaaacgaaaggacaacccaattgaggatgagctcgtcttccgtgttggcagtcgtggaagggagaaaggtgaattcaccaatttacaaggtgtgtccgcagccagcagcggccgcatcgtggtagcagacagcaacaaccagtgtattcaggttttctccaatgagggccagttcaagttccgttttggggtccgaggacgctcacctgggcagctgcagcgccccacaggtgtggcagtggacaccaatggagacataattgtggcagactatgacaaccgttgggtcagcatcttctcccctgagggcaagttcaagaccaagattggagctggccgcctcatgggccccaagggagtggccgtagaccggaatggacatatcattgtggtcgacaacaagtcttgctgcgtctttaccttccagcccaatggcaaactggttggccgttttgggggccgtggggccactgaccgccactttgcagggccccattttgtggctgtgaacaacaagaatgaaattgtagtaacggacttccataaccattcagtgaaggtgtacagtgccgatggagagttcctcttcaagtttggctcccatggcgagggcaatgggcagttcaatgcccccacaggagtagctgtggactccaatggaaacatcattgtggctgactggggcaacagccgcatccaggtattcgacagctctggctccttcctgtcctatatcaacacatctgcagaaccactgtatggtccacagggcctggcactgacctcggatggccatgtggtggtggctgatgctggcaaccactgctttaaagcctatcgctacctccagtagctgtacagaggccctgcctggcttgtggagggacagacattggggtgattggacaagagggtctggctgggaggtgggccagacctggcagcactgaatgtgggctgtgggcatgggtgcacccggtgccctccctctcctacccccacccccacggttgcactttatttattcggttcttgctttggtgactgggtgagcctggactgtggtcccaaggatgtgtgcagagcttcaccctacccttcttacacacctccccacccctgtcagtctgctccccatcccccagcctggggccagaacagcctaccccaggacaggagtccctctagttgtctccctaccaccctatacacactgacagagacagcaataccccaccccccatattaaataaatgtcttcacc

SEQ ID NO: 194901 - DNA, 2043 bp, Homo sapiens
  Payload ID: 18491
  Gene Name: tripartite motif containing 31
  Uniprot ID: Q9BZY9
  ENST ID: ENST00000357569
  CDS Start-End: 127-1404
attacacattcaaagtatccatttgttctcaagaggtagcaagaaacagtatccacagtggactccggggctcctacagacttggcacagcttcctacagtcttgaaacagccctgttgttctgtcatggccagtgggcagtttgtgaacaaactgcaagaggaagtgatctgccccatctgcctggacattctgcagaaacctgtcaccatcgactgtgggcacaatttctgcctcaaatgcatcactcagattggggaaacatcatgtggatttttcaaatgtcccctctgcaaaacttccgtaaggaagaacgcaatcaggttcaactcgctgttgcggaatctggtggagaaaatccaagctctacaagcctctgaggtgcagtccaaaaggaaagaggctacatgcccgaggcaccaggagatgttccactatttctgcgaggatgatgggaagttcctctgttttgtgtgttgtgaatccaaggaccacaaatcccataatgtcagcttgatcgaagaagctgcccagaattatcaggggcagattcaagagcagatccaagtcttgcagcaaaaggagaaggagacagtacaagtgaaggcacaaggtgtacacagggtcgatgtcttcacggaccaggtagaacatgagaagcaaaggatcctcacagaatttgaactcctgcatcaagtcctagaggaggagaagaatttcctgctatcacggatttactggctgggtcatgagggaacggaagcggggaaacactatgttgcctccactgagccacagttgaacgatctcaagaagctcgttgattccctgaagaccaagcagaacatgccacccaggcagctgctggaggatatcaaagtcgtcttgtgcagaagtgaagagtttcagtttctcaacccaacccctgttcctctggaactggagaaaaaactcagtgaagcaaaatcaagacacgactccatcacagggagcctgaaaaaattcaaagaccaactccaggctgataggaaaaaagatgaaaacagattcttcaaaagcatgaataaaaatgacatgaagagctggggcttgttacagaaaaataatcataaaatgaacaaaacctcagagcccgggtcatcttctgcaggcggcagaactacatcggggccaccaaatcaccactcttcagccccatcccactccctgtttcgggcctcgtctgctgggaaagtcacttttccagtatgtctcctggcctcttatgatgagatttctggtcaaggagcgagctctcaggatacgaagacatttgacgttgcgctgtccgaggagctccatgcggcactgagtgagtggctgacagcgatccgggcttggttttgtgaggttccttcaagctaagccagctcagagaacacggggagcggtggtgctacacggacttcggagcatagagtggcgctgagtgagtggctgagaccgaccacggttcttgacttagtggaattgggtcgaaggagtggagaatgggagggctcgggctactgagagtggagatgggggcgggggtggtggtgaagagagttggagaaggaatggacgagttcttgagcaaaaggaggggaagagacaatctccagccacccgccccacgcttgacttcttatcactttggctgtggtgccgcctagtggaaaaaggaagtccctgcagcagtccccgcactctttaagcagctgtttaccgaaggcaccagttcagccaggagtgaaatccggagaggagcaacgccagcctgggtcacagtccatcaaaccccatgagcccgaccactctcgctcttccttacattcccacgtcccccttctctcccaacccctcatatcagcaagggaaattaattaatgagatttgataaatcagtagatagaatgaggtccccattctgaaatatttagcagactggaaccaccacgcaagcctctgtagggggtggatggagacacttctaactttaataaactgcgactgaacgtggaa

SEQ ID NO: 194902 - DNA, 2043 bp, Homo sapiens
  Payload ID: 18491
  Gene Name: tripartite motif containing 31
  Uniprot ID: Q9BZY9
  ENST ID: ENST00000376734
  CDS Start-End: 127-1404
attacacattcaaagtatccatttgttctcaagaggtagcaagaaacagtatccacagtggactccggggctcctacagacttggcacagcttcctacagtcttgaaacagccctgttgttctgtcatggccagtgggcagtttgtgaacaaactgcaagaggaagtgatctgccccatctgcctggacattctgcagaaacctgtcaccatcgactgtgggcacaatttctgcctcaaatgcatcactcagattggggaaacatcatgtggatttttcaaatgtcccctctgcaaaacttccgtaaggaagaacgcaatcaggttcaactcgctgttgcggaatctggtggagaaaatccaagctctacaagcctctgaggtgcagtccaaaaggaaagaggctacatgcccgaggcaccaggagatgttccactatttctgcgaggatgatgggaagttcctctgttttgtgtgtcgtgaatccaaggaccacaaatcccataatgtcagcttgatcgaagaagctgcccagaattatcaggggcagattcaagagcagatccaagtcttgcagcaaaaggagaaggagacagtacaagtgaaggcacaaggtgtacacagggtcgatgtcttcacggaccaggtagaacatgagaagcaaaggatcctcacagaatttgaactcctgcatcaagtcctagaggaggagaagaatttcctgctatcacggatttactggctgggtcatgagggaacggaagcggggaaacactatgttgcctccactgagccacagttgaacgatctcaagaagctcgttgattccctgaagaccaagcagaacatgccacccaggcagctgctggaggatatcaaagtcgtcttgtgcagaagtgaagagtttcagtttctcaacccaacccctgttcctctggaactggagaaaaaactcagtgaagcaaaatcaagacatgactccatcacagggagcctaaaaaaattcaaagaccaactccaggctgataggaaaaaagatgaaaacagattcttcaaaagcatgaataaaaatgacatgaagagctggggcttgttacagaaaaataatcataaaatgaacaaaacctcagagcccgggtcatcttctgcaggcggcagaactacatcggggccaccaaatcaccactcttcagccccatcccactccctgtttcgggcctcgtctgctgggaaagtcacttttccagtatgtctcctggcctcttatgatgagatttctggtcaaggagcgagctctcaggatacgaagacatttgacgttgcgctgtccgaggagctccatgcggcactgagtgagtggctgacagcgatccgggcttggttttgtgaggttccttcaagctaagccagctcagagaacacggggagcggtggtgctacacggacttcggagcatagagtggcgctgagtgagtggctgagaccgaccacggttcttgacttagtggaattgggtcgaaggagtggagaatgggagggctcgggctactgagagtggagatgggggcgggggtggtggtgaagagagttggagaaggaatggacgaattcttgagcaaaaggaggggaagagacaatctccagccacccgccccacgcttgacttcttatcactttggctgtggtgccgcctagtggaaaaaggaagtccctgcagcagtccccgcactctttaagcagctgtttaccgaaggcaccagttcagccaggagtgaaatccggagaggagcaacgccagcctgggtcacagtccatcaaaccccatgagcccgaccactctcgctcttccttacattcccacgtcccccttctctcccaacccctcatatcagcaagggaaattaattaatgagatttgataaatcagtagatagaatgaggtccccattctgaaatatttagcagactggaaccaccacgcaagcctctgtagggggtggatggagacacttctaactttaataaactgcgactgaacgtggaa

SEQ ID NO: 194903 - DNA, 2043 bp, Homo sapiens
  Payload ID: 18491
  Gene Name: tripartite motif containing 31
  Uniprot ID: Q9BZY9
  ENST ID: ENST00000433864
  CDS Start-End: 127-1404
attacacattcaaagtatccatttgttctcaagaggtagcaagaaacagtatccacagtggactccggggctcctacagacttggcacagcttcctacagtcttgaaacagccctgttgttctgtcatggccagtgggcagtttgtgaacaaactgcaagaggaagtgatctgccccatctgcctggacattctgcagaaacctgtcaccatcgactgtgggcacaatttctgcctcaaatgcatcactcagattggggaaacatcatgtggatttttcaaatgtcccctctgcaaaacttccgtaaggaagaacgcaatcaggttcaactcgctgttgcggaatctggtggagaaaatccaagctctacaagcctctgaggtgcagtccaaaaggaaagaggctacatgcccgaggcaccaggagatgttccactatttctgcgaggatgatgggaagttcctctgttttgtgtgtcgtgaatccaaggaccacaaatcccataatgtcagcttgatcgaagaagctgcccagaattatcaggggcagattcaagagcagatccaagtcttgcagcaaaaggagaaggagacagtacaagtgaaggcacaaggtgtacacagggtcgatgtcttcacggaccaggtagaacatgagaagcaaaggatcctcacagaatttgaactcctgcatcaagtcctagaggaggagaagaatttcctgctatcacggatttactggctgggtcatgagggaacggaagcggggaaacactatgttgcctccactgagccacagttgaacgatctcaagaagctcgttgattccctgaagaccaagcagaacatgccacccaggcagctgctggaggatatcaaagtcgtcttgtgcagaagtgaagagtttcagtttctcaacccaacccctgttcctctggaactggagaaaaaactcagtgaagcaaaatcaagacacgactccatcacagggagcctgaaaaaattcaaagaccaactccaggctgataggaaaaaagatgaaaacagattcttcaaaagcatgaataaaaatgacatgaagagctggggcttgttacagaaaaataatcataaaatgaacaaaacctcagagcccgggtcatcttctgcaggcggcagaactacatcggggccaccaaatcaccactcttcagccccatcccactccctgtttcgggcctcgtctgctgggaaagtcacttttccagtatgtctcctggcctcttatgatgagatttctggtcaaggagcgagctctcaggatacgaagacatttgacgttgcgctgtccgaggagctccatgcggcactgagtgagtggctgacagcgatccgggcttggttttgtaaggttccttcaagctaagccagctcagagaacacggggagcggtggtgctccacggacttcggagcatagagtggcgctgagtgagtggctgagaccgaccacggttcttgacttagtggaattgggtcgaaggagtggagaatgggagggctcgggctactgagagtggagatgggggcgggggtggtggtgaagagagttggagaaggaatggacgagttcttgagcaaaaggaggggaagagacaatctccagccacccgccccacgcttgacttcttatcactttggctgtggtgccgcctagtggaaaaaggaagtccctgcagcagtccccgcactctttaagcagctgtttaccgaaggcaccagttcagccaggagtgaaatccagagacgagcaacgccagcctgggtcacagtccatcaaaccccatgagcccgaccactctcgctcttccttacattcccacgtcccccttctctcccaacccctcatatcagcaagggaaattaattaatgagatttgataaatcagtagatagaatgaggtccccattctgaaatatttagcagactggaaccaccacgcaagcctctgtagggggtggatggagacacttctaactttaataaactgcgactgaacgtggaa

SEQ ID NO: 194904 - DNA, 2043 bp, Homo sapiens
  Payload ID: 18491
  Gene Name: tripartite motif containing 31
  Uniprot ID: Q9BZY9
  ENST ID: ENST00000453266
  CDS Start-End: 127-1404
attacacattcaaagtatccatttgttctcaagaggtagcaagaaacagtatccacagtggactccggggctcctacagacttggcacagcttcctacagtcttgaaacagccctgttgttctgtcatggccagtgggcagtttgtgaacaaactgcaagaggaagtgatctgccccatctgcctggacattctgcagaaacctgtcaccatcgactgtgggcacaatttctgcctcaaatgcatcactcagattggggaaacatcatgtggatttttcaaatgtcccctctgcaaaacttccgtaaggaagaacgcaatcaggttcaactcgctgttgcggaatctggtggagaaaatccaagctctacaagcctctgaggtgcagtccaaaaggaaagaggctacatgcccgaggcaccaggagatgttccactatttctgcgaggatgatgggaagttcctctgttttgtgtgtcgtgaatccaaggaccacaaatcccataatgtcagcttgatcgaagaagctgcccagaattatcaggggcagattcaagagcagatccaagtcttgcagcaaaaggagaaggagacagtacaagtgaaggcacaaggtgtacacagggtcgatgtcttcacggaccaggtagaacatgagaagcaaaggatcctcacagaatttgaactcctgcatcaagtcctagaggaggagaagaatttcctgctatcacggatttactggctgggtcatgagggaacggaagcggggaaacactatgttgcctccactgagccacagttgaacgatctcaagaagctcgttgattccctgaagaccaagcagaacatgccacccaggcagctgctggaggatatcaaagtcgtcttgtgcagaagtgaagagtttcagtttctcaacccaacccctgttcctctggaactggagaaaaaactcagtgaagcaaaatcaagacacgactccatcacagggagcctgaaaaaattcaaagaccaactccaggctgataggaaaaaagatgaaaacagattcttcaaaagcatgaataaaaatgacatgaagagctggggcttgttacagaaaaataatcataaaatgaacaaaacctcagagcccgggtcatcttctgcaggcggcagaactacatcggggccaccaaatcaccactcttcagccccatcccactccctgtttcgggcctcgtctgctgggaaagtcacttttccagtatgtctcctggcctcttatgatgagatttctggtcaaggagcgagctctcaggatacgaagacatttgacgttgcgctgtccgaggagctccatgcggcactgagtgagtggctgacagcgatccgggcttggttttgtgaggttccttcaagctaagccagctcagagaacacggggagcggtggtgctacacggacttcggagcatagagtggcgctgagtgagtggctgagaccgaccacggttcttgacttagtggaattgggtcgaaggagtggagaatgggagggctcgggctactgagagtggagatgggggcgggggtggtggtgaagagagttggagaaggaatggacgagttcttgagcaaaaggaggggaagagacaatctccagccacccgccccacgcttgacttcttatcactttggctgtggtgccgcctagtggaaaaaggaagtccctgcagcagtccccgcactctttaagcagctgtttaccgaaggcaccagttcagccaggagtgaaatccggagaggagcaacgccagcctgggtcacagtccatcaaaccccatgagcccgaccactctcgctcttccttacattcccacgtcccccttctctcccaacccctcatatcagcaagggaaattaattaatgagatttgataaatcagtagatagaatgaggtccccattctgaaatatttagcagactggaaccaccacgcaagcctctgtagggggtggatggagacacttctaactttaataaactgcgactgaacgtggaa

SEQ ID NO: 194905 - DNA, 2043 bp, Homo sapiens
  Payload ID: 18491
  Gene Name: tripartite motif containing 31
  Uniprot ID: Q9BZY9
  ENST ID: ENST00000449412
  CDS Start-End: 127-1404
attacacattcaaagtatccatttgttctcaagaggtagcaagaaacagtatccacagtggactccggggctcctacagacttggcacagcttcctacagtcttgaaacagccctgttgttctgtcatggccagtgggcagtttgtgaacaaactgcaagaggaagtgatctgccccatctgcctggacattctgcagaaacctgtcaccatcgactgtgggcacaatttctgcctcaaatgcatcactcagattggggaaacatcatgtggatttttcaaatgtcccctctgcaaaacttccgtaaggaagaacgcaatcaggttcaactcgctgttgcggaatctggtggagaaaatccaagctctacaagcctctgaggtgcagtccaaaaggaaagaggctacatgcccgaggcaccaggagatgttccactatttctgcgaggatgatgggaagttcctctgttttgtgtgtcgtgaatccaaggaccacaaatcccataatgtcagcttgatcgaagaagctgcccagaattatcaggggcagattcaagagcagatccaagtcttgcagcaaaaggagaaggagacagtacaagtgaaggcacaaggtgtacacagggtcgatgtcttcacggaccaggtagaacatgagaagcaaaggatcctcacagaatttgaactcctgcatcaagtcctagaggaggagaagaatttcctgctatcacggatttactggctgggtcatgagggaacggaagcggggaaacactatgttgcctccactgagccacagttgaacgatctcaagaagctcgttgattccctgaagaccaagcagaacatgccacccaggcagctgctggaggatatcaaagtcgtcttgtgcagaagtgaagagtttcagtttctcaacccaacccctgttcctctagaactggagaaaaaactcagtgaagcaaaatcaagacacgactccatcacagggagcctgaaaaaattcaaagaccaactccaggctgataggaaaaaagatgaaaacagattcttcaaaagcatgaataaaaatgacatgaagagctggggcttgttacagaaaaataatcataaaatgaacaaaacctcagagcccgggtcatcttctgcaggcggcagaactacatcggggccaccaaatcaccactcttcagccccatcccactccctgtttcgggcctcgtctgctgggaaagtcacttttccagtatgtctcctggcctcttatgatgagatttctggtcaaggagcgagctctcaggatacgaagacatttgacgttgcgctgtccgaggagctccatgcggcactgagtgagtggctgacagcgatccgggcttggttttgtgaggttccttcaagctaagccagctcagagaacacggggagcggtggtgctacacggacttcggagcatagagtggcgctgagtgagtggctgagaccgaccacggttcttgacttagtggaattgggtcgaaggagtggagaatgggagggctcgggctactgagagtggagatgggggcgggggtggtggtgaagagagttggagaaggaatggacgaattcttgagcaaaaggaggggaagagacaatctccagccacccgccccacgcttgacttcttatcactttggctgtggtgccgcctagtggaaaaaggaagtccctgcagcagtccccgcactctttaagcagctgtttaccgaaggcaccagttcagccaggagtgaaatccggagaggagcaacgccagcctgggtcacagtccatcaaaccccatgagcccgaccactctcgctcttccttacattcccacgtcccccttctctcccaacccctcatatcagcaagggaaattaattaatgagatttgataaatcagtagatagaatgaggtccccattctgaaatatttagcagactggaaccaccacgcaagcctctgtagggggtggatggagacacttctaactttaataaactgcgactgaacgtggaa

SEQ ID NO: 194906 - DNA, 870 bp, Homo sapiens
  Payload ID: 18491
  Gene Name: tripartite motif containing 31
  ENST ID: ENST00000422484
  CDS Start-End: 127-870
attacacattcaaagtatccatttgttctcaagaggtagcaagaaacagtatccacagtggactccggggctcctacagacttggcacagcttcctacagtcttgaaacagccctgttgttctgtcatggccagtgggcagtttgtgaacaaactgcaagaggaagtgatctgccccatctgcctggacattctgcagaaacctgtcaccatcgactgtgggcacaatttctgcctcaaatgcatcactcagattggggaaacatcatgtggatttttcaaatgtcccctctgcaaaacttccgtaaggaagaacgcaatcaggttcaactcgctgttgcggaatctggtggagaaaatccaagctctacaagcctctgaggtgcagtccaaaaggaaagaggctacatgcccgaggcaccaggagatgttccactatttctgcgaggatgatgggaagttcctctgttttgtgtgtcgtgaatccaaggaccacaaatcccataatgtcagcttgatcgaagaagctgcccagaattatcaggggcagattcaagagcagatccaagtcttgcagcaaaaggagaaggagacagtacaagtgaaggcacaaggtgtacacagggtcgatgtcttcacggaccaggtagaacatgagaagcaaaggatcctcacagaatttgaactcctgcatcaagtcctagaggaggagaagaatttcctgctatcacggatttactggctgggtcatgagggaacggaagcggggaaacactatgttgcctccactgagccacagttgaacgatctcaagaagctcgttgattccctgaagaccaagcagaacatgccacccaggcagctgctggag

SEQ ID NO: 194907 - DNA, 2043 bp, Homo sapiens
  Payload ID: 18491
  Gene Name: tripartite motif containing 31
  Uniprot ID: Q9BZY9
  ENST ID: ENST00000445679
  CDS Start-End: 127-1404
attacacattcaaagtatccatttgttctcaagaggtagcaagaaacagtatccacagtggactccggggctcctacagacttggcacagcttcctacagtcttgaaacagccctgttgttctgtcatggccagtgggcagtttgtgaacaaactgcaagaggaagtgatctgccccatctgcctggacattctgcagaaacctgtcaccatcgactgtgggcacaatttctgcctcaaatgcatcactcagattggggaaacatcatgtggatttttcaaatgtcccctctgcaaaacttccgtaaggaagaacgcaatcaggttcaactcgctgttgcggaatctggtggagaaaatccaagctctacaagcctctgaggtgcagtccaaaaggaaagaggctacatgcccgaggcaccaggagatgttccactatttctgcgaggatgatgggaagttcctctgttttgtgtgtcgtgaatccaaggaccacaaatcccataatgtcagcttgatcgaagaagctgcccagaattatcaggggcagattcaagagcagatccaagtcttgcagcaaaaggagaaggagacagtacaagtgaaggcacaaggtgtacacagggtcgatgtcttcacggaccaggtagaacatgagaagcaaaggatcctcacagaatttgaactcctgcatcaagtcctagaggaggagaagaatttcctgctatcacggatttactggctgggtcatgagggaacggaagcggggaaacactatgttgcctccactgagccacagttgaacgatctcaagaagctcgttgattccctgaagaccaagcagaacatgccacccaggcagctgctggaggatatcaaagtcgtcttgtgcagaagtgaagagtttcagtttctcaacccaacccctgttcctctagaactggagaaaaaactcagtgaagcaaaatcaagacacgactccatcacagggagcctgaaaaaattcaaagaccaactccaggctgataggaaaaaagatgaaaacagattcttcaaaagcatgaataaaaatgacatgaagagctggggcttgttacagaaaaataatcataaaatgaacaaaacctcagagcccgggtcatcttctgcaggcggcagaactacatcggggccaccaaatcaccactcttcagccccatcccactccctgtttcgggcctcgtctgctgggaaagtcacttttccagtatgtctcctggcctcttatgatgagatttctggtcaaggagcgagctctcaggatacgaagacatttgacgttgcgctgtccgaggagctccatgcggcactgagtgagtggctgacagcgatccgggcttggttttgtgaggttccttcaagctaagccagctcagagaacacggggagcggtggtgctacacggacttcggagcatagagtggcgctgagtgagtggctgagaccgaccacggttcttgacttagtggaattgggtcgaaggagtggagaatgggagggctcgggctactgagagtggagatgggggcgggggtggtggtgaagagagttggagaaggaatggacgagttcttgagcaaaaggaggggaagagacaatctccagccacccgccccacgcttgacttcttatcactttggctgtggtgccgcctagtggaaaaaggaagtccctgcagcagtccccgcactctttaagcagctgtttaccgaaggcaccagttcagccaggagtgaaatccggagaggagcaacgccagcctgggtcacagtccatcaaaccccatgagcccgaccactctcgctcttccttacattcccacgtcccccttctctcccaacccctcatatcagcaagggaaattaattaatgagatttgataaatcagtagatagaatgaggtccccattctgaaatatttagcagactggaaccaccacgcaagcctctgtagggggtggatggagacacttctaactttaataaactgcgactgaacgtggaa

SEQ ID NO: 194908 - DNA, 2043 bp, Homo sapiens
  Payload ID: 18491
  Gene Name: tripartite motif containing 31
  ENST ID: ENST00000455349
  CDS Start-End: 127-1404
attacacattcaaagtatccatttgttctcaagaggtagcaagaaacagtatccacagtggactccggggctcctacagacttggcacagcttcctacagtcttgaaacagccctgttgttctgtcatggccagtgggcagtttgtgaacaaactgcaagaggaagtgatctgccccatctgcctggacattctgcagaaacctgtcaccattgactgtgggcacaatttctgcctcaaatgcatcactcagattggggaaacatcatgtggatttttcaaatgtcccctctgcaaaacttccgtaaggaagaacgcaatcaggttcaactcgctgttgcggaatctggtggagaaaatccaagctctacaagcctctgaggtgcagtccaaaaggaaagaggctacatgcccgaggcaccaggagatgttccattatttctgcgaggatgatgggaagttcctctgttttgtgtgtcgtgaatccaaggaccacaaatcccataatgtcagcttgatcgaagaagctgcccagaattatcaggggcagattcaagagcagatccaagtcttgcagcaaaaggagaaggagacagtacaagtgaaggcacaaggtgtacacagggtcgatgtcttcacggaccaggtagaacatgagaagcaaaggatcctcacagaatttgaactcctgcatcaagtcctagaggaggagaagaatttcctgctatcacggatttactggctgggtcatgagggaacggaagcagggaaacactatgttgcctccactgagccacagttgaacgatctcaagaagctcattgattccctgaagaccaagcagaacatgccacccaggcagctgctggaggatatcaaagtcgtcttgtgcagaagtgaagagtttcagtttctcaacccaacccctgttcctctggaactggagaaaaaactcagtgaagcaaaatcaagacatgactccatcacagggagcctgaaaaaattcaaagaccaactccaggctgataggaaaaaagatgaaaacagattcttcaaaagcatgaataaaaatgacatgaagagctggggcttgttacagaaaaataatcataaaatgaacaaaacctcagagcccgggtcatcttctgcaggcggcagaactacatcggggccaccaaatcaccactcttcagccccatcccactccctgtttcgggcctcgtctgctgggaaagtcacttttccagtatgtctcctggcctcttatgatgagatttctggtcaaggagcgagctctcaggatacgaagacatttgacgttgcgctgtccgaggagctccatgcggcactgagtgagtggctgacagcgatccgggcttggttttgtaaggttccttcaagctaagccagctcagagaacacggggagcggtggtgctccacggacttcggagcatagagtggcgctgagtgagtggctgagaccgaccacggttcttgacttagtggaattgggtcgaaggagtggagaatgggagggctcgggctactgagagtggagatgggggcgggggtggtggtgaagagagttggagaaggaatggacgagttcttgagcaaaaggaggggaagagacaatctccagccacccgccccacgcttgacttcttatcactttggctgtggtgccgcctagtggaaaaaggaagtccctgcagcagtccccgcactctttaagcagctgtttaccgaaggcaccagttcagccaggagtgaaatccagagacgagcaacgccagcctgggtcacagtccatcaaaccccatgagcccgaccactctcgctcttccttacattcccacgtcccccttctctcccaacccctcatatcagcaagggaaattaattaatgagatttgataaatcagtagatagaatgaggtccccattctgaaatatttagcagactggaaccaccacgcaagcctctgtagggggtggatggagacacttctaactttaataaactgcgactgaacgtggaa

SEQ ID NO: 194909 - DNA, 3688 bp, Homo sapiens
  Payload ID: 18492
  Gene Name: tripartite motif containing 32
  Uniprot ID: Q13049
  ENST ID: ENST00000373983
  CDS Start-End: 131-2092
ggcaggcgggtgggctgccggcggtggactcgtcggagccgcgggcggtcaggaatttgaccctctagggcatgaatactgtgctgttcagttctgagctgtgctagcaatacccttcaaaggaagagcaatggctgcagcagcagcttctcacctgaacctggatgccctccgggaagtgctagaatgccccatctgcatggagtccttcacagaagagcagctgcgtcccaagcttctgcactgtggccataccatctgccgccagtgcctggagaagctattggccagtagcatcaatggtgtccgctgtcccttttgcagcaagattacccgcataaccagcttgacccagctgacagacaatctgacagtgctaaagatcattgatacagctgggctcagcgaggctgtggggctgctcatgtgtcggtcctgtgggcggcgtctgccccggcaattctgccggagctgtggtttggtgttatgtgagccctgccgggaggcagaccatcagcctcctggccactgtacactccctgtcaaagaagcagctgaggagcggcgtcgggactttggagagaagttaactcgtctgcgggaacttatgggggagctgcagcggcggaaggcagccttggaaggtgtctccaaggaccttcaggcaaggtataaagcagttctccaggagtatgggcatgaggagcgcagggtccaggatgagctggctcgctctcggaagttcttcacaggctctttggctgaagttgagaagtccaatagtcaagtggtagaggagcagagttacctgcttaacattgcagaggtgcaggctgtgtctcgctgtgactacttcctggccaagatcaagcaggcagatgtagcactactggaggagacagctgatgaggaggagccagagctcactgccagcttgcctcgggagctcaccctgcaagatgtggagctccttaaggtaggtcatgttggccccctccaaattggacaagctgttaagaagccccggacagttaacgtggaagattcctgggccatggaggccacagcgtctgctgcctctacctctgttacttttagagagatggacatgagcccggaggaagtggttgccagccctagggcctcacctgctaaacagcggggtcctgaggcagcctccaatatccagcagtgcctctttctcaagaagatgggggccaaaggcagcactccaggaatgttcaatcttccagtcagtctctacgtgaccagtcaaggtgaagtactagtcgctgaccgtggtaactatcgtatacaagtctttacccgcaaaggctttttgaaggaaatccgccgcagccccagtggcattgatagctttgtgctaagcttccttggggcagatctacccaacctcactcctctctcagtggcaatgaactgccaggggctgattggtgtgactgacagctatgataactccctcaaggtatataccttggatggccactgcgtggcctgtcacaggagccagctgagcaaaccatggggtatcacagccttgccatctggccagtttgtagtaaccgatgtggaaggtggaaagctttggtgtttcacagttgatcgaggatcaggggtggtcaaatacagctgcctatgtagtgctgtgcggcccaaatttgtcacctgtgatgctgagggcaccgtctacttcacccagggcttaggcctcaatctggagaatcggcagaatgagcaccacctggagggtggcttttccattggctctgtaggccctgatgggcagctgggtcgccagattagccacttcttctcggagaatgaggatttccgctgcattgctggcatgtgtgtggatgctcgtggtgatctcatcgtggctgacagtagtcgcaaggaaattctccattttcctaagggtgggggctatagtgtccttattcgagagggacttacctgtccggtgggcatagccctaactcctaaggggcagctgctggtcttggactgttgggatcattgcatcaagatctacagctaccatctgagaagatattccaccccataggggatgagaaattatcagtttcttctgctcccaagccaacttcccttcccttagttcttggttgttagtggcacatgcagaatagactcagcctatgtcctgattccagctgggtagttctagaacttcagaagctccatcttttaatgtttttatttgttatgtccccctccccgcttcccacctaaatttagagctttaaaagatgcactgcccaaataggacacacgatggtgttagctgaagtttgattagcaattaggcacttccaaggctttagtagagagagccactttagccctttgtgccatgtttgaaatttgcccttgtattaaatccttgattttttcccatttggctttgatgcccttgatccattgtttccttcctactataatgtgcttcatctgtgacactttctcttgaactctgattggattcactgtgcatgcttcagtgggatctgctccacctttcagtgacatttaagacatcatattcccgtaacattatgtctcagtctgatcgtctttaccagtatgaaagtcattcatttagtgctaccaaaggggatacacaagccctttaggaagcagtacctctcgcctggaggatctgtgccatcttggattgagaattgcagatgtgacagaatggattgaccctagttggttggtattgatgacttcagcctggaaattgcttgccttttaaagaagcatatatgggttggaattatgccaaagcataggaagctgggaataagcaaacaaatgctgatatagtcagcaaatttggatagtctctagggctcatcatttttcatactacctctctcttctggcctgtgtctaaggaattgtacaacataggccagggccaacaaagtggagaggtggacacattttcatgttcattactaaaacaaacagcaaaactattggtttgttattctgtgttttcctcaagtcagtacatactatttggtttcaggatttctttccatttctctatcaagcattaaataattgagaactgtttcttcatctctggtgttcatgtcttttaattaaatacggaattttggagatgataagagggataacctgcgctatgccattttgcttccttatctcactgtgttctttcagagtgtagatatctacccaggtcaaaattcagccaaaagcactattatgtaaagataataatccaaatctttctcccaaatacatgtgtacagaatcatcccccaaggtttagagtcaccaataccctattctgagcttctgctgtatgttttatgtttataattacagttcacaaaaaggaagttagtcttgtttttaagatcagaagtgggtgagaggacctgtgatgaggttcctgagggtttggtgtttactaagtaatatatcttactctaggtgcagggctgatggcaagccaaagagcaactgccttactttgatgtaaacaaaatttgctaaactgagctgctcaaaattgtttttatggtagtagtgtttctttggattgtatcataatagctgccaaaggataggtaaagaggtcattaaaatgatgttgaactag

SEQ ID NO: 194910 - DNA, 3717 bp, Homo sapiens
  Payload ID: 18492
  Gene Name: tripartite motif containing 32
  Uniprot ID: Q13049
  ENST ID: ENST00000450136
  CDS Start-End: 162-2123
ggtgctcaacggcgcgtgcgcagagggaggcaggcgggtgggctgccggcggtggactcgtcggagccgcgggcggtcagcaggaatttgaccctctagggcatgaatactgtgctgttcagttctgagctgtgctagcaatacccttcaaaggaagagcaatggctgcagcagcagcttctcacctgaacctggatgccctccgggaagtgctagaatgccccatctgcatggagtccttcacagaagagcagctgcgtcccaagcttctgcactgtggccataccatctgccgccagtgcctggagaagctattggccagtagcatcaatggtgtccgctgtcccttttgcagcaagattacccgcataaccagcttgacccagctgacagacaatctgacagtgctaaagatcattgatacagctgggctcagcgaggctgtggggctgctcatgtgtcggtcctgtgggcggcgtctgccccggcaattctgccggagctgtggtttggtgttatgtgagccctgccgggaggcagaccatcagcctcctggccactgtacactccctgtcaaagaagcagctgaggagcggcgtcgggactttggagagaagttaactcgtctgcgggaacttatgggggagctgcagcggcggaaggcagccttggaaggtgtctccaaggaccttcaggcaaggtataaagcagttctccaggagtatgggcatgaggagcgcagggtccaggatgagctggctcgctctcggaagttcttcacaggctctttggctgaagttgagaagtccaatagtcaagtggtagaggagcagagttacctgcttaacattgcagaggtgcaggctgtgtctcgctgtgactacttcctggccaagatcaagcaggcagatgtagcactactggaggagacagctgatgaggaggagccagagctcactgccagcttgcctcgggagctcaccctgcaagatgtggagctccttaaggtaggtcatgttggccccctccaaattggacaagctgttaagaagccccggacagttaacgtggaagattcctgggccatggaggccacagcgtctgctgcctctacctctgttacttttagagagatggacatgagcccggaggaagtggttgccagccctagggcctcacctgctaaacagcggggtcctgaggcagcctccaatatccagcagtgcctctttctcaagaagatgggggccaaaggcagcactccaggaatgttcaatcttccagtcagtctctacgtgaccagtcaaggtgaagtactagtcgctgaccgtggtaactatcgtatacaagtctttacccgcaaaggctttttgaaggaaatccgccgcagccccagtggcattgatagctttgtgctaagcttccttggggcagatctacccaacctcactcctctctcagtggcaatgaactgccaggggctgattggtgtgactgacagctatgataactccctcaaggtatataccttggatggccactgcgtggcctgtcacaggagccagctgagcaaaccatggggtatcacagccttgccatctggccagtttgtagtaaccgatgtggaaggtggaaagctttggtgtttcacagttgatcgaggatcaggggtggtcaaatacagctgcctatgtagtgctgtgcggcccaaatttgtcacctgtgatgctgagggcaccgtctacttcacccagggcttaggcctcaatctggagaatcggcagaatgagcaccacctggagggtggcttttccattggctctgtaggccctgatgggcagctgggtcgccagattagccacttcttctcggagaatgaggatttccgctgcattgctggcatgtgtgtggatgctcgtggtgatctcatcgtggctgacagtagtcgcaaggaaattctccattttcctaagggtgggggctatagtgtccttattcgagagggacttacctgtccggtgggcatagccctaactcctaaggggcagctgctggtcttggactgttgggatcattgcatcaagatctacagctaccatctgagaagatattccaccccataggggatgagaaattatcagtttcttctgctcccaagccaacttcccttcccttagttcttggttgttagtggcacatgcagaatagactcagcctatgtcctgattccagctgggtagttctagaacttcagaagctccatcttttaatgtttttatttgttatgtccccctccccgcttcccacctaaatttagagctttaaaagatgcactgcccaaataggacacacgatggtgttagctgaagtttgattagcaattaggcacttccaaggctttagtagagagagccactttagccctttgtgccatgtttgaaatttgcccttgtattaaatccttgattttttcccatttggctttgatgcccttgatccattgtttccttcctactataatgtgcttcatctgtgacactttctcttgaactctgattggattcactgtgcatgcttcagtgggatctgctccacctttcagtgacatttaagacatcatattcccgtaacattatgtctcagtctgatcgtctttaccagtatgaaagtcattcatttagtgctaccaaaggggatacacaagccctttaggaagcagtacctctcgcctggaggatctgtgccatcttggattgagaattgcagatgtgacagaatggattgaccctagttggttggtattgatgacttcagcctggaaattgcttgccttttaaagaagcatatatgggttggaattatgccaaagcataggaagctgggaataagcaaacaaatgctgatatagtcagcaaatttggatagtctctagggctcatcatttttcatactacctctctcttctggcctgtgtctaaggaattgtacaacataggccagggccaacaaagtggagaggtggacacattttcatgttcattactaaaacaaacagcaaaactattggtttgttattctgtgttttcctcaagtcagtacatactatttggtttcaggatttctttccatttctctatcaagcattaaataattgagaactgtttcttcatctctggtgttcatgtcttttaattaaatacggaattttggagatgataagagggataacctgcgctatgccattttgcttccttatctcactgtgttctttcagagtgtagatatctacccaggtcaaaattcagccaaaagcactattatgtaaagataataatccaaatctttctcccaaatacatgtgtacagaatcatcccccaaggtttagagtcaccaataccctattctgagcttctgctgtatgttttatgtttataattacagttcacaaaaaggaagttagtcttgtttttaagatcagaagtgggtgagaggacctgtgatgaggttcctgagggtttggtgtttactaagtaatatatcttactctaggtgcagggctgatggcaagccaaagagcaactgccttactttgatgtaaacaaaatttgctaaactgagctgctcaaaattgtttttatggtagtagtgtttctttggattgtatcataatagctgccaaaggataggtaaagaggtcattaaaatgatgttgaact

SEQ ID NO: 194911 - DNA, 699 bp, Homo sapiens
  Payload ID: 18492
  Gene Name: tripartite motif containing 32
  ENST ID: ENST00000411410
  CDS Start-End: 182-699
gctgccggcggtggactcgtcggagccgcgggcggtcagatgagtgatggggaaagagcttttggaagtttgagttaattccttatggtcatgcagctaacaggaatttgaccctctagggcatgaatactgtgctgttcagttctgagctgtgctagcaatacccttcaaaggaagagcaatggctgcagcagcagcttctcacctgaacctggatgccctccgggaagtgctagaatgccccatctgcatggagtccttcacagaagagcagctgcgtcccaagcttctgcactgtggccataccatctgccgccagtgcctggagaagctattggccagtagcatcaatggtgtccgctgtcccttttgcagcaagattacccgcataaccagcttgacccagctgacagacaatctgacagtgctaaagatcattgatacagctgggctcagcgaggctgtggggctgctcatgtgtcggtcctgtgggcggcgtctgccccggcaattctgccggagctgtggtttggtgttatgtgagccctgccgggaggcagaccatcagcctcctggccactgtacactccctgtcaaagaagcagctgaggagcggcgtcgggactttggagagaagttaactcgtctgcgggaacttatgggggagctgcagcggcggaaggcagccttggaaggtgt

SEQ ID NO: 194912 - DNA, 8339 bp, Homo sapiens
  Payload ID: 18493
  Gene Name: tripartite motif containing 33
  Uniprot ID: Q9UPN9
  ENST ID: ENST00000358465
  CDS Start-End: 85-3468
ctgcggctggggctgggggcggcggcggcggcgacgcgggcggcgggcggcgcggggcggtccggcgggttcaaagaggaaaacatggcggaaaacaaaggcggcggcgaggctgagagcggcggcgggggcagcggcagcgcgccggtaactgccggggccgccgggcccgccgcgcaggaggcggagccgcctctcaccgcggtgctggtggaggaggaggaggaggaaggcggcagggccggcgctgagggcggcgcggccgggcccgacgacgggggggtggccgcggcctcctcgggctcggcccaggctgcttcatctcctgcggcctcagtgggcactggagttgccgggggcgcagtatcgacgccggctccagctccagcctcggctcccgctccgggtccctcggcagggccgcctcctggaccgccagcctcgctcctggacacctgcgccgtgtgtcagcagagcttgcagagccggcgtgaggcggagcccaagctgctgccctgtcttcactccttctgcctgcgctgcctgcccgagccggagcgccagctcagcgtgcccatcccggggggcagcaacggcgacatccagcaagttggtgtaatacggtgcccagtatgccgccaagaatgcagacagatagaccttgtggataattattttgtgaaagacacatctgaagctcctagcagttctgatgaaaaatcagaacaggtatgtactagttgtgaagacaatgcaagtgcagttggcttttgtgtagaatgtggagagtggctatgtaagacatgtatcgaagcacatcaaagagtaaaatttactaaagatcacttgatcaggaagaaagaagatgtctcagagtctgttggagcatctggtcaacgccctgttttctgccctgtacacaaacaagaacagttgaaacttttctgtgaaacatgtgatagattgacatgtagagactgtcagctattggaacacaaagaacataggtatcagtttttggaagaagcttttcaaaatcagaagggtgcaattgagaatctactggcgaaacttcttgagaagaagaattatgttcattttgcagctactcaggtgcagaataggataaaagaagtaaatgagactaacaaacgagtagaacaggaaattaaagtggccattttcacccttatcaatgaaattaataagaaaggaaaatctctcttacaacagctagagaatgttacaaaggaaagacagatgaagttactacagcagcagaatgacatcacaggcctttcccggcaggtgaagcatgttatgaacttcacaaattgggcaattgcaagtggcagcagcacagcactactatacagcaagcgactgattactttccagttgcgtcatattttgaaagcacggtgtgatcctgtccctgctgctaatggagcaatacgtttccattgtgatcccaccttctgggcaaagaatgtagtcaatttaggtaatctagtaatagagagtaaaccagctcctggttatactcctaatgttgtagttgggcaagttcctccagggacaaaccacattagtaaaacccctggacagattaacttagcacagcttcgactccagcacatgcaacaacaagtatatgcacagaaacatcagcagttgcaacagatgaggatgcagcaaccaccagcacctgtaccaactacaacaacaacaacacaacagcatcctagacaagcagcccctcagatgttacaacaacagcctcctcgattgatcagtgtgcaaacaatgcaaagaggcaacatgaactgtggagcttttcaagcccatcagatgagactggctcagaatgctgccagaataccagggatacccaggcacagcggccctcaatattccatgatgcagccacacctccaaagacaacactcaaacccagggcatgctggaccctttcccgtagtatcggtacacaacaccacaatcaacccaacgagccctactacagcaactatggcaaatgcaaaccgaggtcccaccagcccatctgttacagcaatagagctaatcccctcagttaccaatccagaaaaccttccatcgctgccagatattccacccatacagttggaagatgctggctcaagtagtttagataatctactaagtagatacatctcaggcagtcacctacccccacagcctacaagcaccatgaatccttctccaggtccctctgccctttctccgggatcatcaggtttatccaattctcacacacctgtgagacccccaagtacttctagtactggcagtcgaggcagctgtgggtcatcaggaagaactgctgagaagacaagtcttagtttcaaatctgatcaggtgaaggtcaagcaagaacctgggactgaagatgaaatatgtagcttttcaggaggtgtaaaacaagaaaaaacagaggatggcaggaggagtgcttgcatgttgagcagtcctgagagtagcttgacaccacctctctcaaccaacctgcatctagaaagtgaattggatgcattggcaagcctggaaaaccatgtgaaaattgaacctgcagatatgaatgaaagctgcaaacagtcagggctcagcagccttgttaatggaaagtccccaattcgaagcctcatgcacaggtcggcaaggattggaggagatggcaacaataaagatgatgacccaaatgaagactggtgtgctgtctgccaaaacggaggagatctcttgtgctgcgaaaaatgtccaaaggtctttcatctaacttgtcatgttccaacactacttagctttccaagtggggactggatatgcacattttgtagagatattggaaagccagaagttgaatatgattgtgataatttgcaacatagtaagaaggggaaaactgcgcaggggttaagccccgtggaccaaaggaaatgtgaacgtcttctgctttacctctattgccatgaattaagtattgaattccaggagcctgttcctgcttcgataccaaactactataaaattataaagaaaccaatggatttatccaccgtgaaaaagaagcttcagaaaaaacattcccaacactaccaaatcccggatgactttgtggccgatgtccgtttgatcttcaagaactgtgaaaggtttaatgaaatgatgaaagttgttcaagtttatgcagacacacaagagattaatttgaaggctgattcagaagtagctcaggcagggaaagcagttgcattgtactttgaagataaactcacagagatctactcagacaggaccttcgcacctttgccagagtttgagcaggaagaggatgatggtgaggtaactgaggactctgatgaagactttatacagccccgcagaaaacgcctaaagtcagatgagagaccagtacatataaagtaaaatgacatggatttaaatcaattgtttaaaaaaaaaaaaacgaaaaaaaaaaaaaaaacacaaaaaacccagaaaacttttaagtgttgctggaatatcctgcctacagtgggcacctccttgaagaagctgatagcttttacacagtattagattgaaataatggacagaaacacattcttgtcaagaaagggggagagaagtctgtttgcaagtttcaaagcaaaaagcaaaagtgaaatgatttgaggatttctgttctaatggagatgattctctgattgttagaaatggcaaatattgatgattgtgtgctattgattggtgcaggatacttggtatacgagtaaatacttgagactcgtgtcacttgataaattttctttttggactaggtcgcacagttattaaaacaacttttaaccctcccccttcacacacatacatatcaggttgttttctagttaaaaacccaagtagctcagattctactttaatgtcagtgcagatttgcattgaatcatgccattatgttttttctcatttttatgctgttgggtcttagtttttaaattgatataaagaactcagcaatggttttattttctactcatacttagggtttaggaaacactaccactagttatcatttaatcaacttcaatggtctactgaaacaaaaatggtaacttttcattagtggattatttagagttatagtagttgtttccagaaaacacttcctcacaattgtacttcccaatcaaatcatgtgatcatacagttattcccatgaaaggcagaatgtttgtttcaaaattaatctagttttctgtacatttaaatttgagaaggtgacaactggctcttttccagtcttccttcatgtcagttttctgatagaccactattggcaaacagtatctgtcaactaccaaatgtgtaaaattttctgtatttcactttgtcttatttgtaaatagtgaactaaaacttttggcagatcagcaacatttgctgagcctgttttttaagctaatgtgtattcttactaatgttcctatcaagaatggatttgtaatatatgctgtctatttctaatgttcacattcatattttgaggttctatcttattttaatagagaacagacttctcaaaaaatcttcagaagcagcttattattgaaatatcgaaatattgaaataaacccggtggggttagattactcatctgtccaccaagtgggacatttgcatggactgggggcttaaaggacttagaagagacctgtaagtaaatcctgaaaatgagccaatccccacttgaatggttactggagtaaacccacctttaccaccccaattacagcacccgaggccgataaaccaacttggctctggttcatttttcttttcttcatttgtgatgctcagattcaaaatgtgtgttctacactgttacaggcttctcttttgtttgattaaagattttagtcctacttttgtatggacacattagaatattcagagaccaaaatagaagaatttgctgttagatatttttcagaagtcagcagatttgtggcaaatcatttatttgcctttttaaaaattcatttaagcagttcagagagtagactactcagaaaattatttcacgtaattgtctaagaggtcaatattttttaatgcatattgaatcaaataaagtgctctaaagaaattattatacaaattcctttgggttgtttttcttttcttaacaaggggtgggggtaaacaggaatatgattcaggctttctggttgtgtatttaaagagtattgattttattattactattgatttactttattcctggcttccttttcacttttctttcaatttttaaaaaataatttaagccgttgaaaatataccaaactgttgaaacattttactcaaattttaaattcctaaaaatgttttttaataagagggagaaaattatttaaaaatacttatgcctatgccaatttccctcttttttcacaaaatccatgatttcagtttgtaagtagacatatatctaagggcacatttttggaaagtgaggaatagcagcagtataacttcattttgtcaggcctttgagttctaatattttgtattgctcttcaaatggatccttttaaaaaaattgtagataatgagtcataaatagattctgccaactgaggggagaaacattttaagtaaatatttttcagtatttggggccttaaaaaataattgtgtttccttaaaattacatgttagatagagtttttaggtttttttggttttaagattggttaaagcaatttaaaagccacttttttgtcaacatttaatagcctccacttctgttaagataatgtatactgctgaggaattactattaatagctatcaacataccaccattaaattaaggtattcactttagattttttattaaagcttttttcttgcacactgatcgttgtgtttctaagctgattttttcagctctaatatacctatggttaaaaagtataaaaacttaaattgatatttagatatatgttttcctattagtttatgttttaaaaagacaaaattgtatctgtcagtccctgaaggcagtttgtttttatactctctcacatttgtatttgttttttaaatggcagtattttagaagatttggagaaaagtccacataataatgttttcttaaaagcttttaaagtttttgctgtacttcaatttacttcttccatcagaaaactaagaacaaagtgttgctcagtctgttccgctgacctaaatttgtgttttcagcacttggctcagccaattcactgagtgaaggaattgctttatgaggcaaagcatgtgaaagttctaaagtatggttagattgtaggtcgtgctctatatggaaacatcaaaccattactacagagaaatgataaggcattggatccactattgaaattattatttttggatcaacaagttggtactttctgacttctgtatcttaacataagggaattttaggtaatgctaagtcagttgtctcattttttgtgataagttttggaatttttagttaattgaaataaataatgcttttaaatagaagtaaaaggtttataagtgtgcaaattgtagatttatcaattacctcagcaggtatcctgccatgtaattattagtgattagtgttaataagataatagattcaggtcttccaactatgcccttggattgtggcctactgtatgttattaaatggtctcttactatccaaaatgggagtagatgctgtggccccgtctcccttggcttttacgtcccatatccacccccattcatgtacaacatgtgaaatataaaaatctcatttcttgtcaaaatcagcactgcttatttgcatactcagcatcggatcagtgagtagttttataaaaaatccacgcacccaactcccttagttaaaacagattcttaattcataccatgaattcttaatttctgtaccatctatgttaatgatctgctgaaggtgactcaagattttcaaggtgtaatacagtttgatcatgtaccggacctggatatttaattttttttccctcacagttaatctcctccttgataaagcaataacactgctttgagtctgttgcctaatagcatgtcagaatcctctcctggatggtgattttataggaaagtttgtatgcatatcacccagtctatcttttaaaaattaagaaatttaaatgtatgctggaagtaatgacactatattgtggcattttattttaaaaattggggaaagttgcatatttttttaaaagtaagtgtttgagtaaaaaaattgaaggtacttttttaaggaaaaaaatttatatgccacagtttacatagacatttcagattcaacacgtactcttgaatataatggtttcttttacttggtcaaaatgcatgtatagcatttctttcatcttagttccttgtgtttgcctatgtggtcctttatatattttttattgtatcgaagaaacaaaactatcttcaaaaataagttaatttggatatatttgtcatatcaaactacaaagtgtacaaagttaagtttagcccttttctagaaagtgatctttaaaattaaaaatgctcctcttttaaattcaccaaatttatgtgtgggaaggcaccaaaatgattttgtaagtgccactgcaatattccctttcaagtgtggcctaaatttcaatcttaaggatggaatgcatgtctgctccttgttctgaaaaatgtaggcatctactacattttaaaacacagtgaaacatatacataagcctataaaaaaagatttgtgcaatttgaaagcctgttaattttttatgtagacatacctacacacgaaagggttaaattcacagccttactagttccttgcttccagtatttcaattggtctcctcccctcattattattattactactagtactattatttttgcacatagttaactgcccttcaatatgattcttaaaaagtgctgtttctgtggtatcgtattctctaaataatcatatttaattttttaaaacaaggttgcagtttctaattgtttcgttcctgtgtttttgctggtgtgtaataaaagcaagttttttcttttcatggttatttaatacattagctgcctgtaaataattcttgttataatgctctggaatgtgttgtagaagttgtattagattagttttaaacccttgtttgaaagccacattgttttggttatttctattaaattagaaaattgaaaaagttttcaaatgaa

SEQ ID NO: 194913 - DNA, 3457 bp, Homo sapiens
  Payload ID: 18493
  Gene Name: tripartite motif containing 33
  Uniprot ID: Q9UPN9
  ENST ID: ENST00000369543
  CDS Start-End: 85-3417
ctgcggctggggctgggggcggcggcggcggcgacgcgggcggcgggcggcgcggggcggtccggcgggttcaaagaggaaaacatggcggaaaacaaaggcggcggcgaggctgagagcggcggcgggggcagcggcagcgcgccggtaactgccggggccgccgggcccgccgcgcaggaggcggagccgcctctcaccgcggtgctggtggaggaggaggaggaggaaggcggcagggccggcgctgagggcggcgcggccgggcccgacgacgggggggtggccgcggcctcctcgggctcggcccaggctgcttcatctcctgcggcctcagtgggcactggagttgccgggggcgcagtatcgacgccggctccagctccagcctcggctcccgctccgggtccctcggcagggccgcctcctggaccgccagcctcgctcctggacacctgcgccgtgtgtcagcagagcttgcagagccggcgtgaggcggagcccaagctgctgccctgtcttcactccttctgcctgcgctgcctgcccgagccggagcgccagctcagcgtgcccatcccggggggcagcaacggcgacatccagcaagttggtgtaatacggtgcccagtatgccgccaagaatgcagacagatagaccttgtggataattattttgtgaaagacacatctgaagctcctagcagttctgatgaaaaatcagaacaggtatgtactagttgtgaagacaatgcaagtgcagttggcttttgtgtagaatgtggagagtggctatgtaagacatgtatcgaagcacatcaaagagtaaaatttactaaagatcacttgatcaggaagaaagaagatgtctcagagtctgttggagcatctggtcaacgccctgttttctgccctgtacacaaacaagaacagttgaaacttttctgtgaaacatgtgatagattgacatgtagagactgtcagctattggaacacaaagaacataggtatcagtttttggaagaagcttttcaaaatcagaagggtgcaattgagaatctactggcgaaacttcttgagaagaagaattatgttcattttgcagctactcaggtgcagaataggataaaagaagtaaatgagactaacaaacgagtagaacaggaaattaaagtggccattttcacccttatcaatgaaattaataagaaaggaaaatctctcttacaacagctagagaatgttacaaaggaaagacagatgaagttactacagcagcagaatgacatcacaggcctttcccggcaggtgaagcatgttatgaacttcacaaattgggcaattgcaagtggcagcagcacagcactactatacagcaagcgactgattactttccagttgcgtcatattttgaaagcacggtgtgatcctgtccctgctgctaatggagcaatacgtttccattgtgatcccaccttctgggcaaagaatgtagtcaatttaggtaatctagtaatagagagtaaaccagctcctggttatactcctaatgttgtagttgggcaagttcctccagggacaaaccacattagtaaaacccctggacagattaacttagcacagcttcgactccagcacatgcaacaacaagtatatgcacagaaacatcagcagttgcaacagatgaggatgcagcaaccaccagcacctgtaccaactacaacaacaacaacacaacagcatcctagacaagcagcccctcagatgttacaacaacagcctcctcgattgatcagtgtgcaaacaatgcaaagaggcaacatgaactgtggagcttttcaagcccatcagatgagactggctcagaatgctgccagaataccagggatacccaggcacagcggccctcaatattccatgatgcagccacacctccaaagacaacactcaaacccagggcatgctggaccctttcccgtagtatcggtacacaacaccacaatcaacccaacgagccctactacagcaactatggcaaatgcaaaccgaggtcccaccagcccatctgttacagcaatagagctaatcccctcagttaccaatccagaaaaccttccatcgctgccagatattccacccatacagttggaagatgctggctcaagtagtttagataatctactaagtagatacatctcaggcagtcacctacccccacagcctacaagcaccatgaatccttctccaggtccctctgccctttctccgggatcatcaggtttatccaattctcacacacctgtgagacccccaagtacttctagtactggcagtcgaggcagctgtgggtcatcaggaagaactgctgagaagacaagtcttagtttcaaatctgatcaggtgaaggtcaagcaagaacctgggactgaagatgaaatatgtagcttttcaggaggtgtaaaacaagaaaaaacagaggatggcaggaggagtgcttgcatgttgagcagtcctgagagtagcttgacaccacctctctcaaccaacctgcatctagaaagtgaattggatgcattggcaagcctggaaaaccatgtgaaaattgaacctgcagatatgaatgaaagctgcaaacagtcagggctcagcagccttgttaatggaaagtccccaattcgaagcctcatgcacaggtcggcaaggattggaggagatggcaacaataaagatgatgacccaaatgaagactggtgtgctgtctgccaaaacggaggagatctcttgtgctgcgaaaaatgtccaaaggtctttcatctaacttgtcatgttccaacactacttagctttccaagtggggactggatatgcacattttgtagagatattggaaagccagaagttgaatatgattgtgataatttgcaacatagtaagaaggggaaaactgcgcaggggttaagccccgtggaccaaaggaaatgtgaacgtcttctgctttacctctattgccatgaattaagtattgaattccaggagcctgttcctgcttcgataccaaactactataaaattataaagaaaccaatggatttatccaccgtgaaaaagaagcttcagaaaaaacattcccaacactaccaaatcccggatgactttgtggccgatgtccgtttgatcttcaagaactgtgaaaggtttaatgaagctgattcagaagtagctcaggcagggaaagcagttgcattgtactttgaagataaactcacagagatctactcagacaggaccttcgcacctttgccagagtttgagcaggaagaggatgatggtgaggtaactgaggactctgatgaagactttatacagccccgcagaaaacgcctaaagtcagatgagagaccagtacatataaagtaaaatgacatggatttaaatcaattgtttaaaaaaaaaaaaa

SEQ ID NO: 194914 - DNA, 2706 bp, Homo sapiens
  Payload ID: 18493
  Gene Name: tripartite motif containing 33
  ENST ID: ENST00000448034
  CDS Start-End: 1-2666
agtctgttggagcatctggtcaacgccctgttttctgccctgtacacaaacaagaacagttgaaacttttctgtgaaacatgtgatagattgacatgtagagactgtcagctattggaacacaaagaacataggtatcagtttttggaagaagcttttcaaaatcagaagggtgcaattgagaatctactggcgaaacttcttgagaagaagaattatgttcattttgcagctactcaggtgcagaataggataaaagaagtaaatgagactaacaaacgagtagaacaggaaattaaagtggccattttcacccttatcaatgaaattaataagaaaggaaaatctctcttacaacagctagagaatgttacaaaggaaagacagatgaagttactacagcagcagaatgacatcacaggcctttcccggcaggtgaagcatgttatgaacttcacaaattgggcaattgcaagtggcagcagcacagcactactatacagcaagcgactgattactttccagttgcgtcatattttgaaagcacggtgtgatcctgtccctgctgctaatggagcaatacgtttccattgtgatcccaccttctgggcaaagaatgtagtcaatttaggtaatctagtaatagagagtaaaccagctcctggttatactcctaatgttgtagttgggcaagttcctccagggacaaaccacattagtaaaacccctggacagattaacttagcacagcttcgactccagcacatgcaacaacaagtatatgcacagaaacatcagcagttgcaacagatgaggatgcagcaaccaccagcacctgtaccaactacaacaacaacaacacaacagcatcctagacaagcagcccctcagatgttacaacaacagcctcctcgattgatcagtgtgcaaacaatgcaaagaggcaacatgaactgtggagcttttcaagcccatcagatgagactggctcagaatgctgccagaataccagggatacccaggcacagcggccctcaatattccatgatgcagccacacctccaaagacaacactcaaacccagggcatgctggaccctttcccgtagtatcggtacacaacaccacaatcaacccaacgagccctactacagcaactatggcaaatgcaaaccgaggtcccaccagcccatctgttacagcaatagagctaatcccctcagttaccaatccagaaaaccttccatcgctgccagatattccacccatacaggcaaacgttgttccgatgatgcactcctggtatgagtttggagccagagagaagacccaggaccaaaatgtgttggaagatgctggctcaagtagtttagataatctactaagtagatacatctcaggcagtcacctacccccacagcctacaagcaccatgaatccttctccaggtccctctgccctttctccgggatcatcaggtttatccaattctcacacacctgtgagacccccaagtacttctagtactggcagtcgaggcagctgtgggtcatcaggaagaactgctgagaagacaagtcttagtttcaaatctgatcaggtgaaggtcaagcaagaacctgggactgaagatgaaatatgtagcttttcaggaggtgtaaaacaagaaaaaacagaggatggcaggaggagtgcttgcatgttgagcagtcctgagagtagcttgacaccacctctctcaaccaacctgcatctagaaagtgaattggatgcattggcaagcctggaaaaccatgtgaaaattgaacctgcagatatgaatgaaagctgcaaacagtcagggctcagcagccttgttaatggaaagtccccaattcgaagcctcatgcacaggtcggcaaggattggaggagatggcaacaataaagatgatgacccaaatgaagactggtgtgctgtctgccaaaacggaggagatctcttgtgctgcgaaaaatgtccaaaggtctttcatctaacttgtcatgttccaacactacttagctttccaagtggggactggatatgcacattttgtagagatattggaaagccagaagttgaatatgattgtgataatttgcaacatagtaagaaggggaaaactgcgcaggggttaagccccgtggaccaaaggaaatgtgaacgtcttctgctttacctctattgccatgaattaagtattgaattccaggagcctgttcctgcttcgataccaaactactataaaattataaagaaaccaatggatttatccaccgtgaaaaagaagcttcagaaaaaacattcccaacactaccaaatcccggatgactttgtggccgatgtccgtttgatcttcaagaactgtgaaaggtttaatgaaatgatgaaagttgttcaagtttatgcagacacacaagagattaatttgaaggctgattcagaagtagctcaggcagggaaagcagttgcattgtactttgaagataaactcacagagatctactcagacaggaccttcgcacctttgccagagtttgagcaggaagaggatgatggtgaggtaactgaggactctgatgaagactttatacagccccgcagaaaacgcctaaagtcagatgagagaccagtacatataaagtaaaatgacatggatttaaatcaattgtttaaaaaaaaaaaaa

SEQ ID NO: 194915 - DNA, 3493 bp, Homo sapiens
  Payload ID: 18493
  Gene Name: tripartite motif containing 33
  ENST ID: ENST00000450349
  CDS Start-End: 85-3444
ctgcggctggggctgggggcggcggcggcggcgacgcgggcggcgggcggcgcggggcggtccggcgggttcaaagaggaaaacatggcggaaaacaaaggcggcggcgaggctgagagcggcggcgggggcagcggcagcgcgccggtaactgccggggccgccgggcccgccgcgcaggaggcggagccgcctctcaccgcggtgctggtggaggaggaggaggaggaaggcggcagggccggcgctgagggcggcgcggccgggcccgacgacgggggggtggccgcggcctcctcgggctcggcccaggctgcttcatctcctgcggcctcagtgggcactggagttgccgggggcgcagtatcgacgccggctccagctccagcctcggctcccgctccgggtccctcggcagggccgcctcctggaccgccagcctcgctcctggacacctgcgccgtgtgtcagcagagcttgcagagccggcgtgaggcggagcccaagctgctgccctgtcttcactccttctgcctgcgctgcctgcccgagccggagcgccagctcagcgtgcccatcccggggggcagcaacggcgacatccagcaagttggtgtaatacggtgcccagtatgccgccaagaatgcagacagatagaccttgtggataattattttgtgaaagacacatctgaagctcctagcagttctgatgaaaaatcagaacaggtatgtactagttgtgaagacaatgcaagtgcagttggcttttgtgtagaatgtggagagtggctatgtaagacatgtatcgaagcacatcaaagagtaaaatttactaaagatcacttgatcaggaagaaagaagatgtctcagagtctgttggagcatctggtcaacgccctgttttctgccctgtacacaaacaagaacagttgaaacttttctgtgaaacatgtgatagattgacatgtagagactgtcagctattggaacacaaagaacataggtatcagtttttggaagaagcttttcaaaatcagaagggtgcaattgagaatctactggcgaaacttcttgagaagaagaattatgttcattttgcagctactcaggtgcagaataggataaaagaagtaaatgagactaacaaacgagtagaacaggaaattaaagtggccattttcacccttatcaatgaaattaataagaaaggaaaatctctcttacaacagctagagaatgttacaaaggaaagacagatgaagttactacagcagcagaatgacatcacaggcctttcccggcaggtgaagcatgttatgaacttcacaaattgggcaattgcaagtggcagcagcacagcactactatacagcaagcgactgattactttccagttgcgtcatattttgaaagcacggtgtgatcctgtccctgctgctaatggagcaatacgtttccattgtgatcccaccttctgggcaaagaatgtagtcaatttaggtaatctagtaatagagagtaaaccagctcctggttatactcctaatgttgtagttgggcaagttcctccagggacaaaccacattagtaaaacccctggacagattaacttagcacagcttcgactccagcacatgcaacaacaagtatatgcacagaaacatcagcagttgcaacagatgaggatgcagcaaccaccagcacctgtaccaactacaacaacaacaacacaacagcatcctagacaagcagcccctcagatgttacaacaacagcctcctcgattgatcagtgtgcaaacaatgcaaagaggcaacatgaactgtggagcttttcaagcccatcagatgagactggctcagaatgctgccagaataccagggatacccaggcacagcggccctcaatattccatgatgcagccacacctccaaagacaacactcaaacccagggcatgctggaccctttcccgtagtatcggtacacaacaccacaatcaacccaacgagccctactacagcaactatggcaaatgcaaaccgaggtcccaccagcccatctgttacagcaatagagctaatcccctcagttaccaatccagaaaaccttccatcgctgccagatattccacccatacagttggaagatgctggctcaagtagtttagataatctactaagtagatacatctcaggcagtcacctacccccacagcctacaagcaccatgaatccttctccaggtccctctgccctttctccgggatcatcaggtttatccaattctcacacacctgtgagacccccaagtacttctagtactggcagtcgaggcagctgtgggtcatcaggaagaactgctgagaagacaagtcttagtttcaaatctgatcaggtgaaggtcaagcaagaacctgggactgaagatgaaatatgtagcttttcaggaggtgtaaaacaagaaaaaacagaggatggcaggaggagtgcttgcatgttgagcagtcctgagagtagcttgacaccacctctctcaaccaacctgcatctagaaagtgaattggatgcattggcaagcctggaaaaccatgtgaaaattgaacctgcagatatgaatgaaagctgcaaacagtcagggctcagcagccttgttaatggaaagtccccaattcgaagcctcatgcacaggtcggcaaggattggaggagatggcaacaataaagatgatgacccaaatgaagactggtgtgctgtctgccaaaacggaggagatctcttgtgctgcgaaaaatgtccaaaggtctttcatctaacttgtcatgttccaacactacttagctttccaagtggggactggatatgcacattttgtagagatattggaaagccagaagttgaatatgattgtgataatttgcaacatagtaagaaggggaaaactgcgcaggggttaagccccgtggaccaaaggaaatgtgaacgtcttctgctttacctctattgccatgaattaagtattgaattccaggagcctgttcctgcttcgataccaaactactataaaattataaagaaaccaatggatttatccaccgtgaaaaagaagcttcagaaaaaacattcccaacactaccaaatcccggatgactttgtggccgatgtccgtttgatcttcaagaactgtgaaaggtttaatgaaatgatgaaagttgttcaagtttatgcagacacacaagagattaatttgaaggctgattcagaagtagctcaggcagggaaagcagttgcattgtactttgaagataaactcacagagatctactcagacaggaccttcgcacctttgccagagtttgagcaggaagaggatgatggtgaggtaactgaggactctgatgaagactttatacagccccgcagaacgcctaaagtcagatgagagaccagtacatataaagtaaaatgacatggatttaaatcaattgttt

SEQ ID NO: 194916 - DNA, 2311 bp, Homo sapiens
  Payload ID: 18494
  Gene Name: tripartite motif containing 34
  Uniprot ID: Q9BYJ4
  ENST ID: ENST00000429814
  CDS Start-End: 156-1622
tgaatgaatcctgaccacacccaccctggcttttcttcacctcttcaaccaggagccgagatttctgttgctctgaagccatccaggggtctttaaccagaagagagaggagagcctcaggagttaggaccagaagaagccagggaagcagtgcaatggcttcaaaaatcttgcttaacgtacaagaggaggtgacctgtcccatctgcctggagctgttgacagaacccttgagtctagactgtggccacagcctctgccgagcctgcatcactgtgagcaacaaggaggcagtgaccagcatgggaggaaaaagcagctgtcctgtgtgtggtatcagttactcatttgaacatctacaggctaatcagcatctggccaacatagtggagagactcaaggaggtcaagttgagcccagacaatgggaagaagagagatctctgtgatcatcatggagagaaactcctactcttctgtaaggaggataggaaagtcatttgctggctttgtgagcggtctcaggagcaccgtggtcaccacacagtcctcacggaggaagtattcaaggaatgtcaggagaaactccaggcagtcctcaagaggctgaagaaggaagaggaggaagctgagaagctggaagctgacatcagagaagagaaaacttcctggaagtatcaggtacaaactgagagacaaaggatacaaacagaatttgatcagcttagaagcatcctaaataatgaggagcagagagagctgcaaagattggaagaagaagaaaagaagacgctggataagtttgcagaggctgaggatgagctagttcagcagaagcagttggtgagagagctcatctcagatgtggagtgtcggagtcagtggtcaacaatggagctgctgcaggacatgagtggaatcatgaaatggagtgagatctggaggctgaaaaagccaaaaatggtttccaagaaactgaagactgtattccatgctccagatctgagtaggatgctgcaaatgtttagagaactgacagctgtccggtgctactgggtggatgtcacactgaattcagtcaacctaaatttgaatcttgtcctttcagaagatcagagacaagtgatatctgtgccaatttggccttttcagtgttataattatggtgtcttgggatcccaatatttctcctctgggaaacattactgggaagtggacgtgtccaagaaaactgcctggatcctgggggtatactgtagaacatattcccgccatatgaagtatgttgttagaagatgtgcaaatcgtcaaaatctttacaccaaatacagacctctatttggctactgggttatagggttacagaataaatgtaagtatggtgtctttgaagagtctttgtcctctgatcccgaggttttgactctctccatggctgtgcctccctgccgtgttggggttttcctcgactatgaagcaggcattgtctcatttttcaatgtcacaagccatggctccctcatttacaagttctctaaatgttgcttttctcagcctgtttatccatatttcaatccttggaactgtccagctcccatgactctatgcccaccaagctcttgaattttctcatttcttcacctacaaccctttgtcttgacttatctcctgcaactgactcatctgcaacattcacaccattgcttccttgtggtttcccttctttagaacttttactcatccttgagatgtatggtgtatttggcttgagttatgagagatgcttatttattcatttactctttttcatattttcagagaaagttacctaatccctcctaaagacacagcagtatgggtataacatccttgccttcccatttatccatgtttcactttatcactgatatgaagaggcccaaagcctgttagccaccatccatgctacctaggtagtccataggaaccacccccatgaccaccaccaacatcaactaaaggttcttggagggtatgtcagtgtgttgctcaggataccccaggtacatcaaggaatcaaggagaggaaaatatgagcaatatgtgtattcagagtgaagattttatgtccagagtatttgagctcaaaccttgcctgttgttttctaatcatgatgaatactttctcagtttctttttcctgaaatataaattgggatttaagactgtacctaactattaagatcactgtgtaaaactaagtgtctctaaatgtaatgcatcgatttagtgtctggaacataataaatatttgctctcatgattgctaaaaa

SEQ ID NO: 194917 - DNA, 2493 bp, Homo sapiens
  Payload ID: 18494
  Gene Name: tripartite motif containing 34
  Uniprot ID: Q9BYJ4
  ENST ID: ENST00000514226
  CDS Start-End: 338-1804
gtgatctcggctcactgcaacctctgtctcctgggttcaagcgatcctcctgtctcagcctcccgagtaactgggattacaggcgcccaccaccatgcccggctaatttttgtatttttgtagacagggtttcgacatgttggccaggctggtctcaaactcctgacctcaagtgatccacccgcctcagcctcccaaagtgctgggattacaggtgtgagccactgcgcccgtcctgactcatgcaacttctgcttcagccatccaggggtctttaaccagaagagagaggagagcctcaggagttaggaccagaagaagccagggaagcagtgcaatggcttcaaaaatcttgcttaacgtacaagaggaggtgacctgtcccatctgcctggagctgttgacagaacccttgagtctagactgtggccacagcctctgccgagcctgcatcactgtgagcaacaaggaggcagtgaccagcatgggaggaaaaagcagctgtcctgtgtgtggtatcagttactcatttgaacatctacaggctaatcagcatctggccaacatagtggagagactcaaggaggtcaagttgagcccagacaatgggaagaagagagatctctgtgatcatcatggagagaaactcctactcttctgtaaggaggataggaaagtcatttgctggctttgtgagcggtctcaggagcaccgtggtcaccacacagtcctcacggaggaagtattcaaggaatgtcaggagaaactccaggcagtcctcaagaggctgaagaaggaagaggaggaagctgagaagctggaagctgacatcagagaagagaaaacttcctggaagtatcaggtacaaactgagagacaaaggatacaaacagaatttgatcagcttagaagcatcctaaataatgaggagcagagagagctgcaaagattggaagaagaagaaaagaagacgctggataagtttgcagaggctgaggatgagctagttcagcagaagcagttggtgagagagctcatctcagatgtggagtgtcggagtcagtggtcaacaatggagctgctgcaggacatgagtggaatcatgaaatggagtgagatctggaggctgaaaaagccaaaaatggtttccaagaaactgaagactgtattccatgctccagatctgagtaggatgctgcaaatgtttagagaactgacagctgtccggtgctactgggtggatgtcacactgaattcagtcaacctaaatttgaatcttgtcctttcagaagatcagagacaagtgatatctgtgccaatttggccttttcagtgttataattatggtgtcttgggatcccaatatttctcctctgggaaacattactgggaagtggacgtgtccaagaaaactgcctggatcctgggggtatactgtagaacatattcccgccatatgaagtatgttgttagaagatgtgcaaatcgtcaaaatctttacaccaaatacagacctctatttggctactgggttatagggttacagaataaatgtaagtatggtgtctttgaagagtctttgtcctctgatcccgaggttttgactctctccatggctgtgcctccctgccgtgttggggttttcctcgactatgaagcaggcattgtctcatttttcaatgtcacaagccatggctccctcatttacaagttctctaaatgttgcttttctcagcctgtttatccatatttcaatccttggaactgtccagctcccatgactctatgcccaccaagctcttgaattttctcatttcttcacctacaaccctttgtcttgacttatctcctgcaactgactcatctgcaacattcacaccattgcttccttgtggtttcccttctttagaacttttactcatccttgagatgtatggtgtatttggcttgagttatgagagatgcttatttattcatttactctttttcatattttcagagaaagttacctaatccctcctaaagacacagcagtatgggtataacatccttgccttcccatttatccatgtttcactttatcactgatatgaagaggcccaaagcctgttagccaccatccatgctacctaggtagtccataggaaccacccccatgaccaccaccaacatcaactaaaggttcttggagggtatgtcagtgtgttgctcaggataccccaggtacatcaaggaatcaaggagaggaaaatatgagcaatatgtgtattcagagtgaagattttatgtccagagtatttgagctcaaaccttgcctgttgttttctaatcatgatgaatactttctcagtttctttttcctgaaatataaattgggatttaagactgtacctaactattaagatcactgtgtaaaactaagtgtctctaaatgtaatgcatcgatttagtgtctggaacataataaatatttgctctcatgattgctaaaaa

SEQ ID NO: 194918 - DNA, 4229 bp, Homo sapiens
  Payload ID: 18495
  Gene Name: tripartite motif containing 35
  Uniprot ID: Q9UPQ4
  ENST ID: ENST00000305364
  CDS Start-End: 85-1566
cactcgggtcgcgggcgttggcagccgggcgggtgggaggggccggagcaaaagttccgggcgcccgagccggctgctcgtgccatggagcggagtcccgacgtgtcccccgggccttcccgctccttcaaggaggagttgctctgcgccgtctgctacgaccccttccgcgacgcagtcactctgcgctgcggccacaacttctgccgcgggtgcgtgagccgctgctgggaggtgcaggtgtcgcccacctgcccagtgtgcaaagaccgcgcgtcacccgccgacctgcgcaccaaccacaccctcaacaacctggtggagaagctgctgcgcgaggaggccgagggcgcgcgctggaccagctaccgcttctcgcgtgtctgccgcctgcaccgcggacagctcagcctcttctgcctcgaggacaaggagctgctgtgctgctcctgccaggccgacccccgacaccaggggcaccgcgtgcagccggtgaaggacactgcccacgactttcgggccaagtgcaggaacatggagcatgcactgcgggagaaggccaaggccttctgggccatgcggcgctcctatgaggccatcgccaagcacaatcaggtggaggctgcatggctggaaggccggatccggcaggagtttgataagcttcgcgagttcttgagagtggaggagcaggccattctggatgccatggccgaggagacaaggcagaagcaacttctggccgacgagaagatgaagcagctcacagaggagacggaggtgctggcacatgagatcgagcggctgcagatggagatgaaggaggacgacgtttcttttctcatgaaacacaagagccgaaaacgccgactcttctgcaccatggagccagagccagtccagcccggcatgcttatcgatgtctgcaagtacctgggctccctgcagtaccgcgtctggaagaagatgcttgcatctgtggaatctgtacccttcagctttgaccccaacaccgcagctggctggctctccgtgtctgacgacctcaccagcgtcaccaaccatggctaccgcgtgcaggtggagaacccggaacgcttctcctcggcgccctgcctgctgggctcccgtgtcttctcacagggctcgcacgcctgggaggtggcccttggggggctgcagagctggagggtgggcgtggtacgtgtgcgccaggactcgggcgctgagggccactcacacagctgctaccacgacacacgctcgggcttctggtatgtctgccgcacgcagggcgtggagggggaccactgcgtgacctcggacccagccacgtcgcccctggtcctggccatcccacgccgcctgcgtgtggagctggagtgtgaggagggcgagctgtctttctatgacgcggagcgccactgccacctgtacaccttccacgcccgctttggggaggttcgcccctacttctacctggggggtgcacggggcgccgggcctccagagcctttgcgcatctgccccttgcacatcagtgtcaaggaagaactggatggctgagctggcccggggctgccccggtcttgtgccacagcactgttttctttctgccctcttcctaatgcccacactgcttgggcactattgcgcccctgcctccttgccaggctcttcctcctgtcctgcctggtccttttccatgactccaggctgtgcctctctccatgtttggtcccttctgtgcccatggtcaggagctattcgggtggcacctcgctggccaggctctcccgagtcgtggcacctccacaatgtgaattttctgaatccctattccaggatttctgggaataatgtttacttctagaatgggcctgttgtaaaccatctcatcgaggtgtggtaaagccattggatgaggaggggactgccatggaaaggagagtttgttacttacggttctgagaggaggggccacataggaaagccccacggtgggtcagaaggcggaaggagggaggggaacgtgtgggcaagagacttcctctggtttcctcaggaggaaatgggcaaggcagagtaagcaggggagacaggtttaagggtagctggcttgagtaatttcagtggctctcaggataggggctgccctttttgtctgatacctggccccgggatagtcaggacaggtgaatgttggcctggggtgtgacagccctgggagagccatgtgaaggaggcagctggcgccatcgctccggattagttggtttccataggaaaggcatgctttcagccagatgcttgccatctctagggattgggggattggctagcctgggaggatcagtctgtccaggtcagcgaggccccagataccagagcatcaagagtacaggaaatacagttaatgcagggcctctgtgtggctggatcctccgtctccatcagatcagctctgattgatctattcttgcacgatttcctctgaacacagggttccagagtacttaaacacaacattttttaaatcgtgatttcggcctatttccttgccaggcctgtttccccaccaggaaatgagataggaggactggatgaggatgtcctgttatagttgctgtggaggaagttcctctggttaattctcatcagcgtctgcagaaaagaaggaaagagggcacccttttcagttgggaagaaaggagaggggtggcgccatggacgtggccctaaacgctgtgggagagggaagaggaggctgggcctcgctgccctcttgtctctgctgacttcagcctggtcatgcttgctctgccacttgcgatttcatccctaatttcttcctccaccatgcctgcagacttttccctgggcttgttttttctcgcacatctctgaagagtttttaatcttcagctcatcatgtcccaggaagtggcatcataaaaggaaatatttttttttcctaggagcagtgttaaaatctgggtcacattcctgaccaaggacagcatcctgccttctgcccatccccttcagttcacaaaagctgacattttaaacaaatcatgactcacacgtattaattggttataaatatgttgtgtacactggttagataaaacttaaggccacaaggagggcccaggtaggcgatgtcagtgtgtgaaggggctggattgggcgtggtgaggatgttggcaaaccagtgcatgcacctggttggaagatgctcagcctcacaaaagctccaagccctttgggagccaaagtgtctgagagtgtgaccctctcctgtaaagtatttatcccacccattaatataatttctgtataataaacttgacctgaaattatttcattctttatattaaacttttaaaaatgttttttattttcaccttagatatgggaagagttttttttttttttttttttttaacaggataacttgagcaggctaggcctcttaaaaaaaaatttgagctaaaactcatttttcttttggcattttcttttcaatgttcttataagcaaagttcatccatgttgtagcatgtgttcaactttattttttcatcgggtaatattccattgtatggaatggtagtactacattttatttatcatgcatcgattggtggacatttggatcgtttctacttcttgactattatacataatgctgctaggaacttttgtgtatgagtttttgtgtggacatatgttttcatttctctttggtatatgcctgggagcagatttgctggatcatatgaaactctatttaacccttgagggactcccaaactgttttccaatgtggtgacacaattttatatcccatcaacagggcatgagggttctgatgactccacatccctcagtgctttttattatctatcttttaacttagccatcctagtaggggtaatgtggcatctcattgtgattttggtttgcatttccctgatggcgaatgatattgagcatcttttcatgagcttattggccatttgcatatcttcttaggacagctatctttagatcacttgctcattttttaattgggttatttgtctttttattattgagttgtaagagtccttttatagcctggcacaagtccctttaactggtatatgattataaaatttttctccgtgagctgtttcatttccttgatgatgtcctttgaaatactaaagcttttaattttg

SEQ ID NO: 194919 - DNA, 1215 bp, Homo sapiens
  Payload ID: 18495
  Gene Name: tripartite motif containing 35
  ENST ID: ENST00000521253
  CDS Start-End: 4-804
gccatggagcggagtcccgacgtgtcccccgggccttcccgctccttcaaggaggagttgctctgcgccgtctgctacgaccccttccgcgacgcagtcactctgcgctgcggccacaacttctgccgcgggtgcgtgagccgctgctgggaggtgcaggtgtcgcccacctgcccagtgtgcaaagaccgcgcgtcacccgccgacctgcgcaccaaccacaccctcaacaacctggtggagaagctgctgcgcgaggaggccgagggcgcgcgctggaccagctaccgcttctcgcgtgtctgccgcctgcaccgcggacagctcagcctcttctgcctcgaggacaaggagctgctgtgctgctcctgccaggccgacccccgacaccaggggcaccgcgtgcagccggtgaaggacactgcccacgactttcgggtggaggctgcatggctggaaggccggatccggcaggagtttgataagcttcgcgagttcttgagagtggaggagcaggccattctggatgccatggccgaggagacaaggcagaagcaacttctggccgacgagaagatgaagcagctcacagaggagacggaggtgctggcacatgagatcgagcggctgcagatggagatgaaggaggacgacgtttcttttctcatgactcttctgcaccatggagccagagccagtccagcccggcatgcttatcgatgtctgcaagtacctgggctccctgcagtaccgcgtctggaagaagatgcttgcatctgtggaatctgtacccttcagctttgaccccaacaccgcagctggctggctctccgtgtctgacgacctcaccagcgtcaccaaccatggctaccgcgtgcaggtggagaacccggaacgcttctcctcggcgccctgcctgctgggctcccgtgtcttctcacagggctcgcacgcctgggaggtggcccttggggggctgcagagctggagggtgggcgtggtacgtgtgcgccaggactcgggcgctgagggccactcacacagctgctaccacgacacacgctcgggcttctggtatgtctgccgcacgcagggcgtggagggggaccactgcgtgacctcggacccagccacgtcgcccctggtcctggccatcccacgccgcctgcgtgtggagctggagtgtgaggagggcgagctgtctttctatgacgc

SEQ ID NO: 194920 - DNA, 619 bp, Homo sapiens
  Payload ID: 18495
  Gene Name: tripartite motif containing 35
  ENST ID: ENST00000521283
  CDS Start-End: 1-302
atgagatcgagcggctgcagatggagatgaaggaggacgacgtttcttttctcatgaaacacaagagccgaaaacgccgactcttctgcaccatggagccagagccagtccagcccggcatgcttatcgatgtctgcaagtacctgggctccctgcagtaccgcgtctggaagaagatgcttgcatctgtggaatctgtacccttcagctttgaccccaacaccgcagctggctggctctccgtgtctgacgacctcaccagcgtcaccaaccatggctaccgcgtgcaggagcagtgttaaaatctgggtcacattcctgaccaaggacagcatcctgccttctgcccatccccttcagttcacaaaagctgacattttaaacaaatcatgactcacacgtattaattggttataaatatgttgtgtacactggttagataaaacttaaggccacaaggagggcccaggtaggcgatgtcagtgtgtgaaggggctggattgggcgtggtgaggatgttggcaaaccagtgcatgcacctggttggaagatgctcagcctcacaaaagctccaagccctttgggagccaaagtgtctgagagtgtgaccctctcctgt

SEQ ID NO: 194921 - DNA, 4050 bp, Homo sapiens
  Payload ID: 18496
  Gene Name: tripartite motif containing 36
  Uniprot ID: Q9NQ86
  ENST ID: ENST00000282369
  CDS Start-End: 123-2309
tggttaacagcttatgggcggggagctcggcaaaactcagactaaaaacagaaaaagagaaaagaaaggacaaattcgatacacccgcgtcggtcctccagagtttgtgaaggggtgtaaacatgtcggagtctggggagatgagtgaatttggctacatcatggaattgatagctaaaggcaaggttaccattaagaatatcgaaagggagctcatttgcccagcatgcaaggagctgtttacccacccattgattctcccttgccaacatagtatctgtcataaatgtgtaaaagaactcctgctgactctcgatgattcattcaacgatgtgggatcagacaactccaatcaaagcagtcctcgacttcggctcccctcccctagtatggataaaattgaccgaattaacagaccaggctggaagcgcaattcattgaccccgaggacaactgttttcccttgccctggctgtgagcatgatgtggatcttggagaacgaggaatcaatggtctgtttcgaaacttcactttggaaactattgtggaaagatatcgtcaagcagctagggcagccacagccattatgtgtgacctttgtaaaccaccacctcaagaatccacaaaaagctgcatggactgtagtgcaagttactgcaatgaatgcttcaaaattcatcacccttggggtactataaaagctcaacatgagtatgttggtccaactactaacttcagacccaagattttaatgtgcccagaacatgaaacagagagaataaacatgtactgtgaattatgtaggaggccagtttgccatctgtgtaagttgggtggtaatcatgccaaccaccgtgtaaccactatgagcagtgcctacaaaaccttaaaggaaaagctttcaaaggatattgattaccttattggtaaggaaagccaggtgaagagtcaaatatctgaactaaacttgttaatgaaagaaacagagtgtaatggagagagggctaaagaagaagcaattacacattttgaaaagctctttgaagttctggaagagaggaaatcatctgttttgaaagcaattgactcctctaagaaactaagattagacaaatttcagactcaaatggaagagtaccagggacttctagagaacaatggacttgtgggatatgctcaagaagtgctaaaggagacagatcagtcttgctttgtgcagacagcaaagcagctccacctcagaatacagaaagccacagaatctttgaagagctttagacctgcagctcagacttcttttgaagactatgttgttaatacctctaaacaaacagaacttcttggagaattatcctttttctctagtggcatagacgtgccagagatcaatgaggaacagagcaaagtttataacaatgccttgataaattggcaccatccagaaaaggataaagctgatagctatgttcttgaatatcggaaaatcaatagagatgatgaaatgtcatggaatgagatagaagtgtgtggaacaagtaaaataattcaagacttggaaaacagtagtacctatgctttcagagtaagagcttacaagggttcaatctgtagtccttgcagcagagaattgattcttcatactcctccagctccagttttcagcttcctctttgatgaaaaatgtggctataataatgaacacctcctgctgaacttgaagagagaccgtgtagagagtagagctggatttaatcttctgcttgctgcagaacgcatccaagtgggttattacacaagcttagactacatcattggagatactggcattacaaaaggaaaacacttctgggccttccgtgtggaaccatattcatacctggtaaaagtgggagttgcttctagcgataaactacaagaatggctccgttctccccgggatgcagttagtccaagatatgagcaagacagtgggcatgacagtggaagtgaggatgcctgttttgattcttcacaaccatttaccttagttactataggcatgcagaaattttttatacccaagtcacctacttcttctaatgaacctgaaaatagagttctccctatgccaacaagtattgggattttccttgactgtgataaaggcaaagtagatttctatgatatggatcagatgaaatgcctttatgaacgccaagtggactgttcacatacactgtatccagcatttgcattaatgggcagtggaggaattcagcttgaagaacccatcacagcaaaatatctggaataccaagaggacatgtagttgaaacatctgatgtgactcaggataaaaactgtaaacaaagcaatgccttagcgttaaccttcgtaactaattacatatcgctgagtgttctgtcaccccacttgtgtttgagtatgattcttcttgaaatacagaaaatctaaacagccttgtgtcttcatgtcgttgttctgcctttcacaaatgatgaaagtgaagatgttctttccaagttaatactgaagtggttaactttgcaactggactgtcttttactttatgtacaggatatctaatttatttctgtcagctggtgttgctgacactttccttatggtgggggggatacaaaagtatttattatgattctcttctgtttgacttttcatttttatatcatgtttatgtcctaagagaagatattttttaaatgccttatggataggaattagtactaagcaatgtgtcttgcatttgttttcaataggaaaacaaagttctagataggttaaaagaaaaacaccataaaagtggtagtatatttaagtggaaaattatgtattttaaagtgtgtaactattaaaaatatattgcctggaaaaggaatactactgttttgttttgttaagaccacaaactgtattgctaaggacattttaagagtctgcttagccataacactcatttaacagcatgggtagtaagcatggtttcttgcagaaaacacaaagttctcagctaacacattaaacttctcactttatatactttttttcagagaaatttatctttagtttttcttattctgtgaaaatatttgttcttatgtcaaagaattatttttcagatatattggtaaagatggactgatattaaaagtcatatttattcttttacccccttactgtgttttgtgattttcatttttggcccaattattacatatcaggttttcctgatttatatttacatgtttgaaaagttcattatatattttagtagcgttacatatattataaatttttgtaacatttaaatgttcacttatgtggcattttctgtttctcattggtaataagcatttctaatataagcaagtaaaaatacaaatttaattacttagaaatgataactaagatcacaatgactgtgtaccctttaaaatatcttttaatttgaggaattacattctatctaaattgtgtgtctgtttttgaaaggtgttgctttcaagtaggtggtttttatttaaagtacttatttttttgaggttaaaatattcagaaactacttttatgcattgtagcagtaatcatttatggaatgcttttgacatgttttaacagggtaaccaaaacttttaggcctgttttttttggttgtccttgttgttatatttttaatggaaatctgttactcaggctggtagcattaaattagctttttaccctcaactcaagtagcaaatatcatggagaacttcagtgtttagcaggctgttaatttcccatctatgaatagcactttatgatgtaggctaaactaagcaaataatgcagcgttatgtggatcattatgcaataaagctgctaaagtcacatttgtggttgatactcaagccttgtacaagcacatatgatgtagacatttttaaatgtgaagctttaacaggaataggatagctgtttcaaaccttgtgcaattgtaaataaattgtttagctgtgtttctttcatttttaataaaaaattaaaaagaa

SEQ ID NO: 194922 - DNA, 1322 bp, Homo sapiens
  Payload ID: 18496
  Gene Name: tripartite motif containing 36
  Uniprot ID: Q9NQ86
  ENST ID: ENST00000379617
  CDS Start-End: 510-695
gatggggcttttttccagatcttcgcgccgagagccggggacggccaacctgccggcatgcgataaaggccggggaatgtctagctggggccgcgctgagccgagtgcggacccgctttgtgtgcgcgtttgtttgtctccgctgcggtccgaaccgctgccgcgacccccgaggaggcggggcctccgcgcgcccggctccgcctggtgagggtttcacggcctctgctgccgccgccgccgccctcgtttgttccgttagatcgcgcagccccgaccgctgcacccggatcctagcaagccgggcgaggctgcccgggagccctcgatggccttcatttcacccaagcccgcttcttgctttccccggcgcttcccctcttttcctggttaacagcttatgggcggggagctcggcaaaactcagactaaaaacagaaaaagagaaaagaaaggacaaattcgatacacccgcgtcggtcctccagagtttgtgaaggggtgtaaacatgtcggagtctggggagatgagtgaatttggctacatcatggaattgatagctaaaggcaaggcttcagcaatgggcctgcagcaaacccatgagcattcccggttgacttctaaaggtggagaggcccgctgtccctttgaaatctctgaggttggaaagcagtctctcccaagaagaacttaggacaattcctctctctgttttgtgggggttggagggggagagttggtctggagtaggctcctaaccatttcaacgtaagcttatttcctaccactctcctcaggctcaaatcctgccccgccccgcagccccagcactagcccatttaagacccctgttttgtgtgtgattatacaggatttgaacactgaatattaaccatggaatagcagacctttgagactgacttgctttattttcctctgtggggttcggttccactttgtagttcgggtttgtaatgtaaagaataatgggaaactggtctaattatgagagttaagagagtagaggcctgtagttggcctgccctccgccccaccatccctcaaagttgagaccactgagttaaccatcctcttaatttctctcacttttcccccagatttgtttcatccttgtactggacttctcaagctctgtacataattaaaaatacatagctttacatttttacaaacttaatacctggaatatatgcttgttgtaaagtattcaaacttcacagaaaggttcacagagtaaaaagtctaagttcatgcccacctccaatctcattccttccccagtggcagcagtttgtgtgtc

SEQ ID NO: 194923 - DNA, 693 bp, Homo sapiens
  Payload ID: 18496
  Gene Name: tripartite motif containing 36
  Uniprot ID: Q9NQ86
  ENST ID: ENST00000379618
  CDS Start-End: 510-692
gatggggcttttttccagatcttcgcgccgagagccggggacggccaacctgccggcatgcgataaaggccggggaatgtctagctggggccgcgctgagccgagtgcggacccgctttgtgtgcgcgtttgtttgtctccgctgcggtccgaaccgctgccgcgacccccgaggaggcggggcctccgcgcgcccggctccgcctggtgagggtttcacggcctctgctgccgccgccgccgccctcgtttgttccgttagatcgcgcagccccgaccgctgcacccggatcctagcaagccgggcgaggctgcccgggagccctcgatggccttcatttcacccaagcccgcttcttgctttccccggcgcttcccctcttttcctggttaacagcttatgggcggggagctcggcaaaactcagactaaaaacagaaaaagagaaaagaaaggacaaattcgatacacccgcgtcggtcctccagagtttgtgaaggggtgtaaacatgtcggagtctggggagatgagtgaatttggctacatcatggaattgatagctaaaggcaagatgccggattggagacgaggctaccgctgcagacagggctgtgggaagacgacggaacttgccacagcgacagacttctcccaaacaggaaataaaagtgggaagcattttaaaacctaaa

SEQ ID NO: 194924 - DNA, 4218 bp, Homo sapiens
  Payload ID: 18496
  Gene Name: tripartite motif containing 36
  Uniprot ID: Q9NQ86
  ENST ID: ENST00000513154
  CDS Start-End: 328-2478
gtccacgccccgcggtgccccgcccaggtctctgcgcggcgccgttcccagccgcagtccgcaggagccgctgctgcagccggcagctgggcgggattcccggggtagtcgctgggagcaaagctcgcttctcccgcgcctgtgcttttgcctgccccggcttacttctccccgcgtcggtccgctggccacgtacagctgaccagctcatcttccagcttcggaccgaggctccacggccgccgcagggacccgcccaccagaccctgcgctcggtagccggtgtgagtggaacgtgccgctgatgacacctggcagaaggcagccatggagggcgatggctcagattcgccggttaccattaagaatatcgaaagggagctcatttgcccagcatgcaaggagctgtttacccacccattgattctcccttgccaacatagtatctgtcataaatgtgtaaaagaactcctgctgactctcgatgattcattcaacgatgtgggatcagacaactccaatcaaagcagtcctcgacttcggctcccctcccctagtatggataaaattgaccgaattaacagaccaggctggaagcgcaattcattgaccccgaggacaactgttttcccttgccctggctgtgagcatgatgtggatcttggagaacgaggaatcaatggtctgtttcgaaacttcactttggaaactattgtggaaagatatcgtcaagcagctagggcagccacagccattatgtgtgacctttgtaaaccaccacctcaagaatccacaaaaagctgcatggactgtagtgcaagttactgcaatgaatgcttcaaaattcatcacccttggggtactataaaagctcaacatgagtatgttggtccaactactaacttcagacccaagattttaatgtgcccagaacatgaaacagagagaataaacatgtactgtgaattatgtaggaggccagtttgccatctgtgtaagttgggtggtaatcatgccaaccaccgtgtaaccactatgagcagtgcctacaaaaccttaaaggaaaagctttcaaaggatattgattaccttattggtaaggaaagccaggtgaagagtcaaatatctgaactaaacttgttaatgaaagaaacagagtgtaatggagagagggctaaagaagaagcaattacacattttgaaaagctctttgaagttctggaagagaggaaatcatctgttttgaaagcaattgactcctctaagaaactaagattagacaaatttcagactcaaatggaagagtaccagggacttctagagaacaatggacttgtgggatatgctcaagaagtgctaaaggagacagatcagtcttgctttgtgcagacagcaaagcagctccacctcagaatacagaaagccacagaatctttgaagagctttagacctgcagctcagacttcttttgaagactatgttgttaatacctctaaacaaacagaacttcttggagaattatcctttttctctagtggcatagacgtgccagagatcaatgaggaacagagcaaagtttataacaatgccttgataaattggcaccatccagaaaaggataaagctgatagctatgttcttgaatatcggaaaatcaatagagatgatgaaatgtcatggaatgagatagaagtgtgtggaacaagtaaaataattcaagacttggaaaacagtagtacctatgctttcagagtaagagcttacaagggttcaatctgtagtccttgcagcagagaattgattcttcatactcctccagctccagttttcagcttcctctttgatgaaaaatgtggctataataatgaacacctcctgctgaacttgaagagagaccgtgtagagagtagagctggatttaatcttctgcttgctgcagaacgcatccaagtgggttattacacaagcttagactacatcattggagatactggcattacaaaaggaaaacacttctgggccttccgtgtggaaccatattcatacctggtaaaagtgggagttgcttctagcgataaactacaagaatggctccgttctccccgggatgcagttagtccaagatatgagcaagacagtgggcatgacagtggaagtgaggatgcctgttttgattcttcacaaccatttaccttagttactataggcatgcagaaattttttatacccaagtcacctacttcttctaatgaacctgaaaatagagttctccctatgccaacaagtattgggattttccttgactgtgataaaggcaaagtagatttctatgatatggatcagatgaaatgcctttatgaacgccaagtggactgttcacatacactgtatccagcatttgcattaatgggcagtggaggaattcagcttgaagaacccatcacagcaaaatatctggaataccaagaggacatgtagttgaaacatctgatgtgactcaggataaaaactgtaaacaaagcaatgccttagcgttaaccttcgtaactaattacatatcgctgagtgttctgtcaccccacttgtgtttgagtatgattcttcttgaaatacagaaaatctaaacagccttgtgtcttcatgtcgttgttctgcctttcacaaatgatgaaagtgaagatgttctttccaagttaatactgaagtggttaactttgcaactggactgtcttttactttatgtacaggatatctaatttatttctgtcagctggtgttgctgacactttccttatggtgggggggatacaaaagtatttattatgattctcttctgtttgacttttcatttttatatcatgtttatgtcctaagagaagatattttttaaatgccttatggataggaattagtactaagcaatgtgtcttgcatttgttttcaataggaaaacaaagttctagataggttaaaagaaaaacaccataaaagtggtagtatatttaagtggaaaattatgtattttaaagtgtgtaactattaaaaatatattgcctggaaaaggaatactactgttttgttttgttaagaccacaaactgtattgctaaggacattttaagagtctgcttagccataacactcatttaacagcatgggtagtaagcatggtttcttgcagaaaacacaaagttctcagctaacacattaaacttctcactttatatactttttttcagagaaatttatctttagtttttcttattctgtgaaaatatttgttcttatgtcaaagaattatttttcagatatattggtaaagatggactgatattaaaagtcatatttattcttttacccccttactgtgttttgtgattttcatttttggcccaattattacatatcaggttttcctgatttatatttacatgtttgaaaagttcattatatattttagtagcgttacatatattataaatttttgtaacatttaaatgttcacttatgtggcattttctgtttctcattggtaataagcatttctaatataagcaagtaaaaatacaaatttaattacttagaaatgataactaagatcacaatgactgtgtaccctttaaaatatcttttaatttgaggaattacattctatctaaattgtgtgtctgtttttgaaaggtgttgctttcaagtaggtggtttttatttaaagtacttatttttttgaggttaaaatattcagaaactacttttatgcattgtagcagtaatcatttatggaatgcttttgacatgttttaacagggtaaccaaaacttttaggcctgttttttttggttgtccttgttgttatatttttaatggaaatctgttactcaggctggtagcattaaattagctttttaccctcaactcaagtagcaaatatcatggagaacttcagtgtttagcaggctgttaatttcccatctatgaatagcactttatgatgtaggctaaactaagcaaataatgcagcgttatgtggatcattatgcaataaagctgctaaagtcacatttgtggttgatactcaagccttgtacaagcacatatgatgtagacatttttaaatgtgaagctttaacaggaataggatagctgtttcaaaccttgtgcaattgtaaataaattgtttagctgtgtttctttcatttttaataaaaaattaaaaaga

SEQ ID NO: 194925 - DNA, 1952 bp, Homo sapiens
  Payload ID: 18496
  Gene Name: tripartite motif containing 36
  ENST ID: ENST00000514154
  CDS Start-End: 231-1952
atgtcggagtctggggagatgagtgaatttggctacatcatggaattgatagctaaaggcaaggctggaagcgcaattcattgaccccgaggacaactgttttcccttgccctggctgtgagcatgatgtggatcttggagaacgaggaatcaatggtctgtttcgaaacttcactttggaaactattgtggaaagatatcgtcaagcagctagggcagccacagccattatgtgtgacctttgtaaaccaccacctcaagaatccacaaaaagctgcatggactgtagtgcaagttactgcaatgaatgcttcaaaattcatcacccttggggtactataaaagctcaacatgagtatgttggtccaactactaacttcagacccaagattttaatgtgcccagaacatgaaacagagagaataaacatgtactgtgaattatgtaggaggccagtttgccatctgtgtaagttgggtggtaatcatgccaaccaccgtgtaaccactatgagcagtgcctacaaaaccttaaaggaaaagctttcaaaggatattgattaccttattggtaaggaaagccaggtgaagagtcaaatatctgaactaaacttgttaatgaaagaaacagagtgtaatggagagagggctaaagaagaagcaattacacattttgaaaagctctttgaagttctggaagagaggaaatcatctgttttgaaagcaattgactcctctaagaaactaagattagacaaatttcagactcaaatggaagagtaccagggacttctagagaacaatggacttgtgggatatgctcaagaagtgctaaaggagacagatcagtcttgctttgtgcagacagcaaagcagctccacctcagaatacagaaagccacagaatctttgaagagctttagacctgcagctcagacttcttttgaagactatgttgttaatacctctaaacaaacagaacttcttggagaattatcctttttctctagtggcatagacgtgccagagatcaatgaggaacagagcaaagtttataacaatgccttgataaattggcaccatccagaaaaggataaagctgatagctatgttcttgaatatcggaaaatcaatagagatgatgaaatgtcatggaatgagatagaagtgtgtggaacaagtaaaataattcaagacttggaaaacagtagtacctatgctttcagagtaagagcttacaagggttcaatctgtagtccttgcagcagagaattgattcttcatactcctccagctccagttttcagcttcctctttgatgaaaaatgtggctataataatgaacacctcctgctgaacttgaagagagaccgtgtagagagtagagctggatttaatcttctgcttgctgcagaacgcatccaagtgggttattacacaagcttagactacatcattggagatactggcattacaaaaggaaaacacttctgggccttccgtgtggaaccatattcatacctggtaaaagtgggagttgcttctagcgataaactacaagaatggctccgttctccccgggatgcagttagtccaagatatgagcaagacagtgggcatgacagtggaagtgaggatgcctgttttgattcttcacaaccatttaccttagttactataggcatgcagaaattttttatacccaagtcacctacttcttctaatgaacctgaaaatagagttctccctatgccaacaagtattgggattttccttgactgtgataaaggcaaagtagatttctatgatatggatcagatgaaatgcctttatgaacgccaagtggactgttcacatacactgtatccagcatttgcattaatgggcagtggaggaattcagcttgaagaacccatcacagcaaaatatctggaataccaagaggacatgtag

SEQ ID NO: 194926 - DNA, 786 bp, Homo sapiens
  Payload ID: 18496
  Gene Name: tripartite motif containing 36
  ENST ID: ENST00000508894
  CDS Start-End: 276-786
cgcagtccgcaggagccgctgctgcagccggcagctgggcgggattcccggggtagtcgctgggagcaaagctcgcttctcccgcgcctgtgcttttgcctgccccggcttacttctccccgcgtcggtccgctggccacgtacagctgaccagctcatcttccagcttcggaccgaggctccacggccgccgcagggacccgcccaccagaccctgcgctcggtagccggtgtgagtggaacgtgccgctgatgacacctggcagaaggcagccatggagggcgatggctcagattcgccggttaccattaagaatatcgaaagggagctcatttgcccagcatgcaaggagctgtttacccacccattgattctcccttgccaacatagtatctgtcataaatgtgtaaaagaactcctgctgactctcgatgattcattcaacgatgtgggatcagacaactccaatcaaagcagtcctcgacttcggctcccctcccctagtatggataaaattgaccgaattaacagaccagcatcacaacggagatctgtggggtggagaggctggaagcgcaattcattgaccccgaggacaactgttttcccttgccctggctgtgagcatgatgtggatcttggagaacgaggaatcaatggtctgtttcgaaacttcactttggaaactattgtggaaagatatcgtcaagcagctagggcagccacagccattatgtgtgacctttgtaaaccaccacctcaagaatccacaaaaagctgcatgg

SEQ ID NO: 194927 - DNA, 4330 bp, Homo sapiens
  Payload ID: 18497
  Gene Name: tripartite motif containing 37
  Uniprot ID: O94972
  ENST ID: ENST00000262294
  CDS Start-End: 261-3155
agccgggagaaaggagctgcggccaccgttcgccctacttctgcgcctcggggcgggcgcgccggtaaaaatggcgaaatgggggtaggcggcgctggacctgaagagatggggcgcgcaggtggggcggttgtcagagccccctgacgtgggcgccgggcttttatcggcgatttgatctggcgacctcgggccggcgcctaagaggtcagactgcggagcctgcgggtcgccagcggccccgccgagagccggaggcaatggatgaacagagcgtggagagcattgctgaggttttccgatgtttcatttgtatggagaaattgcgggatgcacgcctgtgtcctcattgctccaaactgtgttgtttcagctgtattaggcgctggctgacagagcagagagctcaatgtcctcattgccgtgctccactccagctacgagaactagtaaattgtcgttgggcagaagaagtaacacaacagcttgatactcttcaactctgcagtctcaccaaacatgaagaaaatgaaaaggacaaatgtgaaaatcaccatgaaaaacttagtgtattttgctggacttgtaagaagtgtatctgccatcagtgtgcactttggggaggaatgcatggcggacatacctttaaacctttggcagaaatttatgagcaacacgtcactaaagtgaatgaagaggtagccaaacttcgtcggcgtctcatggaactgatcagcttagttcaagaagtggaaaggaatgtagaagctgtaagaaatgcaaaagatgagcgtgttcgggaaattaggaatgcagtggagatgatgattgcacggttagacacacagctgaagaataagcttataacactgatgggtcagaagacatctctaacccaagaaacagagcttttggaatccttacttcaggaggtggagcaccagttgcggtcttgtagtaagagtgagttgatatctaagagctcagagatccttatgatgtttcagcaagttcatcggaagcccatggcatcttttgttaccactcctgttccaccagactttaccagtgaattagtgccatcttacgattcagctacttttgttttagagaatttcagcactttgcgtcagagagcagatcctgtttacagtccacctcttcaagtttcaggactttgctggaggttaaaagtttacccagatggaaatggagttgtgcgaggttactacttatctgtgtttctggagctctcagctggcttgcctgaaacttctaaatatgaatatcgtgtagagatggttcaccagtcctgtaatgatcctacaaaaaatatcattcgagaatttgcatctgactttgaagttggagaatgctggggctataatagatttttccgtttggacttactcgcaaatgaaggatacttgaatccacaaaatgatacagtgattttaaggtttcaggtacgttcaccaactttctttcaaaaatcccgggaccagcattggtacattactcagttggaagctgcacagactagttatatccaacaaataaacaaccttaaagagagacttactattgagctgtctcgaactcagaagtcaagagatttgtcaccaccagataaccatcttagcccccaaaatgatgatgctctggagacacgagctaagaagtctgcatgctctgacatgcttctcgaaggtggtcctactacagcttctgtaagagaggccaaagaggatgaagaagatgaggagaagattcagaatgaagattatcatcacgagctttcagatggagatctggatctggatcttgtttatgaggatgaagtaaatcagctcgatggcagcagttcctctgctagttccacagcaacaagtaatacagaagaaaatgatattgatgaagaaactatgtctggagaaaatgatgtggaatataacaacatggaattagaagagggagaactcatggaagatgcagctgctgcaggacccgcaggtagtagccatggttatgtgggttccagtagtagaatatcaagaagaacacatttatgctccgctgctaccagtagtttactagacattgatccattaattttaatacatttgttggaccttaaggaccggagcagtatagaaaatttgtggggcttacagcctcgcccacctgcttcacttctgcagcccacagcatcatattctcgaaaagataaagaccaaaggaagcaacaggcaatgtggcgagtgccctctgatttaaagatgctaaaaagactcaaaactcaaatggccgaagttcgatgtatgaaaactgatgtaaagaatacactttcagaaataaaaagcagcagtgctgcttctggagacatgcagacaagccttttttctgctgaccaggcagctctggctgcatgtggaactgaaaactctggcagattgcaggatttgggaatggaactcctggcaaagtcatcagttgccaattgttacatacgaaactccacaaataagaagagtaattcgcccaagccagctcgatccagtgtagcaggtagtctatcacttcgaagagcagtggaccctggagaaaatagtcgttcaaagggagactgtcagactctgtctgaaggctccccaggaagctctcagtctgggagcaggcacagttctccccgagccttgatacatggcagtatcggtgatattctgccaaaaactgaagaccggcagtgtaaagctttggattcagatgctgttgtggttgcagttttcagtggcttgcctgcggttgagaaaaggaggaaaatggtcaccttgggggctaatgctaaaggaggtcatctggaaggactgcagatgactgatttggaaaataattctgaaactggagagttacagcctgtactacctgaaggagcttcagctgcccctgaagaaggaatgagtagcgacagtgacattgaatgtgacactgagaatgaggagcaggaagagcataccagtgtgggcgggtttcacgactccttcatggtcatgacacagcccccggatgaagatacacattccagttttcctgatggtgaacaaataggccctgaagatctcagcttcaatacagatgaaaatagtggaaggtaattgccaaatcaagagaactgacttgcaagctaccttgaccctgaattttgctgtagttggtgctcaaatttgtcatcagtcagataatcagatttggtcttatttcttcattatctcgacctgaaatagtaatttggaaactgttggaaggtggcacagtttagtctaagacagcagtagtacatgggaaaaacagtatgggaagagttctttgtaatgtaaggaaataacaatgtagttctctattaatttagcaaatttgtacattcacaaaaggcagtttgtctactacagcagaaggctggttaactgccagaaaatgtacctccaggccctgcatgccgtcagtaacccgcccggcattggtgctctactgtctttggctagagcttagttgtgtttaaataatcatctttatatttggggttttaattacagttccattagtgcctgtagattagtgaacagaaaattgctttggaagagattctgccctgtagacactatgtgaataactgaagtaacactagactgaatctcctttttggagtatgtatcttctctcacttgttcaagtacaggcacactgttcaaccgcatggtatctttctgttgtgtgacttctacaaatgtaattttaaatgaaattaagttaacatggattcattacgttcctggccctgtagacacgtgtaagattatttaaaattctttcatttttttctgcctcttactatacgactgtagtgcaacaaatattttaaagcccccttttcttctttattttcattagttgtacattgatttcagtgtcaacacatttaaagattcattcatgttgcacagtggcttacatgaacgtgaaactgtgatataaggttttctttcatactcataattagcccaaaacagttgccaaactttgccattgtgctcctgcatttgtgtttgagctgctatatatttgtggaaattacactgaaagttgactaagagactattgaaaaagcatgaataattaaatatacatgtgagagacatctcatctgctgtattttacttagtgaatattgttcactcttccgtgtctgatgtcttgctgaatgctgtgactcatagtttacttttgttcaaaatagtttgcactttttgttaataaaatcaacttgagaaaa

SEQ ID NO: 194928 - DNA, 3548 bp, Homo sapiens
  Payload ID: 18497
  Gene Name: tripartite motif containing 37
  Uniprot ID: O94972
  ENST ID: ENST00000393065
  CDS Start-End: 366-3158
gaattctctgcggcaccttcttcgctgaactccaccgtcagttccataggcgcgcgcccgcgtcacgtgggccgaggttccggcgcggctgctggccggcggctgagccgggagaaaggagctgcggccaccgttcgccctacttctgcgcctcggggcgggcgcgccggtaaaaatggcgaaatgggggtaggcggcgctggacctgaagagatggggcgcgcaggtggggcggttgtcagagccccctgacgtgggcgccgggcttttatcggcgatttgatctggcgacctcgggccggcgcctaagaggtcagactgcggagcctgcgggtcgccagcggccccgccgagagccggaggcaatggatgaacagagcgtggagcgctggctgacagagcagagagctcaatgtcctcattgccgtgctccactccagctacgagaactagtaaattgtcgttgggcagaagaagtaacacaacagcttgatactcttcaactctgcagtctcaccaaacatgaagaaaatgaaaaggacaaatgtgaaaatcaccatgaaaaacttagtgtattttgctggacttgtaagaagtgtatctgccatcagtgtgcactttggggaggaatgcatggcggacatacctttaaacctttggcagaaatttatgagcaacacgtcactaaagtgaatgaagaggtagccaaacttcgtcggcgtctcatggaactgatcagcttagttcaagaagtggaaaggaatgtagaagctgtaagaaatgcaaaagatgagcgtgttcgggaaattaggaatgcagtggagatgatgattgcacggttagacacacagctgaagaataagcttataacactgatgggtcagaagacatctctaacccaagaaacagagcttttggaatccttacttcaggaggtggagcaccagttgcggtcttgtagtaagagtgagttgatatctaagagctcagagatccttatgatgtttcagcaagttcatcggaagcccatggcatcttttgttaccactcctgttccaccagactttaccagtgaattagtgccatcttacgattcagctacttttgttttagagaatttcagcactttgcgtcagagagcagatcctgtttacagtccacctcttcaagtttcaggactttgctggaggttaaaagtttacccagatggaaatggagttgtgcgaggttactacttatctgtgtttctggagctctcagctggcttgcctgaaacttctaaatatgaatatcgtgtagagatggttcaccagtcctgtaatgatcctacaaaaaatatcattcgagaatttgcatctgactttgaagttggagaatgctggggctataatagatttttccgtttggacttactcgcaaatgaaggatacttgaatccacaaaatgatacagtgattttaaggtttcaggtacgttcaccaactttctttcaaaaatcccgggaccagcattggtacattactcagttggaagctgcacagactagttatatccaacaaataaacaaccttaaagagagacttactattgagctgtctcgaactcagaagtcaagagatttgtcaccaccagataaccatcttagcccccaaaatgatgatgctctggagacacgagctaagaagtctgcatgctctgacatgcttctcgaaggtggtcctactacagcttctgtaagagaggccaaagaggatgaagaagatgaggagaagattcagaatgaagattatcatcacgagctttcagatggagatctggatctggatcttgtttatgaggatgaagtaaatcagctcgatggcagcagttcctctgctagttccacagcaacaagtaatacagaagaaaatgatattgatgaagaaactatgtctggagaaaatgatgtggaatataacaacatggaattagaagagggagaactcatggaagatgcagctgctgcaggacccgcaggtagtagccatggttatgtgggttccagtagtagaatatcaagaagaacacatttatgctccgctgctaccagtagtttactagacattgatccattaattttaatacatttgttggaccttaaggaccggagcagtatagaaaatttgtggggcttacagcctcgcccacctgcttcacttctgcagcccacagcatcatattctcgaaaagataaagaccaaaggaagcaacaggcaatgtggcgagtgccctctgatttaaagatgctaaaaagactcaaaactcaaatggccgaagttcgatgtatgaaaactgatgtaaagaatacactttcagaaataaaaagcagcagtgctgcttctggagacatgcagacaagccttttttctgctgaccaggcagctctggctgcatgtggaactgaaaactctggcagattgcaggatttgggaatggaactcctggcaaagtcatcagttgccaattgttacatacgaaactccacaaataagaagagtaattcgcccaagccagctcgatccagtgtagcaggtagtctatcacttcgaagagcagtggaccctggagaaaatagtcgttcaaagggagactgtcagactctgtctgaaggctccccaggaagctctcagtctgggagcaggcacagttctccccgagccttgatacatggcagtatcggtgatattctgccaaaaactgaagaccggcagtgtaaagctttggattcagatgctgttgtggttgcagttttcagtggcttgcctgcggttgagaaaaggaggaaaatggtcaccttgggggctaatgctaaaggaggtcatctggaaggactgcagatgactgatttggaaaataattctgaaactggagagttacagcctgtactacctgaaggagcttcagctgcccctgaagaaggaatgagtagcgacagtgacattgaatgtgacactgagaatgaggagcaggaagagcataccagtgtgggcgggtttcacgactccttcatggtcatgacacagcccccggatgaagatacacattccagttttcctgatggtgaacaaataggccctgaagatctcagcttcaatacagatgaaaatagtggaaggtaattgccaaatcaagagaactgacttgcaagctaccttgaccctgaattttgctgtagttggtgctcaaatttgtcatcagtcagataatcagatttggtcttatttcttcattatctcgacctgaaatagtaatttggaaactgttggaaggtggcacagtttagtctaagacagcagtagtacatgggaaaaacagtatgggaagagttctttgtaatgtaaggaaataacaatgtagttctctattaatttagcaaatttgtacattcacaaaaggcagtttgtctactacagcagaaggctggttaactgccagaaaatgtacctccaggccctgcatgccgtcagtaacccgcccggcattggtgctctactgtctttggctagagc

SEQ ID NO: 194929 - DNA, 3622 bp, Homo sapiens
  Payload ID: 18497
  Gene Name: tripartite motif containing 37
  Uniprot ID: O94972
  ENST ID: ENST00000393066
  CDS Start-End: 461-3355
cctcctttcccctcccacagcgtcctgcgcgcatgcgcttcgcagcttctctcgccgccgcgcccccagctgctctggttacggttggtgtttgcgaattctctgcggcaccttcttcgctgaactccaccgtcagttccataggcgcgcgcccgcgtcacgtgggccgaggttccggcgcggctgctggccggcggctgagccgggagaaaggagctgcggccaccgttcgccctacttctgcgcctcggggcgggcgcgccggtaaaaatggcgaaatgggggtaggcggcgctggacctgaagagatggggcgcgcaggtggggcggttgtcagagccccctgacgtgggcgccgggcttttatcggcgatttgatctggcgacctcgggccggcgcctaagaggtcagactgcggagcctgcgggtcgccagcggccccgccgagagccggaggcaatggatgaacagagcgtggagagcattgctgaggttttccgatgtttcatttgtatggagaaattgcgggatgcacgcctgtgtcctcattgctccaaactgtgttgtttcagctgtattaggcgctggctgacagagcagagagctcaatgtcctcattgccgtgctccactccagctacgagaactagtaaattgtcgttgggcagaagaagtaacacaacagcttgatactcttcaactctgcagtctcaccaaacatgaagaaaatgaaaaggacaaatgtgaaaatcaccatgaaaaacttagtgtattttgctggacttgtaagaagtgtatctgccatcagtgtgcactttggggaggaatgcatggcggacatacctttaaacctttggcagaaatttatgagcaacacgtcactaaagtgaatgaagaggtagccaaacttcgtcggcgtctcatggaactgatcagcttagttcaagaagtggaaaggaatgtagaagctgtaagaaatgcaaaagatgagcgtgttcgggaaattaggaatgcagtggagatgatgattgcacggttagacacacagctgaagaataagcttataacactgatgggtcagaagacatctctaacccaagaaacagagcttttggaatccttacttcaggaggtggagcaccagttgcggtcttgtagtaagagtgagttgatatctaagagctcagagatccttatgatgtttcagcaagttcatcggaagcccatggcatcttttgttaccactcctgttccaccagactttaccagtgaattagtgccatcttacgattcagctacttttgttttagagaatttcagcactttgcgtcagagagcagatcctgtttacagtccacctcttcaagtttcaggactttgctggaggttaaaagtttacccagatggaaatggagttgtgcgaggttactacttatctgtgtttctggagctctcagctggcttgcctgaaacttctaaatatgaatatcgtgtagagatggttcaccagtcctgtaatgatcctacaaaaaatatcattcgagaatttgcatctgactttgaagttggagaatgctggggctataatagatttttccgtttggacttactcgcaaatgaaggatacttgaatccacaaaatgatacagtgattttaaggtttcaggtacgttcaccaactttctttcaaaaatcccgggaccagcattggtacattactcagttggaagctgcacagactagttatatccaacaaataaacaaccttaaagagagacttactattgagctgtctcgaactcagaagtcaagagatttgtcaccaccagataaccatcttagcccccaaaatgatgatgctctggagacacgagctaagaagtctgcatgctctgacatgcttctcgaaggtggtcctactacagcttctgtaagagaggccaaagaggatgaagaagatgaggagaagattcagaatgaagattatcatcacgagctttcagatggagatctggatctggatcttgtttatgaggatgaagtaaatcagctcgatggcagcagttcctctgctagttccacagcaacaagtaatacagaagaaaatgatattgatgaagaaactatgtctggagaaaatgatgtggaatataacaacatggaattagaagagggagaactcatggaagatgcagctgctgcaggacccgcaggtagtagccatggttatgtgggttccagtagtagaatatcaagaagaacacatttatgctccgctgctaccagtagtttactagacattgatccattaattttaatacatttgttggaccttaaggaccggagcagtatagaaaatttgtggggcttacagcctcgcccacctgcttcacttctgcagcccacagcatcatattctcgaaaagataaagaccaaaggaagcaacaggcaatgtggcgagtgccctctgatttaaagatgctaaaaagactcaaaactcaaatggccgaagttcgatgtatgaaaactgatgtaaagaatacactttcagaaataaaaagcagcagtgctgcttctggagacatgcagacaagccttttttctgctgaccaggcagctctggctgcatgtggaactgaaaactctggcagattgcaggatttgggaatggaactcctggcaaagtcatcagttgccaattgttacatacgaaactccacaaataagaagagtaattcgcccaagccagctcgatccagtgtagcaggtagtctatcacttcgaagagcagtggaccctggagaaaatagtcgttcaaagggagactgtcagactctgtctgaaggctccccaggaagctctcagtctgggagcaggcacagttctccccgagccttgatacatggcagtatcggtgatattctgccaaaaactgaagaccggcagtgtaaagctttggattcagatgctgttgtggttgcagttttcagtggcttgcctgcggttgagaaaaggaggaaaatggtcaccttgggggctaatgctaaaggaggtcatctggaaggactgcagatgactgatttggaaaataattctgaaactggagagttacagcctgtactacctgaaggagcttcagctgcccctgaagaaggaatgagtagcgacagtgacattgaatgtgacactgagaatgaggagcaggaagagcataccagtgtgggcgggtttcacgactccttcatggtcatgacacagcccccggatgaagatacacattccagttttcctgatggtgaacaaataggccctgaagatctcagcttcaatacagatgaaaatagtggaagataatttgatttgaaactgacactgcacctgatgggttaacaagatctaggcttcagaaggtgacagatatgagtgaggaccatgtgtggggcaaagcctcagaatgatgaaaaggttccggcactatagttggggccatgttgactccttttcaaccatttgtcacagacgtgagaagaagaaatgacttcaaaatcaagagaaaacaaatactgaaagtctctacttacatccaaattttaaaaaataaaatctgtagattaacaatct

SEQ ID NO: 194930 - DNA, 4310 bp, Homo sapiens
  Payload ID: 18497
  Gene Name: tripartite motif containing 37
  ENST ID: ENST00000577554
  CDS Start-End: 280-483
ggctgctggccggcggctgagccgggagaaaggagctgcggccaccgttcgccctacttctgcgcctcggggcgggcgcgccggtaaaaatggcgaaatgggggtaggcggcgctggacctgaagagatggggcgcgcaggtggggcggttgtcagagccccctgacgtgggcgccgggcttttatcggcgatttgatctggcgacctcgggccggcgcctaagaggtcagactgcggagcctgcgggtcgccagcggccccgccgagagccggaggcaatggatgaacagagcgtggagagcattgctgaggttttccgatgtttcatttgtatggagaaattgcgggatgcacgcctgtgtcctcattgctccaaactgtgttgtttcagctgtattaggcgctggctgacagagcagagagctcaatgtcctcattgccgagtctcgctctgtcgtccaggccggagtgcaatggcgtgatttcagctcactgcagcctcgacctcctgggctcagtgctccactccagctacgagaactagtaaattgtcgttgggcagaagaagtaacacaacagcttgatactcttcaactctgcagtctcaccaaacatgaagaaaatgaaaaggacaaatgtgaaaatcaccatgaaaaacttagtgtattttgctggacttgtaagaagtgtatctgccatcagtgtgcactttggggaggaatgcatggcggacatacctttaaacctttggcagaaatttatgagcaacacgtcactaaagtgaatgaagaggtagccaaacttcgtcggcgtctcatggaactgatcagcttagttcaagaagtggaaaggaatgtagaagctgtaagaaatgcaaaagatgagcgtgttcgggaaattaggaatgcagtggagatgatgattgcacggttagacacacagctgaagaataagcttataacactgatgggtcagaagacatctctaacccaagaaacagagcttttggaatccttacttcaggaggtggagcaccagttgcggtcttgtagtaagagtgagttgatatctaagagctcagagatccttatgatgtttcagcaagttcatcggaagcccatggcatcttttgttaccactcctgttccaccagactttaccagtgaattagtgccatcttacgattcagctacttttgttttagagaatttcagcactttgcgtcagagagcagatcctgtttacagtccacctcttcaagtttcaggactttgctggaggttaaaagtttacccagatggaaatggagttgtgcgaggttactacttatctgtgtttctggagctctcagctggcttgcctgaaacttctaaatatgaatatcgtgtagagatggttcaccagtcctgtaatgatcctacaaaaaatatcattcgagaatttgcatctgactttgaagttggagaatgctggggctataatagatttttccgtttggacttactcgcaaatgaaggatacttgaatccacaaaatgatacagtgattttaaggtttcaggtacgttcaccaactttctttcaaaaatcccgggaccagcattggtacattactcagttggaagctgcacagactagttatatccaacaaataaacaaccttaaagagagacttactattgagctgtctcgaactcagaagtcaagagatttgtcaccaccagataaccatcttagcccccaaaatgatgatgctctggagacacgagctaagaagtctgcatgctctgacatgcttctcgaaggtggtcctactacagcttctgtaagagaggccaaagaggatgaagaagatgaggagaagattcagaatgaagattatcatcacgagctttcagatggagatctggatctggatcttgtttatgaggatgaagtaaatcagctcgatggcagcagttcctctgctagttccacagcaacaagtaatacagaagaaaatgatattgatgaagaaactatgtctggagaaaatgatgtggaatataacaacatggaattagaagagggagaactcatggaagatgcagctgctgcaggacccgcaggtagtagccatggttatgtgggttccagtagtagaatatcaagaagaacacatttatgctccgctgctaccagtagtttactagacattgatccattaattttaatacatttgttggaccttaaggaccggagcagtatagaaaatttgtggggcttacagcctcgcccacctgcttcacttctgcagcccacagcatcatattctcgaaaagataaagaccaaaggaagcaacaggcaatgtggcgagtgccctctgatttaaagatgctaaaaagactcaaaactcaaatggccgaagttcgatgtatgaaaactgatgtaaagaatacactttcagaaataaaaagcagcagtgctgcttctggagacatgcagacaagccttttttctgctgaccaggcagctctggctgcatgtggaactgaaaactctggcagattgcaggatttgggaatggaactcctggcaaagtcatcagttgccaattgttacatacgaaactccacaaataagaagagtaattcgcccaagccagctcgatccagtgtagcaggtagtctatcacttcgaagagcagtggaccctggagaaaatagtcgttcaaagggagactgtcagactctgtctgaaggctccccaggaagctctcagtctgggagcaggcacagttctccccgagccttgatacatggcagtatcggtgatattctgccaaaaactgaagaccggcagtgtaaagctttggattcagatgctgttgtggttgcagttttcagtggcttgcctgcggttgagaaaaggaggaaaatggtcaccttgggggctaatgctaaaggaggtcatctggaaggactgcagatgactgatttggaaaataattctgaaactggagagttacagcctgtactacctgaaggagcttcagctgcccctgaagaagatacacattccagttttcctgatggtgaacaaataggccctgaagatctcagcttcaatacagatgaaaatagtggaaggtaattgccaaatcaagagaactgacttgcaagctaccttgaccctgaattttgctgtagttggtgctcaaatttgtcatcagtcagataatcagatttggtcttatttcttcattatctcgacctgaaatagtaatttggaaactgttggaaggtggcacagtttagtctaagacagcagtagtacatgggaaaaacagtatgggaagagttctttgtaatgtaaggaaataacaatgtagttctctattaatttagcaaatttgtacattcacaaaaggcagtttgtctactacagcagaaggctggttaactgccagaaaatgtacctccaggccctgcatgccgtcagtaacccgcccggcattggtgctctactgtctttggctagagcttagttgtgtttaaataatcatctttatatttggggttttaattacagttccattagtgcctgtagattagtgaacagaaaattgctttggaagagattctgccctgtagacactatgtgaataactgaagtaacactagactgaatctcctttttggagtatgtatcttctctcacttgttcaagtacaggcacactgttcaaccgcatggtatctttctgttgtgtgacttctacaaatgtaattttaaatgaaattaagttaacatggattcattacgttcctggccctgtagacacgtgtaagattatttaaaattctttcatttttttctgcctcttactatacgactgtagtgcaacaaatattttaaagcccccttttcttctttattttcattagttgtacattgatttcagtgtcaacacatttaaagattcattcatgttgcacagtggcttacatgaacgtgaaactgtgatataaggttttctttcatactcataattagcccaaaacagttgccaaactttgccattgtgctcctgcatttgtgtttgagctgctatatatttgtggaaattacactgaaagttgactaagagactattgaaaaagcatgaataattaaatatacatgtgagagacatctcatctgctgtattttacttagtgaatattgttcactcttccgtgtctgatgtcttgctgaatgctgtgactcatagtttacttttgttcaaaatagtttgcactttttgttaataaaatcaacttgagaaaata

SEQ ID NO: 194931 - DNA, 430 bp, Homo sapiens
  Payload ID: 18497
  Gene Name: tripartite motif containing 37
  ENST ID: ENST00000583945
  CDS Start-End: 1-163
gactgatttggaaaataattctgaaactggagagttacagcctgtactacctgaaggagcttcagctgcccctgaagaagatacacattccagttttcctgatggtgaacaaataggccctgaagatctcagcttcaatacagatgaaaatagtggaagataatttgatttgaaactgacactgcacctgatgggttaacaagatctaggcttcagaaggtgacagatatgagtgaggaccatgtgtggggcaaagcctcagaatgatgaaaaggttccggcactatagttggggccatgttgactccttttcaaccatttgtcacagacgtgagaagaagaaatgacttcaaaatcaagagaaaacaaatactgaaagtctctacttacatccaaattttaaaaaataaaatctgtagattaacaatct

SEQ ID NO: 194932 - DNA, 584 bp, Homo sapiens
  Payload ID: 18497
  Gene Name: tripartite motif containing 37
  ENST ID: ENST00000581468
  CDS Start-End: 1-584
gtgaatgaagaggtagccaaacttcgtcggcgtctcatggaactgatcagcttagttcaagaagtggaaaggaatgtagaagctgtaagaaatgcaaaagatgagcgtgttcgggaaattaggaatgcagtggagatgatgattgcacggttagacacacagctgaagaataagcttataacactgatgggtcagaagacatctctaacccaagaaacagagcttttggaatccttacttcaggaggtggagcaccagggagcaagttgcttttggaagaaatggtgtcaaggaaggatatacacattgcggtcttgtagtaagagtgagttgatatctaagagctcagagatccttatgatgtttcagcaagttcatcggaagcccatggcatcttttgttaccactcctgttccaccagactttaccagtgaattagtgccatcttacgattcagctacttttgttttagagaatttcagcactttgcgtcagagagcagatcctgtttacagtccacctcttcaagtttcaggactttgctggaggttaaaagtttacccagatggaaatggagttgtgcg

SEQ ID NO: 194933 - DNA, 353 bp, Homo sapiens
  Payload ID: 18497
  Gene Name: tripartite motif containing 37
  ENST ID: ENST00000584889
  CDS Start-End: 8-319
ggaggcaatggatgaacagagcgtggagagcattgctgaggttttccgatgtttcatttgtatggagaaattgcgggatgcacgcctgtgtcctcattgctccaaactgtgttgtttcagctgtattaggcgctggctgacagagcagagagctcaatgtcctcattgccgtgctccactccagctacgagaactagtaaattgtcgttgggcagaagaagtaacacaacagcttgatactcttcaactctgcagtctcaccaaacatgaagaaaatgaaaaggacaagtatgtcctcaatttctttgttcaatattgaatggattttgcctttgtattgtttaatgacacta

SEQ ID NO: 194934 - DNA, 573 bp, Homo sapiens
  Payload ID: 18497
  Gene Name: tripartite motif containing 37
  ENST ID: ENST00000580973
  CDS Start-End: 255-431
gagaaaggagctgcggccaccgttcgccctacttctgcgcctcggggcgggcgcgccggtaaaaatggcgaaatgggggtaggcggcgctggacctgaagagatggggcgcgcaggtggggcggttgtcagagccccctgacgtgggcgccgggcttttatcggcgatttgatctggcgacctcgggccggcgcctaagaggtcagactgcggagcctgcgggtcgccagcggccccgccgagagccggaggcaatggatgaacagagcgtggagagcattgctgaggttttccgatgtttcatttgtatggagaaattgcgggatgcacgcctgtgtcctcattgctccaaactgtgttgtttcagctgtattaggcgctggctgacagagcagagagctcaatgtcctcattgccggaaaggaatgtagaagctgtaagaaatgcaaaagatgagcgtgttcgggaaattaggaatgcagtggagatgatgattgcacggttagacacacagctgaagaataagcttataacactgatgggtcagaagacatctctaacccaagaaacaga

SEQ ID NO: 194935 - DNA, 634 bp, Homo sapiens
  Payload ID: 18497
  Gene Name: tripartite motif containing 37
  ENST ID: ENST00000585287
  CDS Start-End: 1-354
accttgggggctaatgctaaaggaggtcatctggaaggactgcagatgactgatttggaaaataattctgaaactggagagttacagcctgtactacctgaaggagcttcagctgcccctgaagaagaaacatgttctccttccttcctgccaggaatgagtagcgacagtgacattgaatgtgacactgagaatgaggagcaggaagagcataccagtgtgggcgggtttcacgactccttcatggtcatgacacagcccccggatgaagatacacattccagttttcctgatggtgaacaaataggccctgaagatctcagcttcaatacagatgaaaatagtggaagataatttgatttgaaactgacactgcacctgatgggttaacaagatctaggcttcagaaggtgacagatatgagtgaggaccatgtgtggggcaaagcctcagaatgatgaaaaggttccggcactatagttggggccatgttgactccttttcaaccatttgtcacagacgtgagaagaagaaatgacttcaaaatcaagagaaaacaaatactgaaagtctctacttacatccaaattttaaaaaataaaatctgtagattaacaatctgatcattgctaaa

SEQ ID NO: 194936 - DNA, 482 bp, Homo sapiens
  Payload ID: 18497
  Gene Name: tripartite motif containing 37
  ENST ID: ENST00000580122
  CDS Start-End: 1-340
ggatgaacagagcgtggagagcattgctgaggttttccgatgtttcatttgtatggagaaattgcgggatgcacgcctgtgtcctcattgctccaaactgtgttgtttcagctgtattaggcgctggctgacagagcagagagctcaatgtcctcattgccgtgctccactccagctacgagaactagtaaattgtcgttgggcagaagaagtaacacaacagcttgatactcttcaactctgcagtctcaccaaacatgaagaaaatgaaaaggacaacatggcggacatacctttaaacctttggcagaaatttatgagcaacacgtcactaaagtgaatgaagaggtagccaaacttcgtcggcgtctcatggaactgatcagcttagttcaagaagtggaaaggaatgtagaagctgtaagaaatgcaaaagatgagcgtgttcgggaaattaggaatgcagtggagatgatgattgc

SEQ ID NO: 194937 - DNA, 204 bp, Homo sapiens
  Payload ID: 18497
  Gene Name: tripartite motif containing 37
  ENST ID: ENST00000625984
  CDS Start-End: 1-204
atggatgaacagagcgtggagagcattgctgaggttttccgatgtttcatttgtatggagaaattgcgggatgcacgcctgtgtcctcattgctccaaactgtgttgtttcagctgtattaggcgctggctgacagagcagagagctcaatgtcctcattgccgagtctcgctctgtcgtccaggccggagtgcaatggcgtga

SEQ ID NO: 194938 - DNA, 9413 bp, Homo sapiens
  Payload ID: 18498
  Gene Name: tripartite motif containing 38
  Uniprot ID: O00635
  ENST ID: ENST00000357085
  CDS Start-End: 477-1874
gttaacttcctgacccaggaagtggcagcaacagaggggactagcagcgaatatactttacaccaaatctcagaagattcagaacttagatgagtggggcccaggacaggaaccctggagccttggaaggaggggagccccatctccccagaagagcagtgaccccagcagagaggggcctggtgtatcactggaggaaatagcctgccaaggaatacacgtcttcagaagaaattctgtgtggcttcaagagactgatcaaattgtgagaggaaaacagcctacccggtcctcttttcttcaatacaaaatgagataataggggttggaaggaaaaccttcaagacctatggaagtcagttgcagccagctcatcacatagaggtgcaggtgaggtgtattttcatcacggtggaaaattctggctgcttcatctccatctctagagccaatattggagcttttcaataaaagctatggcctcaaccaccagcaccaagaagatgatggaggaagccacctgctccatctgcctgagcctgatgacgaacccagtaagcatcaactgtggacacagctactgccacttgtgtataacagacttctttaaaaacccaagccaaaagcaactgaggcaggagacattctgctgtccccagtgtcgggctccatttcatatggatagcctccgacccaacaagcagctgggaagcctcattgaagccctcaaagagacggatcaagaaatgtcatgtgaggaacacggagagcagttccacctgttctgcgaagacgaggggcagctcatctgctggcgctgtgagcgggcaccacagcacaaagggcacaccacagctcttgttgaagacgtatgccagggctacaaggaaaagctccagaaagctgtgacaaaactgaagcaacttgaagacagatgtacggagcagaagctgtccacagcaatgcgaataactaaatggaaagagaaggtacagattcagagacaaaaaatccggtctgactttaagaatctccagtgtttcctacatgaggaagagaagtcttatctctggaggctggagaaagaagaacaacagactctgagtagactgagggactatgaggctggtctggggctgaagagcaatgaactcaagagccacatcctggaactggaggaaaaatgtcagggctcagcccagaaattgctgcagaatgtgaatgacactttgagcaggagttgggctgtgaagctggaaacatcagaggctgtctccttggaacttcatactatgtgcaatgtttccaagctttacttcgatgtgaagaaaatgttaaggagtcatcaagttagtgtgactctggatccagatacagctcatcacgaactaattctctctgaggatcggagacaagtgactcgtggatacacccaggagaatcaggacacatcttccaggagatttactgccttcccctgtgtcttgggttgtgaaggcttcacctcaggaagacgttactttgaagtggatgttggcgaaggaaccggatgggatttaggagtttgtatggaaaatgtgcagaggggcactggcatgaagcaagagcctcagtctggattctggaccctcaggctgtgcaaaaagaaaggctatgtagcacttacttctcccccaacttcccttcatctgcatgagcagcccctgcttgtgggaatttttctggactatgaggccggagttgtatccttttataacgggaatactggctgccacatctttactttcccgaaggcttccttctctgatactctccggccctatttccaggtttatcaatattctcctttgtttctgcctcccccaggtgactaaggaaaagagcagaagctccttggtttaaccagcacagagaaaataatataaatcccataagggcagacgtttggtctgttttcttcgctgtcatttccttagtagttagactagtgctgagattttagtggatatataattgatttatgttgaatatatggacttagcaactaaaaataccacagatggttaacctggactggggcaaagcaagataatagtgatgatcgtatgttgctgtctccatccgtctttaatgggtcagggctttgatttccaagggtcttcaggtgatgagtaggggtacccacaagtcagaaggtctgcgttctcctagtttgtttgctgccatttgaactcatgtagggaatgaaagaaagctgcaattatccgccaactgcatttaaaacaaaacaaaacagaaaaatcaaaataacattgactcttccaaccactgacatgttgtttaataatctaagcggcagtcctggaggctaccagacttactgagttctacctgagaaacagccaagcaaagtgtgagagaagggttaagactggcttacaatgagatgcttcaaatgaaaagggaattatgagtaaaattgaactttgatgggggattcagttctggaaaagaatttggtattttccagtctgctaggaccaattaccttgaaatattttaaaatctcagtaaatagttattgctgaaatggctgttggcagttcttattatgattcagagaagagcaaatagaccttaacttcattttgaaaaagaccaaattaccatacccgagtgagtaatgacaggactacaactaaaacataaacaacattaatgatgaccataaaaagtcacaaaattgctaaatgttataatttagagttgacataaaaattgatggccaggcatggtggctcacgcctgtaatcccagaactatgtgaggctgaggcaggtggatcacttgaggtcaggagttcaacaccagcctggccaacatggtgaaaccctgtctctactaaaaatacaaaaattagccgggcatggtggtaggggcctgtaacccagctactcgtgaggccaaggcaggagaattgcttgagcctgcagcagctgcagtaagccaagatcatgctgtgcctcaaggaaaaaaaaaattaatgtttactgatatttgttgaagtcctacaacatcacctctgagaataggagaaatgaagcaacagttgtgtctagatgtcagaggcatggctgggcctccatctctgcctaagggagatataaaagagttcaaactattgcccatgttccccagggtcagaagttctaattatgatgatagaggctgggttgtaagtagtaagtgaagggtagcagaatatgccatctttggcataagaagtattttgagttgaagacaattgagaaaaaaaatagattaaaaacaaacaaacacctctgccctctccctatttgcctaaaagcaggatatgaaattgtgaaggtgtcttcttactcggggaagaacaaaagttagtcaccagagactttagactcttatcagcctggacatagcaccagagaagtctttttttttaaaaaaaaaaaaaaaaaaagggaaagaaaaagttgccttcccacaatttactgcactagaaactcaaagtccttttcgtcttccttgtcacttaaaaaatgtattcttttcttaaaatgctatataagcccaagttctaaatcctcttttgagtattcatctcagtactcccctgtgtttgtacaatgcacatgctttgtttctgtcttgtcaatctgtcttttgttagtctacttgatagggccacagatggagaacctaagatgaatagaaaaaaaagatttttctccccaacagaaggattatcgccagttgcacttgttctatatacccgtagtctcggtatgctgacccagacttgggtaataggacccagtgggtaaccgaggaaccccacctttgtgcaggatcagtgaagatgtaatctggatattcataagctcttctctacctcttggcatcccacagtcctgtgttaatgtaagtgtggtcttccccagaaaggggaggcctccctaacattgttaaagcctagcatatgctgcttagaggaaattctatatccctaagcacttagattgctgaataagaaagaatgataataaaataaacaattaaataaaagttttaaaaaatgaataaaataaacctgtggaaactataaggaaggccagaagaaatataaaattggagattaattggggtgcaggaaagttatggaaagaatataagtcctgctagataaatcattagctattttaataaagaatacagaagaaaataggaacaaaagaatatatactggaataattttgagagtaatttgaagaattagatgcaaataaatttgaaaacctttaaaaagaaaccaatggcctaactgacccaagaagggaaagaaaatctaaacagactgataaatacaaaatgaaattcagacacttacagagcagccaggcatggtggctcacacctgtaatcctgtcactttgggaggctgagatgggaggatcacttgaggctaggagtttgagactagcctgggcaaggctcccatctctaaaagaaaagaaattagctgggcatggtggcatgtgccttagtttcagctactcaggaggctgagacgaggattgcttgagcctaggagggcaaggctgcagtgagccatggtcatgccactgaattccagcctaagtgacagagcaagaccttgtctcaaaaaaaaaaaaaaaaaaagttacagagctccaactaaataatgtggggaacaaaagaaaaaagaagatgattttatggctgattttttttttaaggaaaagcaattcatgtacccttgaagattagattaagttctataaaatagcccaaaatgacagtggctgaaacaagtttatttctctcccatttaaagcaagtctagatgtggaagtctgggaagcccagaaaatccaggtcttgtttgtgtatggaaactccagaaaatcacagattccttccagccacccctcaattacccctgggatccaagagagccactaaagttccagccatcatactcacaacccaagttgtaggatggaaaaaaggacacaaaagtagggtgaagagcatgtgtgcaacagctctcttttactctagtgtcctaaaacctatcataaaacctttggcttgccttgcattagccagaatttagtacatggccacacttaagaagtcagaaagattagctttttttccagggtagttggctgaaaatcaggagttctcatattaaaaaacagagaagggacatcgaatagatgaccaacaatctccttcacactcatactatttaaactgtcctagtcaatgaccaaaaaagaaaagcctacaaactcattgatataaaagcttaacaaaggtactccccgccccccgcccgccacacaccatccccaaaaggaaatttctaatccaattaacagtcttaggttgggctgctgaaacaaaataccacagcctgagtgacttaaacaacgacaatttatctctcactgttctgaggtctgagttgattctttgtgaaggccctttcctagcttgcagatggctaccttcctgctatgtcttcacatggcaaagagagagctagctttctggtcttttcttataagggaccagtcccatcatgcccatcatgaagactcgatctgctaggatctcaactaaacctaactatcacccaaagagcccacctccaaagaccatcacattgaatgtgagagtttctacatatgcattgtgggaaacacaaacatttacttcaactgtaactattgaagcaaaaatgtccccccaccatagacatccagcaccacagtagtacatttattacaattgaacttacattgacacgtcattatcaacgaaagtctgtaatttacattagggtttattcttggtgttgtgctttctatgggttttgacaaatgtataatgtcatgtattcaccattatagtatcacagaagtttcactgccctaaaaatcctgtgttctgccttttcaacacttcctgtcacccaatttctatcaactaatcttttgactgtgtccatagttactgtcttttctagagtgtcatacagttgtgaagcaggaagcaggagtgaactccggaggcagggactttactccggaccagattgaagactagccgaaacagggacgaggttaaagcacctctccataagacacgcccaccagcgccatgtcagtttttcgttgccatggcaacaacaggacattatcgacttctttcctctgtacctactccgaagttaccactctttttctagaaatttctgcataatcccccttaacatgcacttaactaaaagcaggtatattactgcagaactgcccctgagctgctactctgggcacattacttatgggttagccctgctcagcaaggagcagtacctgttctgctgttgtacactgctgcttcagtaaaagttgctaacaccaccacttcacccttgaattcttcccgggctaagccctaatttttggcttgcttgccctgcatcagttggagtcatatagtatgcagtcttttcaggttggctttttagtaacatacatttaagtttccttcatgtgttttcatggcttgatcgtttcttttctttttctttttcttttttcttttctttctttttttttttttttttgagacagaggagtcttgctctgttgcccaggctgaagtgcagtggcactggctcactgcaacctccatctcccaggttcaaacgattctcatatctcagcctcccgagtagctgggattacaggctcacgccactatgcccggctaattggggttttcccatgttgaccaggctggtctcaaactcctggcctcaagcaatccacccacttcggcctcccaaagtgaatgcatttctttttaactctaaataacattccattattcagaagtaccacagttatccacttacctactgaaagacatcttgtttccaagttttggataaattatgaataaagctgctataaacatctatgtgcaggtttttgtgtggagataagttttcaattcctttggataaatactaaggagtgtgattggtgaatcttatggtaaaagtatggttacttttgtaagaaaccaccaaactgtcttccaaagtgattgcacattttgcattctcaccagtaatgaacaagttactattgctacatatctttgcaacctttggtgctgacagtgttctaaattttggtcattctactaggtatgcagtggtatctacttgttttaatttgcagttccctaatgacatgatgtcaagcatcttttcatatgcatacttgcatctgtgtatcttctttggtgaacagatgttcaggtcattggcctgctttaaatcaggttattttcttactgttgagttttaagtattctttgtatattctaaaaatattgttcttcatcagatctgtcttttgcaaacattacctgccaatgtgtggcttttcttcaacacttctttgtaaatttgcaagtcctttgagaaaagaaatgcacccaaagtattaatttggcaatctcatatcacgagagtactctaaagctaaataaattacagtttttcaaattttgaattaattgatctttgctattgttagcaaggtcttgtattcttttttttttttttttttttttttaatagagacgggtcttgctacagtgcccaggctggtctcgaactccaggcctaaaatgatcctcctgccttggccttccaaagtactgggattacaggcataagtcaccacgctcagccatctggtattctttagcaactgtttggtaacttaatctttcactttttgaaaacaaaaaatagtttttttctcatagttttctaacaaaatcttcataactgaaataatttctctttatcacctcttcttataaatatggttttctttttttaaataaaaatttaagacattttataactggccaaatttactagcttagatactattagatagtcaatattttttgttggatatttgatttttatttcaggcaactaatatctattcatttttgcactgttggaagaaaattactgatcaaattcactatgtatttgcagaaaatggctttcaatattgtctactttatcatcctttttttttttttctttcttcctttttagatacagggtctcactatgttgcccaggctggtctccaacttctgggctcaaacaatcctccctccttggccttccaaagggttggatatgttttatctacagttttgttgttttgttctgctacaggatatttgcaattgccatttatcatgaaattcatgacataccttcttccactctcctttttatctttattgttctggttataggactagctttgcatctctactcaattctgtatcagtagtatgctttcattttaaattttaagtttgtccatatgtatattgacacagggtcttgctctgttgcccagactggagtgcagtggcaagatcagggctcactgcagccttgactgcctaggctcaagtcatcctcccacctcagcctccagaatggctgggactacaggcacgcaccaccacacatggctcatttttttgtattgagacagggtttctccatgttgcccaggctggtcttgaactactgggctcaagcaatcctcccaccttagcctcccaaagtgttgggattacaggcttgagccaccatgcctcgcttctacacttatttttaattctaaaataatttataataataaatattaacaattagatttaattactgataaatattaaatgttaaataggttttattaaataattaaataaaaatgaaaataatcagtatttcaatttaattactaattataattcacagttatccttgtaactcctaatgtctatataaaagatttttatattttttaattcttaaaattttattatttatttcacaccaggccatcactgtgatacattttttaaaacacattaaattatcaccagaaaagtgctgtgatggaaaatataaattgaaataccttttctggttaggagagtaattctgtttttctgatagagaatagaagagtccttcaggcccctccaaactgtcatattccgggcatcgggtgtccccatcctcacttcagtccacaggcagggtcctcagtcttcagcgctccttctctttcccctttgtcttgtgtctccttgggtctcttttctccaagacctaaactccctgaggacaggactattttttacatcttgatgtcactcctgagcacttgctttaatgtgttggacactgggtccattaaagattgtatgtgaaatta

SEQ ID NO: 194939 - DNA, 3338 bp, Homo sapiens
  Payload ID: 18499
  Gene Name: tripartite motif containing 39
  Uniprot ID: Q9HCM9
  ENST ID: ENST00000376656
  CDS Start-End: 313-1869
cccagcttccactgacacgagcctcggcgcggcttccgcttccggcgagtattgtgtgtcgcgccgcggggcgggggcgaggggaggaggaaggagggaggcagcgctccggcggctccgcgccccgcactcccggacccgaagccgggaagattcctttcttgtctgttagaaacgtatgtcaaacgaggatacagtgtctggaactattggttctaagatataagtggaatgagcctggatcaggagaagtatgctgagctagagttgaaggaagcttctctttctaacaagagaaagcagagttaaattatggcagagacaagtctgttagaggctggggcctctgcagcctctacagctgcggctttggagaacttacaggtggaggcgagctgctctgtgtgcctggagtatctgaaggaacctgtcatcattgagtgtgggcacaacttctgcaaagcttgcatcacccgctggtgggaggacctagagagggacttcccttgtcctgtctgtcgaaagacatcccgctaccgcagtctccgacctaatcggcaactaggcagtatggtggaaattgccaagcagctccaggccgtcaagcggaagatccgggatgagagcctctgcccccaacaccatgaggccctcagccttttctgttatgaggaccaggaggctgtatgcttgatatgtgcaatttcccacacccaccgggcccacaccgttgtgccactggacgatgctacacaggagtacaaggaaaaactgcagaagtgtctggagcccctggaacagaagctgcaggagatcactcgctgcaagtcctctgaggagaagaagcctggtgagctcaagagactagtggaaagtcgccgacagcagatcttgagggagtttgaagagcttcataggcggctggatgaagagcagcaggtgttgctttcacgactggaagaagaggaacaggacattctgcagcgactccgagaaaatgctgctcaccttggggacaagcgccgggacctggcccacttggctgccgaggtggagggcaagtgcttacagtcaggcttcgagatgcttaaggatgtcaaaagtaccctggaaaagaatattcctagaaagttcggaggctcactctcaacgatctgtccacgggatcataaggctctccttggattagtaaaagaaatcaacagatgtgaaaaggtgaagaccatggaggtgacttcagtatccatagagctggaaaagaacttcagcaattttccccgacagtactttgccctaaggaaaatccttaaacagctaattgcggatgtgaccctggaccctgagacagctcatcctaacctagtcctgtcagaggatcgtaagagcgtcaagttcgtggagacaagactccgggatctccctgacacaccaaggcgtttcaccttctacccttgcgtcctggctactgagggtttcacctcaggtcgacactactgggaggtggaggtgggcgacaagacccactgggcagtgggtgtatgccgggactccgtgagccgaaagggcgagttgactccactccctgagactggctactggcgggtgcggctatggaatggggacaaatatgcagccaccaccacaccttttacccctttgcacatcaaggtgaaacccaagcgggtaggcatattcctagactatgaggccggcacactgtctttctacaatgtcacagaccgctctcatatctacaccttcactgatacttttactgagaaactttggcccctcttctacccaggcatccgggctggacggaagaatgctgcaccacttaccatcaggcccccaacagattgggagtgacaggttgggatgtgggaatgactggggtgaggcagggtcaagtgctacgggcctccttcccgtgtcctgctggaacgtcttcgtgtccacctgggtccagtcctgaatcatcttggagaaacaccttggtttctaggatggttttgtgtggagggggaggtaggactgggctggatgagagagcacagctgtgacttcctcctaactgtcagggtggggagctggttcccagaggattgtctaccctgaagtccatcaggttttctgttgcacaaggacgggtcaggaaggaaggagaggcttttccagaaacaaaaaatctgtgagggtctgacttgctcaaaccagaggaggaaacagaaacccctgcacatctttttagggggttctttgacccaggatagtcttgcttcttgaggtagatcacaggggtctgtgtacctctgaattcatgagagatgaatgacagatgctctcatgggtctagatattgaggagtttttctgagggcagagattggacatcaacaaggctagaagggtcagggaagtgggctaaaggaacagattcctagagattaatgaagaggagggaggtttctttggtcttctattccaagggtaaggttgcgattatgggtaagattggccagaggtaggaatgtggggagaaggagaggctgaaaagaaagcagaggagaacccaggtccctgcctcagccttcagcagagttggcttattgcctgcctctataccaataagtcagtcaccttgctcctctccagaggcaaagtggaagagatcctgcaagacacatctatcctttcacagtgttcccaagggaacttggaaaggagagtcaggtattagaggaaagagaagggtatttgtatacaaagccctggccttaaagaatgttacttagtagctactcccaaattgtcagccttcttacctggccaaggtgtccaagccagaaaggaaaaaaggttatggagtctttctcaccctaaggacagggtggaagagggtggtatatagggaagggccagataggcaacttcatttggcttgtgtgcatctggcctggaactggtgttaagccaggcttttgcttgtttgttgccatccctcaccctttgccatttcccttttcagagaatgtaaatgattttcatgttaggccaaaataaacaacttatagggtacatatgttgtcataaaaggtaaaagtgatgcatgccaaaccaaactaaaccaatttggattatctgctattcgggtaatcttcacagaaatgactgagagaagaatctgcagtttactgagggcatttcagttcctcctaccacctcaacaggactttgtccagactctcctcctcttacctttgtgccttgactgtggttctttgtggcaagatactttggttggttaaaataatatggaacaaaggatccactgaagtg

SEQ ID NO: 194940 - DNA, 3535 bp, Homo sapiens
  Payload ID: 18499
  Gene Name: tripartite motif containing 39
  Uniprot ID: Q9HCM9
  ENST ID: ENST00000376659
  CDS Start-End: 599-2065
cggcagcgtcatagcggcgggcatcccatctgcacgtcacacctctttctcacctggacacgcatcccttcctaccctgccagccacgacgtttcctctttcccctctccaatgccccagccccagatctggcggaagaagatggagaacgggggtgggacagagttgtggacaacctctcaggagagggtcgcaaggtgggaccctgaacagtggtagaaacaaaatgagattgtccctgaagtttgcccttcagctgagacacaaggagtagaggaagaggaaggactaacgcagaggcactcaaggtctcactatgactgtagttgagagtcctctcccttcttccctaaccctttccccatttctctcaccacttctttgccagtctagatccgtcctggtgccttactgtgcatacagttctactcgtctcagattcctttcttgtctgttagaaacgtatgtcaaacgaggatacagtgtctggaactattggttctaagatataagtggaatgagcctggatcaggagaagtatgctgagctagagttgaaggaagcttctctttctaacaagagaaagcagagttaaattatggcagagacaagtctgttagaggctggggcctctgcagcctctacagctgcggctttggagaacttacaggtggaggcgagctgctctgtgtgcctggagtatctgaaggaacctgtcatcattgagtgtgggcacaacttctgcaaagcttgcatcacccgctggtgggaggacctagagagggacttcccttgtcctgtctgtcgaaagacatcccgctaccgcagtctccgacctaatcggcaactaggcagtatggtggaaattgccaagcagctccaggccgtcaagcggaagatccgggatgagagcctctgcccccaacaccatgaggccctcagccttttctgttatgaggaccaggaggctgtatgcttgatatgtgcaatttcccacacccaccgggcccacaccgttgtgccactggacgatgctacacaggagtacaaggaaaaactgcagaagtgtctggagcccctggaacagaagctgcaggagatcactcgctgcaagtcctctgaggagaagaagcctggtgagctcaagagactagtggaaagtcgccgacagcagatcttgagggagtttgaagagcttcataggcggctggatgaagagcagcaggtgttgctttcacgactggaagaagaggaacaggacattctgcagcgactccgagaaaatgctgctcaccttggggacaagcgccgggacctggcccacttggctgccgaggtggagggcaagtgcttacagtcaggcttcgagatgcttaaggatgtcaaaagtaccctggaaaaatgtgaaaaggtgaagaccatggaggtgacttcagtatccatagagctggaaaagaacttcagcaattttccccgacagtactttgccctaaggaaaatccttaaacagctaattgcggatgtgaccctggaccctgagacagctcatcctaacctagtcctgtcagaggatcgtaagagcgtcaagttcgtggagacaagactccgggatctccctgacacaccaaggcgtttcaccttctacccttgcgtcctggctactgagggtttcacctcaggtcgacactactgggaggtggaggtgggcgacaagacccactgggcagtgggtgtatgccgggactccgtgagccgaaagggcgagttgactccactccctgagactggctactggcgggtgcggctatggaatggggacaaatatgcagccaccaccacaccttttacccctttgcacatcaaggtgaaacccaagcgggtaggcatattcctagactatgaggccggcacactgtctttctacaatgtcacagaccgctctcatatctacaccttcactgatacttttactgagaaactttggcccctcttctacccaggcatccgggctggacggaagaatgctgcaccacttaccatcaggcccccaacagattgggagtgacaggttgggatgtgggaatgactggggtgaggcagggtcaagtgctacgggcctccttcccgtgtcctgctggaacgtcttcgtgtccacctgggtccagtcctgaatcatcttggagaaacaccttggtttctaggatggttttgtgtggagggggaggtaggactgggctggatgagagagcacagctgtgacttcctcctaactgtcagggtggggagctggttcccagaggattgtctaccctgaagtccatcaggttttctgttgcacaaggacgggtcaggaaggaaggagaggcttttccagaaacaaaaaatctgtgagggtctgacttgctcaaaccagaggaggaaacagaaacccctgcacatctttttagggggttctttgacccaggatagtcttgcttcttgaggtagatcacaggggtctgtgtacctctgaattcatgagagatgaatgacagatgctctcatgggtctagatattgaggagtttttctgagggcagagattggacatcaacaaggctagaagggtcagggaagtgggctaaaggaacagattcctagagattaatgaagaggagggaggtttctttggtcttctattccaagggtaaggttgcgattatgggtaagattggccagaggtaggaatgtggggagaaggagaggctgaaaagaaagcagaggagaacccaggtccctgcctcagccttcagcagagttggcttattgcctgcctctataccaataagtcagtcaccttgctcctctccagaggcaaagtggaagagatcctgcaagacacatctatcctttcacagtgttcccaagggaacttggaaaggagagtcaggtattagaggaaagagaagggtatttgtatacaaagccctggccttaaagaatgttacttagtagctactcccaaattgtcagccttcttacctggccaaggtgtccaagccagaaaggaaaaaaggttatggagtctttctcaccctaaggacagggtggaagagggtggtatatagggaagggccagataggcaacttcatttggcttgtgtgcatctggcctggaactggtgttaagccaggcttttgcttgtttgttgccatccctcaccctttgccatttcccttttcagagaatgtaaatgattttcatgttaggccaaaataaacaacttatagggtacatatgttgtcataaaaggtaaaagtgatgcatgccaaaccaaactaaaccaatttggattatctgctattcgggtaatcttcacagaaatgactgagagaagaatctgcagtttactgagggcatttcagttcctcctaccacctcaacaggactttgtccagactctcctcctcttacctttgtgccttgactgtggttctttgtggcaagatactttggttggttaaaataatatggaacaaaggatccactgaagtga

SEQ ID NO: 194941 - DNA, 3198 bp, Homo sapiens
  Payload ID: 18499
  Gene Name: tripartite motif containing 39
  Uniprot ID: Q9HCM9
  ENST ID: ENST00000383601
  CDS Start-End: 262-1728
gcgaggggaggaggaaggagggaggcagcgctccggcggctccgcgccccgcactcccggacccgaagccgggaagatccgtcctggtgccttactgtgcatacagttctactcgtctcagaaacgtatgtcaaacgaggatacagtgtctggaactattggttctaagatataagtggaatgagcctggatcaggagaagtatgctgagctagagttgaaggaagcttctctttctaacaagagaaagcagagttaaattatggcagagacaagtctgttagaggctggggcctctgcagcctctacagctgcggctttggagaacttacaggtggaggcgagctgctctgtgtgcctggagtatctgaaggaacctgtcatcattgagtgtgggcacaacttctgcaaagcttgcatcacccgctggtgggaggacctagagagggacttcccttgtcctgtctgtcgaaagacatcccgctaccgcagtctccgacctaatcggcaactaggcagtatggtggaaattgccaagcagctccaggccgtcaagcggaagatccgggatgagagcctctgcccccaacaccatgaggccctcagccttttctgttatgaggaccaggaggctgtatgcttgatatgtgcaatttcccacacccaccgggctcacaccgttgtgccactggacgatgctacacaggagtacaaggaaaaactgcagaagtgtctggagcccctggaacagaagctgcaggagatcactcgctgcaagtcctctgaggagaagaagcctggtgagctcaagagactagtggaaagtcgccgacagcagatcttgagggagtttgaagagcttcataggcggctggatgaagagcagcaggtgttgctttcacgactggaagaagaggaacaggacattctgcagcgactccgagaaaatgctgctcaccttggggacaagcgccgggacctggcccacttggctgccgaggtggagggcaagtgcttacagtcaggcttcgagatgcttaaggatgtcaaaagtaccctggaaaaatgtgaaaaggtgaagaccatggaggtgacttcagtatccatagagctggaaaagaacttcagcaattttccccgacagtactttgccctaaggaaaatccttaaacagctaattgcggatgtgaccctggaccctgagacagctcatcctaacctagtcctgtcagaggatcgtaagagcgtcaagttcgtggagacaagactccgggatctccctgacacaccaaggcgtttcaccttctacccttgcgtcctggctactgagggtttcacctcaggtcgacactactgggaggtggaggtgggcgacaagacccactgggcagtgggtgtatgccgggactccgtgagccgaaagggcgagttgactccactccctgagactggctactggcgggtgcggctatggaatggggacaaatatgcagccaccaccacaccttttacccctttgcacatcaaggtgaaacccaagcgggtaggcatattcctagactatgaggccggcacactgtctttctacaatgtcacagaccgctctcatatctacaccttcactgatacttttactgagaaactttggcccctcttctacccaggcatccgggctggacggaagaatgctgcaccacttaccatcaggcccccaacagattgggagtgacaggttgggatgtgggaatgactggggtgaggcagggtcaagtgctacgggcctccttcccgtgtcctgctggaacgtcttcgtgtccacctgggtccagtcctgaatcatcttggagaaacaccttggtttctaggatggttttgtgtggagggggaggtaggactgggctggatgagagagcacagctgtgacttcctcctaactgtcagggtggggagctggttcccagaggattgtctaccctgaagtccatcaggttttctgttgcacaaggacgggtcaggaaggaaggagaggcttttccagaaacaaaaaatctgtgagggtctgacttgctcaaaccagaggaggaaacagaaacccctgcacatctttttagggggttctttgacccaggatagtcttgcttcttgaggtagatcacaggggtctgtgtacctctgaattcatgagagatgaatgacagatgctctcatgggtctagatattgaggagtttttctgagggcagagattggacatcaacaaggctagaagggtcagggaagtgggctaaaggaacagattcctagagattaatgaagaggagggaggtttctttggtcttctattccaagggtaaggttgcgattatgggtaagattggccagaggtaggaatgtggggagaaggagaggctgaaaagaaagcagaggagaacccaggtccctgcctcagccttcagcagagttggcttattgcctgcctctataccaataagtcagtcaccttgctcctctccagaggcaaagtggaagagatcctgcaagacacatctatcctttcacagtgttcccaagggaacttggaaaggagagtcaggtattagaggaaagagaagggtatttgtatacaaagccctggccttaaagaatgttacttagtagctactcccaaattgtcagccttcttacctggccaaggtgtccaagccagaaaggaaaaaaggttatggagtctttctcaccctaaggacagggtggaagagggtggtatatagggaagggccagataggcaacttcatttggcttgtgtgcatctggcctggaactggtgttaagccaggcttttgcttgtttgttgccatccctcaccctttgccatttcccttttcagagaatgtaaatgattttcatgttaggccaaaataaacaacttatagggtacatatgttgtcataaaaggtaaaagtgatgcatgccaaaccaaactaaaccaatttggattatctgctattcgggtaatcttcacagaaatgactgagagaagaatctgcagtttactgagggcatttcagttcctcctaccacctcaacaggactttgtccagactctcctcctcttacctttgtgccttgactgtggttctttgtggcaagatactttggttggttaaaataatatggaacaaaggatccactgaagtga

SEQ ID NO: 194942 - DNA, 3187 bp, Homo sapiens
  Payload ID: 18499
  Gene Name: tripartite motif containing 39
  Uniprot ID: Q9HCM9
  ENST ID: ENST00000383602
  CDS Start-End: 161-1717
attcctttcttgtctgttagaaacgtatgtcaaacgaggatacagtgtctggaactattggttctaagatataagtggaatgagcctggatcaggagaagtatgctgagctagagttgaaggaagcttctctttctaacaagagaaagcagagttaaattatggcagagacaagtctgttagaggctggggcctctgcagcctctacagctgcggctttggagaacttacaggtggaggcgagctgctctgtgtgcctggagtatctgaaggaacctgtcatcattgagtgtgggcacaacttctgcaaagcttgcatcacccgctggtgggaggacctagagagggacttcccttgtcctgtctgtcgaaagacatcccgctaccgcagtctccgacctaatcggcaactaggcagtatggtggaaattgccaagcagctccaggccgtcaagcggaagatccgggatgagagcctctgcccccaacaccatgaggccctcagccttttctgttatgaggaccaggaggctgtatgcttgatatgtgcaatttcccacacccaccgggctcacaccgttgtgccactggacgatgctacacaggagtacaaggaaaaactgcagaagtgtctggagcccctggaacagaagctgcaggagatcactcgctgcaagtcctctgaggagaagaagcctggtgagctcaagagactagtggaaagtcgccgacagcagatcttgagggagtttgaagagcttcataggcggctggatgaagagcagcaggtgttgctttcacgactggaagaagaggaacaggacattctgcagcgactccgagaaaatgctgctcaccttggggacaagcgccgggacctggcccacttggctgccgaggtggagggcaagtgcttacagtcaggcttcgagatgcttaaggatgtcaaaagtaccctggaaaagaatattcctagaaagttcggaggctcactctcaacgatctgtccacgggatcataaggctctccttggattagtaaaagaaatcaacagatgtgaaaaggtgaagaccatggaggtgacttcagtatccatagagctggaaaagaacttcagcaattttccccgacagtactttgccctaaggaaaatccttaaacagctaattgcggatgtgaccctggaccctgagacagctcatcctaacctagtcctgtcagaggatcgtaagagcgtcaagttcgtggagacaagactccgggatctccctgacacaccaaggcgtttcaccttctacccttgcgtcctggctactgagggtttcacctcaggtcgacactactgggaggtggaggtgggcgacaagacccactgggcagtgggtgtatgccgggactccgtgagccgaaagggcgagttgactccactccctgagactggctactggcgggtgcggctatggaatggggacaaatatgcagccaccaccacaccttttacccctttgcacatcaaggtgaaacccaagcgggtaggcatattcctagactatgaggccggcacactgtctttctacaatgtcacagaccgctctcatatctacaccttcactgatacttttactgagaaactttggcccctcttctacccaggcatccgggctggacggaagaatgctgcaccacttaccatcaggcccccaacagattgggagtgacaggttgggatgtgggaatgactggggtgaggcagggtcaagtgctacgggcctccttcccgtgtcctgctggaacgtcttcgtgtccacctgggtccagtcctgaatcatcttggagaaacaccttggtttctaggatggttttgtgtggagggggaggtaggactgggctggatgagagagcacagctgtgacttcctcctaactgtcagggtggggagctggttcccagaggattgtctaccctgaagtccatcaggttttctgttgcacaaggacgggtcaggaaggaaggagaggcttttccagaaacaaaaaatctgtgagggtctgacttgctcaaaccagaggaggaaacagaaacccctgcacatctttttagggggttctttgacccaggatagtcttgcttcttgaggtagatcacaggggtctgtgtacctctgaattcatgagagatgaatgacagatgctctcatgggtctagatattgaggagtttttctgagggcagagattggacatcaacaaggctagaagggtcagggaagtgggctaaaggaacagattcctagagattaatgaagaggagggaggtttctttggtcttctattccaagggtaaggttgcgattatgggtaagattggccagaggtaggaatgtggggagaaggagaggctgaaaagaaagcagaggagaacccaggtccctgcctcagccttcagcagagttggcttattgcctgcctctataccaataagtcagtcaccttgctcctctccagaggcaaagtggaagagatcctgcaagacacatctatcctttcacagtgttcccaagggaacttggaaaggagagtcaggtattagaggaaagagaagggtatttgtatacaaagccctggccttaaagaatgttacttagtagctactcccaaattgtcagccttcttacctggccaaggtgtccaagccagaaaggaaaaaaggttatggagtctttctcaccctaaggacagggtggaagagggtggtatatagggaagggccagataggcaacttcatttggcttgtgtgcatctggcctggaactggtgttaagccaggcttttgcttgtttgttgccatccctcaccctttgccatttcccttttcagagaatgtaaatgattttcatgttaggccaaaataaacaacttatagggtacatatgttgtcataaaaggtaaaagtgatgcatgccaaaccaaactaaaccaatttggattatctgctattcgggtaatcttcacagaaatgactgagagaagaatctgcagtttactgagggcatttcagttcctcctaccacctcaacaggactttgtccagactctcctcctcttacctttgtgccttgactgtggttctttgtggcaagatactttggttggttaaaataatatggaacaaaggatccactgaagtga

SEQ ID NO: 194943 - DNA, 3535 bp, Homo sapiens
  Payload ID: 18499
  Gene Name: tripartite motif containing 39
  Uniprot ID: Q9HCM9
  ENST ID: ENST00000383603
  CDS Start-End: 599-2065
cggcagcgtcatagcggcgggcatcccatctgcacgtcacacctctttctcacctggacacgcatcccttcctaccctgccagccacgacgtttcctctttcccctctccaatgccccagccccagatctggcggaagaagatggagaacgggggtgggacagagttgtggacaacctctcaggagagggtcgcaaggtgggaccctgaacagtggtagaaacaaaatgagattgtccctgaagtttgcccttcagctgagacacaaggagtagaggaagaggaaggactaacgcagaggcactcaaggtctcactatgactgtagttgagagtcctctcccttcttccctaaccctttccccatttctctcaccacttctttgccagtctagatccgtcctggtgccttactgtgcatacagttctactcgtctcagattcctttcttgtctgttagaaacgtatgtcaaacgaggatacagtgtctggaactattggttctaagatataagtggaatgagcctggatcaggagaagtatgctgagctagagttgaaggaagcttctctttctaacaagagaaagcagagttaaattatggcagagacaagtctgttagaggctggggcctctgcagcctctacagctgcggctttggagaacttacaggtggaggcgagctgctctgtgtgcctggagtatctgaaggaacctgtcatcattgagtgtgggcacaacttctgcaaagcttgcatcacccgctggtgggaggacctagagagggacttcccttgtcctgtctgtcgaaagacatcccgctaccgcagtctccgacctaatcggcaactaggcagtatggtggaaattgccaagcagctccaggccgtcaagcggaagatccgggatgagagcctctgcccccaacaccatgaggccctcagccttttctgttatgaggaccaggaggctgtatgcttgatatgtgcaatttcccacacccaccgggctcacaccgttgtgccactggacgatgctacacaggagtacaaggaaaaactgcagaagtgtctggagcccctggaacagaagctgcaggagatcactcgctgcaagtcctctgaggagaagaagcctggtgagctcaagagactagtggaaagtcgccgacagcagatcttgagggagtttgaagagcttcataggcggctggatgaagagcagcaggtgttgctttcacgactggaagaagaggaacaggacattctgcagcgactccgagaaaatgctgctcaccttggggacaagcgccgggacctggcccacttggctgccgaggtggagggcaagtgcttacagtcaggcttcgagatgcttaaggatgtcaaaagtaccctggaaaaatgtgaaaaggtgaagaccatggaggtgacttcagtatccatagagctggaaaagaacttcagcaattttccccgacagtactttgccctaaggaaaatccttaaacagctaattgcggatgtgaccctggaccctgagacagctcatcctaacctagtcctgtcagaggatcgtaagagcgtcaagttcgtggagacaagactccgggatctccctgacacaccaaggcgtttcaccttctacccttgcgtcctggctactgagggtttcacctcaggtcgacactactgggaggtggaggtgggcgacaagacccactgggcagtgggtgtatgccgggactccgtgagccgaaagggcgagttgactccactccctgagactggctactggcgggtgcggctatggaatggggacaaatatgcagccaccaccacaccttttacccctttgcacatcaaggtgaaacccaagcgggtaggcatattcctagactatgaggccggcacactgtctttctacaatgtcacagaccgctctcatatctacaccttcactgatacttttactgagaaactttggcccctcttctacccaggcatccgggctggacggaagaatgctgcaccacttaccatcaggcccccaacagattgggagtgacaggttgggatgtgggaatgactggggtgaggcagggtcaagtgctacgggcctccttcccgtgtcctgctggaacgtcttcgtgtccacctgggtccagtcctgaatcatcttggagaaacaccttggtttctaggatggttttgtgtggagggggaggtaggactgggctggatgagagagcacagctgtgacttcctcctaactgtcagggtggggagctggttcccagaggattgtctaccctgaagtccatcaggttttctgttgcacaaggacgggtcaggaaggaaggagaggcttttccagaaacaaaaaatctgtgagggtctgacttgctcaaaccagaggaggaaacagaaacccctgcacatctttttagggggttctttgacccaggatagtcttgcttcttgaggtagatcacaggggtctgtgtacctctgaattcatgagagatgaatgacagatgctctcatgggtctagatattgaggagtttttctgagggcagagattggacatcaacaaggctagaagggtcagggaagtgggctaaaggaacagattcctagagattaatgaagaggagggaggtttctttggtcttctattccaagggtaaggttgcgattatgggtaagattggccagaggtaggaatgtggggagaaggagaggctgaaaagaaagcagaggagaacccaggtccctgcctcagccttcagcagagttggcttattgcctgcctctataccaataagtcagtcaccttgctcctctccagaggcaaagtggaagagatcctgcaagacacatctatcctttcacagtgttcccaagggaacttggaaaggagagtcaggtattagaggaaagagaagggtatttgtatacaaagccctggccttaaagaatgttacttagtagctactcccaaattgtcagccttcttacctggccaaggtgtccaagccagaaaggaaaaaaggttatggagtctttctcaccctaaggacagggtggaagagggtggtatatagggaagggccagataggcaacttcatttggcttgtgtgcatctggcctggaactggtgttaagccaggcttttgcttgtttgttgccatccctcaccctttgccatttcccttttcagagaatgtaaatgattttcatgttaggccaaaataaacaacttatagggtacatatgttgtcataaaaggtaaaagtgatgcatgccaaaccaaactaaaccaatttggattatctgctattcgggtaatcttcacagaaatgactgagagaagaatctgcagtttactgagggcatttcagttcctcctaccacctcaacaggactttgtccagactctcctcctcttacctttgtgccttgactgtggttctttgtggcaagatactttggttggttaaaataatatggaacaaaggatccactgaagtga

SEQ ID NO: 194944 - DNA, 3187 bp, Homo sapiens
  Payload ID: 18499
  Gene Name: tripartite motif containing 39
  Uniprot ID: Q9HCM9
  ENST ID: ENST00000396547
  CDS Start-End: 161-1717
attcctttcttgtctgttagaaacgtatgtcaaacgaggatacagtgtctggaactattggttctaagatataagtggaatgagcctggatcaggagaagtatgctgagctagagttgaaggaagcttctctttctaacaagagaaagcagagttaaattatggcagagacaagtctgttagaggctggggcctctgcagcctctacagctgcggctttggagaacttacaggtggaggcgagctgctctgtgtgcctggagtatctgaaggaacctgtcatcattgagtgtgggcacaacttctgcaaagcttgcatcacccgctggtgggaggacctagagagggacttcccttgtcctgtctgtcgaaagacatcccgctaccgcagtctccgacctaatcggcaactaggcagtatggtggaaattgccaagcagctccaggccgtcaagcggaagatccgggatgagagcctctgcccccaacaccatgaggccctcagccttttctgttatgaggaccaggaggctgtatgcttgatatgtgcaatttcccacacccaccgggcccacaccgttgtgccactggacgatgctacacaggagtacaaggaaaaactgcagaagtgtctggagcccctggaacagaagctgcaggagatcactcgctgcaagtcctctgaggagaagaagcctggtgagctcaagagactagtggaaagtcgccgacagcagatcttgagggagtttgaagagcttcataggcggctggatgaagagcagcaggtgttgctttcacgactggaagaagaggaacaggacattctgcagcgactccgagaaaatgctgctcaccttggggacaagcgccgggacctggcccacttggctgccgaggtggagggcaagtgcttacagtcaggcttcgagatgcttaaggatgtcaaaagtaccctggaaaagaatattcctagaaagttcggaggctcactctcaacgatctgtccacgggatcataaggctctccttggattagtaaaagaaatcaacagatgtgaaaaggtgaagaccatggaggtgacttcagtatccatagagctggaaaagaacttcagcaattttccccgacagtactttgccctaaggaaaatccttaaacagctaattgcggatgtgaccctggaccctgagacagctcatcctaacctagtcctgtcagaggatcgtaagagcgtcaagttcgtggagacaagactccgggatctccctgacacaccaaggcgtttcaccttctacccttgcgtcctggctactgagggtttcacctcaggtcgacactactgggaggtggaggtgggcgacaagacccactgggcagtgggtgtatgccgggactccgtgagccgaaagggcgagttgactccactccctgagactggctactggcgggtgcggctatggaatggggacaaatatgcagccaccaccacaccttttacccctttgcacatcaaggtgaaacccaagcgggtaggcatattcctagactatgaggccggcacactgtctttctacaatgtcacagaccgctctcatatctacaccttcactgatacttttactgagaaactttggcccctcttctacccaggcatccgggctggacggaagaatgctgcaccacttaccatcaggcccccaacagattgggagtgacaggttgggatgtgggaatgactggggtgaggcagggtcaagtgctacgggcctccttcccgtgtcctgctggaacgtcttcgtgtccacctgggtccagtcctgaatcatcttggagaaacaccttggtttctaggatggttttgtgtggagggggaggtaggactgggctggatgagagagcacagctgtgacttcctcctaactgtcagggtggggagctggttcccagaggattgtctaccctgaagtccatcaggttttctgttgcacaaggacgggtcaggaaggaaggagaggcttttccagaaacaaaaaatctgtgagggtctgacttgctcaaaccagaggaggaaacagaaacccctgcacatctttttagggggttctttgacccaggatagtcttgcttcttgaggtagatcacaggggtctgtgtacctctgaattcatgagagatgaatgacagatgctctcatgggtctagatattgaggagtttttctgagggcagagattggacatcaacaaggctagaagggtcagggaagtgggctaaaggaacagattcctagagattaatgaagaggagggaggtttctttggtcttctattccaagggtaaggttgcgattatgggtaagattggccagaggtaggaatgtggggagaaggagaggctgaaaagaaagcagaggagaacccaggtccctgcctcagccttcagcagagttggcttattgcctgcctctataccaataagtcagtcaccttgctcctctccagaggcaaagtggaagagatcctgcaagacacatctatcctttcacagtgttcccaagggaacttggaaaggagagtcaggtattagaggaaagagaagggtatttgtatacaaagccctggccttaaagaatgttacttagtagctactcccaaattgtcagccttcttacctggccaaggtgtccaagccagaaaggaaaaaaggttatggagtctttctcaccctaaggacagggtggaagagggtggtatatagggaagggccagataggcaacttcatttggcttgtgtgcatctggcctggaactggtgttaagccaggcttttgcttgtttgttgccatccctcaccctttgccatttcccttttcagagaatgtaaatgattttcatgttaggccaaaataaacaacttatagggtacatatgttgtcataaaaggtaaaagtgatgcatgccaaaccaaactaaaccaatttggattatctgctattcgggtaatcttcacagaaatgactgagagaagaatctgcagtttactgagggcatttcagttcctcctaccacctcaacaggactttgtccagactctcctcctcttacctttgtgccttgactgtggttctttgtggcaagatactttggttggttaaaataatatggaacaaaggatccactgaagtga

SEQ ID NO: 194945 - DNA, 3198 bp, Homo sapiens
  Payload ID: 18499
  Gene Name: tripartite motif containing 39
  Uniprot ID: Q9HCM9
  ENST ID: ENST00000396548
  CDS Start-End: 262-1728
gcgaggggaggaggaaggagggaggcagcgctccggcggctccgcgccccgcactcccggacccgaagccgggaagatccgtcctggtgccttactgtgcatacagttctactcgtctcagaaacgtatgtcaaacgaggatacagtgtctggaactattggttctaagatataagtggaatgagcctggatcaggagaagtatgctgagctagagttgaaggaagcttctctttctaacaagagaaagcagagttaaattatggcagagacaagtctgttagaggctggggcctctgcagcctctacagctgcggctttggagaacttacaggtggaggcgagctgctctgtgtgcctggagtatctgaaggaacctgtcatcattgagtgtgggcacaacttctgcaaagcttgcatcacccgctggtgggaggacctagagagggacttcccttgtcctgtctgtcgaaagacatcccgctaccgcagtctccgacctaatcggcaactaggcagtatggtggaaattgccaagcagctccaggccgtcaagcggaagatccgggatgagagcctctgcccccaacaccatgaggccctcagccttttctgttatgaggaccaggaggctgtatgcttgatatgtgcaatttcccacacccaccgggcccacaccgttgtgccactggacgatgctacacaggagtacaaggaaaaactgcagaagtgtctggagcccctggaacagaagctgcaggagatcactcgctgcaagtcctctgaggagaagaagcctggtgagctcaagagactagtggaaagtcgccgacagcagatcttgagggagtttgaagagcttcataggcggctggatgaagagcagcaggtgttgctttcacgactggaagaagaggaacaggacattctgcagcgactccgagaaaatgctgctcaccttggggacaagcgccgggacctggcccacttggctgccgaggtggagggcaagtgcttacagtcaggcttcgagatgcttaaggatgtcaaaagtaccctggaaaaatgtgaaaaggtgaagaccatggaggtgacttcagtatccatagagctggaaaagaacttcagcaattttccccgacagtactttgccctaaggaaaatccttaaacagctaattgcggatgtgaccctggaccctgagacagctcatcctaacctagtcctgtcagaggatcgtaagagcgtcaagttcgtggagacaagactccgggatctccctgacacaccaaggcgtttcaccttctacccttgcgtcctggctactgagggtttcacctcaggtcgacactactgggaggtggaggtgggcgacaagacccactgggcagtgggtgtatgccgggactccgtgagccgaaagggcgagttgactccactccctgagactggctactggcgggtgcggctatggaatggggacaaatatgcagccaccaccacaccttttacccctttgcacatcaaggtgaaacccaagcgggtaggcatattcctagactatgaggccggcacactgtctttctacaatgtcacagaccgctctcatatctacaccttcactgatacttttactgagaaactttggcccctcttctacccaggcatccgggctggacggaagaatgctgcaccacttaccatcaggcccccaacagattgggagtgacaggttgggatgtgggaatgactggggtgaggcagggtcaagtgctacgggcctccttcccgtgtcctgctggaacgtcttcgtgtccacctgggtccagtcctgaatcatcttggagaaacaccttggtttctaggatggttttgtgtggagggggaggtaggactgggctggatgagagagcacagctgtgacttcctcctaactgtcagggtggggagctggttcccagaggattgtctaccctgaagtccatcaggttttctgttgcacaaggacgggtcaggaaggaaggagaggcttttccagaaacaaaaaatctgtgagggtctgacttgctcaaaccagaggaggaaacagaaacccctgcacatctttttagggggttctttgacccaggatagtcttgcttcttgaggtagatcacaggggtctgtgtacctctgaattcatgagagatgaatgacagatgctctcatgggtctagatattgaggagtttttctgagggcagagattggacatcaacaaggctagaagggtcagggaagtgggctaaaggaacagattcctagagattaatgaagaggagggaggtttctttggtcttctattccaagggtaaggttgcgattatgggtaagattggccagaggtaggaatgtggggagaaggagaggctgaaaagaaagcagaggagaacccaggtccctgcctcagccttcagcagagttggcttattgcctgcctctataccaataagtcagtcaccttgctcctctccagaggcaaagtggaagagatcctgcaagacacatctatcctttcacagtgttcccaagggaacttggaaaggagagtcaggtattagaggaaagagaagggtatttgtatacaaagccctggccttaaagaatgttacttagtagctactcccaaattgtcagccttcttacctggccaaggtgtccaagccagaaaggaaaaaaggttatggagtctttctcaccctaaggacagggtggaagagggtggtatatagggaagggccagataggcaacttcatttggcttgtgtgcatctggcctggaactggtgttaagccaggcttttgcttgtttgttgccatccctcaccctttgccatttcccttttcagagaatgtaaatgattttcatgttaggccaaaataaacaacttatagggtacatatgttgtcataaaaggtaaaagtgatgcatgccaaaccaaactaaaccaatttggattatctgctattcgggtaatcttcacagaaatgactgagagaagaatctgcagtttactgagggcatttcagttcctcctaccacctcaacaggactttgtccagactctcctcctcttacctttgtgccttgactgtggttctttgtggcaagatactttggttggttaaaataatatggaacaaaggatccactgaagtga

SEQ ID NO: 194946 - DNA, 3249 bp, Homo sapiens
  Payload ID: 18499
  Gene Name: tripartite motif containing 39
  Uniprot ID: Q9HCM9
  ENST ID: ENST00000396551
  CDS Start-End: 313-1779
cccagcttccactgacacgagcctcggcgcggcttccgcttccggcgagtattgtgtgtcgcgccgcggggcgggggcgaggggaggaggaaggagggaggcagcgctccggcggctccgcgccccgcactcccggacccgaagccgggaagattcctttcttgtctgttagaaacgtatgtcaaacgaggatacagtgtctggaactattggttctaagatataagtggaatgagcctggatcaggagaagtatgctgagctagagttgaaggaagcttctctttctaacaagagaaagcagagttaaattatggcagagacaagtctgttagaggctggggcctctgcagcctctacagctgcggctttggagaacttacaggtggaggcgagctgctctgtgtgcctggagtatctgaaggaacctgtcatcattgagtgtgggcacaacttctgcaaagcttgcatcacccgctggtgggaggacctagagagggacttcccttgtcctgtctgtcgaaagacatcccgctaccgcagtctccgacctaatcggcaactaggcagtatggtggaaattgccaagcagctccaggccgtcaagcggaagatccgggatgagagcctctgcccccaacaccatgaggccctcagccttttctgttatgaggaccaggaggctgtatgcttgatatgtgcaatttcccacacccaccgggcccacaccgttgtgccactggacgatgctacacaggagtacaaggaaaaactgcagaagtgtctggagcccctggaacagaagctgcaggagatcactcgctgcaagtcctctgaggagaagaagcctggtgagctcaagagactagtggaaagtcgccgacagcagatcttgagggagtttgaagagcttcataggcggctggatgaagagcagcaggtgttgctttcacgactggaagaagaggaacaggacattctgcagcgactccgagaaaatgctgctcaccttggggacaagcgccgggacctggcccacttggctgccgaggtggagggcaagtgcttacagtcaggcttcgagatgcttaaggatgtcaaaagtaccctggaaaaatgtgaaaaggtgaagaccatggaggtgacttcagtatccatagagctggaaaagaacttcagcaattttccccgacagtactttgccctaaggaaaatccttaaacagctaattgcggatgtgaccctggaccctgagacagctcatcctaacctagtcctgtcagaggatcgtaagagcgtcaagttcgtggagacaagactccgggatctccctgacacaccaaggcgtttcaccttctacccttgcgtcctggctactgagggtttcacctcaggtcgacactactgggaggtggaggtgggcgacaagacccactgggcagtgggtgtatgccgggactccgtgagccgaaagggcgagttgactccactccctgagactggctactggcgggtgcggctatggaatggggacaaatatgcagccaccaccacaccttttacccctttgcacatcaaggtgaaacccaagcgggtaggcatattcctagactatgaggccggcacactgtctttctacaatgtcacagaccgctctcatatctacaccttcactgatacttttactgagaaactttggcccctcttctacccaggcatccgggctggacggaagaatgctgcaccacttaccatcaggcccccaacagattgggagtgacaggttgggatgtgggaatgactggggtgaggcagggtcaagtgctacgggcctccttcccgtgtcctgctggaacgtcttcgtgtccacctgggtccagtcctgaatcatcttggagaaacaccttggtttctaggatggttttgtgtggagggggaggtaggactgggctggatgagagagcacagctgtgacttcctcctaactgtcagggtggggagctggttcccagaggattgtctaccctgaagtccatcaggttttctgttgcacaaggacgggtcaggaaggaaggagaggcttttccagaaacaaaaaatctgtgagggtctgacttgctcaaaccagaggaggaaacagaaacccctgcacatctttttagggggttctttgacccaggatagtcttgcttcttgaggtagatcacaggggtctgtgtacctctgaattcatgagagatgaatgacagatgctctcatgggtctagatattgaggagtttttctgagggcagagattggacatcaacaaggctagaagggtcagggaagtgggctaaaggaacagattcctagagattaatgaagaggagggaggtttctttggtcttctattccaagggtaaggttgcgattatgggtaagattggccagaggtaggaatgtggggagaaggagaggctgaaaagaaagcagaggagaacccaggtccctgcctcagccttcagcagagttggcttattgcctgcctctataccaataagtcagtcaccttgctcctctccagaggcaaagtggaagagatcctgcaagacacatctatcctttcacagtgttcccaagggaacttggaaaggagagtcaggtattagaggaaagagaagggtatttgtatacaaagccctggccttaaagaatgttacttagtagctactcccaaattgtcagccttcttacctggccaaggtgtccaagccagaaaggaaaaaaggttatggagtctttctcaccctaaggacagggtggaagagggtggtatatagggaagggccagataggcaacttcatttggcttgtgtgcatctggcctggaactggtgttaagccaggcttttgcttgtttgttgccatccctcaccctttgccatttcccttttcagagaatgtaaatgattttcatgttaggccaaaataaacaacttatagggtacatatgttgtcataaaaggtaaaagtgatgcatgccaaaccaaactaaaccaatttggattatctgctattcgggtaatcttcacagaaatgactgagagaagaatctgcagtttactgagggcatttcagttcctcctaccacctcaacaggactttgtccagactctcctcctcttacctttgtgccttgactgtggttctttgtggcaagatactttggttggttaaaataatatggaacaaaggatccactgaagtga

SEQ ID NO: 194947 - DNA, 3249 bp, Homo sapiens
  Payload ID: 18499
  Gene Name: tripartite motif containing 39
  Uniprot ID: Q9HCM9
  ENST ID: ENST00000400644
  CDS Start-End: 313-1779
cccagcttccactgacacgagcctcggcgcggcttccgcttccggcgagtattgtgtgtcgcgccgcggggcgggggcgaggggaggaggaaggagggaggcagcgctccggcggctccgcgccccgcactcccggacccgaagccgggaagattcctttcttgtctgttagaaacgtatgtcaaacgaggatacagtgtctggaactattggttctaagatataagtggaatgagcctggatcaggagaagtatgctgagctagagttgaaggaagcttctctttctaacaagagaaagcagagttaaattatggcagagacaagtctgttagaggctggggcctctgcagcctctacagctgcggctttggagaacttacaggtggaggcgagctgctctgtgtgcctggagtatctgaaggaacctgtcatcattgagtgtgggcacaacttctgcaaagcttgcatcacccgctggtgggaggacctagagagggacttcccttgtcctgtctgtcgaaagacatcccgctaccgcagtctccgacctaatcggcaactaggcagtatggtggaaattgccaagcagctccaggccgtcaagcggaagatccgggatgagagcctctgcccccaacaccatgaggccctcagccttttctgttatgaggaccaggaggctgtatgcttgatatgtgcaatttcccacacccaccgggctcacaccgttgtgccactggacgatgctacacaggagtacaaggaaaaactgcagaagtgtctggagcccctggaacagaagctgcaggagatcactcgctgcaagtcctctgaggagaagaagcctggtgagctcaagagactagtggaaagtcgccgacagcagatcttgagggagtttgaagagcttcataggcggctggatgaagagcagcaggtgttgctttcacgactggaagaagaggaacaggacattctgcagcgactccgagaaaatgctgctcaccttggggacaagcgccgggacctggcccacttggctgccgaggtggagggcaagtgcttacagtcaggcttcgagatgcttaaggatgtcaaaagtaccctggaaaaatgtgaaaaggtgaagaccatggaggtgacttcagtatccatagagctggaaaagaacttcagcaattttccccgacagtactttgccctaaggaaaatccttaaacagctaattgcggatgtgaccctggaccctgagacagctcatcctaacctagtcctgtcagaggatcgtaagagcgtcaagttcgtggagacaagactccgggatctccctgacacaccaaggcgtttcaccttctacccttgcgtcctggctactgagggtttcacctcaggtcgacactactgggaggtggaggtgggcgacaagacccactgggcagtgggtgtatgccgggactccgtgagccgaaagggcgagttgactccactccctgagactggctactggcgggtgcggctatggaatggggacaaatatgcagccaccaccacaccttttacccctttgcacatcaaggtgaaacccaagcgggtaggcatattcctagactatgaggccggcacactgtctttctacaatgtcacagaccgctctcatatctacaccttcactgatacttttactgagaaactttggcccctcttctacccaggcatccgggctggacggaagaatgctgcaccacttaccatcaggcccccaacagattgggagtgacaggttgggatgtgggaatgactggggtgaggcagggtcaagtgctacgggcctccttcccgtgtcctgctggaacgtcttcgtgtccacctgggtccagtcctgaatcatcttggagaaacaccttggtttctaggatggttttgtgtggagggggaggtaggactgggctggatgagagagcacagctgtgacttcctcctaactgtcagggtggggagctggttcccagaggattgtctaccctgaagtccatcaggttttctgttgcacaaggacgggtcaggaaggaaggagaggcttttccagaaacaaaaaatctgtgagggtctgacttgctcaaaccagaggaggaaacagaaacccctgcacatctttttagggggttctttgacccaggatagtcttgcttcttgaggtagatcacaggggtctgtgtacctctgaattcatgagagatgaatgacagatgctctcatgggtctagatattgaggagtttttctgagggcagagattggacatcaacaaggctagaagggtcagggaagtgggctaaaggaacagattcctagagattaatgaagaggagggaggtttctttggtcttctattccaagggtaaggttgcgattatgggtaagattggccagaggtaggaatgtggggagaaggagaggctgaaaagaaagcagaggagaacccaggtccctgcctcagccttcagcagagttggcttattgcctgcctctataccaataagtcagtcaccttgctcctctccagaggcaaagtggaagagatcctgcaagacacatctatcctttcacagtgttcccaagggaacttggaaaggagagtcaggtattagaggaaagagaagggtatttgtatacaaagccctggccttaaagaatgttacttagtagctactcccaaattgtcagccttcttacctggccaaggtgtccaagccagaaaggaaaaaaggttatggagtctttctcaccctaaggacagggtggaagagggtggtatatagggaagggccagataggcaacttcatttggcttgtgtgcatctggcctggaactggtgttaagccaggcttttgcttgtttgttgccatccctcaccctttgccatttcccttttcagagaatgtaaatgattttcatgttaggccaaaataaacaacttatagggtacatatgttgtcataaaaggtaaaagtgatgcatgccaaaccaaactaaaccaatttggattatctgctattcgggtaatcttcacagaaatgactgagagaagaatctgcagtttactgagggcatttcagttcctcctaccacctcaacaggactttgtccagactctcctcctcttacctttgtgccttgactgtggttctttgtggcaagatactttggttggttaaaataatatggaacaaaggatccactgaagtga

SEQ ID NO: 194948 - DNA, 3535 bp, Homo sapiens
  Payload ID: 18499
  Gene Name: tripartite motif containing 39
  Uniprot ID: Q9HCM9
  ENST ID: ENST00000450778
  CDS Start-End: 599-2065
cggcagcgtcatagcggcgggcatcccatctgcacgtcacacctctttctcacctggacacgcatcccttcctaccctgccagccacgacgtttcctctttcccctctccaatgccccagccccagatctggcggaagaagatggagaacgggggtgggacagagttgtggacaacctctcaggagagggtcgcaaggtgggaccctgaacagtggtagaaacaaaatgagattgtccctgaagtttgcccttcagctgagacacaaggagtagaggaagaggaaggactaacgcagaggcactcaaggtctcactatgactgtagttgagagtcctctcccttcttccctaaccctttccccatttctctcaccacttctttgccagtctagatccgtcctggtgccttactgtgcatacagttctactcgtctcagattcctttcttgtctgttagaaacgtatgtcaaacgaggatacagtgtctggaactattggttctaagatataagtggaatgagcctggatcaggagaagtatgctgagctagagttgaaggaagcttctctttctaacaagagaaagcagagttaaattatggcagagacaagtctgttagaggctggggcctctgcagcctctacagctgcggctttggagaacttacaggtggaggcgagctgctctgtgtgcctggagtatctgaaggaacctgtcatcattgagtgtgggcacaacttctgcaaagcttgcatcacccgctggtgggaggacctagagagggacttcccttgtcctgtctgtcgaaagacatcccgctaccgcagtctccgacctaatcggcaactaggcagtatggtggaaattgccaagcagctccaggccgtcaagcggaagatccgggatgagagcctctgcccccaacaccatgaggccctcagccttttctgttatgaggaccaggaggctgtatgcttgatatgtgcaatttcccacacccaccgggcccacaccgttgtgccactggacgacgctacacaggagtacaaggaaaaactgcagaagtgtctggagcccctggaacagaagctgcaggagatcactcgctgcaagtcctctgaggagaagaagcctggtgagctcaagagactagtggaaagtcgccgacagcagatcttgagggagtttgaagagcttcataggcggctggatgaagagcagcaggtgttgctttcacgactggaagaagaggaacaggacattctgcagcgactccgagaaaatgctgctcaccttggggacaagcgccgggacctggcccacttggctgccgaggtggagggcaagtgcttacagtcaggcttcgagatgcttaaggatgtcaaaagtaccctggaaaaatgtgaaaaggtgaagaccatggaggtgacttcagtatccatagagctggaaaagaacttcagcaattttccccgacagtactttgccctaaggaaaatccttaaacagctaattgcggatgtgaccctggaccccgagacagctcatcctaacctagtcctgtcagaggatcgtaagagcgtcaagttcgtggagacaagactccgggatctccctgacacaccaaggcgtttcaccttctacccttgcgtcctggctactgagggtttcacctcaggtcgacactactgggaggtggaggtgggcgacaagacccactgggcagtgggtgtatgccgggactccgtgagccgaaagggcgagttgactccactccctgagactggctactggcgggtgcggctatggaatggggacaaatatgcagccaccaccacaccttttacccctttgcacatcaaggtgaaacccaagcgggtaggcatattcctagactatgaggccggcacactgtctttctacaatgtcacagaccgctctcatatctacaccttcactgatacttttactgagaaactttggcccctcttctacccaggcatccgggctggacggaagaatgctgcaccacttaccatcaggcccccaacagattgggagtgacaggttgggatgtgggaatgactggggtgaggcagggtcaagtgctacgggcctccttcccgtgtcctgctggaacgtcttcgtgtccacctgggtccagtcctgaatcatcttggagaaacaccttggtttctaggatggttttgtgtggagggggaggtaggactgggctggatgagagagcacagctgtgacttcctcctaactgtcagggtggggagctggttcccagaggattgtctaccctgaagtccatcaggttttctgttgcacaaggacgggtcaggaaggaaggagaggcttttccagaaacaaaaaatctgtgagggtctgacttgctcaaaccagaggaggaaacagaaacccctgcacatctttttagggggttctttgacccaggatagtcttgcttcttgaggtagatcacaggggtctgtgtacctctgaattcatgagagatgaatgacagatgctctcatgggtctagatattgaggagtttttctgagggcagagattggacatcaacaaggctagaagggtcagggaagtgggctaaaggaacagattcctagagattaatgaagaggagggaggtttctttggtcttctattccaagggtaaggttgcgattatgggtaagattggccagaggtaggaatgtggggagaaggagaggctgaaaagaaagcagaggagaacccaggtccctgcctcagccttcagcagagttggcttattgcctgcctctataccaataagtcagtcaccttgctcctctccagaggcaaagtggaagagatcctgcaagacacatctatcctttcacagtgttcccaagggaacttggaaaggagagtcaggtattagaggaaagagaagggtatttgtatacaaagccctggccttaaagaatgttacttagtagctactcccaaattgtcagccttcttacctggccaaggtgtccaagccagaaaggaaaaaaggttatggagtctttctcaccctaaggacagggtggaagagggtggtatatagggaagggccagataggcaacttcatttggcttgtgtgcatctggcctggaactggtgttaagccaggcttttgcttgtttgttgccatccctcaccctttgccatttcccttttcagagaatgtaaatgattttcatgttaggccaaaataaacaacttatagggtacatatgttgtcataaaaggtaaaagtgatgcatgccaaaccaaactaaaccaatttggattatctgctattcgggtaatcttcacagaaatgactgagagaagaatctgcagtttactgagggcatttcagttcctcctaccacctcaacaggactttgtccagactctcctcctcttacctttgtgccttgactgtggttctttgtggcaagatactttggttggttaaaataatatggaacaaaggatccactgaagtga

SEQ ID NO: 194949 - DNA, 708 bp, Homo sapiens
  Payload ID: 18499
  Gene Name: tripartite motif containing 39
  ENST ID: ENST00000437257
  CDS Start-End: 1-683
agacatcccgctaccgcagtctccgacctaatcggcaactaggcagtatggtggaaattgccaagcagctccaggccgtcaagcggaagatccgggatgagagcctctgcccccaacaccatgaggccctcagccttttctgttatgaggaccaggaggctgtatgcttgatatgtgcaatttcccacacccaccgggcccacaccgttgtgccactggacgatgctacacaggagtacaaggaaaaactgcagaagtgtctggagcccctggaacagaagctgcaggagatcactcgctgcaagtcctctgaggagaagaagcctggtgagctcaagagactagtggaaagtcgccgacagcagatcttgagggagtttgaagagcttcataggcggctggatgaagagcagcaggtgttgctttcacgactggaagaagaggaacaggacattctgcagcgactccgagaaaatgctgctcaccttggggacaagcgccgggacctggcccacttggctgccgaggtggagggcaagtgcttacagtcaggcttcgagatgcttaaggatgtcaaaagtaccctggaaaaatgtgaaaaggtgaagaccatggaggtgacttcaactacaccttgtacttctctacatagtgagataaatgataatgtcagagggagatgaagagaggaccaggcgggaacctaga

SEQ ID NO: 194950 - DNA, 708 bp, Homo sapiens; identical to SEQ ID NO: 194949
  Payload ID: 18499
  Gene Name: tripartite motif containing 39
  ENST ID: ENST00000420746
  CDS Start-End: 1-683

SEQ ID NO: 194951 - DNA, 459 bp, Homo sapiens
  Payload ID: 18499
  Gene Name: tripartite motif containing 39
  ENST ID: ENST00000457343
  CDS Start-End: 315-459
caaggagtagaggaagaggaaggactaacgcagaggcactcaaggtctcactatgactgtagttgagagtcctctcccttcttccctaaccctttccccatttctctcaccacttctttgccagtctagatccgtcctggtgccttactgtgcatacagttctactcgtctcagaaacgtatgtcaaacgaggatacagtgtctggaactattggttctaagatataagtggaatgagcctggatcaggagaagtatgctgagctagagttgaaggaagcttctctttctaacaagagaaagcagagttaaattatggcagagacaagtctgttagaggctggggcctctgcagcctctacagctgcggctttggagaacttacaggtggaggcgagctgctctgtgtgcctggagtatctgaaggaacctgtcatcattgagtgtgggcacaacttct

SEQ ID NO: 194952 - DNA, 1013 bp, Homo sapiens
  Payload ID: 18499
  Gene Name: tripartite motif containing 39
  ENST ID: ENST00000431871
  CDS Start-End: 232-1013
cgccgcggggcgggggcgaggggaggaggaaggagggaggcagcgctccggcggctccgcgccccgcactcccggacccgaagccgggaagaaacgtatgtcaaacgaggatacagtgtctggaactattggttctaagatataagtggaatgagcctggatcaggagaagtatgctgagctagagttgaaggaagcttctctttctaacaagagaaagcagagttaaattatggcagagacaagtctgttagaggctggggcctctgcagcctctacagctgcggctttggagaacttacaggtggaggcgagctgctctgtgtgcctggagtatctgaaggaacctgtcatcattgagtgtgggcacaacttctgcaaagcttgcatcacccgctggtgggaggacctagagagggacttcccttgtcctgtctgtcgaaagacatcccgctaccgcagtctccgacctaatcggcaactaggcagtatggtggaaattgccaagcagctccaggccgtcaagcggaagatccgggatgagagcctctgcccccaacaccatgaggccctcagccttttctgttatgaggaccaggaggctgtatgcttgatatgtgcaatttcccacacccaccgggcccacaccgttgtgccactggacgatgctacacaggagtacaaggaaaaactgcagaagtgtctggagcccctggaacagaagctgcaggagatcactcgctgcaagtcctctgaggagaagaagcctggtgagctcaagagactagtggaaagtcgccgacagcagatcttgagggagtttgaagagcttcataggcggctggatgaagagcagcaggtgttgctttcacgactggaagaagaggaacaggacattctgcagcgactccgagaaaatgctgctcaccttggggacaagcgccgggacctggcccacttggctgccgaggtggagggcaagtgcttacagtcaggcttcgagatgcttaaggt

SEQ ID NO: 194953 - DNA, 3249 bp, Homo sapiens; identical to SEQ ID NO: 194946
  Payload ID: 18499
  Gene Name: tripartite motif containing 39
  Uniprot ID: Q9HCM9
  ENST ID: ENST00000438076
  CDS Start-End: 313-1779

SEQ ID NO: 194954 - DNA, 1013 bp, Homo sapiens
  Payload ID: 18499
  Gene Name: tripartite motif containing 39
  ENST ID: ENST00000442914
  CDS Start-End: 232-1013
cgccgcggggcgggggcgaggggaggaggaaggagggaggcagcgctccggcggctccgcgccccgcactcccggacccgaagccgggaagaaacgtatgtcaaacgaggatacagtgtctggaactattggttctaagatataagtggaatgagcctggatcaggagaagtatgctgagctagagttgaaggaagcttctctttctaacaagagaaagcagagttaaattatggcagagacaagtctgttagaggctggggcctctgcagcctctacagctgcggctttggagaacttacaggtggaggcgagctgctctgtgtgcctggagtatctgaaggaacctgtcatcattgagtgtgggcacaacttctgcaaagcttgcatcacccgctggtgggaggacctagagagggacttcccttgtcctgtctgtcgaaagacatcccgctaccgcagtctccgacctaatcggcaactaggcagtatggtggaaattgccaagcagctccaggccgtcaagcggaagatccgggatgagagcctctgcccccaacaccatgaggccctcagccttttctgttatgaggaccaggaggctgtatgcttgatatgtgcaatttcccacacccaccgggcccacaccgttgtgccactggacgacgctacacaggagtacaaggaaaaactgcagaagtgtctggagcccctggaacagaagctgcaggagatcactcgctgcaagtcctctgaggagaagaagcctggtgagctcaagagactagtggaaagtcgccgacagcagatcttgagggagtttgaagagcttcataggcggctggatgaagagcagcaggtgttgctttcacgactggaagaagaggaacaggacattctgcagcgactccgagaaaatgctgctcaccttggggacaagcgccgggacctggcccacttggctgccgaggtggagggcaagtgcttacagtcaggcttcgagatgcttaaggt

SEQ ID NO: 194955 - DNA, 588 bp, Homo sapiens
  Payload ID: 18499
  Gene Name: tripartite motif containing 39
  ENST ID: ENST00000412150
  CDS Start-End: 367-588
cgccgacaccccagcttccactgacacgagcctcggcgcggcttccgcttccggcgagtattgtgtgtcgcgccgcggggcgggggcgaggggaggaggaaggagggaggcagcgctccggcggctccgcgccccgcactcccggacccgaagccgggaagatccgtcctggtgccttactgtgcatacagttctactcgtctcagattcctttcttgtctgttagaaacgtatgtcaaacgaggatacagtgtctggaactattggttctaagatataagtggaatgagcctggatcaggagaagtatgctgagctagagttgaaggaagcttctctttctaacaagagaaagcagagttaaattatggcagagacaagtctgttagaggctggggcctctgcagcctctacagctgcggctttggagaacttacaggtggaggcgagctgctctgtgtgcctggagtatctgaaggaacctgtcatcattgagtgtgggcacaacttctgcaaagcttgcatcacccgctggtgggaggacctagagagggacttcccttgtcctgtctgtcgaaagacatcccgc

SEQ ID NO: 194956 - DNA, 3535 bp, Homo sapiens; identical to SEQ ID NO: 194940
  Payload ID: 18499
  Gene Name: tripartite motif containing 39
  Uniprot ID: Q9HCM9
  ENST ID: ENST00000433900
  CDS Start-End: 599-2065

SEQ ID NO: 194957 - DNA, 708 bp, Homo sapiens
  Payload ID: 18499
  Gene Name: tripartite motif containing 39
  ENST ID: ENST00000457154
  CDS Start-End: 1-683
agacatcccgctaccgcagtctccgacctaatcggcaactaggcagtatggtggaaattgccaagcagctccaggccgtcaagcggaagatccgggatgagagcctctgcccccaacaccatgaggccctcagccttttctgttatgaggaccaggaggctgtatgcttgatatgtgcaatttcccacacccaccgggctcacaccgttgtgccactggacgatgctacacaggagtacaaggaaaaactgcagaagtgtctggagcccctggaacagaagctgcaggagatcactcgctgcaagtcctctgaggagaagaagcctggtgagctcaagagactagtggaaagtcgccgacagcagatcttgagggagtttgaagagcttcataggcggctggatgaagagcagcaggtgttgctttcacgactggaagaagaggaacaggacattctgcagcgactccgagaaaatgctgctcaccttggggacaagcgccgggacctggcccacttggctgccgaggtggagggcaagtgcttacagtcaggcttcgagatgcttaaggatgtcaaaagtaccctggaaaaatgtgaaaaggtgaagaccatggaggtgacttcaactacaccttgtacttctctacatagtgagataaatgataatgtcagagggagatgaagagaggaccaggcgggaacctaga

SEQ ID NO: 194958 - DNA, 427 bp, Homo sapiens
  Payload ID: 18499
  Gene Name: tripartite motif containing 39
  ENST ID: ENST00000424074
  CDS Start-End: 250-427
ggctccgcgccccgcactcccggacccgaagccgggaagtctagatccgtcctggtgccttactgtgcatacagttctactcgtctcagattcctttcttgtctgttagaaacgtatgtcaaacgaggatacagtgtctggaactattggttctaagatataagtggaatgagcctggatcaggagaagtatgctgagctagagttgaaggaagcttctctttctaacaagagaaagcagagttaaattatggcagagacaagtctgttagaggctggggcctctgcagcctctacagctgcggctttggagaacttacaggtggaggcgagctgctctgtgtgcctggagtatctgaaggaacctgtcatcattgagtgtgggcacaacttctgcaaagcttgcatcacccgctggtgggaggacc

SEQ ID NO: 194959 - DNA, 3187 bp, Homo sapiens
  Payload ID: 18499
  Gene Name: tripartite motif containing 39
  Uniprot ID: Q9HCM9
  ENST ID: ENST00000445206
  CDS Start-End: 161-1717
attcctttcttgtctgttagaaacgtatgtcaaacgaggatacagtgtctggaactattggttctaagatataagtggaatgagcctggatcaggagaagtatgctgagctagagttgaaggaagcttctctttctaacaagagaaagcagagttaaattatggcagagacaagtctgttagaggctggggcctctgcagcctctacagctgcggctttggagaacttacaggtggaggcgagctgctctgtgtgcctggagtatctgaaggaacctgtcatcattgagtgtgggcacaacttctgcaaagcttgcatcacccgctggtgggaggacctagagagggacttcccttgtcctgtctgtcgaaagacatcccgctaccgcagtctccgacctaatcggcaactaggcagtatggtggaaattgccaagcagctccaggccgtcaagcggaagatccgggatgagagcctctgcccccaacaccatgaggccctcagccttttctgttatgaggaccaggaggctgtatgcttgatatgtgcaatttcccacacccaccgggcccacaccgttgtgccactggacgacgctacacaggagtacaaggaaaaactgcagaagtgtctggagcccctggaacagaagctgcaggagatcactcgctgcaagtcctctgaggagaagaagcctggtgagctcaagagactagtggaaagtcgccgacagcagatcttgagggagtttgaagagcttcataggcggctggatgaagagcagcaggtgttgctttcacgactggaagaagaggaacaggacattctgcagcgactccgagaaaatgctgctcaccttggggacaagcgccgggacctggcccacttggctgccgaggtggagggcaagtgcttacagtcaggcttcgagatgcttaaggatgtcaaaagtaccctggaaaagaatattcctagaaagttcggaggctcactctcaacgatctgtccacgggatcataaggctctccttggattagtaaaagaaatcaacagatgtgaaaaggtgaagaccatggaggtgacttcagtatccatagagctggaaaagaacttcagcaattttccccgacagtactttgccctaaggaaaatccttaaacagctaattgcggatgtgaccctggaccccgagacagctcatcctaacctagtcctgtcagaggatcgtaagagcgtcaagttcgtggagacaagactccgggatctccctgacacaccaaggcgtttcaccttctacccttgcgtcctggctactgagggtttcacctcaggtcgacactactgggaggtggaggtgggcgacaagacccactgggcagtgggtgtatgccgggactccgtgagccgaaagggcgagttgactccactccctgagactggctactggcgggtgcggctatggaatggggacaaatatgcagccaccaccacaccttttacccctttgcacatcaaggtgaaacccaagcgggtaggcatattcctagactatgaggccggcacactgtctttctacaatgtcacagaccgctctcatatctacaccttcactgatacttttactgagaaactttggcccctcttctacccaggcatccgggctggacggaagaatgctgcaccacttaccatcaggcccccaacagattgggagtgacaggttgggatgtgggaatgactggggtgaggcagggtcaagtgctacgggcctccttcccgtgtcctgctggaacgtcttcgtgtccacctgggtccagtcctgaatcatcttggagaaacaccttggtttctaggatggttttgtgtggagggggaggtaggactgggctggatgagagagcacagctgtgacttcctcctaactgtcagggtggggagctggttcccagaggattgtctaccctgaagtccatcaggttttctgttgcacaaggacgggtcaggaaggaaggagaggcttttccagaaacaaaaaatctgtgagggtctgacttgctcaaaccagaggaggaaacagaaacccctgcacatctttttagggggttctttgacccaggatagtcttgcttcttgaggtagatcacaggggtctgtgtacctctgaattcatgagagatgaatgacagatgctctcatgggtctagatattgaggagtttttctgagggcagagattggacatcaacaaggctagaagggtcagggaagtgggctaaaggaacagattcctagagattaatgaagaggagggaggtttctttggtcttctattccaagggtaaggttgcgattatgggtaagattggccagaggtaggaatgtggggagaaggagaggctgaaaagaaagcagaggagaacccaggtccctgcctcagccttcagcagagttggcttattgcctgcctctataccaataagtcagtcaccttgctcctctccagaggcaaagtggaagagatcctgcaagacacatctatcctttcacagtgttcccaagggaacttggaaaggagagtcaggtattagaggaaagagaagggtatttgtatacaaagccctggccttaaagaatgttacttagtagctactcccaaattgtcagccttcttacctggccaaggtgtccaagccagaaaggaaaaaaggttatggagtctttctcaccctaaggacagggtggaagagggtggtatatagggaagggccagataggcaacttcatttggcttgtgtgcatctggcctggaactggtgttaagccaggcttttgcttgtttgttgccatccctcaccctttgccatttcccttttcagagaatgtaaatgattttcatgttaggccaaaataaacaacttatagggtacatatgttgtcataaaaggtaaaagtgatgcatgccaaaccaaactaaaccaatttggattatctgctattcgggtaatcttcacagaaatgactgagagaagaatctgcagtttactgagggcatttcagttcctcctaccacctcaacaggactttgtccagactctcctcctcttacctttgtgccttgactgtggttctttgtggcaagatactttggttggttaaaataatatggaacaaaggatccactgaagtga

SEQ ID NO: 194960 - DNA, 3249 bp, Homo sapiens; identical to SEQ ID NO: 194946
  Payload ID: 18499
  Gene Name: tripartite motif containing 39
  Uniprot ID: Q9HCM9
  ENST ID: ENST00000440117
  CDS Start-End: 313-1779

SEQ ID NO: 194961 - DNA, 427 bp, Homo sapiens; identical to SEQ ID NO: 194958
  Payload ID: 18499
  Gene Name: tripartite motif containing 39
  ENST ID: ENST00000429069
  CDS Start-End: 250-427

SEQ ID NO: 194962 - DNA, 3198 bp, Homo sapiens
  Payload ID: 18499
  Gene Name: tripartite motif containing 39
  Uniprot ID: Q9HCM9
  ENST ID: ENST00000451132
  CDS Start-End: 262-1728
gcgaggggaggaggaaggagggaggcagcgctccggcggctccgcgccccgcactcccggacccgaagccgggaagatccgtcctggtgccttactgtgcatacagttctactcgtctcagaaacgtatgtcaaacgaggatacagtgtctggaactattggttctaagatataagtggaatgagcctggatcaggagaagtatgctgagctagagttgaaggaagcttctctttctaacaagagaaagcagagttaaattatggcagagacaagtctgttagaggctggggcctctgcagcctctacagctgcggctttggagaacttacaggtggaggcgagctgctctgtgtgcctggagtatctgaaggaacctgtcatcattgagtgtgggcacaacttctgcaaagcttgcatcacccgctggtgggaggacctagagagggacttcccttgtcctgtctgtcgaaagacatcccgctaccgcagtctccgacctaatcggcaactaggcagtatggtggaaattgccaagcagctccaggccgtcaagcggaagatccgggatgagagcctctgcccccaacaccatgaggccctcagccttttctgttatgaggaccaggaggctgtatgcttgatatgtgcaatttcccacacccaccgggcccacaccgttgtgccactggacgacgctacacaggagtacaaggaaaaactgcagaagtgtctggagcccctggaacagaagctgcaggagatcactcgctgcaagtcctctgaggagaagaagcctggtgagctcaagagactagtggaaagtcgccgacagcagatcttgagggagtttgaagagcttcataggcggctggatgaagagcagcaggtgttgctttcacgactggaagaagaggaacaggacattctgcagcgactccgagaaaatgctgctcaccttggggacaagcgccgggacctggcccacttggctgccgaggtggagggcaagtgcttacagtcaggcttcgagatgcttaaggatgtcaaaagtaccctggaaaaatgtgaaaaggtgaagaccatggaggtgacttcagtatccatagagctggaaaagaacttcagcaattttccccgacagtactttgccctaaggaaaatccttaaacagctaattgcggatgtgaccctggaccccgagacagctcatcctaacctagtcctgtcagaggatcgtaagagcgtcaagttcgtggagacaagactccgggatctccctgacacaccaaggcgtttcaccttctacccttgcgtcctggctactgagggtttcacctcaggtcgacactactgggaggtggaggtgggcgacaagacccactgggcagtgggtgtatgccgggactccgtgagccgaaagggcgagttgactccactccctgagactggctactggcgggtgcggctatggaatggggacaaatatgcagccaccaccacaccttttacccctttgcacatcaaggtgaaacccaagcgggtaggcatattcctagactatgaggccggcacactgtctttctacaatgtcacagaccgctctcatatctacaccttcactgatacttttactgagaaactttggcccctcttctacccaggcatccgggctggacggaagaatgctgcaccacttaccatcaggcccccaacagattgggagtgacaggttgggatgtgggaatgactggggtgaggcagggtcaagtgctacgggcctccttcccgtgtcctgctggaacgtcttcgtgtccacctgggtccagtcctgaatcatcttggagaaacaccttggtttctaggatggttttgtgtggagggggaggtaggactgggctggatgagagagcacagctgtgacttcctcctaactgtcagggtggggagctggttcccagaggattgtctaccctgaagtccatcaggttttctgttgcacaaggacgggtcaggaaggaaggagaggcttttccagaaacaaaaaatctgtgagggtctgacttgctcaaaccagaggaggaaacagaaacccctgcacatctttttagggggttctttgacccaggatagtcttgcttcttgaggtagatcacaggggtctgtgtacctctgaattcatgagagatgaatgacagatgctctcatgggtctagatattgaggagtttttctgagggcagagattggacatcaacaaggctagaagggtcagggaagtgggctaaaggaacagattcctagagattaatgaagaggagggaggtttctttggtcttctattccaagggtaaggttgcgattatgggtaagattggccagaggtaggaatgtggggagaaggagaggctgaaaagaaagcagaggagaacccaggtccctgcctcagccttcagcagagttggcttattgcctgcctctataccaataagtcagtcaccttgctcctctccagaggcaaagtggaagagatcctgcaagacacatctatcctttcacagtgttcccaagggaacttggaaaggagagtcaggtattagaggaaagagaagggtatttgtatacaaagccctggccttaaagaatgttacttagtagctactcccaaattgtcagccttcttacctggccaaggtgtccaagccagaaaggaaaaaaggttatggagtctttctcaccctaaggacagggtggaagagggtggtatatagggaagggccagataggcaacttcatttggcttgtgtgcatctggcctggaactggtgttaagccaggcttttgcttgtttgttgccatccctcaccctttgccatttcccttttcagagaatgtaaatgattttcatgttaggccaaaataaacaacttatagggtacatatgttgtcataaaaggtaaaagtgatgcatgccaaaccaaactaaaccaatttggattatctgctattcgggtaatcttcacagaaatgactgagagaagaatctgcagtttactgagggcatttcagttcctcctaccacctcaacaggactttgtccagactctcctcctcttacctttgtgccttgactgtggttctttgtggcaagatactttggttggttaaaataatatggaacaaaggatccactgaagtga

SEQ ID NO: 194963 - DNA, 1003 bp, Homo sapiens
  Payload ID: 18499
  Gene Name: tripartite motif containing 39
  ENST ID: ENST00000456425
  CDS Start-End: 570-1003
gaagagaggaaaagtgtggaagtccacaagccgcccccgccccgccctcttcgtcgactttcagctgcaccgggaggcggcggcgcctggccagagccggggcctggagcctggactagacagcctcgccggccggggcgccagtccagcgccctgcgggcaatgggcttcagcgctcgagcacgcgcatgcgcgggcctgtatctccagaggattcctcgggtcacctggacgccagcatctcagccacctgcccctctgggtcccttcttgcccttgattccccctgctgcttctcatcgccagccctcctcctccttcttccgcaggcaccgctagacccggccgcggccgcccgccgacaccccagcttccactgacacgagcctcggcgcggcttccgcttccgattcctttcttgtctgttagaaacgtatgtcaaacgaggatacagtgtctggaactattggttctaagatataagtggaatgagcctggatcaggagaagtatgctgagctagagttgaaggaagcttctctttctaacaagagaaagcagagttaaattatggcagagacaagtctgttagaggctggggcctctgcagcctctacagctgcggctttggagaacttacaggtggaggcgagctgctctgtgtgcctggagtatctgaaggaacctgtcatcattgagtgtgggcacaacttctgcaaagcttgcatcacccgctggtgggaggacctagagagggacttcccttgtcctgtctgtcgaaagacatcccgctaccgcagtctccgacctaatcggcaactaggcagtatggtggaaattgccaagcagctccaggccgtcaagcggaagatccgggatgagagcctctgcccccaacaccatgaggccctcagccttttctgttatgaggaccaggaggctgtatgcttgatatgtgcaatttcccacacccaccgggcccacaccgttgtgccactggacga

SEQ ID NO: 194964 - DNA, 588 bp, Homo sapiens; identical to SEQ ID NO: 194955
  Payload ID: 18499
  Gene Name: tripartite motif containing 39
  ENST ID: ENST00000440271
  CDS Start-End: 367-588

SEQ ID NO: 194965 - DNA, 588 bp, Homo sapiens; identical to SEQ ID NO: 194955
  Payload ID: 18499
  Gene Name: tripartite motif containing 39
  ENST ID: ENST00000426676
  CDS Start-End: 367-588

SEQ ID NO: 194966 - DNA, 3535 bp, Homo sapiens; identical to SEQ ID NO: 194940
  Payload ID: 18499
  Gene Name: tripartite motif containing 39
  Uniprot ID: Q9HCM9
  ENST ID: ENST00000431272
  CDS Start-End: 599-2065

SEQ ID NO: 194967 - DNA, 3187 bp, Homo sapiens; identical to SEQ ID NO: 194944
  Payload ID: 18499
  Gene Name: tripartite motif containing 39
  Uniprot ID: Q9HCM9
  ENST ID: ENST00000426469
  CDS Start-End: 161-1717

SEQ ID NO: 194968 - DNA, 427 bp, Homo sapiens; identical to SEQ ID NO: 194958
  Payload ID: 18499
  Gene Name: tripartite motif containing 39
  ENST ID: ENST00000424180
  CDS Start-End: 250-427

SEQ ID NO: 194969 - DNA, 459 bp, Homo sapiens; identical to SEQ ID NO: 194951
  Payload ID: 18499
  Gene Name: tripartite motif containing 39
  ENST ID: ENST00000428555
  CDS Start-End: 315-459

SEQ ID NO: 194970 - DNA, 3187 bp, Homo sapiens; identical to SEQ ID NO: 194944
  Payload ID: 18499
  Gene Name: tripartite motif containing 39
  Uniprot ID: Q9HCM9
  ENST ID: ENST00000451715
  CDS Start-End: 161-1717

SEQ ID NO: 194971 - DNA, 459 bp, Homo sapiens; identical to SEQ ID NO: 194951
  Payload ID: 18499
  Gene Name: tripartite motif containing 39
  ENST ID: ENST00000421662
  CDS Start-End: 315-459

SEQ ID NO: 194972 - DNA, 427 bp, Homo sapiens; identical to SEQ ID NO: 194958
  Payload ID: 18499
  Gene Name: tripartite motif containing 39
  ENST ID: ENST00000441470
  CDS Start-End: 250-427

SEQ ID NO: 194973 - DNA, 3198 bp, Homo sapiens; identical to SEQ ID NO: 194945
  Payload ID: 18499
  Gene Name: tripartite motif containing 39
  Uniprot ID: Q9HCM9
  ENST ID: ENST00000430502
  CDS Start-End: 262-1728

SEQ ID NO: 194974 - DNA, 588 bp, Homo sapiens; identical to SEQ ID NO: 194955
  Payload ID: 18499
  Gene Name: tripartite motif containing 39
  ENST ID: ENST00000418057
  CDS Start-End: 367-588

SEQ ID NO: 194975 - DNA, 708 bp, Homo sapiens; identical to SEQ ID NO: 194949
  Payload ID: 18499
  Gene Name: tripartite motif containing 39
  ENST ID: ENST00000438168
  CDS Start-End: 1-683

SEQ ID NO: 194976 - DNA, 708 bp, Homo sapiens
  Payload ID: 18499
  Gene Name: tripartite motif containing 39
  ENST ID: ENST00000425693
  CDS Start-End: 1-683
agacatcccgctaccgcagtctccgacctaatcggcaactaggcagtatggtggaaattgccaagcagctccaggccgtcaagcggaagatccgggatgagagcctctgcccccaacaccatgaggccctcagccttttctgttatgaggaccaggaggctgtatgcttgatatgtgcaatttcccacacccaccgggcccacaccgttgtgccactggacgacgctacacaggagtacaaggaaaaactgcagaagtgtctggagcccctggaacagaagctgcaggagatcactcgctgcaagtcctctgaggagaagaagcctggtgagctcaagagactagtggaaagtcgccgacagcagatcttgagggagtttgaagagcttcataggcggctggatgaagagcagcaggtgttgctttcacgactggaagaagaggaacaggacattctgcagcgactccgagaaaatgctgctcaccttggggacaagcgccgggacctggcccacttggctgccgaggtggagggcaagtgcttacagtcaggcttcgagatgcttaaggatgtcaaaagtaccctggaaaaatgtgaaaaggtgaagaccatggaggtgacttcaactacaccttgtacttctctacatagtgagataaatgataatgtcagagggagatgaagagaggaccaggcgggaacctaga

SEQ ID NO: 194977 - DNA, 1003 bp, Homo sapiens
  Payload ID: 18499
  Gene Name: tripartite motif containing 39
  ENST ID: ENST00000424571
  CDS Start-End: 570-1003
gaagagaggaaaagtgtggaagtccacaagccgcccccgccccgccctcttcgtcgactttcagctgcaccgggaggcggcggcgcctggccagagccggggcctggagcctggactagacagcctcgccggccggggcgccagtccagcgccctgcgggcaatgggcttcagcgctcgagcacgcgcatgcgcgggcctgtatctccagaggattcctcgggtcacctggacgccagcatctcagccacctgcccctctgggtcccttcttgcccttgattccccctgctgcttctcatcgccagccctcctcctccttcttccgcaggcaccactagacccggccgcggccgcccgccgacaccccagcttccactgacacgagcctcggcgcggcttccgcttccgattcctttcttgtctgttagaaacgtatgtcaaacgaggatacagtgtctggaactattggttctaagatataagtggaatgagcctggatcaggagaagtatgctgagctagagttgaaggaagcttctctttctaacaagagaaagcagagttaaattatggcagagacaagtctgttagaggctggggcctctgcagcctctacagctgcggctttggagaacttacaggtggaggcgagctgctctgtgtgcctggagtatctgaaggaacctgtcatcattgagtgtgggcacaacttctgcaaagcttgcatcacccgctggtgggaggacctagagagggacttcccttgtcctgtctgtcgaaagacatcccgctaccgcagtctccgacctaatcggcaactaggcagtatggtggaaattgccaagcagctccaggccgtcaagcggaagatccgggatgagagcctctgcccccaacaccatgaggccctcagccttttctgttatgaggaccaggaggctgtatgcttgatatgtgcaatttcccacacccaccgggctcacaccgttgtgccactggacga

SEQ ID NO: 194978 - DNA, 1013 bp, Homo sapiens
  Payload ID: 18499
  Gene Name: tripartite motif containing 39
  ENST ID: ENST00000447077
  CDS Start-End: 232-1013
cgccgcggggcgggggcgaggggaggaggaaggagggaggcagcgctccggcggctccgcgccccgcactcccggacccgaagccgggaagaaacgtatgtcaaacgaggatacagtgtctggaactattggttctaagatataagtggaatgagcctggatcaggagaagtatgctgagctagagttgaaggaagcttctctttctaacaagagaaagcagagttaaattatggcagagacaagtctgttagaggctggggcctctgcagcctctacagctgcggctttggagaacttacaggtggaggcgagctgctctgtgtgcctggagtatctgaaggaacctgtcatcattgagtgtgggcacaacttctgcaaagcttgcatcacccgctggtgggaggacctagagagggacttcccttgtcctgtctgtcgaaagacatcccgctaccgcagtctccgacctaatcggcaactaggcagtatggtggaaattgccaagcagctccaggccgtcaagcggaagatccgggatgagagcctctgcccccaacaccatgaggccctcagccttttctgttatgaggaccaggaggctgtatgcttgatatgtgcaatttcccacacccaccgggctcacaccgttgtgccactggacgatgctacacaggagtacaaggaaaaactgcagaagtgtctggagcccctggaacagaagctgcaggagatcactcgctgcaagtcctctgaggagaagaagcctggtgagctcaagagactagtggaaagtcgccgacagcagatcttgagggagtttgaagagcttcataggcggctggatgaagagcagcaggtgttgctttcacgactggaagaagaggaacaggacattctgcagcgactccgagaaaatgctgctcaccttggggacaagcgccgggacctggcccacttggctgccgaggtggagggcaagtgcttacagtcaggcttcgagatgcttaaggt

SEQ ID NO: 194979 - DNA, 3535 bp, Homo sapiens; identical to SEQ ID NO: 194940
  Payload ID: 18499
  Gene Name: tripartite motif containing 39
  Uniprot ID: Q9HCM9
  ENST ID: ENST00000414015
  CDS Start-End: 599-2065

SEQ ID NO: 194980 - DNA, 588 bp, Homo sapiens; identical to SEQ ID NO: 194955
  Payload ID: 18499
  Gene Name: tripartite motif containing 39
  ENST ID: ENST00000438089
  CDS Start-End: 367-588

SEQ ID NO: 194981 - DNA, 3535 bp, Homo sapiens; identical to SEQ ID NO: 194940
  Payload ID: 18499
  Gene Name: tripartite motif containing 39
  Uniprot ID: Q9HCM9
  ENST ID: ENST00000419790
  CDS Start-End: 599-2065

SEQ ID NO: 194982 - DNA, 588 bp, Homo sapiens; identical to SEQ ID NO: 194955
  Payload ID: 18499
  Gene Name: tripartite motif containing 39
  ENST ID: ENST00000450818
  CDS Start-End: 367-588

SEQ ID NO: 194983 - DNA, 459 bp, Homo sapiens; identical to SEQ ID NO: 194951
  Payload ID: 18499
  Gene Name: tripartite motif containing 39
  ENST ID: ENST00000422419
  CDS Start-End: 315-459

SEQ ID NO: 194984 - DNA, 427 bp, Homo sapiens; identical to SEQ ID NO: 194958
  Payload ID: 18499
  Gene Name: tripartite motif containing 39
  ENST ID: ENST00000434862
  CDS Start-End: 250-427

SEQ ID NO: 194985 - DNA, 3249 bp, Homo sapiens; identical to SEQ ID NO: 194946
  Payload ID: 18499
  Gene Name: tripartite motif containing 39
  Uniprot ID: Q9HCM9
  ENST ID: ENST00000458607
  CDS Start-End: 313-1779

SEQ ID NO: 194986 - DNA, 3198 bp, Homo sapiens; identical to SEQ ID NO: 194945
  Payload ID: 18499
  Gene Name: tripartite motif containing 39
  Uniprot ID: Q9HCM9
  ENST ID: ENST00000449318
  CDS Start-End: 262-1728

SEQ ID NO: 194987 - DNA, 459 bp, Homo sapiens; identical to SEQ ID NO: 194951
  Payload ID: 18499
  Gene Name: tripartite motif containing 39
  ENST ID: ENST00000418079
  CDS Start-End: 315-459

SEQ ID NO: 194988 - DNA, 427 bp, Homo sapiens; identical to SEQ ID NO: 194958
  Payload ID: 18499
  Gene Name: tripartite motif containing 39
  ENST ID: ENST00000428404
  CDS Start-End: 250-427

SEQ ID NO: 194989 - DNA, 1003 bp, Homo sapiens; identical to SEQ ID NO: 194963
  Payload ID: 18499
  Gene Name: tripartite motif containing 39
  ENST ID: ENST00000458516
  CDS Start-End: 570-1003

SEQ ID NO: 194990 - DNA, 1013 bp, Homo sapiens; identical to SEQ ID NO: 194952
  Payload ID: 18499
  Gene Name: tripartite motif containing 39
  ENST ID: ENST00000428728
  CDS Start-End: 232-1013

SEQ ID NO: 194991 - DNA, 1003 bp, Homo sapiens; identical to SEQ ID NO: 194963
  Payload ID: 18499
  Gene Name: tripartite motif containing 39
  ENST ID: ENST00000430414
  CDS Start-End: 570-1003

SEQ ID NO: 194992 - DNA, 708 bp, Homo sapiens; identical to SEQ ID NO: 194949
  Payload ID: 18499
  Gene Name: tripartite motif containing 39
  ENST ID: ENST00000426384
  CDS Start-End: 1-683

SEQ ID NO: 194993 - DNA, 588 bp, Homo sapiens; identical to SEQ ID NO: 194955
  Payload ID: 18499
  Gene Name: tripartite motif containing 39
  ENST ID: ENST00000447542
  CDS Start-End: 367-588

SEQ ID NO: 194994 - DNA, 1003 bp, Homo sapiens; identical to SEQ ID NO: 194963
  Payload ID: 18499
  Gene Name: tripartite motif containing 39
  ENST ID: ENST00000453856
  CDS Start-End: 570-1003

SEQ ID NO: 194995 - DNA, 459 bp, Homo sapiens; identical to SEQ ID NO: 194951
  Payload ID: 18499
  Gene Name: tripartite motif containing 39
  ENST ID: ENST00000450170
  CDS Start-End: 315-459

SEQ ID NO: 194996 - DNA, 1013 bp, Homo sapiens; identical to SEQ ID NO: 194952
  Payload ID: 18499
  Gene Name: tripartite motif containing 39
  ENST ID: ENST00000440130
  CDS Start-End: 232-1013

SEQ ID NO: 194997 - DNA, 708 bp, Homo sapiens; identical to SEQ ID NO: 194949
  Payload ID: 18499
  Gene Name: tripartite motif containing 39
  ENST ID: ENST00000412022
  CDS Start-End: 1-683

SEQ ID NO: 194998 - DNA, 3187 bp, Homo sapiens; identical to SEQ ID NO: 194944
  Payload ID: 18499
  Gene Name: tripartite motif containing 39
  Uniprot ID: Q9HCM9
  ENST ID: ENST00000424575
  CDS Start-End: 161-1717

SEQ ID NO: 194999 - DNA, 1003 bp, Homo sapiens; identical to SEQ ID NO: 194963
  Payload ID: 18499
  Gene Name: tripartite motif containing 39
  ENST ID: ENST00000411711
  CDS Start-End: 570-1003

SEQ ID NO: 195000 - DNA, 3249 bp, Homo sapiens
  Payload ID: 18499
  Gene Name: tripartite motif containing 39
  Uniprot ID: Q9HCM9
  ENST ID: ENST00000438859
  CDS Start-End: 313-1779
cccagcttccactgacacgagcctcggcgcggcttccgcttccggcgagtattgtgtgtcgcgccgcggggcgggggcgaggggaggaggaaggagggaggcagcgctccggcggctccgcgccccgcactcccggacccgaagccgggaagattcctttcttgtctgttagaaacgtatgtcaaacgaggatacagtgtctggaactattggttctaagatataagtggaatgagcctggatcaggagaagtatgctgagctagagttgaaggaagcttctctttctaacaagagaaagcagagttaaattatggcagagacaagtctgttagaggctggggcctctgcagcctctacagctgcggctttggagaacttacaggtggaggcgagctgctctgtgtgcctggagtatctgaaggaacctgtcatcattgagtgtgggcacaacttctgcaaagcttgcatcacccgctggtgggaggacctagagagggacttcccttgtcctgtctgtcgaaagacatcccgctaccgcagtctccgacctaatcggcaactaggcagtatggtggaaattgccaagcagctccaggccgtcaagcggaagatccgggatgagagcctctgcccccaacaccatgaggccctcagccttttctgttatgaggaccaggaggctgtatgcttgatatgtgcaatttcccacacccaccgggcccacaccgttgtgccactggacgacgctacacaggagtacaaggaaaaactgcagaagtgtctggagcccctggaacagaagctgcaggagatcactcgctgcaagtcctctgaggagaagaagcctggtgagctcaagagactagtggaaagtcgccgacagcagatcttgagggagtttgaagagcttcataggcggctggatgaagagcagcaggtgttgctttcacgactggaagaagaggaacaggacattctgcagcgactccgagaaaatgctgctcaccttggggacaagcgccgggacctggcccacttggctgccgaggtggagggcaagtgcttacagtcaggcttcgagatgcttaaggatgtcaaaagtaccctggaaaaatgtgaaaaggtgaagaccatggaggtgacttcagtatccatagagctggaaaagaacttcagcaattttccccgacagtactttgccctaaggaaaatccttaaacagctaattgcggatgtgaccctggaccccgagacagctcatcctaacctagtcctgtcagaggatcgtaagagcgtcaagttcgtggagacaagactccgggatctccctgacacaccaaggcgtttcaccttctacccttgcgtcctggctactgagggtttcacctcaggtcgacactactgggaggtggaggtgggcgacaagacccactgggcagtgggtgtatgccgggactccgtgagccgaaagggcgagttgactccactccctgagactggctactggcgggtgcggctatggaatggggacaaatatgcagccaccaccacaccttttacccctttgcacatcaaggtgaaacccaagcgggtaggcatattcctagactatgaggccggcacactgtctttctacaatgtcacagaccgctctcatatctacaccttcactgatacttttactgagaaactttggcccctcttctacccaggcatccgggctggacggaagaatgctgcaccacttaccatcaggcccccaacagattgggagtgacaggttgggatgtgggaatgactggggtgaggcagggtcaagtgctacgggcctccttcccgtgtcctgctggaacgtcttcgtgtccacctgggtccagtcctgaatcatcttggagaaacaccttggtttctaggatggttttgtgtggagggggaggtaggactgggctggatgagagagcacagctgtgacttcctcctaactgtcagggtggggagctggttcccagaggattgtctaccctgaagtccatcaggttttctgttgcacaaggacgggtcaggaaggaaggagaggcttttccagaaacaaaaaatctgtgagggtctgacttgctcaaaccagaggaggaaacagaaacccctgcacatctttttagggggttctttgacccaggatagtcttgcttcttgaggtagatcacaggggtctgtgtacctctgaattcatgagagatgaatgacagatgctctcatgggtctagatattgaggagtttttctgagggcagagattggacatcaacaaggctagaagggtcagggaagtgggctaaaggaacagattcctagagattaatgaagaggagggaggtttctttggtcttctattccaagggtaaggttgcgattatgggtaagattggccagaggtaggaatgtggggagaaggagaggctgaaaagaaagcagaggagaacccaggtccctgcctcagccttcagcagagttggcttattgcctgcctctataccaataagtcagtcaccttgctcctctccagaggcaaagtggaagagatcctgcaagacacatctatcctttcacagtgttcccaagggaacttggaaaggagagtcaggtattagaggaaagagaagggtatttgtatacaaagccctggccttaaagaatgttacttagtagctactcccaaattgtcagccttcttacctggccaaggtgtccaagccagaaaggaaaaaaggttatggagtctttctcaccctaaggacagggtggaagagggtggtatatagggaagggccagataggcaacttcatttggcttgtgtgcatctggcctggaactggtgttaagccaggcttttgcttgtttgttgccatccctcaccctttgccatttcccttttcagagaatgtaaatgattttcatgttaggccaaaataaacaacttatagggtacatatgttgtcataaaaggtaaaagtgatgcatgccaaaccaaactaaaccaatttggattatctgctattcgggtaatcttcacagaaatgactgagagaagaatctgcagtttactgagggcatttcagttcctcctaccacctcaacaggactttgtccagactctcctcctcttacctttgtgccttgactgtggttctttgtggcaagatactttggttggttaaaataatatggaacaaaggatccactgaagtga

SEQ ID NO: 195001 - DNA, 3187 bp, Homo sapiens; identical to SEQ ID NO: 194944
  Payload ID: 18499
  Gene Name: tripartite motif containing 39
  Uniprot ID: Q9HCM9
  ENST ID: ENST00000413715
  CDS Start-End: 161-1717

SEQ ID NO: 195002 - DNA, 3198 bp, Homo sapiens; identical to SEQ ID NO: 194945
  Payload ID: 18499
  Gene Name: tripartite motif containing 39
  Uniprot ID: Q9HCM9
  ENST ID: ENST00000446397
  CDS Start-End: 262-1728

SEQ ID NO: 195003 - DNA, 427 bp, Homo sapiens; identical to SEQ ID NO: 194958
  Payload ID: 18499
  Gene Name: tripartite motif containing 39
  ENST ID: ENST00000434118
  CDS Start-End: 250-427

SEQ ID NO: 195004 - DNA, 3198 bp, Homo sapiens; identical to SEQ ID NO: 194945
  Payload ID: 18499
  Gene Name: tripartite motif containing 39
  Uniprot ID: Q9HCM9
  ENST ID: ENST00000443109
  CDS Start-End: 262-1728

SEQ ID NO: 195005 - DNA, 3249 bp, Homo sapiens; identical to SEQ ID NO: 194946
  Payload ID: 18499
  Gene Name: tripartite motif containing 39
  Uniprot ID: Q9HCM9
  ENST ID: ENST00000452705
  CDS Start-End: 313-1779

SEQ ID NO: 195006 - DNA, 1013 bp, Homo sapiens; identical to SEQ ID NO: 194952
  Payload ID: 18499
  Gene Name: tripartite motif containing 39
  ENST ID: ENST00000449396
  CDS Start-End: 232-1013

SEQ ID NO: 195007 - DNA, 1003 bp, Homo sapiens; identical to SEQ ID NO: 194963
  Payload ID: 18499
  Gene Name: tripartite motif containing 39
  ENST ID: ENST00000416213
  CDS Start-End: 570-1003

SEQ ID NO: 195008 - DNA, 459 bp, Homo sapiens; identical to SEQ ID NO: 194951
  Payload ID: 18499
  Gene Name: tripartite motif containing 39
  ENST ID: ENST00000426443
  CDS Start-End: 315-459

SEQ ID NO: 195009 - DNA, 1013 bp, Homo sapiens; identical to SEQ ID NO: 194952
  Payload ID: 18499
  Gene Name: tripartite motif containing 39
  ENST ID: ENST00000450421
  CDS Start-End: 232-1013

SEQ ID NO: 195010 - DNA, 1567 bp, Homo sapiens
  Payload ID: 18499
  Gene Name: tripartite motif containing 39
  ENST ID: ENST00000552257
  CDS Start-End: 8-1519
ttaaattatggcagagacaagtctgttagaggctggggcctctgcagcctctacagctgcggctttggagaacttacaggtggaggcgagctgctctgtgtgcctggagtatctgaaggaacctgtcatcattgagtgtgggcacaacttctgcaaagcttgcatcacccgctggtgggaggacctagagagggacttcccttgtcctgtctgtcgaaagacatcccgctaccgcagtctccgacctaatcggcaactaggcagtatggtggaaattgccaagcagctccaggccgtcaagcggaagatccgggatgagagcctctgcccccaacaccatgaggccctcagccttttctgttatgaggaccaggaggctgtatgcttgatatgtgcaatttcccacacccaccgggcccacaccgttgtgccactggacgatgctacacaggagtacaaggaaaaactgcagaagtgtctggagcccctggaacagaagctgcaggagatcactcgctgcaagtcctctgaggagaagaagcctggtgagctcaagagactagtggaaagtcgccgacagcagatcttgagggagtttgaagagcttcataggcggctggatgaagagcagcaggtgttgctttcacgactggaagaagaggaacaggacattctgcagcgactccgagaaaatgctgctcaccttggggacaagcgccgggacctggcccacttggctgccgaggtggagggcaagtgcttacagtcaggcttcgagatgcttaaggatgtcaaaagtaccctggaaaaatgtgaaaaggtgaagaccatggaggtgacttcagtatccatagagctggaaaagaacttcagcaattttccccgacagtactttgccctaaggaaaatccttaaacagctaattgcggatgtgaccctggaccctgagacagctcatcctaacctagtcctgtcagaggatcgtaagagcgtcaagttcgtggagacaagactccgggatctccctgacacaccaaggcgtttcaccttctacccttgcgtcctggctactgagggtttcacctcaggtcgacactactgggaggtggaggccgcccattgtgtccttgcccaggaccccgagaaccaggcgctggcgaggttttactgctacactgagaggaccattgcgaagcggctcgtcttgcggcgagatccctcggtgaagaggactctctgtcgaggctgctcttccctcctcgtcccgggcctcacctgcacccagcgccagagacgctgcaggggacagcgctggaccgtacagacctgcctaacatgccagcgcagccaacgcttcctcaatgatcccgggcatttactctggggagacaggcctgaggcccagctcgggagccaagcagattccaaaccactacaacccttgccaaacacagcccactccatttcagaccgccttcctgaggagaaaatgcagactcagggttccagtaaccagtgatggattcaccccatctcccaaataaagtttacttgttttacattccat

SEQ ID NO: 195011 - DNA, 1567 bp, Homo sapiens
  Payload ID: 18499
  Gene Name: tripartite motif containing 39
  ENST ID: ENST00000552950
  CDS Start-End: 8-1519
ttaaattatggcagagacaagtctgttagaggctggggcctctgcagcctctacagctgcggctttggagaacttacaggtggaggcgagctgctctgtgtgcctggagtatctgaaggaacctgtcatcattgagtgtgggcacaacttctgcaaagcttgcatcacccgctggtgggaggacctagagagggacttcccttgtcctgtctgtcgaaagacatcccgctaccgcagtctccgacctaatcggcaactaggcagtatggtggaaattgccaagcagctccaggccgtcaagcggaagatccgggatgagagcctctgcccccaacaccatgaggccctcagccttttctgttatgaggaccaggaggctgtatgcttgatatgtgcaatttcccacacccaccgggcccacaccgttgtgccactggacgatgctacacaggagtacaaggaaaaactgcagaagtgtctggagcccctggaacagaagctgcaggagatcactcgctgcaagtcctctgaggagaagaagcctggtgagctcaagagactagtggaaagtcgccgacagcagatcttgagggagtttgaagagcttcataggcggctggatgaagagcagcaggtgttgctttcacgactggaagaagaggaacaggacattctgcagcgactccgagaaaatgctgctcaccttggggacaagcgccgggacctggcccacttggctgccgaggtggagggcaagtgcttacagtcaggcttcgagatgcttaaggatgtcaaaagtaccctggaaaaatgtgaaaaggtgaagaccatggaggtgacttcagtatccatagagctggaaaagaacttcagcaattttccccgacagtactttgccctaaggaaaatccttaaacagctaattgcggatgtgaccctggaccctgagacagctcatcctaacctagtcctgtcagaggatcgtaagagcgtcaagttcgtggagacaagactccgggatctccctgacacaccaaggcgtttcaccttctacccttgcgtcctggctactgagggtttcacctcaggtcgacactactgggaggtggaggccgcccattgtgtccttgcccaggaccccgagaaccaggcgctggcgaggttttactgctacactgagaggaccattgcgaagcggctcgtcttgcggcgggatccctcggtgaagaggactctctgtcgaggctgctcttccctcctcgtcccgggcctcacctgcacccagcgccagagacgctgcaggggacagcgctggaccgtacagacctgcctaacatgccagcgcagccaacgcttcctcaatgatcccgggcatttactctggggagacaggcctgaggcccagctcgggagccaagcagattccaaaccactacaacccttgccaaacacagcccactccatttcagaccgccttcctgaggagaaaatgcagactcagggttccagtaaccagtgatggattcaccccatctcccaaataaagtttacttgttttacattccat

SEQ ID NO: 195012 - DNA, 1567 bp, Homo sapiens
  Payload ID: 18499
  Gene Name: tripartite motif containing 39
  ENST ID: ENST00000550618
  CDS Start-End: 8-1519
ttaaattatggcagagacaagtctgttagaggctggggcctctgcagcctctacagctgcggctttggagaacttacaggtggaggcgagctgctctgtgtgcctggagtatctgaaggaacctgtcatcattgagtgtgggcacaacttctgcaaagcttgcatcacccgctggtgggaggacctagagagggacttcccttgtcctgtctgtcgaaagacatcccgctaccgcagtctccgacctaatcggcaactaggcagtatggtggaaattgccaagcagctccaggccgtcaagcggaagatccgggatgagagcctctgcccccaacaccatgaggccctcagccttttctgttatgaggaccaggaggctgtatgcttgatatgtgcaatttcccacacccaccgggctcacaccgttgtgccactggacgatgctacacaggagtacaaggaaaaactgcagaagtgtctggagcccctggaacagaagctgcaggagatcactcgctgcaagtcctctgaggagaagaagcctggtgagctcaagagactagtggaaagtcgccgacagcagatcttgagggagtttgaagagcttcataggcggctggatgaagagcagcaggtgttgctttcacgactggaagaagaggaacaggacattctgcagcgactccgagaaaatgctgctcaccttggggacaagcgccgggacctggcccacttggctgccgaggtggagggcaagtgcttacagtcaggcttcgagatgcttaaggatgtcaaaagtaccctggaaaaatgtgaaaaggtgaagaccatggaggtgacttcagtatccatagagctggaaaagaacttcagcaattttccccgacagtactttgccctaaggaaaatccttaaacagctaattgcggatgtgaccctggaccctgagacagctcatcctaacctagtcctgtcagaggatcgtaagagcgtcaagttcgtggagacaagactccgggatctccctgacacaccaaggcgtttcaccttctacccttgcgtcctggctactgagggtttcacctcaggtcgacactactgggaggtggaggccgcccattgtgtccttgcccaggaccccgagaaccaggcgctggcgaggttttactgctacactgagaggaccattgcgaagcggctcgtcttgcggcgggatccctcggtgaagaggactctctgtcgaggctgctcttccctcctcgtcccgggcctcacctgcacccaccgccagagacgctgcaggggacagcgctggaccgtacagacctgcctaacatgccagcgcagccaacgcttcctcaatgatcccgggcatttactctggggagacaggcctgaggcccagctcgggagccaagcagattccaaaccactacaacccttgccaaacacagcccactccatttcagaccgccttcctgaggagaaaatgcagactcagggttccagtaaccagtgatggattcaccccatctcccaaataaagtttacttgttttacattccat

SEQ ID NO: 195013 - DNA, 3338 bp, Homo sapiens; identical to SEQ ID NO: 194939
  Payload ID: 18499
  Gene Name: tripartite motif containing 39
  Uniprot ID: Q9HCM9
  ENST ID: ENST00000548002
  CDS Start-End: 313-1869

SEQ ID NO: 195014 - DNA, 1567 bp, Homo sapiens
  Payload ID: 18499
  Gene Name: tripartite motif containing 39
  ENST ID: ENST00000550581
  CDS Start-End: 8-1519
ttaaattatggcagagacaagtctgttagaggctggggcctctgcagcctctacagctgcggctttggagaacttacaggtggaggcgagctgctctgtgtgcctggagtatctgaaggaacctgtcatcattgagtgtgggcacaacttctgcaaagcttgcatcacccgctggtgggaggacctagagagggacttcccttgtcctgtctgtcgaaagacatcccgctaccgcagtctccgacctaatcggcaactaggcagtatggtggaaattgccaagcagctccaggccgtcaagcggaagatccgggatgagagcctctgcccccaacaccatgaggccctcagccttttctgttatgaggaccaggaggctgtatgcttgatatgtgcaatttcccacacccaccgggcccacaccgttgtgccactggacgatgctacacaggagtacaaggaaaaactgcagaagtgtctggagcccctggaacagaagctgcaggagatcactcgctgcaagtcctctgaggagaagaagcctggtgagctcaagagactagtggaaagtcgccgacagcagatcttgagggagtttgaagagcttcataggcggctggatgaagagcagcaggtgttgctttcacgactggaagaagaggaacaggacattctgcagcgactccgagaaaatgctgctcaccttggggacaagcgccgggacctggcccacttggctgccgaggtggagggcaagtgcttacagtcaggcttcgagatgcttaaggatgtcaaaagtaccctggaaaaatgtgaaaaggtgaagaccatggaggtgacttcagtatccatagagctggaaaagaacttcagcaattttccccgacagtactttgccctaaggaaaatccttaaacagctaattgcggatgtgaccctggaccctgagacagctcatcctaacctagtcctgtcagaggatcgtaagagcgtcaagttcgtggagacaagactccgggatctccctgacacaccaaggcgtttcaccttctacccttgcgtcctggctactgagggtttcacctcaggtcgacactactgggaggtggaggccgcccattgtgtccttgcccaggaccccgagaaccaggcgctggcgaggttttactgctacactgagaggaccattgcgaagcggctcgtcttgcggcgggatccctcggtgaagaggactctctgtcgaggctgctcttccctcctcgtcccgggcctcacctgcacccaccgccagagacgctgcaggggacagcgctggaccgtacagacctgcctaacatgccagcgcagccaacgcttcctcaatgatcccgggcatttactctggggagacaggcctgaggcccagctcgggagccaagcagattccaaaccactacaacccttgccaaacacagcccactccatttcagaccgccttcctgaggagaaaatgcagactcagggttccagtaaccagtgatggattcaccccatctcccaaataaagtttacttgttttacattccat

SEQ ID NO: 195015 - DNA, 3338 bp, Homo sapiens; identical to SEQ ID NO: 194939
  Payload ID: 18499
  Gene Name: tripartite motif containing 39
  Uniprot ID: Q9HCM9
  ENST ID: ENST00000552520
  CDS Start-End: 313-1869

SEQ ID NO: 195016 - DNA, 1567 bp, Homo sapiens
  Payload ID: 18499
  Gene Name: tripartite motif containing 39
  ENST ID: ENST00000552136
  CDS Start-End: 8-1519
ttaaattatggcagagacaagtctgttagaggctggggcctctgcagcctctacagctgcggctttggagaacttacaggtggaggcgagctgctctgtgtgcctggagtatctgaaggaacctgtcatcattgagtgtgggcacaacttctgcaaagcttgcatcacccgctggtgggaggacctagagagggacttcccttgtcctgtctgtcgaaagacatcccgctaccgcagtctccgacctaatcggcaactaggcagtatggtggaaattgccaagcagctccaggccgtcaagcggaagatccgggatgagagcctctgcccccaacaccatgaggccctcagccttttctgttatgaggaccaggaggctgtatgcttgatatgtgcaatttcccacacccaccgggcccacaccgttgtgccactggacgacgctacacaggagtacaaggaaaaactgcagaagtgtctggagcccctggaacagaagctgcaggagatcactcgctgcaagtcctctgaggagaagaagcctggtgagctcaagagactagtggaaagtcgccgacagcagatcttgagggagtttgaagagcttcataggcggctggatgaagagcagcaggtgttgctttcacgactggaagaagaggaacaggacattctgcagcgactccgagaaaatgctgctcaccttggggacaagcgccgggacctggcccacttggctgccgaggtggagggcaagtgcttacagtcaggcttcgagatgcttaaggatgtcaaaagtaccctggaaaaatgtgaaaaggtgaagaccatggaggtgacttcagtatccatagagctggaaaagaacttcagcaattttccccgacagtactttgccctaaggaaaatccttaaacagctaattgcggatgtgaccctggaccccgagacagctcatcctaacctagtcctgtcagaggatcgtaagagcgtcaagttcgtggagacaagactccgggatctccctgacacaccaaggcgtttcaccttctacccttgcgtcctggctactgagggtttcacctcaggtcgacactactgggaggtggaggccgcccattgtgtccttgcccaggaccccgagaaccaggcgctggcgaggttttactgctacactgagaggaccattgcgaagcggctcgtcttgcggcgggatccctcggtgaagaggactctctgtcgaggctgctcttccctcctcgtcccgggcctcacctgcacccagcgccagagacgctgcaggggacagcgctggaccgtacagacctgcctaacatgccagcgcagccaacgcttcctcaatgatcccgggcatttactctggggagacaggcctgaggcccagctcgggagccaagcagattccaaaccactacaacccttgccaaacacagcccactccatttcagaccgccttcctgaggagaaaatgcagacgaagggttccagtaaccagtgatggattcacctcatctcccaaataaagtttacttgttttacattccat

SEQ ID NO: 195017 - DNA, 3338 bp, Homo sapiens; identical to SEQ ID NO: 194939
  Payload ID: 18499
  Gene Name: tripartite motif containing 39
  Uniprot ID: Q9HCM9
  ENST ID: ENST00000549841
  CDS Start-End: 313-1869

SEQ ID NO: 195018 - DNA, 3338 bp, Homo sapiens
  Payload ID: 18499
  Gene Name: tripartite motif containing 39
  Uniprot ID: Q9HCM9
  ENST ID: ENST00000550282
  CDS Start-End: 313-1869
cccagcttccactgacacgagcctcggcgcggcttccgcttccggcgagtattgtgtgtcgcgccgcggggcgggggcgaggggaggaggaaggagggaggcagcgctccggcggctccgcgccccgcactcccggacccgaagccgggaagattcctttcttgtctgttagaaacgtatgtcaaacgaggatacagtgtctggaactattggttctaagatataagtggaatgagcctggatcaggagaagtatgctgagctagagttgaaggaagcttctctttctaacaagagaaagcagagttaaattatggcagagacaagtctgttagaggctggggcctctgcagcctctacagctgcggctttggagaacttacaggtggaggcgagctgctctgtgtgcctggagtatctgaaggaacctgtcatcattgagtgtgggcacaacttctgcaaagcttgcatcacccgctggtgggaggacctagagagggacttcccttgtcctgtctgtcgaaagacatcccgctaccgcagtctccgacctaatcggcaactaggcagtatggtggaaattgccaagcagctccaggccgtcaagcggaagatccgggatgagagcctctgcccccaacaccatgaggccctcagccttttctgttatgaggaccaggaggctgtatgcttgatatgtgcaatttcccacacccaccgggctcacaccgttgtgccactggacgatgctacacaggagtacaaggaaaaactgcagaagtgtctggagcccctggaacagaagctgcaggagatcactcgctgcaagtcctctgaggagaagaagcctggtgagctcaagagactagtggaaagtcgccgacagcagatcttgagggagtttgaagagcttcataggcggctggatgaagagcagcaggtgttgctttcacgactggaagaagaggaacaggacattctgcagcgactccgagaaaatgctgctcaccttggggacaagcgccgggacctggcccacttggctgccgaggtggagggcaagtgcttacagtcaggcttcgagatgcttaaggatgtcaaaagtaccctggaaaagaatattcctagaaagttcggaggctcactctcaacgatctgtccacgggatcataaggctctccttggattagtaaaagaaatcaacagatgtgaaaaggtgaagaccatggaggtgacttcagtatccatagagctggaaaagaacttcagcaattttccccgacagtactttgccctaaggaaaatccttaaacagctaattgcggatgtgaccctggaccctgagacagctcatcctaacctagtcctgtcagaggatcgtaagagcgtcaagttcgtggagacaagactccgggatctccctgacacaccaaggcgtttcaccttctacccttgcgtcctggctactgagggtttcacctcaggtcgacactactgggaggtggaggtgggcgacaagacccactgggcagtgggtgtatgccgggactccgtgagccgaaagggcgagttgactccactccctgagactggctactggcgggtgcggctatggaatggggacaaatatgcagccaccaccacaccttttacccctttgcacatcaaggtgaaacccaagcgggtaggcatattcctagactatgaggccggcacactgtctttctacaatgtcacagaccgctctcatatctacaccttcactgatacttttactgagaaactttggcccctcttctacccaggcatccgggctggacggaagaatgctgcaccacttaccatcaggcccccaacagattgggagtgacaggttgggatgtgggaatgactggggtgaggcagggtcaagtgctacgggcctccttcccgtgtcctgctggaacgtcttcgtgtccacctgggtccagtcctgaatcatcttggagaaacaccttggtttctaggatggttttgtgtggagggggaggtaggactgggctggatgagagagcacagctgtgacttcctcctaactgtcagggtggggagctggttcccagaggattgtctaccctgaagtccatcaggttttctgttgcacaaggacgggtcaggaaggaaggagaggcttttccagaaacaaaaaatctgtgagggtctgacttgctcaaaccagaggaggaaacagaaacccctgcacatctttttagggggttctttgacccaggatagtcttgcttcttgaggtagatcacaggggtctgtgtacctctgaattcatgagagatgaatgacagatgctctcatgggtctagatattgaggagtttttctgagggcagagattggacatcaacaaggctagaagggtcagggaagtgggctaaaggaacagattcctagagattaatgaagaggagggaggtttctttggtcttctattccaagggtaaggttgcgattatgggtaagattggccagaggtaggaatgtggggagaaggagaggctgaaaagaaagcagaggagaacccaggtccctgcctcagccttcagcagagttggcttattgcctgcctctataccaataagtcagtcaccttgctcctctccagaggcaaagtggaagagatcctgcaagacacatctatcctttcacagtgttcccaagggaacttggaaaggagagtcaggtattagaggaaagagaagggtatttgtatacaaagccctggccttaaagaatgttacttagtagctactcccaaattgtcagccttcttacctggccaaggtgtccaagccagaaaggaaaaaaggttatggagtctttctcaccctaaggacagggtggaagagggtggtatatagggaagggccagataggcaacttcatttggcttgtgtgcatctggcctggaactggtgttaagccaggcttttgcttgtttgttgccatccctcaccctttgccatttcccttttcagagaatgtaaatgattttcatgttaggccaaaataaacaacttatagggtacatatgttgtcataaaaggtaaaagtgatgcatgccaaaccaaactaaaccaatttggattatctgctattcgggtaatcttcacagaaatgactgagagaagaatctgcagtttactgagggcatttcagttcctcctaccacctcaacaggactttgtccagactctcctcctcttacctttgtgccttgactgtggttctttgtggcaagatactttggttggttaaaataatatggaacaaaggatccactgaagtg

SEQ ID NO: 195019 - DNA, 1567 bp, Homo sapiens; identical to SEQ ID NO: 195014
  Payload ID: 18499
  Gene Name: tripartite motif containing 39
  ENST ID: ENST00000551862
  CDS Start-End: 8-1519

SEQ ID NO: 195020 - DNA, 3338 bp, Homo sapiens; identical to SEQ ID NO: 194939
  Payload ID: 18499
  Gene Name: tripartite motif containing 39
  Uniprot ID: Q9HCM9
  ENST ID: ENST00000547030
  CDS Start-End: 313-1869

SEQ ID NO: 195021 - DNA, 3338 bp, Homo sapiens
  Payload ID: 18499
  Gene Name: tripartite motif containing 39
  Uniprot ID: Q9HCM9
  ENST ID: ENST00000552337
  CDS Start-End: 313-1869
cccagcttccactgacacgagcctcggcgcggcttccgcttccggcgagtattgtgtgtcgcgccgcggggcgggggcgaggggaggaggaaggagggaggcagcgctccggcggctccgcgccccgcactcccggacccgaagccgggaagattcctttcttgtctgttagaaacgtatgtcaaacgaggatacagtgtctggaactattggttctaagatataagtggaatgagcctggatcaggagaagtatgctgagctagagttgaaggaagcttctctttctaacaagagaaagcagagttaaattatggcagagacaagtctgttagaggctggggcctctgcagcctctacagctgcggctttggagaacttacaggtggaggcgagctgctctgtgtgcctggagtatctgaaggaacctgtcatcattgagtgtgggcacaacttctgcaaagcttgcatcacccgctggtgggaggacctagagagggacttcccttgtcctgtctgtcgaaagacatcccgctaccgcagtctccgacctaatcggcaactaggcagtatggtggaaattgccaagcagctccaggccgtcaagcggaagatccgggatgagagcctctgcccccaacaccatgaggccctcagccttttctgttatgaggaccaggaggctgtatgcttgatatgtgcaatttcccacacccaccgggcccacaccgttgtgccactggacgacgctacacaggagtacaaggaaaaactgcagaagtgtctggagcccctggaacagaagctgcaggagatcactcgctgcaagtcctctgaggagaagaagcctggtgagctcaagagactagtggaaagtcgccgacagcagatcttgagggagtttgaagagcttcataggcggctggatgaagagcagcaggtgttgctttcacgactggaagaagaggaacaggacattctgcagcgactccgagaaaatgctgctcaccttggggacaagcgccgggacctggcccacttggctgccgaggtggagggcaagtgcttacagtcaggcttcgagatgcttaaggatgtcaaaagtaccctggaaaagaatattcctagaaagttcggaggctcactctcaacgatctgtccacgggatcataaggctctccttggattagtaaaagaaatcaacagatgtgaaaaggtgaagaccatggaggtgacttcagtatccatagagctggaaaagaacttcagcaattttccccgacagtactttgccctaaggaaaatccttaaacagctaattgcggatgtgaccctggaccccgagacagctcatcctaacctagtcctgtcagaggatcgtaagagcgtcaagttcgtggagacaagactccgggatctccctgacacaccaaggcgtttcaccttctacccttgcgtcctggctactgagggtttcacctcaggtcgacactactgggaggtggaggtgggcgacaagacccactgggcagtgggtgtatgccgggactccgtgagccgaaagggcgagttgactccactccctgagactggctactggcgggtgcggctatggaatggggacaaatatgcagccaccaccacaccttttacccctttgcacatcaaggtgaaacccaagcgggtaggcatattcctagactatgaggccggcacactgtctttctacaatgtcacagaccgctctcatatctacaccttcactgatacttttactgagaaactttggcccctcttctacccaggcatccgggctggacggaagaatgctgcaccacttaccatcaggcccccaacagattgggagtgacaggttgggatgtgggaatgactggggtgaggcagggtcaagtgctacgggcctccttcccgtgtcctgctggaacgtcttcgtgtccacctgggtccagtcctgaatcatcttggagaaacaccttggtttctaggatggttttgtgtggagggggaggtaggactgggctggatgagagagcacagctgtgacttcctcctaactgtcagggtggggagctggttcccagaggattgtctaccctgaagtccatcaggttttctgttgcacaaggacgggtcaggaaggaaggagaggcttttccagaaacaaaaaatctgtgagggtctgacttgctcaaaccagaggaggaaacagaaacccctgcacatctttttagggggttctttgacccaggatagtcttgcttcttgaggtagatcacaggggtctgtgtacctctgaattcatgagagatgaatgacagatgctctcatgggtctagatattgaggagtttttctgagggcagagattggacatcaacaaggctagaagggtcagggaagtgggctaaaggaacagattcctagagattaatgaagaggagggaggtttctttggtcttctattccaagggtaaggttgcgattatgggtaagattggccagaggtaggaatgtggggagaaggagaggctgaaaagaaagcagaggagaacccaggtccctgcctcagccttcagcagagttggcttattgcctgcctctataccaataagtcagtcaccttgctcctctccagaggcaaagtggaagagatcctgcaagacacatctatcctttcacagtgttcccaagggaacttggaaaggagagtcaggtattagaggaaagagaagggtatttgtatacaaagccctggccttaaagaatgttacttagtagctactcccaaattgtcagccttcttacctggccaaggtgtccaagccagaaaggaaaaaaggttatggagtctttctcaccctaaggacagggtggaagagggtggtatatagggaagggccagataggcaacttcatttggcttgtgtgcatctggcctggaactggtgttaagccaggcttttgcttgtttgttgccatccctcaccctttgccatttcccttttcagagaatgtaaatgattttcatgttaggccaaaataaacaacttatagggtacatatgttgtcataaaaggtaaaagtgatgcatgccaaaccaaactaaaccaatttggattatctgctattcgggtaatcttcacagaaatgactgagagaagaatctgcagtttactgagggcatttcagttcctcctaccacctcaacaggactttgtccagactctcctcctcttacctttgtgccttgactgtggttctttgtggcaagatactttggttggttaaaataatatggaacaaaggatccactgaagtg

SEQ ID NO: 195022 - DNA, 3374 bp, Homo sapiens
  Payload ID: 18500
  Gene Name: tripartite motif containing 4
  Uniprot ID: Q9C037
  ENST ID: ENST00000349062
  CDS Start-End: 200-1624
cggtcttgcgcgctcaggccgggcaacgtccgtgcgttctttttgggtcctgaaccccggaagagaaactgcgttgtacccttttacgtgaggcggtgacggcggttcggaagtcgtctggcctccccgcggccgctcgcagcttgctggcctctcccgcgcctcacgtcggactccgtctccgcggcagggaagcagcatggaagctgaggacatccaggaggagttgacctgccccatctgcctggactatttccaggacccggtgtccatcgagtgcggccacaacttctgccgcggctgcctgcaccgcaactgggcgccgggcggcggcccgttcccctgccccgaatgtcggcacccatcggcgcccgccgcgctgcgacccaactgggccctggccaggctgactgagaagacgcagcgccggcgcctgggccccgtgcccccgggcctgtgcggccgccactgggagccgctgcggctcttctgcgaggacgaccagcggccagtgtgcctggtgtgcagggagtcccaggagcaccagactcacgccatggcacccatcgacgaggccttcgagagctaccgggagaaacttcttaagtctcagcgtaatctcgtggccaagatgaagaaagtcatgcatttacaggatgtagaagtgaagaacgccacacagtggaaggataagataaagagtcagcgaatgagaatcagcacggagttttcaaagctgcacaacttcctggttgaagaagaggacctgtttcttcagagattgaacaaagaagaagaagagacgaagaagaagctgaatgagaacacgttaaaactcaatcaaactatcgcttcattgaagaagctcatcttagaggtgggggagaagagccaggctcccaccctggagctgcttcagaatccaaaagaagtgttgaccaggagtgagatccaggatgtgaactattctcttgaagctgtaaaggtgaagacagtgtgccagataccattgatgaaggaaatgctaaagcgattccaagtggctgtaaacctagctgaagacacagctcatcccaaactcgtcttctcccaggaagggagatacgtgaaaaatacagcatcagccagttcttggccagtgttttcttcagcatggaactactttgctggatggaggaatcctcagaagactgcttttgtagagagatttcagcacttaccctgtgttctgggaaaaaacgttttcacctcagggaaacattactgggaagttgagagtagagatagtctggaggttgctgttggggtgtgtcgggaggacgtcatgggaattactgatcgttcaaaaatgtccccagatgtgggcatctgggcgatttattggagtgctgctggctattggcccttgataggcttccctggaactcccacccagcaagagccagctctccaccgagtgggggtttacctggatcgtgggactgggaatgtctccttctacagcgctgtggacggagtgcacctgcacaccttttcttgttcttctgtctcacgcctccggccatttttttggttgagtccattagcatctttagtcattccaccagtgactgataggaaatgaggcttttcttcccctgaccaaaactccttccctgtagtccagctgagggacacacatccctgggccctcttctgcccttcatgtctctatcctggatggtccatcttctgggtctccctaacggtaccgtttggtatctgccctttgtgtgcttcacaagaggcagtcccatgggaggtgggtctggccaatggagatgggacaggaaattttccaagacgcttttgggaaatctttttgtagcttttaaagagatgtgcggggaagacatatggatgttagcagccatattggaactgagaacacaggaatggtggaaaggtagaagaaacagagtttttgttgccgttgtgaaattgttgaaatttccttcatgccaagcttcttgttatatgagataattacgcccttattgtataagacaattttagttgtatttggttacttgcagcctgaagtaccgtaactgcactaaagggacgtagtgtgaacatcccgcagtataggcttaagtcacttttgtgaaatttgacaaaggcatagaatctttttctatccagtcaggcattgcctattctttccagtaactactgattcccccacttttctgtcttagaaaattgtgggaatcccccctcactctgcctatgttgcactctctctcttcccaaccataactctgccctcagctattaactgtgctgtgtatttatcaagttggtatgttgtatgtacagtgttattcatgtcatcatgagaatgttgaacgcttgttaaatatcttttgctagcctcttcatatgctgttgcatatgactctcatcacaactcagtgagatggaaagtcaaatcctatttgtacaaatgagaaaactgaactctttagagtaactagctcagtattggccagctggtaaatggcagtgttgggattaaaatccagttcttatctactctccctttattcagaagcatttattggatgttgatctttgtttcaggttttgattttgttacttttttatactgtgtatattttcctcagtctacccttctgctctagattgtctggactcaggagattgtggcagttactggatagttatttttaagataatgattgcttttctctgtttatataagtcatgtgtacttattgtagaaagtttgtaagatgcaaaaagtataaaaattaaagttatgcactactaacatttcaatatattttctcccagattttcagtaaagactttcaggcagtgatttaacgaggattttattttaacttatattttagtttaaggggaacacgtgcaggtttgttctatagatcaattacatgtcacaggggtttggtgtacatattatttcattacccaggtaataagcatagtacccaatagatacttttttgataccccaccctcctccaccctctaccctcaagtagtccctggtgtctgttgttcccttttttgtgtccatgggtactcaatgtttagctctcccttatacgtgagaacatgtgatgtttggttttctgttcatgtgttggtttgcttagggtaatggcctccagctccatccatgttgctgcaaagacatgatctcattctttttttatggctgcatagtattccatggtgtatatgtactatgttttctttatccagtctactgttgatgggcatttaggttgattccatgtctttgctattgtgaatagtgctgcaatgaatatatacatgca

SEQ ID NO: 195023 - DNA, 1942 bp, Homo sapiens
  Payload ID: 18500
  Gene Name: tripartite motif containing 4
  Uniprot ID: Q9C037
  ENST ID: ENST00000354241
  CDS Start-End: 93-977
cggaagtcgtctggcctccccgcggccgctcgcagcttgctggcctctcccgcgcctcacgtcggactccgtctccgcggcagggaagcagcatggaagctgaggacatccaggaggagttgacctgccccatctgcctggactatttccaggacccggtgtccatcgagtgcggccacaacttctgccgcggctgcctgcaccgcaactgggcgccgggcggcggcccgttcccctgccccgaatgtcggcacccatcggcgcccgccgcgctgcgacccaactgggccctggccaggctgactgagaagacgcagcgccggcgcctgggccccgtgcccccgggcctgtgcggccgccactgggagccgctgcggctcttctgcgaggacgaccagcggccagtgtgcctggtgtgcagggagtcccaggagcaccagactcacgccatggcacccatcgacgaggccttcgagagctaccgggagaaacttcttaagtctcagcgtaatctcgtggccaagatgaagaaagtcatgcatttacaggatgtagaagtgaagaacgccacacagtggaaggataagataaagagtcagcgaatgagaatcagcacggagttttcaaagctgcacaacttcctggttgaagaagaggacctgtttcttcagagattgaacaaagaagaagaagagacgaagaagaagctgaatgagaacacgttaaaactcaatcaaactatcgcttcattgaagaagctcatcttagaggtgggggagaagagccaggctcccaccctggagctgcttcagaatccaaaagaagtgttgaccaggagtgagatccaggatgtgaactattctcttgaagctgtaaaggtgaagacagtgtgccagataccattgatgaaggaaatgctaaagcgattccaagcaactaaaataaaaacacaaaaacaaaacaggcacaatatgtgaaacaaccgttttcaaagcaccagacgtcaggcagtgaaggacggtgattcctgagaaatgtgaaacaaatgaggtcagcctatgattgccctaccctctgcctgagggagtttccagaccatgtaaggctgaggtaactgaggtagagccagggagacttgctgagttgaggaatagacctgggagttcacggagaacaaagtagtgagagttcgcaaagtactgggcagtatcctggagcggagagagccggacacagagagaaccctcgccatctatggaggagcttcctagttgtttggcagagttctgatcagcacatgcctgtgaaaatctactcaaggctggagatagaagcttctaaaacgattagagggaacggttcctggtgctcacacagggccaggaacagtgccagttcctatcagccacaccagaaaactcgtagttcacgggcactgagtagcgtactcaggaaaatcttgcctcattagcagaaaatatttagcccttgactgggtgctgctccacacccaccttacaaatcatgaaagcaagacccaaaggggtcaaactctttccaactaacttaactgcatcccaggataaagccctagaaaattggtagaaataaacaaaaaaagagcacctaacaatataaattcacaatgtctggcatccagtcaaatatgcatgcaaaaagataggaaagcagtgacccataatggaggaaaataatcaactgaaactgacctagaattgacacagatgttagaataagcatggaaggactttaaaacatttattatgagtgtattctgtaaagaggtacatagagaccagatcaaagttttaaagatgaaaaatgtgattaaggcgaagaatgcactggatgggattaatagttgattaaatattacaaaagaaaaaattggtgaacttgaagacagagcaatggaaactac

SEQ ID NO: 195024 - DNA, 3383 bp, Homo sapiens
  Payload ID: 18500
  Gene Name: tripartite motif containing 4
  Uniprot ID: Q9C037
  ENST ID: ENST00000355947
  CDS Start-End: 131-1633
tgcgttgtacccttttacgtgaggcggtgacggcggttcggaagtcgtctggcctccccgcggccgctcgcagcttgctggcctctcccgcgcctcacgtcggactccgtctccgcggcagggaagcagcatggaagctgaggacatccaggaggagttgacctgccccatctgcctggactatttccaggacccggtgtccatcgagtgcggccacaacttctgccgcggctgcctgcaccgcaactgggcgccgggcggcggcccgttcccctgccccgaatgtcggcacccatcggcgcccgccgcgctgcgacccaactgggccctggccaggctgactgagaagacgcagcgccggcgcctgggccccgtgcccccgggcctgtgcggccgccactgggagccgctgcggctcttctgcgaggacgaccagcggccagtgtgcctggtgtgcagggagtcccaggagcaccagactcacgccatggcacccatcgacgaggccttcgagagctaccggacaggtaactttgacatccacgtggatgaatggaagagaagactaattaggctgctcttgtaccattttaagcaggaggagaaacttcttaagtctcagcgtaatctcgtggccaagatgaagaaagtcatgcatttacaggatgtagaagtgaagaacgccacacagtggaaggataagataaagagtcagcgaatgagaatcagcacggagttttcaaagctgcacaacttcctggttgaagaagaggacctgtttcttcagagattgaacaaagaagaagaagagacgaagaagaagctgaatgagaacacgttaaaactcaatcaaactatcgcttcattgaagaagctcatcttagaggtgggggagaagagccaggctcccaccctggagctgcttcagaatccaaaagaagtgttgaccaggagtgagatccaggatgtgaactattctcttgaagctgtaaaggtgaagacagtgtgccagataccattgatgaaggaaatgctaaagcgattccaagtggctgtaaacctagctgaagacacagctcatcccaaactcgtcttctcccaggaagggagatacgtgaaaaatacagcatcagccagttcttggccagtgttttcttcagcatggaactactttgctggatggaggaatcctcagaagactgcttttgtagagagatttcagcacttaccctgtgttctgggaaaaaacgttttcacctcagggaaacattactgggaagttgagagtagagatagtctggaggttgctgttggggtgtgtcgggaggacgtcatgggaattactgatcgttcaaaaatgtccccagatgtgggcatctgggcgatttattggagtgctgctggctattggcccttgataggcttccctggaactcccacccagcaagagccagctctccaccgagtgggggtttacctggatcgtgggactgggaatgtctccttctacagcgctgtggacggagtgcacctgcacaccttttcttgttcttctgtctcacgcctccggccatttttttggttgagtccattagcatctttagtcattccaccagtgactgataggaaatgaggcttttcttcccctgaccaaaactccttccctgtagtccagctgagggacacacatccctgggccctcttctgcccttcatgtctctatcctggatggtccatcttctgggtctccctaacggtaccgtttggtatctgccctttgtgtgcttcacaagaggcagtcccatgggaggtgggtctggccaatggagatgggacaggaaattttccaagacgcttttgggaaatctttttgtagcttttaaagagatgtgcggggaagacatatggatgttagcagccatattggaactgagaacacaggaatggtggaaaggtagaagaaacagagtttttgttgccgttgtgaaattgttgaaatttccttcatgccaagcttcttgttatatgagataattacgcccttattgtataagacaattttagttgtatttggttacttgcagcctgaagtaccgtaactgcactaaagggacgtagtgtgaacatcccgcagtataggcttaagtcacttttgtgaaatttgacaaaggcatagaatctttttctatccagtcaggcattgcctattctttccagtaactactgattcccccacttttctgtcttagaaaattgtgggaatcccccctcactctgcctatgttgcactctctctcttcccaaccataactctgccctcagctattaactgtgctgtgtatttatcaagttggtatgttgtatgtacagtgttattcatgtcatcatgagaatgttgaacgcttgttaaatatcttttgctagcctcttcatatgctgttgcatatgactctcatcacaactcagtgagatggaaagtcaaatcctatttgtacaaatgagaaaactgaactctttagagtaactagctcagtattggccagctggtaaatggcagtgttgggattaaaatccagttcttatctactctccctttattcagaagcatttattggatgttgatctttgtttcaggttttgattttgttacttttttatactgtgtatattttcctcagtctacccttctgctctagattgtctggactcaggagattgtggcagttactggatagttatttttaagataatgattgcttttctctgtttatataagtcatgtgtacttattgtagaaagtttgtaagatgcaaaaagtataaaaattaaagttatgcactactaacatttcaatatattttctcccagattttcagtaaagactttcaggcagtgatttaacgaggattttattttaacttatattttagtttaaggggaacacgtgcaggtttgttctatagatcaattacatgtcacaggggtttggtgtacatattatttcattacccaggtaataagcatagtacccaatagatacttttttgataccccaccctcctccaccctctaccctcaagtagtccctggtgtctgttgttcccttttttgtgtccatgggtactcaatgtttagctctcccttatacgtgagaacatgtgatgtttggttttctgttcatgtgttggtttgcttagggtaatggcctccagctccatccatgttgctgcaaagacatgatctcattctttttttatggctgcatagtattccatggtgtatatgtactatgttttctttatccagtctactgttgatgggcatttaggttgattccatgtctttgctattgtgaatagtgctgcaatgaatatatacatgca

SEQ ID NO: 195025 - DNA, 639 bp, Homo sapiens
  Payload ID: 18500
  Gene Name: tripartite motif containing 4
  ENST ID: ENST00000447480
  CDS Start-End: 1-607
ggacgaccagcggccagtgtgcctggtgtgcagggagtcccaggagcaccagactcacgccatggcacccatcgacgaggccttcgagagctaccgggagaaacttcttaagtctcagcgtaatctcgtggccaagatgaagaaagtcatgcatttacaggatgtagaagtgaagaacgccacacagtggaaggataagataaagagtcagcgaatgagaatcagcacggagttttcaaagctgcacaacttcctggttgaagaagaggacctgtttcttcagagattgaacaaagaagaagaagagacgaagaagaagctgaatgagaacacgttaaaactcaatcaaactatcgcttcattgaagaagctcatcttagaggtgggggagaagagccaggctcccaccctggagctgcttcagaatccaaaagaagtgttgaccaggagtgagatccaggatgtgaactattctcttgaagctgtaaaggtgaagacagtgtgccagataccattgatgaaggaaatgctaaagcgattccaagggattgagaaaggggacaatgtggcagaagaatcagacctctctggcagacttcatccttgaggggctcttcgatgactcccttacccaccttt

SEQ ID NO: 195026 - DNA, 1640 bp, Homo sapiens
  Payload ID: 18501
  Gene Name: tripartite motif containing 40
  Uniprot ID: Q6P9F5
  ENST ID: ENST00000307859
  CDS Start-End: 28-717
ggaggctgacagggtaggaacgaggccatgatccctttgcagaaggacaaccaggaggagggtgtctgccccatctgccaggagagcctgaaggaggccgtgagcaccaactgcggacatctcttctgtcgagtgtgcctgacacagcatgtggagaaggcctcagcctctggggtcttctgctgccccctctgccggaagccctgttctgaggaggtgctagggacaggctatatctgccccaaccaccagaagagggtgtgcaggttctgtgaggagagcagacttcttctatgtgtggaatgcctggtgtcccctgaacacatgtctcatcatgaactgaccattgaaaatgccctcagccactacaaggaacgactcaatcgccggagcaggaagctcagaaaggacattgcagaacttcagcggctcaaggctcagcaggagaagaaactgcaggctctgcagcagtggctgggccagctggagcacatgccagcagaagcggccagaatccttgacatctccagggcagtaacacagctcagaagcctggtcattgatctggaaaggacggccaaggaattagacaccaacacactgaagaatgctggtgacttactgaacaggagtgctccacagaaattagaggttatttatccccagttggagaaaggagtcagtgaattgcttcttcagccccctcagaagctctgacctgttcatccctgggacacctcacttcaggctcacctcagcctcctctctctccttcctccaacctgtccaggcccccactgggtctacccagtgcatcttcgggcctgccagctcctgaacatgtcaccatttcttcatgtccacagtcatcacctgatgcctgaccctctgactcttggacgatagccagcctccttccaggacaggctcatgcttggggctgccactgtggaggtcggggcccatggtctccaggagcatttgtgaaatctccattttgcctgtaaactgatggtagtgcccatctctcacaatctcattcaaataggatcctccaggcctctgaatggcccgagctcatcagcagtgacaccacctcacatgtggagcccagctgagttcctgcagtacttgttgtctgtaccactcacctggcacttatttattattgttgtggaagacagactcaaagacagcctcccttcatgatcctcacctcttggaattcatgcccttgtttggtcccctccccttgagtgtaagtgggatctgtgacttgcttctaatgaatggaataaggcaaaggtgatagggtgtcactctggcaactgtgttgcattgtatagaactcctccttgctggcccacccttttagagcccctcctaggagccaagagcagcttccagccaacaacaagcagaggccctcagtcttgtggctgcaagaacctgaattctgccaacaacccgagtgagcttggaagcagattcttccccaactgagccggataagaacctagtccagccaacaccttgattatagtcttgtgagtacctaagctgaggacccagtgaagctgtgccaaaatttcccacccacagaaacagtgtgacaataaatgtgtgtgtgtttttttgtt

SEQ ID NO: 195027 - DNA, 2006 bp, Homo sapiens
  Payload ID: 18501
  Gene Name: tripartite motif containing 40
  Uniprot ID: Q6P9F5
  ENST ID: ENST00000376724
  CDS Start-End: 307-1083
aggtgtatgaaaaataatttcaagtttaacaaacacaaggaaaccgcagggtccatgtcaaagctgatgagctatttctgaaactcgtgcagaattgtggtttgtgtggtctatgtcacggcacccttgagggagagtgggcaattgcctgaacttggaggctgtgtcctgtccccaggctgctccagggctgcctccttccgactgggccttcttatctgggactgttgagggcaacaggccttccgaagaccagtgaagaaggaggccctgcaaacaggaggctgacagggtaggaacgaggccatgatccctttgcagaaggacaaccaggaggagggtgtctgccccatctgccaggagagcctgaaggaggccgtgagcaccaactgcggacatctcttctgtcgagtgtgcctgacacagcatgtggagaaggcctcagcctctggggtcttctgctgccccctctgccggaagccctgttctgaggaggtgctagggacaggctatatctgccccaaccaccagaagagggtgtgcaggttctgtgaggagagcagacttcttctatgtgtggaatgcctggtgtcccctgaacacatgtctcatcatgaactgaccattgaaaatgccctcagccactacaaggaacgactcaatcgccggagcaggaagctcagaaaggacattgcagaacttcagcggctcaaggctcagcaggagaagaaactgcaggctctgcagtttcaggtagaccacgggaaccacaggctggaggctgggccggagagccagcaccaaaccagggaacagctgggtgccctccctcagcagtggctgggccagctggagcacatgccagcagaagcggccagaatccttgacatctccagggcagtaacacagctcagaagcctggtcattgatctggaaaggacggccaaggaattagacaccaacacactgaagaatgctggtgacttactgaacaggagtgctccacagaaattagaggttatttatccccagttggagaaaggagtcagtgaattgcttcttcagccccctcagaagctctgacctgttcatccctgggacacctcacttcaggctcacctcagcctcctctctctccttcctccaacctgtccaggcccccactgggtctacccagtgcatcttcgggcctgccagctcctgaacatgtcaccatttcttcatgtccacagtcatcacctgatgcctgaccctctgactcttggacgatagccagcctccttccaggacaggctcatgcttggggctgccactgtggaggtcggggcccatggtctccaggagcatttgtgaaatctccattttgcctgtaaactgatggtagtgcccatctctcacaatctcattcaaataggatcctccaggcctctgaatggcccgagctcatcagcagtgacaccacctcacatgtggagcccagctgagttcctgcagtacttgttgtctgtaccactcacctggcacttatttattattgttgtggaagacagactcaaagacagcctcccttcatgatcctcacctcttggaattcatgcccttgtttggtcccctccccttgagtgtaagtgggatctgtgacttgcttctaatgaatggaataaggcaaaggtgatagggtgtcactctggcaactgtgttgcattgtatagaactcctccttgctggcccacccttttagagcccctcctaggagccaagagcagcttccagccaacaacaagcagaggccctcagtcttgtggctgcaagaacctgaattctgccaacaacccgagtgagcttggaagcagattcttccccaactgagccggataagaacctagtccagccaacaccttgattatagtcttgtgagtacctaagctgaggacccagtgaagctgtgccaaaatttcccacccacagaaacagtgtgacaataaatgtgtgtgtgtttttttgtt

SEQ ID NO: 195028 - DNA, 2086 bp, Homo sapiens
  Payload ID: 18501
  Gene Name: tripartite motif containing 40
  Uniprot ID: Q6P9F5
  ENST ID: ENST00000383610
  CDS Start-End: 387-1163
ataagaaccactcatctgctggccatctctccaggtctggagccagagaagatgatctgaaattgtagcaggagaaattgaggtgtatgaaaaataatttcaagtttaacaaacacaaggaaaccgcagggtccatgtcaaagctgatgagctatttctgaaactcgtgcagaattgtggtttgtgtggtctatgtcacggcacccttgagggagagtgggcaattgcctgaacttggaggctgtgtcctgtccccaggctgctccagggctgcctccttccgactgggccttcttatctgggactgttgagggcaacaggccttccgaagaccagtgaagaaggaggccctgcaaacaggaggctgacagggtaggaacgaggccatgatccctttgcagaaggacaaccaggaggagggtgtctgccccatctgccaggagagcctgaaggaggccgtgagcaccaactgcggacatctcttctgtcgagtgtgcctgacacagcatgtggagaaggcctcagcctctggggtcttctgctgccccctctgccggaagccctgttctgaggaggtgctagggacaggctatatctgccccaaccaccagaagagggtgtgcaggttctgtgaggagagcagacttcttctatgtgtggaatgcctggtgtcccctgaacacatgtctcatcatgaactgaccattgaaaatgccctcagccactacaaggaacgactcaatcgccggagcaggaagctcagaaaggacattgcagaacttcagcggctcaaggctcagcaggagaagaaactgcaggctctgcagtttcaggtagaccacgggaaccacaggctggaggctgggccggagagccagcaccaaaccagggaacagctgggtgccctccctcagcagtggctgggccagctggagcacatgccagcagaagcggccagaatccttgacatctccagggcagtaacacagctcagaagcctggtcattgatctggaaaggacggccaaggaattagacaccaacacactgaagaatgctggtgacttactgaacaggagtgctccacagaaattagaggttatttatccccagttggagaaaggagtcagtgaattgcttcttcagccccctcagaagctctgacctgttcatccctgggacacctcacttcaggctcacctcagcctcctctctctccttcctccaacctgtccaggcccccactgggtctacccagtgcatcttcgggcctgccagctcctgaacatgtcaccatttcttcatgtccacagtcatcacctgatgcctgaccctctgactcttggacgatagccagcctccttccaggacaggctcatgcttggggctgccactgtggaggtcggggcccatggtctccaggagcatttgtgaaatctccattttgcctgtaaactgatggtagtgcccatctctcacaatctcattcaaataggatcctccaggcctctgaatggcccgagctcatcagcagtgacaccacctcacatgtggagcccagctgagttcctgcagtacttgttgtctgtaccactcacctggcacttatttattattgttgtggaagacagactcaaagacagcctcccttcgtgatcctcacctcttggaattcatgcccttgtttggtcccctccccttgagtgtaagtgggatctgtgacttgcttctaatgaatggaataaggcaaaggtgatagggtgtcactctggcaactgtgttgcattgtatagaactcctccttgctggcccacccttttagagcccctcctaggagccaagagcagcttccagccaacaacaagcagaggccctcagtcttgtggctgcaagaacctgaattctgccaacaacccgagtgagcttggaagcagattcttccccaactgagccggataagaacctagtccagccaacaccttgattatagtcttgtgagtacctaagctgaggacccagtgaagctgtgccaaaatttcccacccacagaaacagtgtgacaataaatgtgtgtgtgtttttttgtt

SEQ ID NO: 195029 - DNA, 2086 bp, Homo sapiens
  Payload ID: 18501
  Gene Name: tripartite motif containing 40
  Uniprot ID: Q6P9F5
  ENST ID: ENST00000396581
  CDS Start-End: 387-1163
ataagaaccactcatctgctggccatctctccaggtctggagccagagaagatgatctgaaattgtagcaggagaaattgaggtgtatgaaaaataatttcaagtttaacaaacacaaggaaaccgcagggtccatgtcaaagctgatgagctatttctgaaactcgtgcagaattgtggtttgtgtggtctatgtcacggcacccttgagggagagtgggcaattgcctgaacttggaggctgtgtcctgtccccaggctgctccagggctgcctccttccgactgggccttcttatctgggactgttgagggcaacaggccttccgaagaccagtgaagaaggaggccctgcaaacaggaggctgacagggtaggaacgaggccatgatccctttgcagaaggacaaccaggaggagggtgtctgccccatctgccaggagagcctgaaggaggccgtgagcaccaactgcggacatctcttctgtcgagtgtgcctgacacagcatgtggagaaggcctcagcctctggggtcttctgctgccccctctgccggaagccctgttctgaggaggtgctagggacaggctatatctgccccaaccaccagaagagggtgtgcaggttctgtgaggagagcagacttcttctatgtgtggaatgcctggtgtcccctgaacacatgtctcatcatgaactgaccattgaaaatgccctcagccactacaaggaacgactcaatcgccggagcaggaagctcagaaaggacattgcagaacttcagcggctcaaggctcagcaggagaagaaactgcaggctctgcagtttcaggtagaccacgggaaccacaggctggaggctgggccggagagccagcaccaaaccagggaacagctgggtgccctccctcagcagtggctgggccagctggagcacatgccagcagaagcggccagaatccttgacatctccagggcagtaacacagctcagaagcctggtcattgatctggaaaggacggccaaggaattagacaccaacacactgaagaatgctggtgacttactgaacaggagtgctccacagaaattagaggttatttatccccagttggagaaaggagtcagtgaattgcttcttcagccccctcagaagctctgacctgttcatccctgggacacctcacttcaggctcacctcagcctcctctctctccttcctccaacctgtccaggcccccactgggtctacccagtgcatcttcgggcctgccagctcctgaacatgtcaccatttcttcatgtccacagtcatcacctgatgcctgaccctctgactcttggacgatagccagcctccttccaggacaggctcatgcttggggctgccactgtggaggtcggggcccatggtctccaggagcatttgtgaaatctccattttgcctgtaaactgatggtagtgcccatctctcacaatctcattcaaataggatcctccaggcctctgaatggcccgagctcatcagcagtgacaccacctcacatgtggagcccagctgagttcctgcagtacttgttgtctgtaccactcacctggcacttatttattattgttgtggaagacagactcaaagacagcctcccttcatgatcctcacctcttggaattcatgcccttgtttggtcccctccccttgagtgtaagtgggatctgtgacttgcttctaatgaatggaataaggcaaaggtgatagggtgtcactctggcaactgtgttgcattgtatagaactcctccttgctggcccacccttttagagcccctcctaggagccaagagcagcttccagccaacaacaagcagaggccctcagtcttgtggctgcaagaacctgaattctgccaacaacccgagtgagcttggaagcagattcttccccaactgagccggataagaacctagtccagccaacaccttgattatagtcttgtgagtacctaagctgaggacccagtgaagctgtgccaaaatttcccacccacagaaacagtgtgacaataaatgtgtgtgtgtttttttgtt

SEQ ID NO: 195030 - DNA, 1640 bp, Homo sapiens
  Payload ID: 18501
  Gene Name: tripartite motif containing 40
  Uniprot ID: Q6P9F5
  ENST ID: ENST00000400651
  CDS Start-End: 28-717
ggaggctgacagggtaggaacgaggccatgatccctttgcagaaggacaaccaggaggagggtgtctgccccatctgccaggagagcctgaaggaggccgtgagcaccaactgcggacatctcttctgtcgagtgtgcctgacacagcatgtggagaaggcctcagcctctggggtcttctgctgccccctctgccggaagccctgttctgaggaggtgctagggacaggctatatctgccccaaccaccagaagagggtgtgcaggttctgtgaggagagcagacttcttctatgtgtggaatgcctggtgtcccctgaacacatgtctcatcatgaactgaccattgaaaatgccctcagccactacaaggaacgactcaatcgccggagcaggaagctcagaaaggacattgcagaacttcagcggctcaaggctcagcaggagaagaaactgcaggctctgcagcagtggctgggccagctggagcacatgccagcagaagcggccagaatccttgacatctccagggcagtaacacagctcagaagcctggtcattgatctggaaaggacggccaaggaattagacaccaacacactgaagaatgctggtgacttactgaacaggagtgctccacagaaattagaggttatttatccccagttggagaaaggagtcagtgaattgcttcttcagccccctcagaagctctgacctgttcatccctgggacacctcacttcaggctcacctcagcctcctctctctccttcctccaacctgtccaggcccccactgggtctacccagtgcatcttcgggcctgccagctcctgaacatgtcaccatttcttcatgtccacagtcatcacctgatgcctgaccctctgactcttggacgatagccagcctccttccaggacaggctcatgcttggggctgccactgtggaggtcggggcccatggtctccaggagcatttgtgaaatctccattttgcctgtaaactgatggtagtgcccatctctcacaatctcattcaaataggatcctccaggcctctgaatggcccgagctcatcagcagtgacaccacctcacatgtggagcccagctgagttcctgcagtacttgttgtctgtaccactcacctggcacttatttattattgttgtggaagacagactcaaagacagcctcccttcgtgatcctcacctcttggaattcatgcccttgtttggtcccctccccttgagtgtaagtgggatctgtgacttgcttctaatgaatggaataaggcaaaggtgatagggtgtcactctggcaactgtgttgcattgtatagaactcctccttgctggcccacccttttagagcccctcctaggagccaagagcagcttccagccaacaacaagcagaggccctcagtcttgtggctgcaagaacctgaattctgccaacaacccgagtgagcttggaagcagattcttccccaactgagccggataagaacctagtccagccaacaccttgattatagtcttgtgagtacctaagctgaggacccagtgaagctgtgccaaaatttcccacccacagaaacagtgtgacaataaatgtgtgtgtgtttttttgtt

SEQ ID NO: 195031 - DNA, 2086 bp, Homo sapiens
  Payload ID: 18501
  Gene Name: tripartite motif containing 40
  Uniprot ID: Q6P9F5
  ENST ID: ENST00000434151
  CDS Start-End: 387-1163
ataagaaccactcatctgctggccatctctccaggtctagagccagagaagatgatctgaaattgtagcaggagaaattgaggtgtatgaaaaataatttcaagtttaacaaacacaaggaaaccgcagggtccatgtcaaagctgatgagctatttctgaaactcgtgaagaattgtggtttgtgtggtctatgtcacggcacccttgagggagagtgggcaattgcctgaacttggaggctgtgtcctgtccccaggctgctccagggctgcctccttccgactgggccttcttatctgggactgttgagggcaacaggccttccgaagaccagtgaagaaggaggccctgcaaacaggaggctgacagggtaggaacgaggccatgatccctttgcagaaggacaaccaggaggagggtgtctgccccatctgccaggagagcctgaaggaggccgtgagcaccaactgcggacatctcttctgtcgagtgtgcctgacacagcatgtggagaaggcctcagcctctggggtcttctgctgccccctctgccggaagccctgttctgaggaggtgctagggacaggctatatctgccccaaccaccagaagagggtgtgcaggttctgtgaggagagcagacttcttctatgtgtggaatgcctggtgtcccctgaacacatgtctcatcatgaactgaccattgaaaatgccctcagccactacaaggaacgactcaatcgccggagcaggaagctcagaaaggacattgcagaacttcagcggctcaaggctcagcaggagaagaaactgcaggctctgcagtttcaggtagaccacgggaaccacaggctggaggctgggccggagagccagcaccaaaccagggaacagctgggtgccctccctcagcagtggctgggccagctggagcacatgccagcagaagcggccagaatccttgacatctccagggcagtaacacagctcagaagcctggtcattgatctggaaaggacggccaaggaattagacaccaacacactgaagaatgctggtgacttactgaacaggagtgctccacagaaattagaggttatttatccccagttggagaaaggagtcagtgaattgcttcttcagccccctcagaagctctgacctgttcatccctgggacacctcacttcaggctcacctcagcctcctctctctccttcctccaacctgtccaggcccccactgggtctacccagtgcatcttcgggcctgccagctcctgaacatgtcaccatttcttcatgtccacagtcatcacctgatgcctgaccctctgactcttggacgatagccagcctccttccaggacaggctcatgcttggggctgccactgtggaggtcggggcccatggtctccaggagcatttgtgaaatctccattttgcctgtaaactgatggtagtgcccatctctcacaatctcattcaaataggatcctccaggcctctgaatggcccgagctcatcagcagtgacaccacctcacatgtggagcccagctgagttcctgcagtacttgttgtctgtaccactcacctggcacttatttattattgttgtggaagacagactcaaagacagcctcccttcgtgatcctcacctcttggaattcatgcccttgtttggtcccctccccttgagtgtaagtgggatctgtgacttgcttctaatgaatggaataaggcaaaggtgatagggtgtcactctggcaactgtgttgcattgtatagaactcctccttgctggcccacccttttagagcccctcctaggagccaagagcagcttccagccaacaacaagcagaggccctcagtcttgtggctgcaagaacctgaattctgccaacaacccgagtgagcttggaagcagattcttccccaactgagccggataagaacctagtccagccaacaccttgattatagtcttgtgagtacctaagctgaggacccagtgaagctgtgccaaaatttcccacccacagaaacagtgtgacaataaatgtgtgtgtgtttttttgtt

SEQ ID NO: 195032 - DNA, 2066 bp, Homo sapiens
  Payload ID: 18501
  Gene Name: tripartite motif containing 40
  Uniprot ID: Q6P9F5
  ENST ID: ENST00000433713
  CDS Start-End: 367-1143
ggccatctctccaggtctagagccagagaagatgatctgaaattgtagcaggagaaattgaggtgtatgaaaaataatttcaagtttaacaaacacaaggaaaccgcagggtccatgtcaaagctgatgagctatttctgaaactcgtgaagaattgtggtttgtgtggtctatgtcacggcacccttgagggagagtgggcaattgcctgaacttggaggctgtgtcctgtccccaggctgctccagggctgcctccttccgactgggccttcttatctgggactgttgagggcaacaggccttccgaagaccagtgaagaaggaggccctgcaaacaggaggctgacagggtaggaacgaggccatgatccctttgcagaaggacaaccaggaggagggtgtctgccccatctgccaggagagcctgaaggaggccgtgagcaccaactgcggacatctcttctgtcgagtgtgcctgacacagcatgtggagaaggcctcagcctctggggtcttctgctgccccctctgccggaagccctgttctgaggaggtgctagggacaggctatatctgccccaaccaccagaagagggtgtgcaggttctgtgaggagagcagacttcttctatgtgtggaatgcctggtgtcccctgaacacatgtctcatcatgaactgaccattgaaaatgccctcagccactacaaggaacgactcaatcgccggagcaggaagctcagaaaggacattgcagaacttcagcggctcaaggctcagcaggagaagaaactgcaggctctgcagtttcaggtagaccacgggaaccacaggctggaggctgggccggagagccagcaccaaaccagggaacagctgggtgccctccctcagcagtggctgggccagctggagcacatgccagcagaagcggccagaatccttgacatctccagggcagtaacacagctcagaagcctggtcattgatctggaaaggacggccaaggaattagacaccaacacactgaagaatgctggtgacttactgaacaggagtgctccacagaaattagaggttatttatccccagttggagaaaggagtcagtgaattgcttcttcagccccctcagaagctctgacctgttcatccctgggacacctcacttcaggctcacctcagcctcctctctctccttcctccaacctgtccaggcccccactgggtctacccagtgcatcttcgggcctgccagctcctgaacatgtcaccatttcttcatgtccacagtcatcacctgatgcctgaccctctgactcttggacgatagccagcctccttccaggacaggctcatgcttggggctgccactgtggaggtcggggcccatggtctccaggagcatttgtgaaatctccattttgcctgtaaactgatggtagtgcccatctctcacaatctcattcaaataggatcctccaggcctctgaatggcccaagctcatcagcagtgacaccacctcacatgtggagcccagctgagttcctgcagtacttgttgtctgtaccactcacctggcacttatttattattgttgtggaagacagactcaaagacagcctcccttcgtgatcctcacctcttggaattcatgcccttgtttggtcccctccccttgagtgtaagtgggatctgtgacttgcttctaatgaatggaataaggcaaaggtgatagggtgtcactctggcaactgtgttgcattgtatagaactcctccttgctggcccacccttttagagcccctcctaggagccaagagcagcttccagccaacaacaagcagaggccctcagtcttgtggctgcaagaacctgaattctgccaacaacccgagtgagcttggaagcagattcttccccaactgagccggataagaacctagtccagccaacaccttgattatagtcttgtgagtacctaagctgaggacccagtgaagctgtgccaaaatttcccacccacagaaacagtgtgacaataaatgtgtgtgtgtttttttgtt

SEQ ID NO: 195033 - DNA, 1640 bp, Homo sapiens; identical to SEQ ID NO: 195030
  Payload ID: 18501
  Gene Name: tripartite motif containing 40
  Uniprot ID: Q6P9F5
  ENST ID: ENST00000429471
  CDS Start-End: 28-717

SEQ ID NO: 195034 - DNA, 1640 bp, Homo sapiens
  Payload ID: 18501
  Gene Name: tripartite motif containing 40
  ENST ID: ENST00000456884
  CDS Start-End: 28-717
ggaggctgacagggtaggaacaaggccatgatccctttgcagaaggacaaccaggaggagggtgtctgccccatctgccaggagagcctgaaggaggccgtgagcaccaactgcggacatctcttctgtcgagtgtgcctgacacagcatgtggagaaggcctcagcctctggggtcttctgctgccccctctgccggaagccctgttctgaggaggtgctagggacaggctatatctgccccaaccaccagaagagggtgtgcaggttctgtgaggagagcagacttcttctatgtgtggaatgcctggtgtcccctgaacacatgtctcatcatgaactgaccattgaaaatgccctcagccactacaaggaacgactcaatcgccggagcaggaagctcagaaaggacattgcagaacttcagcggctcaaggctcagcaggagaagaaactgcaggctctgcagcagtggctgggccagctggagcacatgccagcagaagcggccagaatccttgacatctccagggcagtaacacagctcagaagcctggtcattgatctggaaaggatggccaaggaattagacaccaacacactgaagaatgctggtgacttactgaacaggagtgctccacagaaattagaggttatttatccccagttgaagaaaggagtcagtgaattgcttcttcagccccctcagaagctctgacctgttcatccctgggacacctcacttcaggctcacctcagcctcctctctctccttcctccaacctgtccaggcccccactgggtctacccagtgcatcttcgggcctgccagctcctgaacatgtcaccatttcttcatgtccacagtcatcacctgatgcctgaccctctgactcttggacgatagccagcctccttccaggacaggctcatgcttggggctgccactgtggaggtcggggcccatggtctccaggagcatttgtgaaatctccattttgcctgtaaactgatggtagtgcccatctctcacaatctcattcaaataggatcctccaggcctctgaatggcccgagctcatcagcagtgacatcacctcacatgtggagcccagctgagttcctgcagtacttgttgtctgtaccactcacctggcacttatttattattgttgtggaagacagactcaaagacagcctcccttcgtgatcctcacctcttggaattcatgcccttgtttggtcccctccccttgagtgtaagtgggatctgtgacttgcttctaatcaatggaataaggcaaaggtgatagggtgtcactctggcaactgtgttgcattgtatagaactcctccttgctggcccacccttttagagcccctcctaggagccaagagcagcttccagccaacaacaagcagaggccctcagtcttgtggctgcaagaacctgaattctgccaacaacctgagtgagcttggaagcagattcttccccaactgagccggataagaacctagtccagccaacaccttgattatagtcttgtgagtacctaagctgaggacccagtgaagctgtgccaaaatttcccacccacagaaacagtgtgacaataaatgtgtgtgtgtttttttgtt

SEQ ID NO: 195035 - DNA, 1640 bp, Homo sapiens
  Payload ID: 18501
  Gene Name: tripartite motif containing 40
  ENST ID: ENST00000445004
  CDS Start-End: 28-717
ggaggctgacagggtaggaacgaggccatgatccctttgcagaaggacaaccaggaggagggtgtctgccccatctgccaggagagcctgaaggaggccgtgagcaccaactgcggacatctcttctgtcgagtgtgcctgacacagcatgtggagaaggcctcagcctctggggtcttctgctgccccctctgccggaagccctgttctgaggaggtgctagggacaggctatatctgccccaaccaccagaagagggtgtgcaggttctgtgaggagagcagacttcttctatgtgtggaatgcctggtgtcccctgaacacatgtctcatcatgaactgaccattgaaaatgccctcagccactgcaaggaacgactcaatcgccggagcaggaagctcagaaaggacattgcagaacttcagcggctcaaggctcagcaggagaagaaactgcaggctctgcagcagtggctgggccagctggagcacatgccagcagaagcggccagaatccttgacatctccagggcagtaacacagctcagaagcctggtcattgatctggaaaggacggccaaggaattagacaccaacacactgaagaatgctggtgacttactgaacaggagtgctccacagaaattagaggttatttatccccagttggagaaaggagtcagtgaattgcttcttcagccccctcagaagctctgacctgttcatccctgggacacctcacttcaggctcacctcagcctcctctctctccttcctccaacctgtccaggcccccactgggtctacccagtgcatcttcgggcctgccagctcctgaacatgtcaccatttcttcatgtccacagtcatcacctgatgcctgaccctctgactcttggacgatagccagcctccttccaggacaggctcatgcttggggctgccactgtggaggtcggggcccatggtctccaggagcatttgtgaaatctccattttgcctgtaaactgatggtagtgcccatctctcacaatctcattcaaataggatcctccaggcctctgaatggcccaagctcatcagcagtgacaccacctcacatgtggagcccagctgagttcctgcagtacttgttgtctgtaccactcacctggcacttatttattattgttgtggaagacagactcaaagacagcctcccttcgtgatcctcacctcttggaattcatgcccttgtttggtcccctccccttgagtgtaagtgggatctgtgacttgcttctaatgaatggaataaggcaaaggtgatagggtgtcactctggcaactgtgttgcattgtatagaactcctccttgctggcccacccttttagagcccctcctaggagccaagagcagcttccagccaacaacaagcagaggccctcagtcttgtggctgcaagaacctgaattctgccaacaacccgagtgagcttggaagcagattcttccccaactgagccggataagaacctagtccagccaacaccttgattatagtcttgtgagtacctaagctgaggacccagtgaagctgtgccaaaatttcccacccacagaaacagtgtgacaataaatgtgtgtgtgtttttttgtt

SEQ ID NO: 195036 - DNA, 2086 bp, Homo sapiens
  Payload ID: 18501
  Gene Name: tripartite motif containing 40
  ENST ID: ENST00000431397
  CDS Start-End: 387-1163
ataagaaccactcatctgctggccatctctccaggtctagagccagagaagatgatctgaaattgtagcaggagaaattgaggtgtatgaaaaataatttcaagtttaacaaacacaaggaaaccgcagggtccatgtcaaagctgatgagctatttctgaaactcgtgaagaattgtggtttgtgtggtctatgtcacggcacccttgagggagagtgggcaattgcctgaacttggaggctgtgtcctgtccccaggctgctccagggctgcctccttccgactgggccttcttatctgggactgttgagggcaacaggccttccgaagaccagtgaagaaggaggccctgcaaacaggaggctgacagggtaggaacgaggccatgatccctttgcagaaggacaaccaggaggagggtgtctgccccatctgccaggagagcctgaaggaggccgtgagcaccaactgcggacatctcttctgtcgagtgtgcctgacacagcatgtggagaaggcctcagcctctggggtcttctgctgccccctctgccggaagccctgttctgaggaggtgctagggacaggctatatctgccccaaccaccagaagagggtgtgcaggttctgtgaggagagcagacttcttctatgtgtggaatgcctggtgtcccctgaacacatgtctcatcatgaactgaccattgaaaatgccctcagccactgcaaggaacgactcaatcgccggagcaggaagctcagaaaggacattgcagaacttcagcggctcaaggctcagcaggagaagaaactgcaggctctgcagtttcaggtagaccacgggaaccacaggctggaggctgggccggagagccagcaccaaaccagggaacagctgggtgccctccctcagcagtggctgggccagctggagcacatgccagcagaagcggccagaatccttgacatctccagggcagtaacacagctcagaagcctggtcattgatctggaaaggacggccaaggaattagacaccaacacactgaagaatgctggtgacttactgaacaggagtgctccacagaaattagaggttatttatccccagttggagaaaggagtcagtgaattgcttcttcagccccctcagaagctctgacctgttcatccctgggacacctcacttcaggctcacctcagcctcctctctctccttcctccaacctgtccaggcccccactgggtctacccagtgcatcttcgggcctgccagctcctgaacatgtcaccatttcttcatgtccacagtcatcacctgatgcctgaccctctgactcttggacgatagccagcctccttccaggacaggctcatgcttggggctgccactgtggaggtcggggcccatggtctccaggagcatttgtgaaatctccattttgcctgtaaactgatggtagtgcccatctctcacaatctcattcaaataggatcctccaggcctctgaatggcccaagctcatcagcagtgacaccacctcacatgtggagcccagctgagttcctgcagtacttgttgtctgtaccactcacctggcacttatttattattgttgtggaagacagactcaaagacagcctcccttcgtgatcctcacctcttggaattcatgcccttgtttggtcccctccccttgagtgtaagtgggatctgtgacttgcttctaatgaatggaataaggcaaaggtgatagggtgtcactctggcaactgtgttgcattgtatagaactcctccttgctggcccacccttttagagcccctcctaggagccaagagcagcttccagccaacaacaagcagaggccctcagtcttgtggctgcaagaacctgaattctgccaacaacccgagtgagcttggaagcagattcttccccaactgagccggataagaacctagtccagccaacaccttgattatagtcttgtgagtacctaagctgaggacccagtgaagctgtgccaaaatttcccacccacagaaacagtgtgacaataaatgtgtgtgtgtttttttgtt

SEQ ID NO: 195037 - DNA, 1640 bp, Homo sapiens; identical to SEQ ID NO: 195030
  Payload ID: 18501
  Gene Name: tripartite motif containing 40
  Uniprot ID: Q6P9F5
  ENST ID: ENST00000421981
  CDS Start-End: 28-717

SEQ ID NO: 195038 - DNA, 2086 bp, Homo sapiens
  Payload ID: 18501
  Gene Name: tripartite motif containing 40
  ENST ID: ENST00000425845
  CDS Start-End: 387-1163
ataagaaccactcgtctgctggccatctctccaggtctggagccagagaagatgatctgaaattgtagcaggagaaattgaggtgtatgaaaaataatttcaagtttaacaaacacaaggaaaccgcagggtccatgtcaaagctgatgagctatttctgaaactcgtgcagaattgtggtttgtgtggtctatgtcacggcacccttgagggagagtgggcaattgcctgaacttggaggctgtgtcctgtccccaggctgctccagggctgcctccttccgactgggccttcttatctgggactgttgagggcaacaggccttccgaagaccagtgaagaaggaggccctgcagacaggaggctgacagggtaggaacaaggccatgatccctttgcagaaggacaaccaggaggagggtgtctgccccatctgccaggagagcctgaaggaggccgtgagcaccaactgcggacatctcttctgtcgagtgtgcctgacacagcatgtggagaaggcctcagcctctggggtcttctgctgccccctctgccggaagccctgttctgaggaggtgctagggacaggctatatctgccccaaccaccagaagagggtgtgcaggttctgtgaggagagcagacttcttctatgtgtggaatgcttggtgtcccctgaacacatgtctcatcatgaactgaccattgaaaatgccctcagccactacaaggaacgactcaatcgccggagcaggaagctcagaaaggacattgcagaacttcagcggctcaaggctcagcaggagaagaaactgcaggctctgcagtttcaggtagaccacgggaaccacaggctggaggctgggccggagagccagcaccaaaccagggaacagctgggtgccctcccccagcagtggctgggccagctggagcacatgccagcagaagcggccagaatccttgacatctccagggcagtaacacagctcagaagcctggtcattgatctggaaaggatggccaaggaattagacaccaacacactgaagaatgctggtgacttactgaacaggagtgctccacagaaattagaggttatttatccccagttgaagaaaggagtcagtgaattgcttcttcagccccctcagaagctctgacctgttcatccctgggacacctcacttcaggctcacctcagcctcctctctctccttcctccaacctgtccaggcccccactgggtctacccagtgcatcttcgggcctgccagctcctgaacatgtcaccatttcttcatgtccacagtcatcacctgatgcctgaccctctgactcttggacgatagccagcctccttccaggacaggctcatgcttggggctgccactgtggaggtcggggcccatggtctccaggagcatttgtgaaatctccattttgcctgtaaactgatggtagtgcccatctctcacaatctcattcaaataggatcctccaggcctctgaatggcccgagctcatcagcagtgacatcacctcacatgtggagcccagctgagttcctgcagtacttgttgtctgtaccactcacctggcacttatttattattgttgtggaagacagactcaaagacagcctcccttcgtgatcctcacctcttggaattcatgcccttgtttggtcccctccccttgagtgtaagtgggatctgtgacttgcttctaatcaatggaataaggcaaaggtgatagggtgtcactctggcaactgtgttgcattgtatagaactcctccttgctggcccacccttttagagcccctcctaggagccaagagcagcttccagccaacaacaagcagaggccctcagtcttgtggctgcaagaacctgaattctgccaacaacctgagtgagcttggaagcagattcttccccaactgagccggataagaacctagtccagccaacaccttgattatagtcttgtgagtacctaagctgaggacccagtgaagctgtgccaaaatttcccacccacagaaacagtgtgacaataaatgtgtgtgtgtttttttgtt

SEQ ID NO: 195039 - DNA, 2086 bp, Homo sapiens
  Payload ID: 18501
  Gene Name: tripartite motif containing 40
  ENST ID: ENST00000430485
  CDS Start-End: 387-1163
ataagaaccactcgtctgctggccatctctccaggtctggagccagagaagatgatctgaaattgtagcaggagaaattgaggtgtatgaaaaataatttcaagtttaacaaacacaaggaaaccgcagggtccatgtcaaagctgatgagctatttctgaaactcgtgcagaattgtggtttgtgtggtctatgtcacggcacccttgagggagagtgggcaattgcctgaacttggaggctgtgtcctgtccccaggctgctccagggctgcctccttccgactgggccttcttatctgggactgttgagggcaacaggccttccgaagaccagtgaagaaggaggccctgcagacaggaggctgacagggtaggaacaaggccatgatccctttgcagaaggacaaccaggaggagggtgtctgccccatctgccaggagagcctgaaggaggccgtgagcaccaactgcggacatctcttctgtcgagtgtgcctgacacagcatgtggagaaggcctcagcctctggggtcttctgctgccccctctgccggaagccctgttctgaggaggtgctagggacaggctatatctgccccaaccaccagaagagggtgtgcaggttctgtgaggagagcagacttcttctatgtgtggaatgcctggtgtcccctgaacacatgtctcatcatgaactgaccattgaaaatgccctcagccactacaaggaacgactcaatcgccggagcaggaagctcagaaaggacattgcagaacttcagcggctcaaggctcagcaggagaagaaactgcaggctctgcagtttcaggtagaccacgggaaccacaggctggaggctgggccggagagccagcaccaaaccagggaacagctgggtgccctcccccagcagtggctgggccagctggagcacatgccagcagaagcggccagaatccttgacatctccagggcagtaacacagctcagaagcctggtcattgatctggaaaggatggccaaggaattagacaccaacacactgaagaatgctggtgacttactgaacaggagtgctccacagaaattagaggttatttatccccagttgaagaaaggagtcagtgaattgcttcttcagccccctcagaagctctgacctgttcatccctgggacacctcacttcaggctcacctcagcctcctctctctccttcctccaacctgtccaggcccccactgggtctacccagtgcatcttcgggcctgccagctcctgaacatgtcaccatttcttcatgtccacagtcatcacctgatgcctgaccctctgactcttggacgatagccagcctccttccaggacaggctcatgcttggggctgccactgtggaggtcggggcccatggtctccaggagcatttgtgaaatctccattttgcctgtaaactgatggtagtgcccatctctcacaatctcattcaaataggatcctccaggcctctgaatggcccgagctcatcagcagtgacatcacctcacatgtggagcccagctgagttcctgcagtacttgttgtctgtaccactcacctggcacttatttattattgttgtggaagacagactcaaagacagcctcccttcgtgatcctcacctcttggaattcatgcccttgtttggtcccctccccttgagtgtaagtgggatctgtgacttgcttctaatcaatggaataaggcaaaggtgatagggtgtcactctggcaactgtgttgcattgtatagaactcctccttgctggcccacccttttagagcccctcctaggagccaagagcagcttccagccaacaacaagcagaggccctcagtcttgtggctgcaagaacctgaattctgccaacaacctgagtgagcttggaagcagattcttccccaactgagccggataagaacctagtccagccaacaccttgattatagtcttgtgagtacctaagctgaggacccagtgaagctgtgccaaaatttcccacccacagaaacagtgtgacaataaatgtgtgtgtgtttttttgtt

SEQ ID NO: 195040 - DNA, 1640 bp, Homo sapiens
  Payload ID: 18501
  Gene Name: tripartite motif containing 40
  ENST ID: ENST00000418267
  CDS Start-End: 28-717
ggaggctgacagggtaggaacaaggccatgatccctttgcagaaggacaaccaggaggagggtgtctgccccatctgccaggagagcctgaaggaggccgtgagcaccaactgcggacatctcttctgtcgagtgtgcctgacacagcatgtggagaaggcctcagcctctggggtcttctgctgccccctctgccggaagccctgttctgaggaggtgctagggacaggctatatctgccccaaccaccagaagagggtgtgcaggttctgtgaggagagcagacttcttctatgtgtggaatgcttggtgtcccctgaacacatgtctcatcatgaactgaccattgaaaatgccctcagccactacaaggaacgactcaatcgccggagcaggaagctcagaaaggacattgcagaacttcagcggctcaaggctcagcaggagaagaaactgcaggctctgcagcagtggctgggccagctggagcacatgccagcagaagcggccagaatccttgacatctccagggcagtaacacagctcagaagcctggtcattgatctggaaaggatggccaaggaattagacaccaacacactgaagaatgctggtgacttactgaacaggagtgctccacagaaattagaggttatttatccccagttgaagaaaggagtcagtgaattgcttcttcagccccctcagaagctctgacctgttcatccctgggacacctcacttcaggctcacctcagcctcctctctctccttcctccaacctgtccaggcccccactgggtctacccagtgcatcttcgggcctgccagctcctgaacatgtcaccatttcttcatgtccacagtcatcacctgatgcctgaccctctgactcttggacgatagccagcctccttccaggacaggctcatgcttggggctgccactgtggaggtcggggcccatggtctccaggagcatttgtgaaatctccattttgcctgtaaactgatggtagtgcccatctctcacaatctcattcaaataggatcctccaggcctctgaatggcccgagctcatcagcagtgacatcacctcacatgtggagcccagctgagttcctgcagtacttgttgtctgtaccactcacctggcacttatttattattgttgtggaagacagactcaaagacagcctcccttcgtgatcctcacctcttggaattcatgcccttgtttggtcccctccccttgagtgtaagtgggatctgtgacttgcttctaatcaatggaataaggcaaaggtgatagggtgtcactctggcaactgtgttgcattgtatagaactcctccttgctggcccacccttttagagcccctcctaggagccaagagcagcttccagccaacaacaagcagaggccctcagtcttgtggctgcaagaacctgaattctgccaacaacctgagtgagcttggaagcagattcttccccaactgagccggataagaacctagtccagccaacaccttgattatagtcttgtgagtacctaagctgaggacccagtgaagctgtgccaaaatttcccacccacagaaacagtgtgacaataaatgtgtgtgtgtttttttgtt

SEQ ID NO: 195041 - DNA, 1640 bp, Homo sapiens
  Payload ID: 18501
  Gene Name: tripartite motif containing 40
  Uniprot ID: Q6P9F5
  ENST ID: ENST00000436951
  CDS Start-End: 28-717
ggaggctgacagggtaggaacgaggccatgatccctttgcagaaggacaaccaggaggagggtgtctgccccatctgccaggagagcctgaaggaggccgtgagcaccaactgcggacatctcttctgtcgagtgtgcctgacacagcatgtggagaaggcctcagcctctggggtcttctgctgccccctctgccggaagccctgttctgaggaggtgctagggacaggctatatctgccccaaccaccagaagagggtgtgcaggttctgtgaggagagcagacttcttctatgtgtggaatgcctggtgtcccctgaacacatgtctcatcatgaactgaccattgaaaatgccctcagccactacaaggaacgactcaatcgccggagcaggaagctcagaaaggacattgcagaacttcagcggctcaaggctcagcaggagaagaaactgcaggctctgcagcagtggctgggccagctggagcacatgccagcagaagcggccagaatccttgacatctccagggcagtaacacagctcagaagcctggtcattgatctggaaaggacggccaaggaattagacaccaacacactgaagaatgctggtgacttactgaacaggagtgctccacagaaattagaggttatttatccccagttggagaaaggagtcagtgaattgcttcttcagccccctcagaagctctgacctgttcatccctgggacacctcacttcaggctcacctcagcctcctctctctccttcctccaacctgtccaggcccccactgggtctacccagtgcatcttcgggcctgccagctcctgaacatgtcaccatttcttcatgtccacagtcatcacctgatgcctgaccctctgactcttggacgatagccagcctccttccaggacaggctcatgcttggggctgccactgtggaggtcggggcccatggtctccaggagcatttgtgaaatctccattttgcctgtaaactgatggtagtgcccatctctcacaatctcattcaaataggatcctccaggcctctgaatggcccaagctcatcagcagtgacaccacctcacatgtggagcccagctgagttcctgcagtacttgttgtctgtaccactcacctggcacttatttattattgttgtggaagacagactcaaagacagcctcccttcgtgatcctcacctcttggaattcatgcccttgtttggtcccctccccttgagtgtaagtgggatctgtgacttgcttctaatgaatggaataaggcaaaggtgatagggtgtcactctggcaactgtgttgcattgtatagaactcctccttgctggcccacccttttagagcccctcctaggagccaagagcagcttccagccaacaacaagcagaggccctcagtcttgtggctgcaagaacctgaattctgccaacaacccgagtgagcttggaagcagattcttccccaactgagccggataagaacctagtccagccaacaccttgattatagtcttgtgagtacctaagctgaggacccagtgaagctgtgccaaaatttcccacccacagaaacagtgtgacaataaatgtgtgtgtgtttttttgtt

SEQ ID NO: 195042 - DNA, 2086 bp, Homo sapiens; identical to SEQ ID NO: 195028
  Payload ID: 18501
  Gene Name: tripartite motif containing 40
  Uniprot ID: Q6P9F5
  ENST ID: ENST00000437563
  CDS Start-End: 387-1163

SEQ ID NO: 195043 - DNA, 2006 bp, Homo sapiens
  Payload ID: 18501
  Gene Name: tripartite motif containing 40
  Uniprot ID: Q6P9F5
  ENST ID: ENST00000547289
  CDS Start-End: 307-1083
aggtgtatgaaaaataatttcaagtttaacaaacacaaggaaaccgcagggtccatgtcaaagctgatgagctatttctgaaactcgtgcagaattgtggtttgtgtggtctatgtcacggcacccttgagggagagtgggcaattgcctgaacttggaggctgtgtcctgtccccaggctgctccagggctgcctccttccgactgggccttcttatctgggactgttgagggcaacaggccttccgaagaccagtgaagaaggaggccctgcaaacaggaggctgacagggtaggaacgaggccatgatccctttgcagaaggacaaccaggaggagggtgtctgccccatctgccaggagagcctgaaggaggccgtgagcaccaactgcggacatctcttctgtcgagtgtgcctgacacagcatgtggagaaggcctcagcctctggggtcttctgctgccccctctgccggaagccctgttctgaggaggtgctagggacaggctatatctgccccaaccaccagaagagggtgtgcaggttctgtgaggagagcagacttcttctatgtgtggaatgcctggtgtcccctgaacacatgtctcatcatgaactgaccattgaaaatgccctcagccactacaaggaacgactcaatcgccggagcaggaagctcagaaaggacattgcagaacttcagcggctcaaggctcagcaggagaagaaactgcaggctctgcagtttcaggtagaccacgggaaccacaggctggaggctgggccggagagccagcaccaaaccagggaacagctgggtgccctccctcagcagtggctgggccagctggagcacatgccagcagaagcggccagaatccttgacatctccagggcagtaacacagctcagaagcctggtcattgatctggaaaggacggccaaggaattagacaccaacacactgaagaatgctggtgacttactgaacaggagtgctccacagaaattagaggttatttatccccagttggagaaaggagtcagtgaattgcttcttcagccccctcagaagctctgacctgttcatccctgggacacctcacttcaggctcacctcagcctcctctctctccttcctccaacctgtccaggcccccactgggtctacccagtgcatcttcgggcctgccagctcctgaacatgtcaccatttcttcatgtccacagtcatcacctgatgcctgaccctctgactcttggacgatagccagcctccttccaggacaggctcatgcttggggctgccactgtggaggtcggggcccatggtctccaggagcatttgtgaaatctccattttgcctgtaaactgatggtagtgcccatctctcacaatctcattcaaataggatcctccaggcctctgaatggcccgagctcatcagcagtgacaccacctcacatgtggagcccagctgagttcctgcagtacttgttgtctgtaccactcacctggcacttatttattattgttgtggaagacagactcaaagacagcctcccttcgtgatcctcacctcttggaattcatgcccttgtttggtcccctccccttgagtgtaagtgggatctgtgacttgcttctaatgaatggaataaggcaaaggtgatagggtgtcactctggcaactgtgttgcattgtatagaactcctccttgctggcccacccttttagagcccctcctaggagccaagagcagcttccagccaacaacaagcagaggccctcagtcttgtggctgcaagaacctgaattctgccaacaacccgagtgagcttggaagcagattcttccccaactgagccggataagaacctagtccagccaacaccttgattatagtcttgtgagtacctaagctgaggacccagtgaagctgtgccaaaatttcccacccacagaaacagtgtgacaataaatgtgtgtgtgtttttttgtt

SEQ ID NO: 195044 - DNA, 2006 bp, Homo sapiens
  Payload ID: 18501
  Gene Name: tripartite motif containing 40
  Uniprot ID: Q6P9F5
  ENST ID: ENST00000549728
  CDS Start-End: 307-1083
aggtgtatgaaaaataatttcaagtttaacaaacacaaggaaaccgcagggtccatgtcaaagctgatgagctatttctgaaactcgtgaagaattgtggtttgtgtggtctatgtcacggcacccttgagggagagtgggcaattgcctgaacttggaggctgtgtcctgtccccaggctgctccagggctgcctccttccgactgggccttcttatctgggactgttgagggcaacaggccttccgaagaccagtgaagaaggaggccctgcaaacaggaggctgacagggtaggaacgaggccatgatccctttgcagaaggacaaccaggaggagggtgtctgccccatctgccaggagagcctgaaggaggccgtgagcaccaactgcggacatctcttctgtcgagtgtgcctgacacagcatgtggagaaggcctcagcctctggggtcttctgctgccccctctgccggaagccctgttctgaggaggtgctagggacaggctatatctgccccaaccaccagaagagggtgtgcaggttctgtgaggagagcagacttcttctatgtgtggaatgcctggtgtcccctgaacacatgtctcatcatgaactgaccattgaaaatgccctcagccactacaaggaacgactcaatcgccggagcaggaagctcagaaaggacattgcagaacttcagcggctcaaggctcagcaggagaagaaactgcaggctctgcagtttcaggtagaccacgggaaccacaggctggaggctgggccggagagccagcaccaaaccagggaacagctgggtgccctccctcagcagtggctgggccagctggagcacatgccagcagaagcggccagaatccttgacatctccagggcagtaacacagctcagaagcctggtcattgatctggaaaggacggccaaggaattagacaccaacacactgaagaatgctggtgacttactgaacaggagtgctccacagaaattagaggttatttatccccagttggagaaaggagtcagtgaattgcttcttcagccccctcagaagctctgacctgttcatccctgggacacctcacttcaggctcacctcagcctcctctctctccttcctccaacctgtccaggcccccactgggtctacccagtgcatcttcgggcctgccagctcctgaacatgtcaccatttcttcatgtccacagtcatcacctgatgcctgaccctctgactcttggacgatagccagcctccttccaggacaggctcatgcttggggctgccactgtggaggtcggggcccatggtctccaggagcatttgtgaaatctccattttgcctgtaaactgatggtagtgcccatctctcacaatctcattcaaataggatcctccaggcctctgaatggcccgagctcatcagcagtgacaccacctcacatgtggagcccagctgagttcctgcagtacttgttgtctgtaccactcacctggcacttatttattattgttgtggaagacagactcaaagacagcctcccttcgtgatcctcacctcttggaattcatgcccttgtttggtcccctccccttgagtgtaagtgggatctgtgacttgcttctaatgaatggaataaggcaaaggtgatagggtgtcactctggcaactgtgttgcattgtatagaactcctccttgctggcccacccttttagagcccctcctaggagccaagagcagcttccagccaacaacaagcagaggccctcagtcttgtggctgcaagaacctgaattctgccaacaacccgagtgagcttggaagcagattcttccccaactgagccggataagaacctagtccagccaacaccttgattatagtcttgtgagtacctaagctgaggacccagtgaagctgtgccaaaatttcccacccacagaaacagtgtgacaataaatgtgtgtgtgtttttttgtt

SEQ ID NO: 195045 - DNA, 2006 bp, Homo sapiens
  Payload ID: 18501
  Gene Name: tripartite motif containing 40
  ENST ID: ENST00000548672
  CDS Start-End: 307-1083
aggtgtatgaaaaataatttcaagtttaacaaacacaaggaaaccgcagggtccatgtcaaagctgatgagctatttctgaaactcgtgaagaattgtggtttgtgtggtctatgtcacggcacccttgagggagagtgggcaattgcctgaacttggaggctgtgtcctgtccccaggctgctccagggctgcctccttccgactgggccttcttatctgggactgttgagggcaacaggccttccgaagaccagtgaagaaggaggccctgcaaacaggaggctgacagggtaggaacgaggccatgatccctttgcagaaggacaaccaggaggagggtgtctgccccatctgccaggagagcctgaaggaggccgtgagcaccaactgcggacatctcttctgtcgagtgtgcctgacacagcatgtggagaaggcctcagcctctggggtcttctgctgccccctctgccggaagccctgttctgaggaggtgctagggacaggctatatctgccccaaccaccagaagagggtgtgcaggttctgtgaggagagcagacttcttctatgtgtggaatgcctggtgtcccctgaacacatgtctcatcatgaactgaccattgaaaatgccctcagccactgcaaggaacgactcaatcgccggagcaggaagctcagaaaggacattgcagaacttcagcggctcaaggctcagcaggagaagaaactgcaggctctgcagtttcaggtagaccacgggaaccacaggctggaggctgggccggagagccagcaccaaaccagggaacagctgggtgccctccctcagcagtggctgggccagctggagcacatgccagcagaagcggccagaatccttgacatctccagggcagtaacacagctcagaagcctggtcattgatctggaaaggacggccaaggaattagacaccaacacactgaagaatgctggtgacttactgaacaggagtgctccacagaaattagaggttatttatccccagttggagaaaggagtcagtgaattgcttcttcagccccctcagaagctctgacctgttcatccctgggacacctcacttcaggctcacctcagcctcctctctctccttcctccaacctgtccaggcccccactgggtctacccagtgcatcttcgggcctgccagctcctgaacatgtcaccatttcttcatgtccacagtcatcacctgatgcctgaccctctgactcttggacgatagccagcctccttccaggacaggctcatgcttggggctgccactgtggaggtcggggcccatggtctccaggagcatttgtgaaatctccattttgcctgtaaactgatggtagtgcccatctctcacaatctcattcaaataggatcctccaggcctctgaatggcccaagctcatcagcagtgacaccacctcacatgtggagcccagctgagttcctgcagtacttgttgtctgtaccactcacctggcacttatttattattgttgtggaagacagactcaaagacagcctcccttcgtgatcctcacctcttggaattcatgcccttgtttggtcccctccccttgagtgtaagtgggatctgtgacttgcttctaatgaatggaataaggcaaaggtgatagggtgtcactctggcaactgtgttgcattgtatagaactcctccttgctggcccacccttttagagcccctcctaggagccaagagcagcttccagccaacaacaagcagaggccctcagtcttgtggctgcaagaacctgaattctgccaacaacccgagtgagcttggaagcagattcttccccaactgagccggataagaacctagtccagccaacaccttgattatagtcttgtgagtacctaagctgaggacccagtgaagctgtgccaaaatttcccacccacagaaacagtgtgacaataaatgtgtgtgtgtttttttgtt

SEQ ID NO: 195046 - DNA, 2006 bp, Homo sapiens; identical to SEQ ID NO: 195043
  Payload ID: 18501
  Gene Name: tripartite motif containing 40
  Uniprot ID: Q6P9F5
  ENST ID: ENST00000552119
  CDS Start-End: 307-1083

SEQ ID NO: 195047 - DNA, 2006 bp, Homo sapiens
  Payload ID: 18501
  Gene Name: tripartite motif containing 40
  ENST ID: ENST00000618891
  CDS Start-End: 307-1083
aggtgtatgaaaaataatttcaagtttaacaaacacaaggaaaccgcagggtccatgtcaaagctgatgagctatttctgaaactcgtgcagaattgtggtttgtgtggtctatgtcacggcacccttgagggagagtgggcaattgcctgaacttggaggctgtgtcctgtccccaggctgctccagggctgcctccttccgactgggccttcttatctgggactgttgagggcaacaggccttccgaagaccagtgaagaaggaggccctgcagacaggaggctgacagggtaggaacaaggccatgatccctttgcagaaggacaaccaggaggagggtgtctgccccatctgccaggagagcctgaaggaggccgtgagcaccaactgcggacatctcttctgtcgagtgtgcctgacacagcatgtggagaaggcctcagcctctggggtcttctgctgccccctctgccggaagccctgttctgaggaggtgctagggacaggctatatctgccccaaccaccagaagagggtgtgcaggttctgtgaggagagcagacttcttctatgtgtggaatgcctggtgtcccctgaacacatgtctcatcatgaactgaccattgaaaatgccctcagccactacaaggaacgactcaatcgccggagcaggaagctcagaaaggacattgcagaacttcagcggctcaaggctcagcaggagaagaaactgcaggctctgcagtttcaggtagaccacgggaaccacaggctggaggctgggccggagagccagcaccaaaccagggaacagctgggtgccctcccccagcagtggctgggccagctggagcacatgccagcagaagcggccagaatccttgacatctccagggcagtaacacagctcagaagcctggtcattgatctggaaaggatggccaaggaattagacaccaacacactgaagaatgctggtgacttactgaacaggagtgctccacagaaattagaggttatttatccccagttgaagaaaggagtcagtgaattgcttcttcagccccctcagaagctctgacctgttcatccctgggacacctcacttcaggctcacctcagcctcctctctctccttcctccaacctgtccaggcccccactgggtctacccagtgcatcttcgggcctgccagctcctgaacatgtcaccatttcttcatgtccacagtcatcacctgatgcctgaccctctgactcttggacgatagccagcctccttccaggacaggctcatgcttggggctgccactgtggaggtcggggcccatggtctccaggagcatttgtgaaatctccattttgcctgtaaactgatggtagtgcccatctctcacaatctcattcaaataggatcctccaggcctctgaatggcccgagctcatcagcagtgacatcacctcacatgtggagcccagctgagttcctgcagtacttgttgtctgtaccactcacctggcacttatttattattgttgtggaagacagactcaaagacagcctcccttcgtgatcctcacctcttggaattcatgcccttgtttggtcccctccccttgagtgtaagtgggatctgtgacttgcttctaatcaatggaataaggcaaaggtgatagggtgtcactctggcaactgtgttgcattgtatagaactcctccttgctggcccacccttttagagcccctcctaggagccaagagcagcttccagccaacaacaagcagaggccctcagtcttgtggctgcaagaacctgaattctgccaacaacctgagtgagcttggaagcagattcttccccaactgagccggataagaacctagtccagccaacaccttgattatagtcttgtgagtacctaagctgaggacccagtgaagctgtgccaaaatttcccacccacagaaacagtgtgacaataaatgtgtgtgtgtttttttgtt

SEQ ID NO: 195048 - DNA, 2006 bp, Homo sapiens
  Payload ID: 18501
  Gene Name: tripartite motif containing 40
  ENST ID: ENST00000614405
  CDS Start-End: 307-1083
aggtgtatgaaaaataatttcaagtttaacaaacacaaggaaaccgcagggtccatgtcaaagctgatgagctatttctgaaactcgtgcagaattgtggtttgtgtggtctatgtcacggcacccttgagggagagtgggcaattgcctgaacttggaggctgtgtcctgtccccaggctgctccagggctgcctccttccgactgggccttcttatctgggactgttgagggcaacaggccttccgaagaccagtgaagaaggaggccctgcagacaggaggctgacagggtaggaacaaggccatgatccctttgcagaaggacaaccaggaggagggtgtctgccccatctgccaggagagcctgaaggaggccgtgagcaccaactgcggacatctcttctgtcgagtgtgcctgacacagcatgtggagaaggcctcagcctctggggtcttctgctgccccctctgccggaagccctgttctgaggaggtgctagggacaggctatatctgccccaaccaccagaagagggtgtgcaggttctgtgaggagagcagacttcttctatgtgtggaatgcttggtgtcccctgaacacatgtctcatcatgaactgaccattgaaaatgccctcagccactacaaggaacgactcaatcgccggagcaggaagctcagaaaggacattgcagaacttcagcggctcaaggctcagcaggagaagaaactgcaggctctgcagtttcaggtagaccacgggaaccacaggctggaggctgggccggagagccagcaccaaaccagggaacagctgggtgccctcccccagcagtggctgggccagctggagcacatgccagcagaagcggccagaatccttgacatctccagggcagtaacacagctcagaagcctggtcattgatctggaaaggatggccaaggaattagacaccaacacactgaagaatgctggtgacttactgaacaggagtgctccacagaaattagaggttatttatccccagttgaagaaaggagtcagtgaattgcttcttcagccccctcagaagctctgacctgttcatccctgggacacctcacttcaggctcacctcagcctcctctctctccttcctccaacctgtccaggcccccactgggtctacccagtgcatcttcgggcctgccagctcctgaacatgtcaccatttcttcatgtccacagtcatcacctgatgcctgaccctctgactcttggacgatagccagcctccttccaggacaggctcatgcttggggctgccactgtggaggtcggggcccatggtctccaggagcatttgtgaaatctccattttgcctgtaaactgatggtagtgcccatctctcacaatctcattcaaataggatcctccaggcctctgaatggcccgagctcatcagcagtgacatcacctcacatgtggagcccagctgagttcctgcagtacttgttgtctgtaccactcacctggcacttatttattattgttgtggaagacagactcaaagacagcctcccttcgtgatcctcacctcttggaattcatgcccttgtttggtcccctccccttgagtgtaagtgggatctgtgacttgcttctaatcaatggaataaggcaaaggtgatagggtgtcactctggcaactgtgttgcattgtatagaactcctccttgctggcccacccttttagagcccctcctaggagccaagagcagcttccagccaacaacaagcagaggccctcagtcttgtggctgcaagaacctgaattctgccaacaacctgagtgagcttggaagcagattcttccccaactgagccggataagaacctagtccagccaacaccttgattatagtcttgtgagtacctaagctgaggacccagtgaagctgtgccaaaatttcccacccacagaaacagtgtgacaataaatgtgtgtgtgtttttttgtt

SEQ ID NO: 195049 - DNA, 2006 bp, Homo sapiens
  Payload ID: 18501
  Gene Name: tripartite motif containing 40
  Uniprot ID: Q6P9F5
  ENST ID: ENST00000616351
  CDS Start-End: 307-1083
aggtgtatgaaaaataatttcaagtttaacaaacacaaggaaaccgcagggtccatgtcaaagctgatgagctatttctgaaactcgtgaagaattgtggtttgtgtggtctatgtcacggcacccttgagggagagtgggcaattgcctgaacttggaggctgtgtcctgtccccaggctgctccagggctgcctccttccgactgggccttcttatctgggactgttgagggcaacaggccttccgaagaccagtgaagaaggaggccctgcaaacaggaggctgacagggtaggaacgaggccatgatccctttgcagaaggacaaccaggaggagggtgtctgccccatctgccaggagagcctgaaggaggccgtgagcaccaactgcggacatctcttctgtcgagtgtgcctgacacagcatgtggagaaggcctcagcctctggggtcttctgctgccccctctgccggaagccctgttctgaggaggtgctagggacaggctatatctgccccaaccaccagaagagggtgtgcaggttctgtgaggagagcagacttcttctatgtgtggaatgcctggtgtcccctgaacacatgtctcatcatgaactgaccattgaaaatgccctcagccactacaaggaacgactcaatcgccggagcaggaagctcagaaaggacattgcagaacttcagcggctcaaggctcagcaggagaagaaactgcaggctctgcagtttcaggtagaccacgggaaccacaggctggaggctgggccggagagccagcaccaaaccagggaacagctgggtgccctccctcagcagtggctgggccagctggagcacatgccagcagaagcggccagaatccttgacatctccagggcagtaacacagctcagaagcctggtcattgatctggaaaggacggccaaggaattagacaccaacacactgaagaatgctggtgacttactgaacaggagtgctccacagaaattagaggttatttatccccagttggagaaaggagtcagtgaattgcttcttcagccccctcagaagctctgacctgttcatccctgggacacctcacttcaggctcacctcagcctcctctctctccttcctccaacctgtccaggcccccactgggtctacccagtgcatcttcgggcctgccagctcctgaacatgtcaccatttcttcatgtccacagtcatcacctgatgcctgaccctctgactcttggacgatagccagcctccttccaggacaggctcatgcttggggctgccactgtggaggtcggggcccatggtctccaggagcatttgtgaaatctccattttgcctgtaaactgatggtagtgcccatctctcacaatctcattcaaataggatcctccaggcctctgaatggcccaagctcatcagcagtgacaccacctcacatgtggagcccagctgagttcctgcagtacttgttgtctgtaccactcacctggcacttatttattattgttgtggaagacagactcaaagacagcctcccttcgtgatcctcacctcttggaattcatgcccttgtttggtcccctccccttgagtgtaagtgggatctgtgacttgcttctaatgaatggaataaggcaaaggtgatagggtgtcactctggcaactgtgttgcattgtatagaactcctccttgctggcccacccttttagagcccctcctaggagccaagagcagcttccagccaacaacaagcagaggccctcagtcttgtggctgcaagaacctgaattctgccaacaacccgagtgagcttggaagcagattcttccccaactgagccggataagaacctagtccagccaacaccttgattatagtcttgtgagtacctaagctgaggacccagtgaagctgtgccaaaatttcccacccacagaaacagtgtgacaataaatgtgtgtgtgtttttttgtt

SEQ ID NO: 195050 - DNA, 3637 bp, Homo sapiens
  Payload ID: 18502
  Gene Name: tripartite motif containing 41
  Uniprot ID: Q8WV44
  ENST ID: ENST00000315073
  CDS Start-End: 711-2603
atcggctgtggggagtaccggctgcagtcggctgtgccgggagggtaggatggcgtctggccgatgcggtgatagcaccgaaagcagacggccgccaggcgctccccctaccccccgaagtttctccccagcggcgggggatgggggtaggcggttcctctgttctttctgcgttccccgcggcctcttaccacagagacgcgggcctccaccgtcctagccctcccgccctgttctctagtgcggactagagcgtctcctcgccatttcctgtcgccctggggccccgcggggaaaaagggggagtagcaggacagcggagggaagtcgcgagcttaggtggtgtgtagacgccggaagtgttgggaaggaggccggaagctaggggcggggccaggaagtgaggaggggcgggggtttatgaggagtccaagggagcattggggcagacttgtactcagagccacctgagggacttggcggtggcgcccagcactgtcccctcccctcgtagagacacggttgtcgtttgggagtagggaacactgtgttggggtgggttgtcggcaggacatctctctggctgctcttggggcgaggtgtggaggggcagggctgggggtggagccgggtcgccagggcgtcggtagggaagacccccgcccctcgcccccccaccgaacctctacactggctggctggacactaagatggctgccgttgccatgacacccaaccctgtgcagacccttcaggaggaggcggtgtgcgccatctgcctcgattacttcacggaccccgtgtccatcggctgcgggcacaacttctgccgagtttgtgtaacccagttgtggggtggggaggatgaggaggacagagatgagttagatcgggaggaggaggaggaggacggagaggaggaggaagtggaggctgtgggggctggcgcggggtgggacacccccatgcgggatgaagactacgagggtgacatggaggaggaggtcgaggaggaagaagagggtgtgttctggaccagtggcatgagcaggtccagctgggacaacatggactatgtgtgggaggaggaggacgaggaggaagacctggactactacttgggggacatggaggaggaggacctgaggggggaggatgaggaggacgaggaggaagtgctggaggaggttgaggaagaggatctagaccccgtcaccccactgcccccgcctccagcccctcggaggtgcttcacatgccctcagtgccgaaagagctttcctcggcggagcttccgccccaacctgcagctggccaatatggtccaggtgattcggcagatgcacccaacccctggtcgagggagccgcgtgaccgatcagggcatctgtcccaaacaccaagaagccctgaagctcttctgcgaggtagacgaagaggccatctgtgtggtgtgccgagaatccaggagccacaaacagcacagcgtggtgccattggaggaggtggtgcaggagtacaaggccaaactgcaggggcacgtggaaccactgaggaagcacctggaggcagtgcagaagatgaaagccaaggaggagaggcgagtgacagaactgaagagccagatgaagtcagagctggcagcggtggcctcggagtttgggcgactgacacggtttctggctgaagagcaggcagggctggaacggcgtctcagagagatgcatgaagcccagctggggcgtgcgggagccgcggctagtcgccttgcagaacaggccgcccagctcagccgcctgctggcagaggcccaggagcggagccagcaggggggtctccggctgctccaggacatcaaggagactttcaataggtgtgaagaggtacagctgcagcccccagaggtctggtcccctgacccgtgccaaccccatagccatgacttcctgacagatgccatcgtgaggaaaatgagccggatgttctgtcaggctgcgagagtggacctgacgctggaccctgacacggctcacccggccctgatgctgtcccctgaccgccggggggtccgcctggcagagcggcggcaggaggttgctgaccatcccaagcgcttctcggccgactgctgcgtactgggggcccagggcttccgctccggccggcactactgggaggtagaggtgggcgggcggcggggctgggcggtgggtgctgcccgtgaatcaacccatcataaggaaaaggtgggccctgggggttcctccgtgggcagcggggatgccagctcctcgcgccatcaccatcgccgccgccggctccacctgccccagcagcccctgctccagcgggaagtgtggtgcgtgggcaccaacggcaaacgctatcaggcccagagctccacagaacagacgctgctgagccccagtgagaaaccaaggcgctttggtgtgtacctggactatgaagctgggcgcctgggcttctacaacgcagagactctagcccacgtgcacaccttctcggctgccttcctgggcgagcgtgtctttcctttcttccgggtgctctccaagggcacccgcatcaagctctgcccttgattatcctgccacccgcaggggcccctctgtcagcacttggggggtgggtggtggagggtggcccgtaagtttgagggctcaaaggctcttcccactgcttgttactgtgttgcttcccactcccccttgaccccaggcccctgcttctccctctaggagcctaaagaaccctcctggcctccagctcagccttctctcacctactatgtctgtccaacaggtctgcatgggtccctgataatgagaacagctgcctggtcttctctcccagtctgcctagcccagccctgggactggaatttgagtaggggatgaggggaaattgtaatttcattccttaacttccttttccccacccctgctcttcaacctctttatcagttctgaggctggagggtttgggcaaggcaacatccccattccaattccattttctgatgcagattttagctgagggatttggaagccatttggggaggcaggctgggccaaagggtagagctgggtaataaatgtctattctcctggggaggagggattctaaactttccttccgtcctcaatttctacctccatagaccggccagaatttagcttcacttgagagagatctggaatggtcgccatgattgaaaccacgcaccattacatcatcattacattaattacatcaacataaattatttcttcccccttcccttttccagcactcaaccaaggagcaaagctcatcccaccccacacccctcccaggtctgctcactgccaggctcctctcccctttgttcagtggagctggcttttctcccagcccctttccatgcctttcactccatttggcaagctctgagggggagcctggggacgggtttgggtccccaggaggagagccttgggtataatctatttttctaggagcctcttgccttgtcacttgcagctttcgccctctgctttgatggctgaggtgaactcatgttctttgggaaaagggaaggcgtgctgtggaaataaaatgtttatttgcttctctt

SEQ ID NO: 195051 - DNA, 2696 bp, Homo sapiens
  Payload ID: 18502
  Gene Name: tripartite motif containing 41
  Uniprot ID: Q8WV44
  ENST ID: ENST00000351937
  CDS Start-End: 711-2267
atcggctgtggggagtaccggctgcagtcggctgtgccgggagggtaggatggcgtctggccgatgcggtgatagcaccgaaagcagacggccgccaggcgctccccctaccccccgaagtttctccccagcggcgggggatgggggtaggcggttcctctgttctttctgcgttccccgcggcctcttaccacagagacgcgggcctccaccgtcctagccctcccgccctgttctctagtgcggactagagcgtctcctcgccatttcctgtcgccctggggccccgcggggaaaaagggggagtagcaggacagcggagggaagtcgcgagcttaggtggtgtgtagacgccggaagtgttgggaaggaggccggaagctaggggcggggccaggaagtgaggaggggcgggggtttatgaggagtccaagggagcattggggcagacttgtactcagagccacctgagggacttggcggtggcgcccagcactgtcccctcccctcgtagagacacggttgtcgtttgggagtagggaacactgtgttggggtgggttgtcggcaggacatctctctggctgctcttggggcgaggtgtggaggggcagggctgggggtggagccgggtcgccagggcgtcggtagggaagacccccgcccctcgcccccccaccgaacctctacactggctggctggacactaagatggctgccgttgccatgacacccaaccctgtgcagacccttcaggaggaggcggtgtgcgccatctgcctcgattacttcacggaccccgtgtccatcggctgcgggcacaacttctgccgagtttgtgtaacccagttgtggggtggggaggatgaggaggacagagatgagttagatcgggaggaggaggaggaggacggagaggaggaggaagtggaggctgtgggggctggcgcggggtgggacacccccatgcgggatgaagactacgagggtgacatggaggaggaggtcgaggaggaagaagagggtgtgttctggaccagtggcatgagcaggtccagctgggacaacatggactatgtgtgggaggaggaggacgaggaggaagacctggactactacttgggggacatggaggaggaggacctgaggggggaggatgaggaggacgaggaggaagtgctggaggaggttgaggaagaggatctagaccccgtcaccccactgcccccgcctccagcccctcggaggtgcttcacatgccctcagtgccgaaagagctttcctcggcggagcttccgccccaacctgcagctggccaatatggtccaggtgattcggcagatgcacccaacccctggtcgagggagccgcgtgaccgatcagggcatctgtcccaaacaccaagaagccctgaagctcttctgcgaggtagacgaagaggccatctgtgtggtgtgccgagaatccaggagccacaaacagcacagcgtggtgccattggaggaggtggtgcaggagtacaaggccaaactgcaggggcacgtggaaccactgaggaagcacctggaggcagtgcagaagatgaaagccaaggaggagaggcgagtgacagaactgaagagccagatgaagtcagagctggcagcggtggcctcggagtttgggcgactgacacggtttctggctgaagagcaggcagggctggaacggcgtctcagagagatgcatgaagcccagctggggcgtgcgggagccgcggctagtcgccttgcagaacaggccgcccagctcagccgcctgctggcagaggcccaggagcggagccagcaggggggtctccggctgctccaggacatcaaggagactttcaataggtgtgaagaggtacagctgcagcccccagaggtctggtcccctgacccgtgccaaccccatagccatgacttcctgacagatgccatcgtgaggaaaatgagccggatgttctgtcaggctgcgagagtggacctgacgctggaccctgacacggctcacccggccctgatgctgtcccctgaccgccggggggtccgcctggcagagcggcggcaggaggttgctgaccatcccaagcgcttctcggccgactgctgcgtactgggggcccagggcttccgctccggccggcactactgggaggagcctaaagaaccctcctggcctccagctcagccttctctcacctactatgtctgtccaacagaccggccagaatttagcttcacttgagagagatctggaatggtcgccatgattgaaaccacgcaccattacatcatcattacattaattacatcaacataaattatttcttcccccttcccttttccagcactcaaccaaggagcaaagctcatcccaccccacacccctcccaggtctgctcactgccaggctcctctcccctttgttcagtggagctggcttttctcccagcccctttccatgcctttcactccatttggcaagctctgagggggagcctggggacgggtttgggtccccaggaggagagccttgggtataatctatttttctaggagcctcttgccttgtcacttgcagctttcgccctctgctttgatggctgaggtgaactcatgttctttgggaaaagggaaggcgtgctgtggaaataaaatgtttatttgcttctct

SEQ ID NO: 195052 - DNA, 1904 bp, Homo sapiens
  Payload ID: 18502
  Gene Name: tripartite motif containing 41
  ENST ID: ENST00000503114
  CDS Start-End: 1-1088
gcgccatctgcctcgattacttcacggaccccgtgtccatcggctgcgggcacaacttctgccgagtttgtgtaacccagttgtggggtggggaggatgaggaggacagagatgagttagatcgggaggaggaggaggaggacggagaggaggaggaagtggaggctgtgggggctggcgcggggtgggacacccccatgcgggatgaagactacgagggtgacatggaggaggaggtcgaggaggaagaagagggtgtgttctggaccagtggcatgagcaggtccagctgggacaacatggactatgtgtgggaggaggaggacgaggaggaagacctggactactacttgggggacatggaggaggaggacctgaggggggaggatgaggaggacgaggaggaagtgctggaggaggttgaggaagaggatctagaccccgtcaccccactgcccccgcctccagcccctcggaggtgcttcacatgccctcagtgccgaaagagctttcctcggcggagcttccgccccaacctgcagctggccaatatggtccaggtgattcggcagatgcacccaacccctggtcgagggagccgcgtgaccgatcagggcatctgtcccaaacaccaagaagccctgaagctcttctgcgaggtagacgaagaggccatctgtgtggtgtgccgagaatccaggagccacaaacagcacagcgtggtgccattggaggaggtggtgcaggagtacaaggccaaactgcaggggcacgtggaaccactgaggaagcacctggaggcagtgcagaagatgaaagccaaggaggagaggcgagtgacagaactgaagagccagatgaagtcagagctggcagcggtggcctcggagtttgggcgactgacacggtttctggctgaagagcaggcagggctggaacggcgtctcagagagatgcatgaagcccagctggggcgtgcgggagccgcggctagtcgccttgcagaacaggccgcccagctcagccgcctgctggcagaggcccaggagcggagccagcaggggggtctccggctgctccaggtgtgaagaggtacagctgcagcccccagaggtctggtcccctgacccgtgccaaccccatagccatgacttcctgacagatgccatcgtgaggaaaatgagccggatgttctgtcaggctgcgagagtggacctgacgctggaccctgacacggctcacccggccctgatgctgtcccctgaccgccggggggtccgcctggcagagcggcggcaggaggttgctgaccatcccaagcgcttctcggccgactgctgcgtactgggggcccagggcttccgctccggccggcactactgggaggagcctaaagaaccctcctggcctccagctcagccttctctcacctactatgtctgtccaacagaccggccagaatttagcttcacttgagagagatctggaatggtcgccatgattgaaaccacgcaccattacatcatcattacattaattacatcaacataaattatttcttcccccttcccttttccagcactcaaccaaggagcaaagctcatcccaccccacacccctcccaggtctgctcactgccaggctcctctcccctttgttcagtggagctggcttttctcccagcccctttccatgcctttcactccatttggcaagctctgagggggagcctggggacgggtttgggtccccaggaggagagccttgggtataatctatttttctaggagcctcttgccttgtcacttgcagctttcgccctctgctttgatggctgaggtgaactcatgttctttgggaaaagggaaggcgtgctgtggaaataaaatgtttatttgcttctc

SEQ ID NO: 195053 - DNA, 459 bp, Homo sapiens
  Payload ID: 18502
  Gene Name: tripartite motif containing 41
  ENST ID: ENST00000514219
  CDS Start-End: 1-349
ccaggacatcaaggagactttcaataggtgtgaagaggtacagctgcagcccccagaggtctggtcccctgacccgtgccaaccccatagccatgacttcctgacagatgccatcgtgaggaaaatgagccggatgttctgtcaggctgcgagagtggacctgacgctggaccctgacacggctcacccggccctgatgctgtcccctgaccgccggggggtccgcctggcagagcggcggcaggaggttgctgaccatcccaagcgcttctcggccgactgctgcgtactgggggcccagggcttccgctccggccggcactactgggaggtctgcatgggtccctgataatgagaacagctgcctggtcttctctcccagtctgcctagcccagccctgggactggaatttgaaccggccagaatttagcttcacttgagagagatctggaatggtc

SEQ ID NO: 195054 - DNA, 914 bp, Homo sapiens
  Payload ID: 18502
  Gene Name: tripartite motif containing 41
  ENST ID: ENST00000515499
  CDS Start-End: 341-914
tgaagacacacacggctgagacggccgggatagctctaggcaagcgcccttgtaggacaggcccggggacccctgccgcggccggctgagcggtgtccaggttctggagccggacttgtccaccgcagccgagtccgcaggtcctgtaatggcctagcatagttcacccacgagggttcgtggtttttggcgcgtttgatctgacatactcagaggcctgaccacccccctaggaagcgcgacgtccatctggagttttcccgcgagccgccttgagagcagggccaaactgcaggggcacgtggaaccactgaggaagcacctggaggcagtgcagaagatgaaagccaaggaggagaggcgagtgacagaactgaagagccagatgaagtcagagctggcagcggtggcctcggagtttgggcgactgacacggtttctggctgaagagcaggcagggctggaacggcgtctcagagagatgcatgaagcccagctggggcgtgcgggagccgcggctagtcgccttgcagaacaggccgcccagctcagccgcctgctggcagaggcccaggagcggagccagcaggggggtctccggctgctccaggacatcaaggagactttcaataggtgtgaagaggtacagctgcagcccccagaggtctggtcccctgacccgtgccaaccccatagccatgacttcctgacagatgccatcgtgaggaaaatgagccggatgttctgtcaggctgcgagagtggacctgacgctggaccctgacacggctcacccggccctgatgctgtcccctgaccgccggggggtccgcctggcagagcggcggcaggaggttgctgaccatcccaagcgcttctcggccgactgctgcgtactgggggcccagggcttcc

SEQ ID NO: 195055 - DNA, 450 bp, Homo sapiens
  Payload ID: 18502
  Gene Name: tripartite motif containing 41
  ENST ID: ENST00000617715
  CDS Start-End: 1-450
cttcaggaggaggcggtgtgcgccatctgcctcgattacttcacggaccccgtgtccatcggctgcgggcacaacttctgccgagtttgtgtaacccagttgtggggacggagaggaggaggaagtggaggctaccccgtcaccccactgcccccgcctccagcccctcggaggtgcttcacatgccctcagtgccgaaagagctttcctcggcggagcttccgccccaacctgcagctggccaatatggtccaggtgattcggcagatgcacccaacccctggtcgagggagccgcgtgaccgatcagggcatctgtcccaaacaccaagaagccctgaagctcttctgcgaggtagacgaagaggccatctgtgtggtgtgccgagaatccaggagccacaaacagcacagcgtggtgccattggaggaggtggtgcaggagtacaag

SEQ ID NO: 195056 - DNA, 2539 bp, Homo sapiens
  Payload ID: 18503
  Gene Name: tripartite motif containing 42
  Uniprot ID: Q8IWZ5
  ENST ID: ENST00000286349
  CDS Start-End: 192-2363
aatgccagcctatgagcttcctggtagggacaccagctgtgaagtcctcataacagccaacttcttgcaactttcaagctgacggcctcaggaatgggaggaaggactcctccactggagaactgatagcagtattctggtagaggaggcatcaagagtcctgggaggccggtggtaatcatgtaggcaccatggaaactgctatgtgcgtttgctgtccatgttgtacatggcagagatgttgtcctcagttatgctcctgtctgtgctgcaagttcatcttcacctcagagcggaactgcacctgcttcccctgcccttacaaagatgagcggaactgccagttctgccactgcacctgttctgagagccccaactgccattggtgttgctgctcttgggccaatgatcccaactgtaagtgctgctgcacagccagcagcaatctcaactgctactactatgagagccgctgctgccgcaataccatcatcactttccacaagggccgcctcaggagcatccatacctcctccaagactgccctgcgcactgggagcagcgatacccaggtggatgaagtaaagtcaataccagccaacagtcacctggtgaaccacctcaattgccccatgtgcagccggctgcgcctgcactcattcatgctgccctgcaaccacagcctgtgcgagaagtgcctgcggcagctgcagaagcacgccgaggtcaccgagaacttcttcatcctcatctgcccagtgtgcgaccgctcgcactgcatgccctacagcaacaagatgcagctgcccgagaactacctgcacgggcgtctcaccaagcgctacatgcaggagcacggctacctcaagtggcgctttgaccgctcctccgggcccatcctctgccaggtctgccgcaacaagcgcatcgcttacaagcgctgcatcacctgccgcctcaacctgtgcaacgactgcctcaaggccttccactcggatgtggccatgcaagaccacgtctttgtggacaccagcgccgaggaacaggacgagaagatctgcatccaccacccatccagccgcatcatcgagtactgccgcaatgacaacaaattgctctgcaccttctgcaagttctctttccacaatggccacgacaccattagcctcatcgacgcctgctccgagagggccgcctcactcttcagcgccatcgccaagttcaaagcagtccgatatgaaattgataatgacctaatggaattcaacatcttaaaaaacagctttaaagctgacaaggaggcaaagcgaaaagagatcagaaatggctttctcaagttgcgcagcattcttcaggagaaagagaagatcatcatggagcagatagagaatctagaagtgtccaggcagaaggaaattgaaaaatatgtgtatgttacaaccatgaaagtgaacgagatggatggtctgatcgcctactccaaggaagccctgaaggagactggccaggtggcattcctgcagtcagccaagatcctggtggaccagatcgaggacggcatccagaccacctacaggcctgacccacagctccggctgcactcaataaactacgtgcccttggactttgttgagctttccagtgccatccatgagctcttccccacagggcccaagaaggtacgctcctcaggggactccctgccctccccctaccccgtgcactcagaaacaatgattgccaggaaggtcactttcagcacccacagcctcggcaaccagcacatataccagcgaagctcctccatgttgtccttcagcaacactgacaagaaggccaaggtgggtctggaggcctgtgggagagcccagtcagccacccccgccaaacccacagacggcctctacacctactggagtgctggagcagacagccagtctgtacagaacagcagcagcttccacaactggtactcattcaacgatggctctgtgaagaccccaggcccaattgttatctaccagactctggtgtacccaagagctgccaaggtttactggacatgtccagcagaagacgtggactcttttgagatggaattctatgaagtcattacttctcctcctaacaacgtacaaatggagctctgtggacaaattcgggacataatgcagcaaaatctggagctgcacaacctgacccccaacacagaatacgtgtttaaagttagagccatcaatgataatggtcctgggcaatggagtgatatctgcaaggtggtaacaccagatggacatgggaagaaccgagctaagtggggcctgctgaagaatatccagtctgccctccagaagcacttctgagccccttcagagcaggaaacaacctcagactcatcacaaagtagacatatacacacacatatatgtatgtatatttttctcaccacattcttcaaggaggttgtagacaaatgtttccatgacctctcagctttccaacaggaatcttgtaagagctaataaaaggaaatacctga

SEQ ID NO: 195057 - DNA, 1682 bp, Homo sapiens
  Payload ID: 18504
  Gene Name: tripartite motif containing 43
  Uniprot ID: Q96BQ3
  ENST ID: ENST00000272395
  CDS Start-End: 137-1477
acagagtagctttgcaactggctttggggacttccgaaagctaccagcactgcactgtgagactctcatccctgagctgaattcatctgattcgacggcaagctttggtgagaacatagatatatttctgaggaaaatggactcagacttctcacatgccttccagaaggaactcacctgcgtcatctgtttgaactacctggtagaccctgtcaccatctgctgtgggcacagcttctgtaggccctgtctctgcctttcgtgggaggaagcccaaagtcctgcaaactgccctgcatgcagggaaccatcaccgaaaatggacttcaaaaccaatattcttctgaagaatttagtgaccattgccagaaaagccagtctctggcaattcctgagctctgagaaacaaatatgtgggacccataggcaaacaaagaagatgttctgtgacatggacaagagtctcctctgcttgctgtgctccaactctcaggagcacggggctcacaaacaccatcccatcgaagaggcagctgaggaacaccgggagaaactcttaaagcaaatgaggattttatggaaaaagattcaagaaaatcagagaaatctatatgaggagggaagaacagccttcctctggaggggcaatgtggttttacgggcacagatgatcaggaatgagtataggaagctgcatccggttctccataaggaagaaaaacaacatttagagagactgaacaaggaataccaagagatttttcagcaactccagagaagttgggtcaaaatggatcaaaagagtaaacacttgaaagaaatgtatcaggaactaatggaaatgtgtcataaaccagatgtggagctgctccaggatttgggagacatcgtggcaaggagtgagtccgtgctgctgcacatgccccagcctgtgaatccagagctcactgcaggacccatcactggactggtgtacaggctcaaccgcttccgagtggaaatttccttccattttgaagtaaccaatcacaatatcaggctctttgaggatgtgagaagttggatgtttagacgtggacctttgaattctgacagatctgactattttgctgcatggggagccagggtcttctcctttgggaaacactactgggagctggatgtggacaactcttgtgactgggctctgggagtctgtaacaactcctggataaggaagaatagcacaatggttaactctgaggacatatttcttcttttgtgtctgaaggtggataatcatttcaatctcttgaccacctccccagtgtttcctcactacatagagaaacctctgggccgggttggtgtgtttcttgattttgaaagtggaagtgtgagttttttgaatgtcaccaagagttccctcatatggagttacccagctggctccttaacttttcctgtcaggcctttcttttacactggccacagatgatcaggattaagaaaacttactgtttgggaactccatatacaagggagcccttcactgttgatacaaagaaatcatactgttcaggcttttttgtactttagtgtcacttcattttattgctattaaataaaaaatttgtaaaaggcaaaactttttgtacattttcttacaattaaaataatctcttatggaccattacctaaaa

SEQ ID NO: 195058 - DNA, 12964 bp, Homo sapiens
  Payload ID: 18505
  Gene Name: tripartite motif containing 44
  Uniprot ID: Q96DX7
  ENST ID: ENST00000299413
  CDS Start-End: 308-1342
ggaggctgagcgggcggcgcgacgcgggggccgacgggggcgccgggtggccgcgccggaagtgccttgcgcggcagaggaagcgcagggacagagcggagcaggccgagccggcggaaagggtctttgctgctgcgcccgggcaggggctgccgcggccccaggtcccgcttcgagacgcggcgcggtccaggcgggaggcgactccctaggaagggacccggggcgggaggaggaagtgaggccgcgcggaaggaaggcggcgagccccggggccccgaggccttggccgcgtcacagcacccacatggcctctggagtgggcgcggccttcgaggaactgcctcacgacggcacgtgtgacgagtgcgagcccgacgaggctccgggggccgaggaagtgtgccgagaatgcggcttctgctactgccgccgccatgccgaggcgcacaggcagaagttcctcagtcaccatctggccgaatacgtccacggctcccaggcctggaccccgccagctgacggagagggggcggggaaggaagaagcggaggtcaaggtggagcaggagagggagatagaaagcgaggcaggggaagagagtgagtcggaggaagagagcgagtcagaggaagagagcgagacagaggaagagagtgaggatgagagcgatgaggagagtgaagaagacagcgaggaagaaatggaggatgagcaagaaagcgaggccgaagaagacaaccaagaagaaggggaatccgaggcggagggagaaactgaggcagaaagtgaatttgacccagaaatagaaatggaagcagagagagtggccaagaggaagtgtccggaccatgggcttgatttgagtacctattgccaggaagataggcagctcatctgtgtcctgtgtccagtcattggggctcaccagggccaccaactctccaccctagacgaagcctttgaagaattaagaagcaaagactcaggtggactgaaggccgctatgatcgaattggtggaaaggttgaagttcaagagctcagaccctaaagtaactcgggaccaaatgaagatgtttatacagcaggaatttaagaaagttcagaaagtgattgctgatgaggagcagaaggcccttcatctagtggacatccaagaggcaatggccacagctcatgtgactgagatactggcagacatccaatcccacatggataggttgatgactcagatggcccaagccaaggaacaacttgatacctctaatgaatcagctgagccaaaggcagagggcgatgaggaaggacccagtggtgccagtgaagaagaggacacatgaaggcttgctacccccagtggaaaatcatcccctccccttgtgtgtatgtgacagcgtgtatgtaacggcttctgatttctgtgaaagctgctcagcaacaaacgtacttccaccagatgtgtccccagatccacagcaggcacatatctctccaagggatgaccagttttatgcttactgtgtgcttctcatcccctggttgtggtaggtcaaggaaaagagcccctttgatccaccaggagcaattaagaaaggtccttcaggtaatccctcaatggctgctttgaacttactcaggaaagccagcccccataatattgtattaccaaacagtatcgctttgttaggaaggatctggaataatcttgaagggaagtcagagttttctccctgcctattaacaaaaacccaattttgttcatattgaagcatgaaataaatgagagcaaggtagggccaaattaactcttgtggacagtccctaaaagtccagttctacatttgtgaaaattgtggtgccatgaattaagatggatgactggaaaaaggtgttggagaaagagttaaagatgaggaagagatatttttagtatatgaagttatccaggacttgatattcataattcagtgctgtggaaatgaaaaaaatgattgaagaggtggaacggaaatgaccttagggggaaaaaaaaggaccaaagaagtctgattaaaagttgaaatcagtatttctgaattcaaattgcttgaatttccaaaatagtcagtaaaggatctaatagaaccagaattatttgggtgaattctgcaggttttatgggcttgtcacaacgtgaagggctggaatgtatattaccaaatgggaatttccattgtaggtttttgctagtcccacccccattttagcctaatttggcttaaacgcagtatggggagaattgttcccattccatgtgttctgaattcagctcatctcccagcatatagatatatcctcctttaactccgaccagaacccttcttcctgtggcactccccacccatagaccttcagatcatctcccacaccctggatctcactctcctcttagtaacagagacactcctgaggttggacttccttgcttttctctacttccaaatcacaatttcttacaaccaagctttgtgctcccgagtaagcagggatgtactaggggaatgtaaaactgcaaacttaaaaacctgcatcttcttgaagcatcagttttacttaccaaatggtttagagtcataagatgacctatttttatataaaagttatattatagaataaaatgttcatacgcatagactgttaagataaaaaaataggaatcttgcaaggtaattcttatttgcaagtgggttatgtgttcactctcctctacctttatggtattttggtgttcacttacgaagcatacaactagaaccatatccaagcagactctgggttgctgttaacccagggcctagacttctagtgcctctgaggcagaaccaaaggagcctgcactgggggaaatcccttttcctgcctgcctgtctgcctgtgacctgtgtacgtattacaggctttaggaccagctgattgttatgcttgcaggatggttttgaaacagaaacaatacttgtttactgtaggaatcctatttatattatttttcagtcctgtgaatgctgtgaaaagatttattcctttgaggccaggaagctcccaggcatatatgcttctaggttaggattgtcctgactcactaaagatgccaggatattggggctgaggggagtttgaggtgttaaaaaaaaaaaaaaaaaagcatttttctctcaaactgatggccaagaaatggctaggacaattttggtgctttacctatctctgcaaagactggagaatttggcataccattaattacaaccaccaatcatatccaacaaaagtaccctaaaagaaggaccagtggccactctcgaaaaaatttaagtatcagaagattaaaaagattttaggatttggaagcttgtattgtctttccccaataatcattgtttgatctccaaatagtagccttatattagcaatagacagatcattggttctccatatctgatcatatgttactactttgaatcagtatttgggaaattcaagcatttatgcagtggatataaatggaaatataaaaatatttgccaacctgtctcagtaacttatcatatctctgtgatcctcaaggaaagcacttttgcttttacttagaaagcgtttcagatttgctttatagactcctgctgtcttcagtacctgataaaactttaaccagggaagcattaaacacagtgcagcagcttttgcccaggcttctaagttcctgccggcagcatttatcaatgtaagaactaggatgcttcctgcagtggcactaccttcccctagagctggagcatgctgcttggccttaagccccagcatgatgaggcttccctcctgccaggtcagtaaaagttagagagctcagaattgggtcttgcctgggtgcaggtggcagggtttgctgaaacccctaaagagaagtcaccaagggaggcaggtaatgaatgtttccagaatcagtcggatactcatagcaatttctggctatctttcaaatgttgaatttctggatgctgagagggactttgatttgatatcattaaatccaggacagtcccaagaagtgcttggagtctcggctctgacagcccaagaagggaaataacttgtattaaggaacaactatgagccaggccctgagctgtctcttagataataaaacagatggggagtggaagagtcatttgcttcaagttatacagctaggaaatactcaagccaaatcttgaacgcagctccccctaattctgtggacaggcactttgtaccacacaccatggtccacctaaaaacagaaggataaaaagacttcaggttttcccactgtgtgctgaccatcccaatttatgaatcttcttcaaaatgacatttcacagttatagttagggctcagaaatggcattgaggtagccttatttctcccctttagcagatgctttaagtacacattgctgacttgagcccacccccaggagttaggagaacatttcctttttcatgccatcttccataaataaggtgtttcttggccttcaaagatatagaactttgcagcagtagtaaaagtgaagggtgttctgctctctactcaactttatttgaaaatgtctgcagcttcactcctgtagaaaaggaaatcttcatattttagtaaacttagccgccagtgtactctgtgaggatgtggcaattcaaagtccagtgaatctggactctcttactgattcctggttttagtgtgtgtgtcgggggagtgtgtacctatatataaaggacaagtgtgatatgtgtgtatatgtatatacatacatacatgtccgcacacacacacacaatatttgagagctaaggaaaactcaaagcagccccttcattatcttgcgtactacttcaaagatttctgtcagccctaattacaagtgtcaccatatagttggggcttaggtacttgcttacaggaagagcaattccctagcaaaggtcattagctcctaaggcactgagtcaaagtgacagccctgaaggaaattgcactccagccctcctccaggatgtctaataagatgggaaacttggatgcccagccattttggtgacctgagagtctaactactccagttagacctaagggcacaaatgcagaattcatgaccttgtagttgtggcagggtctaggaagtcctctctccccaagtagaaaatattctcttgccattcctgaaattccacattcatataatggctgtgcaatacatgcttctcaataagaaaattaactgcacgtttactgtgtgctgatcacatcagatttttatgtttaaaaaaatctcattatggattgagtccagcccagctctaagagaaaaagaaggcccatatgggagacttcagtctcattattattgcctttatccagcagtgcttatgaagccccctaccctgtcccattccagaaaccataagactcaggcagttcttgattctggaggcctgcctggtaagataagatagtataatttggaactgagaacataccagaaacagcagaacgagggccagagcagaaaaatgaaaataagtggagacacttatggatacattggtgcaaaaaaagccacggagcccatactgggcttgatatgactttgaggggacagcagattaatacttaatgagggttaaacctgaccagtctttctacagtgacaggccacactgcatgaatggggagaaccaatgaatccattgtcctctgcctattttcctgtgcacagtcacattccctccttaggaatcttccccttccaccctttacattaaacaagggaacactgaatctttcaagggaattacacgtttgggttaatgtttcagtatatcattttcatactgtaaattattttgtaagagagatttactgctatcccaggatgttcggacttggtgcccctgtgcatttggaaatcaataaactattactggaaatgccatttgtctctcagagttgtgcacaaaggaccctgcaaggtgtaaatatttatgacgagctgcatacttgactgtggtaatgctggagatgatggtgttttggttactagatgtgggagtctaatttactcctgacttttccacagtgccttaggagagagctctgggaagtggcaaaagaacagacttaagatcattattatttagtgataagttttctcctcaaagtaaaatgatccaggcctagattacattttatgagcaacttagattataacctaaagaatacttggtgccaaattatgttttcaaataacattaaagttttagaatttggatgaactagaaggaaggtaaaattgtaatttttgccatattttctagaaaaaaaaatgtcttttagagcaaattacagttaggccaacaaaatctttgttttgtgaaactttagaaatacatatttgcatgtaattgatgaaaacatagaatgagttgtaaatgaagcaattccaagctggtttgaaggaccagaggttgcattgaaatcagaagtcatatactcagaggccttcaggagccaaatgtgaagactcaagatggtagatactgtgtgaattagaaaataccaagccctgcctaaatgcattaaaatttaatgtttaaaaatcctaaaacccaccagcaggtgtatctggagggacagtttgtggactctcctctaaattttcttttaacacatttatcttcatcagacccttttagttagctagggactgtgtgagaaccttgagaaaattgtccaagagagggagataagtcactcaaggtcacccaacaagccaggctggtaaagcccaggacagcagactctctgtctccgagagcaatcattaggccctacttcctcttccccagttgcggaggacactgctgcctggtggggtggcactgcctgccactgtagcacttaggagtcttcagtgttttaacaaaccacaatgtgtttggaggttttcttccctgcttcctggtgccagtatctcaacaccacatccattgccccagccctttcttgttttatctttccctctgaaagctacaactctatattttattttattactctttgtttggtccaacatggccccatttcctttatactcataaaaaggtagaatttcagcttgtctggaatatctcctggccttcacaaggcaccagagttagagacacccaacagaaagtcgtaataagagaagatgtcacagaaatagaaacaaaagcaaaagactgcttgaagtcagtaacagactgcactaagtgtctgtgcttgttaactattgtaatctccaggtttaaatcattcatttatgttaataagagctgtcacttagctctttctctgggccaggtactctcctgttgtttttcacattatcataatagtaacagcaccaatactatcattccccactttgttgctcaggaatcaaatttagagaattaagtactgtgaccacggttacaccctaataagcgggaagccagaatttaaacccaggtctagcagacttcacagcctctttccttaatctcttctctcctagctgcactgattccatcttgtattggtgaataacaacactgatccccctacaactacccccacacatgtacagtatggccttggggcaaaggagtttgccttttgcaaagaaggtcttgctttgtatagcctgtaaaatgcaatgtacagtgagggaaagaaagtctaagggtagcagtcaaatcttctggcctgaaactgtacttttggaagggagaactgttagacttgctttatcttctttattccaaggccataaataagaaaatcaacgagaggcaaaaccatgtcttcttttgctatagcgttagaatcctgaaagtcagccagctctgacactgagtctgtgatttaattaaacatgttgaaggctctccaacagcttgacgtcaggccagcttcatattcttggaaagggacaacagcaaaaggagcttatctgttttaaagttcacttactgagttcagctgtcacggccacagcataccatttgccttataaaaatggcccacaaccttcacaatattttaggattcatggcaactcatttacctagggcttagccacctgatagctttacctatccctatttcctgaacacaaaatctaaaccagtggtttgacaatgagtaactgagacagaactagaaaaatctagaacctctgctgaacccatcaaaagtgactgagaattaagaagtaagcaaacaaggcttccaaccaattgaaataaataccatgaagcaaacgcataagacaaaggccatacatctagtcatcaggcacctcctcagaacctatttgctcttccttcacacatatttctaactgtaaaggaaagaaacagacttttagaggaaacaagaaggaaaaaggaggacagcaatagagaaaatggaaattttgagtagactgcaaagctccaaagccctgatatatgggttatttagtgtcaaaaacagtctatacacatctcaatctttaagagcctcactgtatcatgggacaatattctatttaaaatgatgaccctgtgcaccatacataaaaaaactatgcttagaagacaaaaatatgtatatcaaacattttagaaatatttacatcccaatggttaaaaaaaaaaacttttaggaattaaaaggaataaacctttgaccatccagaatatttagctaaatcaaacagtgtatatccccctagctgacttttattgtttcatgagcctctggtgttcagagagtttttttcacagctttgtaagtgactttcatgctacagtgctttgcatataatggcatgaacagtggaggtgccaactttccaatgtgatgaataaaactaataactagaatacagatcaaattctgttacaacaaatactgctaccataaaagtcacttaagcatccctgttagttctaagcccctgtcgattgcccatttattttaggcaatagtcattcaacaaaattggagcataataaaaagaaactggacctcagcgcaagttgagtgttacacaatttaacctgtaataacaggttctcacttgtatttctccagctctttgctgtaagaagaataaacgttatgtagatataataccagcgtgacagcttgtggttggtggtttctagaagaaataattcagaagcaaaagacacatgaagttatgtggcagttcctcactagggaatttggtctccagggccacttttgaccttaatccatgttggagccatcaatcaaagaattgcttgcatctaataatggtgtaatgccaatactaagccctggaacgaagataggattcatttctcatggattattgagcactctggggtaacctggccctgatctgatgacgctaagatttaaaaacccagatgcatgtgactagaactatcttttctcccatgatgcactgctttcaacactgcatgactgtaaaaacatgtgccacgctgattatatatagagatggtctaaatcagctgcatcccatttggtacccaggcaaggatttttccatacctatctttttgctggtggtaatgatgagttttgtcacttgctataacattctctgtccgtcttttttcttttatgtaaatacttttgtgacttcattgtaaccagcattttgtaatactcttaacagcagaggggattaaatcatgattcacttctgaacagtacaatcagcagtaggaaaacgaggagggagggagagggaaattgtccaccacttcccaatgataatgcctggctcggaccccagattcacatcatacttgaagttcataaattctgggcactgctcagcttgaggaggcaggcattgctccttcatatttcagggtgagacaaatgctctgttgaagccatgccactacaggatacattcacctctgcttgctttcctccctaagccagagtgtagttaaacatttatatgtcccaggccaggagatcaaattaagaggaggttagctactttccctggctcttaaaaacatttgagtccaagtatggttctctggcttgagggtggccatttgttgcctcactgtttttattaggacatctggagattagaggtgttaattggaagtaacttttctatatttggtttctctccacacattatgagaccttttagacccagttggatggctgtatcctagtatgaaattcagcttctaagtaggaagaactatgatagaggaacaagattgctctttgacttggtgatagtagggcaatagggagtgtcagtagggtagtttcaggtggggaggatgacaaaccactgataacaataaaaatgggtatttctcaacactcaagccaatttcccatttgataacaagtaggttctgatctattttccccaaattaatattttccctggaagattctgacctgtctgatcaaataaaggcattcctctgagagtatacctagcccacttgtggccaaattatacttgactgttatgtactcaaaacaagctttcctgttaatctctttctcttacctctattatgaggacaagacgtggaagaattaggtcaccggggcatctgccattgcatatgtttaagtggtataaagaagccaggattcctagaatggtctgtcttttgccatttctgggacaatgagaaaatccatctggagtgtttatgcccctctgaatagccaagtcatgggcttgtttgctttcagtcactgccttcagaaaaagacaattttacaatgacttacttctaataatcactgaaacagcctcatgaggacatgcaaaactgctgtctatcttcagacctggcccattgtcaaatggcagacttgcagagcaaataagggacctggcctagttcacaaggcagtcagaagtgatccaaagttcaggctccccctcccttttatcactccaccctgcctctactcctccgcctcctattcttccggcctttccatctggaaaccatgagcctcatggattccaggcacaaattctcagatttcagatgtttgggaaatttctcagcttgggtcattcttcaagagtaagaaattgaatttgtgagaaaaaaaaacagctgagactgtttcacagaagagaaaataaataaggtgtggtgcgtatccatcctcttcccaactcagctccaaaaccacacacaatgtctaacttcaaaaagagtatttagatcccccctgggaaggaacagaatggaaaaacaatctccactcataaaaacacttttctgccttctacagtataaacacaactggcatcagataatacaatgtaattgattttatgtgtgtaattggggaacagaagggtctctagagggtagacctaagagtaatggaatggagtgaaaagtaaaatttagactaaattgttgggaggaaactgttaacattgtgaaccacttgaccctagtgttgcatcttcacaaaaaagagcaatgtgccgtcttctgtctttggaaaatgggacaagcttgctcctgatactaggttttagaagcatacagacttggttttagtactggctttgttctttactaactctgaacaattaaatgagcagatggtctacagggcttagtacagtgcctgacacatagtaagcacttagaaatggtagcttctgactgttgtgctggagtcctgttagagattcagtagatggagccaccttcatgttgcccctcactgagctgctctgctcacctctagatgctccccatggctgtttcatagccctctgtaccacatccccatgtactttttcatatcaacggtaagtacctcaaattaccgtatgtatttacttgttcataaggttgatgtctgtaactctttgaaggttgtattagtcgtttgctcctatattactaatgatgacaaagtcgcctgacagagtagatgttcaaatttatggacttaaactgactgacatcttgataatgcccatatccagaggtactccagatattatatcttcatgcagaaaactgaaagatacctttagctacatctaccccagaatgagtgtccaaagcaggtggcaccaccaaaaggcaccttcttttcccatgaaaagagggaagagagttgagaagcctcactcccatccctgctctgccactgacaagttgtgtggcatttggcacatcatgttctctctctacatgcgcctaaaatgacgggtagggtcagagacattggaggatctctcttttctcttccacctctaacacggtaagatcttagcaaagtaaaaaggacagtgataacagaaaaattgttcctctaagagtcccaagtcatcttttttctctccgtgtgtgttagcatttgtgtgtgtctgtgggtgtgtatgcatgtgtgtggaagctatacaaggaaagctgaatccatatgtagacttcatggagactagtactgctccaaatgtgcacaagccatgtgatatggtttgcctctgtgtccccacccaaatctcatgttgaaatgtaatccccaatgctggaggtgggacctggtgggaagattggatcatgggggagttttctcatgatttaacaacatccgccctttgttgtcatgatagtgagttcttgtgagatctggttgtttaaaaatatgtgacacctccccccaccttccttctgctctggccatgtaaagtgctcactccccctttgccttccaccatgattgtaagtttcctgaagcctccctagaagctgagcagatgccagcatcatgcttgctgtgcagcctgcagaactgtgagccaattaaacctctttatgaatta

SEQ ID NO: 195059 - DNA, 3515 bp, Homo sapiens
  Payload ID: 18506
  Gene Name: tripartite motif containing 45
  Uniprot ID: Q9H8W5
  ENST ID: ENST00000256649
  CDS Start-End: 528-2270
gggccgaggcgcgggagaggcggtggacaccgagaagcccgccggcggcttgcaattccctcacccggcgcgcgcctttcgcagagggaaggagcaagagggcccctacctcatcgtgcgcgggtggggtcggcgcttgtcgcgtgtggcgcgcagtggggcgggcggcgggaggggggtggcagtggagggagcgagaggtgcaggggtgactttgttggcagcaggactagctggagagctagacctggaagcgcatccggggaggacttgcggggcagaggagggcgtgggcgtgtctggtgtgggatgcagtggaaaggagggggccctcctgagtagatctgtgggtgattccttcgaggacgcctcgtcttcccgtctgcccttttatttgtcagcgagggagtccccatggtctctgttcaagttctggagactttctctttgggtgggcttaatcacctgctactaaatcgtagaactgcccagggccctttctaatattggtcacaaacgtgaggagtatgtcagaaaacagaaaaccgctgctgggctttgtaagcaaactcactagtgggactgcacttgggaactcaggcaagactcactgccccctgtgcttggggcttttcaaagcccccaggctcttgccttgtttgcatacagtttgcaccacgtgtctggagcagctggagcccttctcagtagtggacatccgagggggagactctgacacaagctctgaggggtcaatattccaggaactcaagccacgaagtctgcagtcgcagatcggcatcctttgtcctgtatgtgatgctcaggtggacctgcccatgggtggagtgaaggctttaaccatagaccacctggccgtgaatgatgtgatgctggagagcctacgtggggaaggccagggcctggtgtgtgacctgtgcaacgacagggaagtagagaagaggtgtcagacctgcaaagccaacctctgccacttctgctgccaggctcataggcggcagaagaaaacgacttaccacaccatggtggacctaaaagacttgaaaggctacagccggattgggaagcccatcctgtgtcctgttcaccctgcagaggaactgaggctgttctgtgagttctgtgaccggcccgtgtgccaggattgtgtggtgggggagcatcgggaacacccctgtgacttcaccagcaatgtcatccacaagcatggggactctgtgtgggagctcctcaaaggtactcagccccacgtggaggccctggaggaagccctggctcagatccacataataaacagtgccctccagaagcgagtggaggcagtggcagctgatgtccggacattctcggagggctacattaaggccattgaggagcatcgggacaagctgctgaagcagctggaagacatacgggcccagaaggaaaattccctgcagctgcagaaggcccagctggaacagttactggcagacatgcggactggagtggagttcaccgagcacttgctgaccagcggctcagacttggagatcctcatcaccaagagggtggtggtagaacggctcaggaagctgaacaaagttcaatatagcacccgtcctggagtaaatgataagatacgcttctgtcctcaggagaaagcaggccagtgccgtggctatgaaatttatggtacgattaataccaaagaggttgatccagccaaatgtgtcctacaaggagaagacctccacagagcccgggagaaacagacggcctctttcaccctgctttgtaaggatgccgcaggagaaatcatgggcaggggaggagacaacgttcaagttgccgttgtccctaaagataagaaagacagcccagtcagaacaatggtccaggataacaaggatgggacatactacatttcctacacccccaaggaacctggcgtctatactgtgtgggtctgcatcaaagaacagcatgtgcagggctcgccattcactgtgatggtgaggagaaagcaccgcccacactcaggcgtgtttcactgctgcaccttctgctccagcgggggccagaaaaccgctcgctgcgcctgtggaggcaccatgccaggtgggtacctaggctgtggccatggacacaaaggccacccaggtcatccccactggtcatgctgtggaaaatttaatgagaaatctgaatgcacatggacaggtgggcagagcgcaccgaggagtctacttaggactgtggctctctgatgggtttgtgctcagccttttaaagctgcaggcagcaccacttgagatttccagaggacccagaccttcgttcattctaaagagactgatagaattaaaaacaaagtgccttatcttgcactggagttcaagtgctcttttgttagttattcactgattgtacttgtggatggttgagcacaaaaaaccacctctacatttctcttaaaggtaggttggcaacgttctttttctaccacaggatactccttttcattttgtacagtatggaggtatctattccattggcactgaagggtctaggtagtttagttcctttctgatataaccctttttttttcttttttttttttttttaaagacagagtctcactctgtcacccaggctggagtgcagtggcatgatctcggctcactgcaacctctgcctcccggttcaaatgattctcgtgccttggtgtcccgagtagctgggattacaggttcccccccaccttcccccacacccagctaatttttgtgtttttagtagagacggggtttcaccatgttggccaggctggtctcaaactcctgacctcgtgatccacctgcctcggcctcccaaagtgctggggttacaagcatgagccaccacacctggcctattatgacctttttcatttttctctgagctacacattatttagatatttcccctagagattagaaacctcctttcatcctgtccactttttgttagcatactttcattggatttactggtacatgttttgtgatcatgataatgtgatcttgttttggtggtgtccccctactccgtctctatgccatgacagccttctgccccaaagcctggaagattactctttggtcaagggcatacaaatagaaagttaataaaggggaatggtgttgaaatagaacctcatacatttattacagttctacttatacagaaaatctagacaccttcatccttctcacagctctgttttttagtagagtagtctttagagtagtcttcactgttatctatatacctagaaagttaactgggagctttgactcttactgtgccttcactcatagtgtgccttcttagctgctggagaatttggggagaggatgtacacagcactggtgcctcagccctgccaaggtcttcactgtatatattttgtgtgttcttctgaaactcttgatttcttatatggcaataaactcagcatgtattaaatataa

SEQ ID NO: 195060 - DNA, 2415 bp, Homo sapiens
  Payload ID: 18506
  Gene Name: tripartite motif containing 45
  ENST ID: ENST00000369461
  CDS Start-End: 724-2295
gttacacaggactgtggaatcccgggtgacattcaactccttaggtcatctgcactccccccggaccggaaaacaaagccttcccgagcccgacaaggagggtggcgctccctggcccggccgaagtaagccctccattcgacacctcggctccacggtctcccgaaccggtccccgtaacgcgagcctgagatgccctcacccccgaaaaatacccaaagtcggggagccgcgggagtgcttgtacccagcacgctaggcctgagggacctgtgagctacagtaagcgcctgaggacagaggggagcctcgcagcctcaaacccgcgtggaggagaaacgtctggcgcccccgagcggccgagacctcgggagcccgaaaaacgtctcccactcccagcgcagagccaactgacagtgccatccaccaatgggagaacccagtctgcgttcgtgggacgagtccgagggcagaaagaaggccgtcccggcgccaaatcagcgtggctttttaagaggtcctgaggcctctctggtcaccacagagagagggacagtccctgtgaaacggtgacgctgactacactatgccgctcgctccgagccttggccttttcctcccgccgcactctaagcccttcggccgccccgcccacggccttgtcaggtcccgccccccgcgtgagtggactggcgaagatgtggaatttccaaaacttattggatgcttagtggcgtcactctggagggcggcggggcccggagcggcgagggccgccgctctcggacggaactcaagccacgaagtctgcagtcgcagatcggcatcctttgtcctgtatgtgatgctcaggtggacctgcccatgggtggagtgaaggctttaaccatagaccacctggccgtgaatgatgtgatgctggagagcctacgtggggaaggccagggcctggtgtgtgacctgtgcaacgacagggaagtagagaagaggtgtcagacctgcaaagccaacctctgccacttctgctgccaggctcataggcggcagaagaaaacgacttaccacaccatggtggacctaaaagacttgaaaggctacagccggattgggaagcccatcctgtgtcctgttcaccctgcagaggaactgaggctgttctgtgagttctgtgaccggcccgtgtgccaggattgtgtggtgggggagcatcgggaacacccctgtgacttcaccagcaatgtcatccacaagcatggggactctgtgtgggagctcctcaaaggtactcagccccacgtggaggccctggaggaagccctggctcagatccacataataaacagtgccctccagaagcgagtggaggcagtggcagctgatgtccggacattctcggagggctacattaaggccattgaggagcatcgggacaagctgctgaagcagctggaagacatacgggcccagaaggaaaattccctgcagctgcagaaggcccagctggaacagttactggcagacatgcggactggagtggagttcaccgagcacttgctgaccagcggctcagacttggagatcctcatcaccaagagggtggtggtagaacggctcaggaagctgaacaaagttcaatatagcacccgtcctggagtaaatgataagatacgcttctgtcctcaggagaaagcaggccagtgccgtggctatgaaatttatggtacgattaataccaaagaggttgatccagccaaatgtgtcctacaaggagaagacctccacagagcccgggagaaacagacggcctctttcaccctgctttgtaaggatgccgcaggagaaatcatgggcaggggaggagacaacgttcaagttgccgttgtccctaaagataagaaagacagcccagtcagaacaatggtccaggataacaaggatgggacatactacatttcctacacccccaaggaacctggcgtctatactgtgtgggtctgcatcaaagaacagcatgtgcagggctcgccattcactgtgatggtgaggagaaagcaccgcccacactcaggcgtgtttcactgctgcaccttctgctccagcgggggccagaaaaccgctcgctgcgcctgtggaggcaccatgccaggtgggtacctaggctgtggccatggacacaaaggccacccaggtcatccccactggtcatgctgtggaaaatttaatgagaaatctgaatgcacatggacaggtgggcagagcgcaccgaggagtctacttaggactgtggctctctgatgggtttgtgctcagccttttaaagctgcaggcagcaccacttgagatttccagaggacccagaccttcgttcattctaaagagactgatagaattaaaaacaaagtgccttatcttgca

SEQ ID NO: 195061 - DNA, 3495 bp, Homo sapiens
  Payload ID: 18506
  Gene Name: tripartite motif containing 45
  Uniprot ID: Q9H8W5
  ENST ID: ENST00000369464
  CDS Start-End: 562-2250
ggtgtgaggaggggccagagcccgcgggcgtcccgggccgaggcgcgggagaggcggtggacaccgagaagcccgccggcggcttgcaattccctcacccggcgcgcgcctttcgcagagggaaggagcaagagggcccctacctcatcgtgcgcgggtggggtcggcgcttgtcgcgtgtggcgcgcagtggggcgggcggcgggaggggggtggcagtggagggagcgagaggtgcaggggtgactttgttggcagcaggactagctggagagctagacctggaagcgcatccggggaggacttgcggggcagaggagggcgtgggcgtgtctggtgtgggatgcagtggaaaggagggggccctcctgagtagatctgtgggtgattccttcgaggacgcctcgtcttcccgtctgcccttttatttgtcagcgagggagtccccatggtctctgttcaagttctggagactttctctttgggtgggcttaatcacctgctactaaatcgtagaactgcccagggccctttctaatattggtcacaaacgtgaggagtatgtcagaaaacagaaaaccgctgctgggctttgtaagcaaactcactagtgggactgcacttgggaactcaggcaagactcactgccccctgtgcttggggcttttcaaagcccccaggctcttgccttgtttgcatacagtttgcaccacgtgtctggagcagctggagcccttctcagtagtggacatccgagggggagactctgacacaagctctgaggggtcaatattccaggaactcaagccacgaagtctgcagtcgcagatcggcatcctttgtcctgtatgtgatgctcaggtggacctgcccatgggtggagtgaaggctttaaccatagaccacctggccgtgaatgatgtgatgctggagagcctacgtggggaaggccagggcctggtgtgtgacctgtgcaacgacagggaagtagagaagaggtgtcagacctgcaaagccaacctctgccacttctgctgccaggctcataggcggcagaagaaaacgacttaccacaccatggtggacctaaaagacttgaaaggctacagccggattgggaagcccatcctgtgtcctgttcaccctgcagaggaactgaggctgttctgtgagttctgtgaccggcccgtgtgccaggattgtgtggtgggggagcatcgggaacacccctgtgacttcaccagcaatgtcatccacaagcatggggactctgtgtgggagctcctcaaaggtactcagccccacgtggaggccctggaggaagccctggctcagatccacataataaacagtgccctccagaagcgagtggaggcagtggcagctgatgtccggacattctcggagggctacattaaggccattgaggagcatcgggacaagctgctgaagcagctggaagacatacgggcccagaaggaaaattccctgcagctgcagaaggcccagctggaacagttactggcagacatgcggactggagtggagttcaccgagcacttgctgaccagcggctcagacttggagatcctcatcaccaagagggtggtggtagaacggctcaggaagctgaacaaagttcaatatagcacccgtcctggagtaaatgataagatacgcttctgtcctcaggagaaagcaggccagtgccgtggctatgaaatttatgacctccacagagcccgggagaaacagacggcctctttcaccctgctttgtaaggatgccgcaggagaaatcatgggcaggggaggagacaacgttcaagttgccgttgtccctaaagataagaaagacagcccagtcagaacaatggtccaggataacaaggatgggacatactacatttcctacacccccaaggaacctggcgtctatactgtgtgggtctgcatcaaagaacagcatgtgcagggctcgccattcactgtgatggtgaggagaaagcaccgcccacactcaggcgtgtttcactgctgcaccttctgctccagcgggggccagaaaaccgctcgctgcgcctgtggaggcaccatgccaggtgggtacctaggctgtggccatggacacaaaggccacccaggtcatccccactggtcatgctgtggaaaatttaatgagaaatctgaatgcacatggacaggtgggcagagcgcaccgaggagtctacttaggactgtggctctctgatgggtttgtgctcagccttttaaagctgcaggcagcaccacttgagatttccagaggacccagaccttcgttcattctaaagagactgatagaattaaaaacaaagtgccttatcttgcactggagttcaagtgctcttttgttagttattcactgattgtacttgtggatggttgagcacaaaaaaccacctctacatttctcttaaaggtaggttggcaacgttctttttctaccacaggatactccttttcattttgtacagtatggaggtatctattccattggcactgaagggtctaggtagtttagttcctttctgatataaccctttttttttcttttttttttttttttaaagacagagtctcactctgtcacccaggctggagtgcagtggcatgatctcggctcactgcaacctctgcctcccggttcaaatgattctcgtgccttggtgtcccgagtagctgggattacaggttcccccccaccttcccccacacccagctaatttttgtgtttttagtagagacggggtttcaccatgttggccaggctggtctcaaactcctgacctcgtgatccacctgcctcggcctcccaaagtgctggggttacaagcatgagccaccacacctggcctattatgacctttttcatttttctctgagctacacattatttagatatttcccctagagattagaaacctcctttcatcctgtccactttttgttagcatactttcattggatttactggtacatgttttgtgatcatgataatgtgatcttgttttggtggtgtccccctactccgtctctatgccatgacagccttctgccccaaagcctggaagattactctttggtcaagggcatacaaatagaaagttaataaaggggaatggtgttgaaatagaacctcatacatttattacagttctacttatacagaaaatctagacaccttcatccttctcacagctctgttttttagtagagtagtctttagagtagtcttcactgttatctatatacctagaaagttaactgggagctttgactcttactgtgccttcactcatagtgtgccttcttagctgctggagaatttggggagaggatgtacacagcactggtgcctcagccctgccaaggtcttcactgtatatattttgtgtgttcttctgaaactcttgatttcttatatggcaataaactcagcatgtattaaatataa

SEQ ID NO: 195062 - DNA, 677 bp, Homo sapiens
  Payload ID: 18506
  Gene Name: tripartite motif containing 45
  ENST ID: ENST00000497970
  CDS Start-End: 1-314
atactgtgtgggtctgcatcaaagaacagcatgtgcagggctcgccattcactgtgatggtgaggagaaagcaccgcccacactcaggcgtgtttcactgctgcaccttctgctccagcgggggccagaaaaccgctcgctgcgcctgtggaggcaccatgccaggtgggtacctaggctgtggccatggacacaaaggccacccaggtcatccccactggtcatgctgtggaaaatttaatgagaaatctgaatgcacatggacaggtgggcagagcgcaccgaggagtctacttaggactgtggctctctgatgggtttgtgctcagccttttaaagctgcaggcagcaccacttgagatttccagaggacccagaccttcgttcattctaaagagactgatagaattaaaaacaaagtgccttatcttgcactggagttcaagtgctcttttgttagttattcactgattgtacttgtggatggttgagcacaaaaaaccacctctacatttctcttaaagtgtgccttcttagctgctggagaatttggggagaggatgtacacagcactggtgcctcagccctgccaaggtcttcactgtatatattttgtgtgttcttctgaaactcttgatttcttatatggcaataaactcagcatgtattaaatataa

SEQ ID NO: 195063 - DNA, 1109 bp, Homo sapiens
  Payload ID: 18506
  Gene Name: tripartite motif containing 45
  ENST ID: ENST00000485032
  CDS Start-End: 200-1109
ggactcgccggagtagaccgggctgggattggtgtgaggaggggccagagcccgcgggcgtcccgggccgaggcgcgggagaggcggtggacaccgagaagcccgccggcggcttgcaattccctcacccggcgcgcgcctttcgcagagggaaggagcaagagggcccctacctcatcgtgcgcgggtggacctgcccatgggtggagtgaaggctttaaccatagaccacctggccgtgaatgatgtgatgctggagagcctacgtggggaaggccagggcctggtgtgtgacctgtgcaacgacagggaagtagagaagaggtgtcagacctgcaaagccaacctctgccacttctgctgccaggctcataggcggcagaagaaaacgacttaccacaccatggtggacctaaaagacttgaaaggctacagccggattgggaagcccatcctgtgtcctgttcaccctgcagaggaactgaggctgttctgtgagttctgtgaccggcccgtgtgccaggattgtgtggtgggggagcatcgggaacacccctgtgacttcaccagcaatgtcatccacaagcatggggactctgtgtgggagctcctcaaaggtactcagccccacgtggaggccctggaggaagccctggctcagatccacataataaacagtgccctccagaagcgagtggaggcagtggcagctgatgtccggacattctcggagggctacattaaggccattgaggagcatcgggacaagctgctgaagcagctggaagacatacgggcccagaaggaaaattccctgcagctgcagaaggcccagctggaacagttactggcagacatgcggactggagtggagttcaccgagcacttgctgaccagcggctcagacttggagatcctcatcaccaagagggtggtggtagaacggctcaggaagctgaacaaagttcaatatagcacccgtcctggagtaaatgataagatacgcttctgtcctcaggagaaagcaggccagtgccgtggctatgaaatttatggtacgattaataccaaagaggttgatccagccaaatgtgtcctacaaggagaag

SEQ ID NO: 195064 - DNA, 3061 bp, Homo sapiens
  Payload ID: 18507
  Gene Name: tripartite motif containing 46
  Uniprot ID: Q7Z4K8
  ENST ID: ENST00000334634
  CDS Start-End: 1-2280
atggcagagggtgaggatatgcagaccttcacttccatcatggacgcactggtccgcatcagtaccagcatgaagaacatggagaaggaactgctgtgcccagtgtgtcaagagatgtacaagcagccactggtgctgccctgtacccacaacgtgtgccaggcctgtgcccgagaggtcttgggccagcagggctacataggacatggtggggaccccagctccgagcccacctctcctgcctccaccccttccacccgcagcccccgcctctcccgcagaactctccccaagccagaccgcctggaccggctgcttaagtcaggctttgggacataccctgggaggaagcgaggtgctttgcacccccaagtgatcatgttcccgtgcccagcctgccaaggtgatgtggagcttggggagcggggtctggcagggcttttccggaacctgaccctggagcgtgtggtggagcggtaccgccagagtgtgagtgtgggaggtgccatcctgtgccagttgtgcaagcccccaccactagaggccaccaagggctgcacagagtgccgcgccaccttctgcaatgagtgcttcaagctcttccacccctggggcacccagaaggcccagcatgagcccaccctgcctaccctctccttccgacccaagggccttatgtgcccagaccacaaggaagaggtgacccactactgcaagacatgccaacgcctggtatgtcaactctgccgggtgcggcgcacccacagcgggcacaagatcacaccagtgctcagtgcctaccaggccctcaaggacaagctgacaaagagcctgacatacatcctgggaaaccaggacacggtacagacccagatctgtgagctggaggaggccgtgaggcacaccgaggtgagtggtcagcaggccaaggaggaggtgtcgcagctggtgcgggggctgggggctgtgctggaggagaagcgggcatcactgcttcaggccattgaagaatgccagcaggagcggctggcccgtctcagcgcccagatccaggagcaccggagcctgctggatggctcaggtctggtgggctatgcccaggaagtacttaaggaaacagaccagccttgctttgtgcaagccgccaagcagctgcacaacaggattgcccgagccactgaagccctccagacattccggccagctgccagctcctccttccgccattgccagctcgacgtgggacgtgagatgaagctgctgacagagcttaacttcctgcgagtgcctgaggcccccgtcattgacacccagcgcacctttgcctatgatcagatcttcctgtgctggcggctgcccccccattcaccacctgcctggcactataccgttgagttccggcgcacggatgtgcctgctcagccaggccccacccgctggcagcggcgggaggaggtgaggggcaccagtgccctgcttgagaaccccgacacgggctctgtgtatgtgctgcgtgtccgcggctgcaacaaggccggctacggcgaatacagtgaagatgtgcacctgcacacgcccccggcacctgtcctgcacttcttcctcgatagccgctggggcgcaagccgagagcggctggctatcagcaaggaccagcgagcagtacggagtgttccagggctgcccctgctgctggctgctgaccggctgctgaccggctgccacctgagtgtggatgtggtcctgggcgacgtggctgtgacccagggccgcagctactgggcctgcgccgtagacccagcctcctacttggtcaaggtgggcgtcgggctggagagcaagcttcaagaaagtttccagggtgcccccgatgtgatcagccccaggtacgacccggacagcgggcacgacagcggtgccgaggatgccacagtggaggcgtcgccacccttcgctttcctaaccattggcatgggcaagatcctgctggggtcgggggcaagctcaaacgcagggctgacagggagggatggccccacagccggctgcacagtgcccctgccaccccgcctgggcatctgcctggactatgagcggggccgggtttccttcctggatgctgtttccttccgtgggctcttggagtgccccctggactgctcagggcctgtgtgccctgccttttgcttcatcgggggtggcgcagtacagctccaggagccagtgggcactaagcctgagaggaaagtcaccattgggggcttcgccaagctggactgagccttccaggcccctcatgcagacctggggtcctcctgggccctggcccccaaacctcttggcacccggttgttaccccctggcagcttctcccccaaactctcctaccatgtggccctgctccttctcccgtgtctgtcttcccacagttttctcttgacccaggggctctcttctgcccacctctctggatggcccccgttctctccattgcttgttagccaggcccccacccccactgagtctgccctatgacctgcctttggcatgttacccaagccatggagagagccccttctccatccctgtcctgtgccccccaggctgattgggagggagggcacctggaacactgggcatgatctccagctctgcccttgccctgccaagctccctgccctgttgatgctgaactacagccttgggacaggcaggctttggggctggacgctgtccaggcattcctggtgaggggaaggggaccctgtcatcctgctttatttatttgggtcccaacaccccgcagccgcatgccccttatgtccctcttctccctcttgcatgctttacctgtcccacacccatgccaatgtgccaagtctcccttggggacccagctgagtctgggtgttcccattgggttgggccaggcaaggcctctggtgcccgctgccgtccccctgcagtgggctctgctaggcctgtgctgagcaacagctgttattgtcatggtttataaacaataaactgtgatgccaggcacatctctgccttccctgag

SEQ ID NO: 195065 - DNA, 3127 bp, Homo sapiens
  Payload ID: 18507
  Gene Name: tripartite motif containing 46
  Uniprot ID: Q7Z4K8
  ENST ID: ENST00000368382
  CDS Start-End: 138-2348
ggggttcgcagccgcagccgggatcgggcacccaggggcgggcgggcacggtagggccatggcagagggtgaggatatgcagaccttcacttccatcatggacgcactggtccgcatcagtgtgagttaagaccagcatgaagaacatggagaaggaactgctgtgcccagtgtgtcaagagatgtacaagcagccactggtgctgccctgtacccacaacgtgtgccaggcctgtgcccgagaggtcttgggccagcagggctacataggacatggtggggaccccagctccgagcccacctctcctgcctccaccccttccacccgcagcccccgcctctcccgcagaactctccccaagccagaccgcctggaccggctgcttaagtcaggctttgggacataccctgggaggaagcgaggtgctttgcacccccaagtgatcatgttcccgtgcccagcctgccaaggtgatgtggagcttggggagcggggtctggcagggcttttccggaacctgaccctggagcgtgtggtggagcggtaccgccagagtgtgagtgtgggaggtgccatcctgtgccagttgtgcaagcccccaccactagaggccaccaagggctgcacagagtgccgcgccaccttctgcaatgagtgcttcaagctcttccacccctggggcacccagaaggcccagcatgagcccaccctgcctaccctctccttccgacccaagggccttatgtgcccagaccacaaggaagaggtgacccactactgcaagacatgccaacgcctggtatgtcaactctgccgggtgcggcgcacccacagcgggcacaagatcacaccagtgctcagtgcctaccaggccctcaaggacaagctgacaaagagcctgacatacatcctgggaaaccaggacacggtacagacccagatctgtgagctggaggaggccgtgaggcacaccgaggtgagtggtcagcaggccaaggaggaggtgtcgcagctggtgcgggggctgggggctgtgctggaggagaagcgggcatcactgcttcaggccattgaagaatgccagcaggagcggctggcccgtctcagcgcccagatccaggagcaccggagcctgctggatggctcaggtctggtgggctatgcccaggaagtacttaaggaaacagaccagccttgctttgtgcaagccgccaagcagctgcacaacaggattgcccgagccactgaagccctccagacattccggccagctgccagctcctccttccgccattgccagctcgacgtgggacgtgagatgaagctgctgacagagcttaacttcctgcgagtgcctgaggcccccgtcattgacacccagcgcacctttgcctatgatcagatcttcctgtgctggcggctgcccccccattcaccacctgcctggcactataccgttgagttccggcgcacggatgtgcctgctcagccaggccccacccgctggcagcggcgggaggaggtgaggggcaccagtgccctgcttgagaaccccgacacgggctctgtgtatgtgctgcgtgtccgcggctgcaacaaggccggctacggcgaatacagtgaagatgtgcacctgcacacgcccccggcacctgtcctgcacttcttcctcgatagccgctggggcgcaagccgagagcggctggctatcagcaaggaccagcgagcagtacggagtgttccagggctgcccctgctgctggctgctgaccggctgctgaccggctgccacctgagtgtggatgtggtcctgggcgacgtggctgtgacccagggccgcagctactgggcctgcgccgtagacccagcctcctacttggtcaaggtgggcgtcgggctggagagcaagcttcaagaaagtttccagggtgcccccgatgtgatcagccccaggtacgacccggacagcgggcacgacagcggtgccgaggatgccacagtggaggcgtcgccacccttcgctttcctaaccattggcatgggcaagatcctgctggggtcgggggcaagctcaaacgcagggctgacagggagggatggccccacagccggctgcacagtgcccctgccaccccgcctgggcatctgcctggactatgagcggggccgggtttccttcctggatgctgtttccttccgtgggctcttggagtgccccctggactgctcagggcctgtgtgccctgccttttgcttcatcgggggtggcgcagtacagctccaggagccagtgggcactaagcctgagaggaaagtcaccattgggggcttcgccaagctggactgagccttccaggcccctcatgcagacctggggtcctcctgggccctggcccccaaacctcttggcacccggttgttaccccctggcagcttctcccccaaactctcctaccatgtggccctgctccttctcccgtgtctgtcttcccacagttttctcttgacccaggggctctcttctgcccacctctctggatggcccccgttctctccattgcttgttagccaggcccccacccccactgagtctgccctatgacctgcctttggcatgttacccaagccatggagagagccccttctccatccctgtcctgtgccccccaggctgattgggagggagggcacctggaacactgggcatgatctccagctctgcccttgccctgccaagctccctgccctgttgatgctgaactacagccttgggacaggcaggctttggggctggacgctgtccaggcattcctggtgaggggaaggggaccctgtcatcctgctttatttatttgggtcccaacaccccgcagccgcatgccccttatgtccctcttctccctcttgcatgctttacctgtcccacacccatgccaatgtgccaagtctcccttggggacccagctgagtctgggtgttcccattgggttgggccaggcaaggcctctggtgcccgctgccgtccccctgcagtgggctctgctaggcctgtgctgagcaacagctgttattgtcatggtttataaacaataaactgtgatgccaggcacatctctgccttccctg

SEQ ID NO: 195066 - DNA, 2666 bp, Homo sapiens
  Payload ID: 18507
  Gene Name: tripartite motif containing 46
  ENST ID: ENST00000368383
  CDS Start-End: 68-2002
attaagcccggggttcgcagccgcagccgggatcgggcacccaggggcgggcgggcacggtagggccatggcagagggtgaggatatgcagaccttcacttccatcatggacgcactggtccgcatcagtaccagcatgaagaacatggagaaggaactgctgtgcccagtgtgtcaagagatgtacaagcagccactggtgctgccctgtacccacaacgtgtgccaggcctgtgcccgagaggtcttgggccagcagggctacataggacatggtggggaccccagctccgagcccacctctcctgcctccaccccttccacccgcagcccccgcctctcccgcagaactctccccaagccagaccgcctggaccggctgcttaagtcaggctttgggacataccctgggaggaagcgaggtgctttgcacccccaagtgatcatgttcccgtgcccagcctgccaaggtgatgtggagcttggggagcggggtctggcagggcttttccggaacctgaccctggagcgtgtggtggagcggtaccgccagagtgtgagtgtgggaggtgccatcctgtgccagttgtgcaagcccccaccactagaggccaccaagggctgcacagagtgccgcgccaccttctgcaatgagtgcttcaagctcttccacccctggggcacccagaaggcccagcatgagcccaccctgcctaccctctccttccgacccaagggccttatgtgcccagaccacaaggaagaggtgacccactactgcaagacatgccaacgcctggtatgtcaactctgccgggtgcggcgcacccacagcgggcacaagatcacaccagtgctcagtgcctaccaggccctcaaggacaagctgacaaagagcctgacatacatcctgggaaaccaggacacggtacagacccagatctgtgagctggaggaggccgtgaggcacaccgaggtgagtggtcagcaggccaaggaggaggtgtcgcagctggtgcgggggctgggggctgtgctggaggagaagcgggcatcactgcttcaggccattgaagaatgccagcaggagcggctggcccgtctcagcgcccagatccaggagcaccggagcctgctggatggctcaggtctggtgggctatgcccaggaagtacttaaggaaacagaccagccttgctttgtgcaagccgccaagcagctgcacaacaggattgcccgagccactgaagccctccagacattccggccagctgccagctcctccttccgccattgccagctcgacgtgggacgtgagatgaagctgctgacagagcttaacttcctgcgagtgcctgaggcccccgtcattgacacccagcgcacctttgcctatgatcagatcttcctgtgctggcggctgcccccccattcaccacctgcctggcactataccgttgagttccggcgcacggatgtgcctgctcagccaggccccacccgctggcagcggcgggaggaggtgaggggcaccagtgccctgcttgagaaccccgacacgggctctgtgtatgtgctgcgtgtccgcggctgcaacaaggccggctacggcgaatacagtgaagatgtgcacctgcacacgcccccggcacctgtcctgcacttcttcctcgatagccgctggggcgcaagccgagagcggctggctatcagcaaggaccagcgagcagtacggagtgttccagggctgcccctgctgctggctgctgaccggctgctgaccggctgccacctgagtgtggatgtggtcctgggcgacgtggctgtgacccagggccgcagctactgggcctgcgccgtagacccagcctcctacttggtcaaggtgggcgtcgggctggagagcaagcttcaagaaagtttccagggtgcccccgatgtgatcagccccaggtcagacccctctggaagggatggggtgtgggggtcctggtgggagtgaggggcacagaaggggtggcaagtggagcacagacttgctagggtggggctgggaggggattaggaggaagtagtaggagcctggaagccaggctgggaggcctgtgtccaggagacgcatgggctcagcaaaagggcttttgaggactgattttcagagcatgtcgtgtggtcagggaaagggatgatagaagagggagccatctctgcttccttccaaccatctgtcactctggatcaacacaccatctctccaagcatctgtgtcctttcttcctaacactccatttccaacataccttctccataaaacctttgctctccaagacctccttcacccgtatcttaaaattcttcccttagccggatgcggtggctcacgcctgtaatcccagcactttgggaggctgaggcaggcaaatcactggaggtcgagagttcgagaccagcttgaccaacatggagtgaccccatctctactaaaaatacaaaaaaaatagctgggcgtggtagcgcatgcctgtaaccccggctactcgtgaggctgaggcaggagaatcacttgaacccgggaggtggaggttgcggtgagccaagattgtgtcattgcactgcagcctgggcgacaaaagcaaaactccttctcaaaaaaaaaaaaaaaaaaa

SEQ ID NO: 195067 - DNA, 1864 bp, Homo sapiens
  Payload ID: 18507
  Gene Name: tripartite motif containing 46
  Uniprot ID: Q7Z4K8
  ENST ID: ENST00000368385
  CDS Start-End: 90-1745
cacacccccactgggctcctgcattaagcccggggttcgcagccgcagccgggatcgggcacccaggggcgggcgggcacggtagggccatggcagagggtgaggatatgcagaccttcacttccatcatggacgcactggtccgcatcagtaccagcatgaagaacatggagaaggaactgctgtgcccagtgtgtcaagagatgtacaagcagccactggtgctgccctgtacccacaacgtgtgccaggcctgtgcccgagaggtcttgggccagcagggctacataggacatggtggggaccccagctccgagcccacctctcctgcctccaccccttccacccgcagcccccgcctctcccgcagaactctccccaagccagaccgcctggaccggctgcttaagtcaggctttgggacataccctgggaggaagcgaggtgctttgcacccccaagtgatcatgttcccgtgcccagcctgccaaggtgatgtggagcttggggagcggggtctggcagggcttttccggaacctgaccctggagcgtgtggtggagcggtaccgccagagtgtgagtgtgggaggtgccatcctgtgccagttgtgcaagcccccaccactagaggccaccaagggctgcacagagtgccgcgccaccttctgcaatgagtgcttcaagctcttccacccctggggcacccagaaggcccagcatgagcccaccctgcctaccctctccttccgacccaagggccttatgtgcccagaccacaaggaagaggtgacccactactgcaagacatgccaacgcctggtatgtcaactctgccgggtgcggcgcacccacagcgggcacaagatcacaccagtgctcagtgcctaccaggccctcaaggacaagctgacaaagagcctgacatacatcctgggaaaccaggacacggtacagacccagatctgtgagctggaggaggccgtgaggcacaccgaggtgagtggtcagcaggccaaggaggaggtgtcgcagctggtgcgggggctgggggctgtgctggaggagaagcgggcatcactgcttcaggccattgaagaatgccagcaggagcggctggcccgtctcagcgcccagatccaggagcaccggagcctgctggatggctcaggtctggtgggctatgcccaggaagtacttaaggaaacagaccagccttgctttgtgcaagccgccaagcagctgcacaacaggattgcccgagccactgaagccctccagacattccggccagctgccagctcctccttccgccattgccagctcgacgtgggacgtgagatgaagctgctgacagagcttaacttcctgcgagtgcctgaggcccccgtcattgacacccagcgcacctttgcctatgatcagatcttcctgtgctggcggctgcccccccattcaccacctgcctggcactataccgttgagttccggcgcacggatgtgcctgctcagccaggccccacccgctggcagcggcgggaggaggtgaggggcaccagtgccctgcttgagaaccccgacacgggctctgtgtatgtgctgcgtgtccgcggctgcaacaaggccggctacggcgaatacagtgaagatgtgcacctgcacacgcccccggcacctggaatacaaaacttagccaggcgtggtggtgcgtgcctacaattccagctactcgggaggctgaggtaggagaatcgcttgaacctgggaggcggaggttgcagtgagctgagatcgcgccactggactccagcctggacaacagagcaagactccgacgtctcggaaaaataaataaataaataaat

SEQ ID NO: 195068 - DNA, 3195 bp, Homo sapiens
  Payload ID: 18507
  Gene Name: tripartite motif containing 46
  ENST ID: ENST00000392451
  CDS Start-End: 261-2414
gagaactatttcccaccccctaccccgacgggcgctgttcgaggctggtcccgggagcatgcgcagtgacacctcaacccccagccctcctcacacccccactgggctcctgcattaagcccggggttcgcagccgcagccgggatcgggcacccaggggcgggcgggcacggtagggccatggcagagggtgaggatatgcagaccttcacttccatcatggacgcactggtccgcatcagtctgcgcccctgaccgggatggctgcgaagagagggaccaagaccagcatgaagaacatggagaaggaactgctgtgcccagtgtgtcaagagatgtacaagcagccactggtgctgccctgtacccacaacgtgtgccaggcctgtgcccgagaggtcttgggccagcagggctacataggacatggtggggaccccagctccgagcccacctctcctgcctccaccccttccacccgcagcccccgcctctcccgcagaactctccccaagccagaccgcctggaccggctgcttaagtcaggctttgggacataccctgggaggaagcgaggtgctttgcacccccaagtgatcatgttcccgtgcccagcctgccaaggtgatgtggagcttggggagcggggtctggcagggcttttccggaacctgaccctggagcgtgtggtggagcggtaccgccagagtgtgagtgtgggaggtgccatcctgtgccagttgtgcaagcccccaccactagaggccaccaagggctgcacagagtgccgcgccaccttctgcaatgagtgcttcaagctcttccacccctggggcacccagaaggcccagcatgagcccaccctgcctaccctctccttccgacccaagggccttatgtgcccagaccacaaggaagaggtgacccactactgcaagacatgccaacgcctggtatgtcaactctgccgggtgcggcgcacccacagcgggcacaagatcacaccagtgctcagtgcctaccaggccctcaaggacaagctgacaaagagcctgacatacatcctgggaaaccaggacacggtacagacccagatctgtgagctggaggagaagcgggcatcactgcttcaggccattgaagaatgccagcaggagcggctggcccgtctcagcgcccagatccaggagcaccggagcctgctggatggctcaggtctggtgggctatgcccaggaagtacttaaggaaacagaccagccttgctttgtgcaagccgccaagcagctgcacaacaggattgcccgagccactgaagccctccagacattccggccagctgccagctcctccttccgccattgccagctcgacgtgggacgtgagatgaagctgctgacagagcttaacttcctgcgagtgcctgaggcccccgtcattgacacccagcgcacctttgcctatgatcagatcttcctgtgctggcggctgcccccccattcaccacctgcctggcactataccgttgagttccggcgcacggatgtgcctgctcagccaggccccacccgctggcagcggcgggaggaggtgaggggcaccagtgccctgcttgagaaccccgacacgggctctgtgtatgtgctgcgtgtccgcggctgcaacaaggccggctacggcgaatacagtgaagatgtgcacctgcacacgcccccggcacctgtcctgcacttcttcctcgatagccgctggggcgcaagccgagagcggctggctatcagcaaggaccagcgagcagtacggagtgttccagggctgcccctgctgctggctgctgaccggctgctgaccggctgccacctgagtgtggatgtggtcctgggcgacgtggctgtgacccagggccgcagctactgggcctgcgccgtagacccagcctcctacttggtcaaggtgggcgtcgggctggagagcaagcttcaagaaagtttccagggtgcccccgatgtgatcagccccaggtacgacccggacagcgggcacgacagcggtgccgaggatgccacagtggaggcgtcgccacccttcgctttcctaaccattggcatgggcaagatcctgctggggtcgggggcaagctcaaacgcagggctgacagggagggatggccccacagccggctgcacagtgcccctgccaccccgcctgggcatctgcctggactatgagcggggccgggtttccttcctggatgctgtttccttccgtgggctcttggagtgccccctggactgctcagggcctgtgtgccctgccttttgcttcatcgggggtggcgcagtacagctccaggagccagtgggcactaagcctgagaggaaagtcaccattgggggcttcgccaagctggactgagccttccaggcccctcatgcagacctggggtcctcctgggccctggcccccaaacctcttggcacccggttgttaccccctggcagcttctcccccaaactctcctaccatgtggccctgctccttctcccgtgtctgtcttcccacagttttctcttgacccaggggctctcttctgcccacctctctggatggcccccgttctctccattgcttgttagccaggcccccacccccactgagtctgccctatgacctgcctttggcatgttacccaagccatggagagagccccttctccatccctgtcctgtgccccccaggctgattgggagggagggcacctggaacactgggcatgatctccagctctgcccttgccctgccaagctccctgccctgttgatgctgaactacagccttgggacaggcaggctttggggctggacgctgtccaggcattcctggtgaggggaaggggaccctgtcatcctgctttatttatttgggtcccaacaccccgcagccgcatgccccttatgtccctcttctccctcttgcatgctttacctgtcccacacccatgccaatgtgccaagtctcccttggggacccagctgagtctgggtgttcccattgggttgggccaggcaaggcctctggtgcccgctgccgtccccctgcagtgggctctgctaggcctgtgctgagcaacagctgttattgtcatggtttataaacaataaactgtgatgccaggcacatctctgccttccctgag

SEQ ID NO: 195069 - DNA, 2979 bp, Homo sapiens
  Payload ID: 18507
  Gene Name: tripartite motif containing 46
  ENST ID: ENST00000545012
  CDS Start-End: 297-2198
gagaactatttcccaccccctaccccgacgggcgctgttcgaggctggtcccgggagcatgcgcagtgacacctcaacccccagccctcctcacacccccactgggctcctgcattaagcccggggttcgcagccgcagccgggatcgggcacccaggggcgggcgggcacggtagggccatggcagagggtgaggatatgcagaccttcacttccatcatggacgcactggtccgcatcagtgctttgggacataccctgggaggaagcgaggtgctttgcacccccaagtgatcatgttcccgtgcccagcctgccaaggtgatgtggagcttggggagcggggtctggcagggcttttccggaacctgaccctggagcgtgtggtggagcggtaccgccagagtgtgagtgtgggaggtgccatcctgtgccagttgtgcaagcccccaccactagaggccaccaagggctgcacagagtgccgcgccaccttctgcaatgagtgcttcaagctcttccacccctggggcacccagaaggcccagcatgagcccaccctgcctaccctctccttccgacccaagggccttatgtgcccagaccacaaggaagaggtgacccactactgcaagacatgccaacgcctggtatgtcaactctgccgggtgcggcgcacccacagcgggcacaagatcacaccagtgctcagtgcctaccaggccctcaaggacaagctgacaaagagcctgacatacatcctgggaaaccaggacacggtacagacccagatctgtgagctggaggaggccgtgaggcacaccgaggtgagtggtcagcaggccaaggaggaggtgtcgcagctggtgcgggggctgggggctgtgctggaggagaagcgggcatcactgcttcaggccattgaagaatgccagcaggagcggctggcccgtctcagcgcccagatccaggagcaccggagcctgctggatggctcaggtctggtgggctatgcccaggaagtacttaaggaaacagaccagccttgctttgtgcaagccgccaagcagctgcacaacaggattgcccgagccactgaagccctccagacattccggccagctgccagctcctccttccgccattgccagctcgacgtgggacgtgagatgaagctgctgacagagcttaacttcctgcgagtgcctgaggcccccgtcattgacacccagcgcacctttgcctatgatcagatcttcctgtgctggcggctgcccccccattcaccacctgcctggcactataccgttgagttccggcgcacggatgtgcctgctcagccaggccccacccgctggcagcggcgggaggaggtgaggggcaccagtgccctgcttgagaaccccgacacgggctctgtgtatgtgctgcgtgtccgcggctgcaacaaggccggctacggcgaatacagtgaagatgtgcacctgcacacgcccccggcacctgtcctgcacttcttcctcgatagccgctggggcgcaagccgagagcggctggctatcagcaaggaccagcgagcagtacggagtgttccagggctgcccctgctgctggctgctgaccggctgctgaccggctgccacctgagtgtggatgtggtcctgggcgacgtggctgtgacccagggccgcagctactgggcctgcgccgtagacccagcctcctacttggtcaaggtgggcgtcgggctggagagcaagcttcaagaaagtttccagggtgcccccgatgtgatcagccccaggtacgacccggacagcgggcacgacagcggtgccgaggatgccacagtggaggcgtcgccacccttcgctttcctaaccattggcatgggcaagatcctgctggggtcgggggcaagctcaaacgcagggctgacagggagggatggccccacagccggctgcacagtgcccctgccaccccgcctgggcatctgcctggactatgagcggggccgggtttccttcctggatgctgtttccttccgtgggctcttggagtgccccctggactgctcagggcctgtgtgccctgccttttgcttcatcgggggtggcgcagtacagctccaggagccagtgggcactaagcctgagaggaaagtcaccattgggggcttcgccaagctggactgagccttccaggcccctcatgcagacctggggtcctcctgggccctggcccccaaacctcttggcacccggttgttaccccctggcagcttctcccccaaactctcctaccatgtggccctgctccttctcccgtgtctgtcttcccacagttttctcttgacccaggggctctcttctgcccacctctctggatggcccccgttctctccattgcttgttagccaggcccccacccccactgagtctgccctatgacctgcctttggcatgttacccaagccatggagagagccccttctccatccctgtcctgtgccccccaggctgattgggagggagggcacctggaacactgggcatgatctccagctctgcccttgccctgccaagctccctgccctgttgatgctgaactacagccttgggacaggcaggctttggggctggacgctgtccaggcattcctggtgaggggaaggggaccctgtcatcctgctttatttatttgggtcccaacaccccgcagccgcatgccccttatgtccctcttctccctcttgcatgctttacctgtcccacacccatgccaatgtgccaagtctcccttggggacccagctgagtctgggtgttcccattgggttgggccaggcaaggcctctggtgcccgctgccgtccccctgcagtgggctctgctaggcctgtgctgagcaacagctgttattgtcatggtttataaacaataaactgtgatgccaggcacatctctgccttccctgag

SEQ ID NO: 195070 - DNA, 1703 bp, Homo sapiens
  Payload ID: 18507
  Gene Name: tripartite motif containing 46
  Uniprot ID: Q7Z4K8
  ENST ID: ENST00000543729
  CDS Start-End: 77-1573
ggctcctgcattaagcccggggttcgcagccgcagccgggatcgggcacccaggggcgggcgggcacggtagggccatggcagagggtgaggatatgcagaccttcacttccatcatggacgcactggtccgcatcagtaccagcatgaagaacatggagaaggaactgctgtgcccagtgtgtcaagagatgtacaagcagccactggtgctgccctgtacccacaacgtgtgccaggcctgtgcccgagaggtcttgggccagcagggctacataggacatggtggggaccccagctccgagcccacctctcctgcctccaccccttccacccgcagcccccgcctctcccgcagaactctccccaagccagaccgcctggaccggctgcttaagtcaggctttgggacataccctgggaggaagcgaggtgctttgcacccccaagtgatcatgttcccgtgcccagcctgccaaggtgatgtggagcttggggagcggggtctggcagggcttttccggaacctgaccctggagcgtgtggtggagcggtaccgccagagtgtgagtgtgggaggtgccatcctgtgccagttgtgcaagcccccaccactagaggccaccaagggctgcacagagtgccgcgccaccttctgcaatgagtgcttcaagctcttccacccctggggcacccagaaggcccagcatgagcccaccctgcctaccctctccttccgacccaagggccttatgtgcccagaccacaaggaagaggtgacccactactgcaagacatgccaacgcctggtatgtcaactctgccgggtgcggcgcacccacagcgggcacaagatcacaccagtgctcagtgcctaccaggccctcaaggacaagctgacaaagagcctgacatacatcctgggaaaccaggacacggtacagacccagatctgtgagctggaggaggccgtgaggcacaccgaggtgagtggtcagcaggccaaggaggaggtgtcgcagctggtgcgggggctgggggctgtgctggaggagaagcgggcatcactgcttcaggccattgaagaatgccagcaggagcggctggcccgtctcagcgcccagatccaggagcaccggagcctgctggatggctcaggtctggtgggctatgcccaggaagtacttaaggaaacagaccagccttgctttgtgcaagccgccaagcagctgcacaacaggattgcccgagccactgaagccctccagacattccggccagctgccagctcctccttccgccattgccagctcgacgtgggacgtgagatgaagctgctgacagagcttaacttcctgcgaggctgtggccaccgcggactctgctccggagcaccccagtgcctgaggcccccgtcattgacacccagcgcacctttgcctatgatcagatcttcctgtgctggcggctgcccccccattcaccacctgcctggcactataccgttgagttccggcgcacggatgtgcctgctcagccaggccccacccgctggcagcggcgggaggaggtgaggggcaccagtgccctgcttgagaaccccgacacgggctctgtgtatgtgctgcgtgtccgcggctgcaacaaggccggctacggcgaatacagtgaagatgtgcacctgcacacgcccccggcacctgg

SEQ ID NO: 195071 - DNA, 3082 bp, Homo sapiens
  Payload ID: 18507
  Gene Name: tripartite motif containing 46
  ENST ID: ENST00000611379
  CDS Start-End: 61-2301
agttcggagaagggggtgccgctgaccgggttgcgctgcgggagagggcgggagggcctgatgggggcgaaggggaatgggttgaccagcatgaagaacatggagaaggaactgctgtgcccagtgtgtcaagagatgtacaagcagccactggtgctgccctgtacccacaacgtgtgccaggcctgtgcccgagaggtcttgggccagcagggctacataggacatggtggggaccccagctccgagcccacctctcctgcctccaccccttccacccgcagcccccgcctctcccgcagaactctccccaagccagaccgcctggaccggctgcttaagtcaggctttgggacataccctgggaggaagcgaggtgctttgcacccccaagtgatcatgttcccgtgcccagcctgccaaggtgatgtggagcttggggagcggggtctggcagggcttttccggaacctgaccctggagcgtgtggtggagcggtaccgccagagtgtgagtgtgggaggtgccatcctgtgccagttgtgcaagcccccaccactagaggccaccaagggctgcacagagtgccgcgccaccttctgcaatgagtgcttcaagctcttccacccctggggcacccagaaggcccagcatgagcccaccctgcctaccctctccttccgacccaagggccttatgtgcccagaccacaaggaagaggtgacccactactgcaagacatgccaacgcctggtatgtcaactctgccgggtgcggcgcacccacagcgggcacaagatcacaccagtgctcagtgcctaccaggccctcaaggacaagctgacaaagagcctgacatacatcctgggaaaccaggacacggtacagacccagatctgtgagctggaggaggccgtgaggcacaccgaggtgagtggtcagcaggccaaggaggaggtgtcgcagctggtgcgggggctgggggctgtgctggaggagaagcgggcatcactgcttcaggccattgaagaatgccagcaggagcggctggcccgtctcagcgcccagatccaggagcaccggagcctgctggatggctcaggtctggtgggctatgcccaggaagtacttaaggaaacagaccagccttgctttgtgcaagccgccaagcagctgcacaacaggattgcccgagccactgaagccctccagacattccggccagctgccagctcctccttccgccattgccagctcgacgtgggacgtgagatgaagctgctgacagagcttaacttcctgcgagtgcctgaggcccccgtcattgacacccagcgcacctttgcctatgatcagatcttcctgtgctggcggctgcccccccattcaccacctgcctggcactataccgttgagttccggcgcacggatgtgcctgctcagccaggccccacccgctggcagcggcgggaggaggtgaggggcaccagtgccctgcttgagaaccccgacacgggctctgtgtatgtgctgcgtgtccgcggctgcaacaaggccggctacggcgaatacagtgaagatgtgcacctgcacacgcccccggcacctgtcctgcacttcttcctcgatagccgctggggcgcaagccgagagcggctggctatcagcaaggaccagcgagcagtacggagtgttccagggctgcccctgctgctggctgctgaccggctgctgaccggctgccacctgagtgtggatgtggtcctgggcgacgtggctgtgacccagggccgcagctactgggcctgcgccgtagacccagcctcctacttggtcaaggtgggcgtcgggctggagagcaagcttcaagaaagtttccagggtgcccccgatgtgatcagccccaggtacgacccggacagcgggcacgacagcggtgccgaggatgccacagtggaggcgtcgccacccttcgctttcctaaccattggcatgggcaagatcctgctggggtcgggggcaagctcaaacgcagggctgacagggagggatggccccacagccggctgcacagtgcccctgccaccccgcctgggcatctgcctggactatgagcggggccgggtttccttcctggatgctgtttccttccgtgggctcttggagtgccccctggactgctcagggcctgtgtgccctgccttttgcttcatcgggggtggcgcagtacagctccaggagccagtgggcactaagcctgagaggaaagtcaccattgggggcttcgccaagctggactgagccttccaggcccctcatgcagacctggggtcctcctgggccctggcccccaaacctcttggcacccggttgttaccccctggcagcttctcccccaaactctcctaccatgtggccctgctccttctcccgtgtctgtcttcccacagttttctcttgacccaggggctctcttctgcccacctctctggatggcccccgttctctccattgcttgttagccaggcccccacccccactgagtctgccctatgacctgcctttggcatgttacccaagccatggagagagccccttctccatccctgtcctgtgccccccaggctgattgggagggagggcacctggaacactgggcatgatctccagctctgcccttgccctgccaagctccctgccctgttgatgctgaactacagccttgggacaggcaggctttggggctggacgctgtccaggcattcctggtgaggggaaggggaccctgtcatcctgctttatttatttgggtcccaacaccccgcagccgcatgccccttatgtccctcttctccctcttgcatgctttacctgtcccacacccatgccaatgtgccaagtctcccttggggacccagctgagtctgggtgttcccattgggttgggccaggcaaggcctctggtgcccgctgccgtccccctgcagtgggctctgctaggcctgtgctgagcaacagctgttattgtcatggtttataaacaataaactgtgatgccaggcacatctctgccttccctgag

SEQ ID NO: 195072 - DNA, 2266 bp, Homo sapiens
  Payload ID: 18508
  Gene Name: tripartite motif containing 47
  Uniprot ID: Q96LD4
  ENST ID: ENST00000254816
  CDS Start-End: 28-1944
ggcggcgccctgggcggccgcggagtcatggacggcagtggacccttcagctgccccatctgcctagagccactccgggagccggtgacgctgccctgcggccacaacttctgtctcgcctgcctgggcgcgctctggccgcatcgtggcgcgagtggagccggcggacccggaggcgcggcccgctgcccgctgtgccaggagcccttccccgacggccttcagctccgcaagaaccacacgctgtccgagctgctgcagctccgccagggctcgggccccgggtccggccccggcccggcccctgccctggccccggagccctcggcacccagcgcgctgcccagtgtcccggagccgtcggccccctgcgctcccgagccgtggcccgcgggcgaagagccagtgcgctgcgacgcgtgccccgagggcgcggccctgcccgccgcgctgtcctgcctctcctgcctcgcctccttttgccccgcgcacctgggcccgcacgagcgcagccccgccctccgcggacaccgcctggtgccgccgctgcgccggctagaggagagcctgtgcccgcgccacctacggccgctcgagcgctactgccgcgcggagcgcgtgtgtctgtgcgaggcctgcgccgcacaggagcaccgcggccacgagctggtgccgctggagcaggagcgcgcgcttcaggaggctgagcagtccaaagtcctgagcgccgtggaggaccgcatggacgagctgggtgctggcattgcacagtccaggcgcacagtggccctcatcaagagtgcagccgtagcagagcgggagagggtgagccggctgtttgcagatgctgcggccgccctgcagggcttccagacccaggtgctgggcttcatcgaggagggggaagctgccatgctaggccgctcccagggtgacctgcggcgacaggaggaacagcgcagccgcctgagccgagcccgccagaatctcagccaggtccctgaagctgactcagtcagcttcctgcaggagctgctggcactaaggctggccctggaggatgggtgtggccctgggcctggacccccgagggagctcagcttcaccaaatcatcccaagctgtccgtgcagtgagagacatgctggccgtggcctgcgtcaaccagtgggagcagctgagggggccgggtggcaacgaggatgggccacagaagctggactcggaagctgatgctgagccccaagacctcgagagtacgaacctcttggagagtgaagctcccagggactatttcctcaagtttgcctatattgtggatttggacagcgacacagcagacaagttcctgcagctgtttggaaccaaaggtgtcaagagggtgctgtgtcctatcaactaccccttgtcgcccacccgcttcacccattgtgagcaggtgctgggcgagggtgccctggaccgaggcacctactactgggaggtggagattatcgagggctgggtcagcatgggggtcatggccgaagacttctccccacaagagccctacgaccgcggccggctgggccgcaacgcccactcctgctgcctgcagtggaatggacgcagcttctccgtctggtttcatgggctggaggctcccctgccccaccccttctcgcccacggttggggtctgcctggaatacgctgaccgtgccttggccttctatgctgtacgggacggcaagatgagcctcctgcggaggctgaaggcctcccggccccgccggggtggcatcccggcctcccccattgaccccttccagagccgcctggacagtcactttgcggggctcttcacccacagactcaagcctgccttcttcctggagagtgtggacgcccacttgcagatcgggcccctcaagaagtcctgcatatccgtgctgaagaggaggtgatgccgggcacgggcgctcctgctgccgtctctgctccaggaagctgcctcctctgggccctctccttcgtctgggaaggcaccagcatgagtcccacacacccagccttctcatttctagaggcttccacctttttatacactcagccttccctctcccaggcaggaggacccccagaccctgttcccctgcagacctcacttctgggagacagagctacagctgggacagctccaagctaccctaacccctcctttcccaggtttctagaatagtgtctggcatgtagtagatgctcaataaacacttgttgaatgaatga

SEQ ID NO: 195073 - DNA, 1907 bp, Homo sapiens
  Payload ID: 18508
  Gene Name: tripartite motif containing 47
  ENST ID: ENST00000587339
  CDS Start-End: 1-368
agccgtggcccgcgggcgaagagccagtgcgctgcgacgcgtgccccgagggcgcggccctgcccgccgcgctgtcctgcctctcctgcctcgcctccttttgccccgcgcacctgggcccgcacgagcgcagccccgccctccgcggacaccgcctggtgccgccgctgcgccggctagaggagagcctgtgcccgcgccacctacggccgctcgagcgctactgccgcgcggagcgcgtgtgtctgtgcgaggcctgcgccgcacaggagcaccgcggccacgagctggtgccgctggagcaggagcgcgcgcttcaggaggtgggctccgggggcacactcgggctgagcagtccaaagtcctgagcgccgtggaggaccgcatggacgagctgggtgctggcattgcacagtccaggcgcacagtggccctcatcaagagtgcagccgtagcagagcgggagagggtgagccggctgtttgcagatgctgcggccgccctgcagggcttccagacccaggtgctgggcttcatcgaggagggggaagctgccatgctaggccgctcccagggtgacctgcggcgacaggaggaacagcgcagccgcctgagccgagcccgccagaatctcagccaggtccctgaagctgactcagtcagcttcctgcaggagctgctggcactaaggctggccctggaggatgggtgtggccctgggcctggacccccgagggagctcagcttcaccaaatcatcccaagctgtccgtgcagtgagagacatgctggccgtggcctgcgtcaaccagtgggagcagctgagggggccgggtggcaacgaggatgggccacagaagctggactcggaagctgatgctgagccccaagacctcgagagtacgaacctcttggagagtgaagctcccagggactatttcctcaagtttgcctatattgtggatttggacagcgacacagcagacaagttcctgcagctgtttggaaccaaaggtgtcaagagggtgctgtgtcctatcaactaccccttgtcgcccacccgcttcacccattgtgagcaggtgctgggcgagggtgccctggaccgaggcacctactactgggaggtggagattatcgagggctgggtcagcatgggggtcatggccgaagacttctccccacaagagccctacgaccgcggccggctgggccgcaacgcccactcctgctgcctgcagtggaatggacgcagcttctccgtctggtttcatgggctggaggctcccctgccccaccccttctcgcccacggttggggtctgcctggaatacgctgaccgtgccttggccttctatgctgtacgggacggcaagatgagcctcctgcggaggctgaaggcctcccggccccgccggggtggcatcccggcctcccccattgaccccttccagagccgcctggacagtcactttgcggggctcttcacccacagactcaagcctgccttcttcctggagagtgtggacgcccacttgcagatcgggcccctcaagaagtcctgcatatccgtgctgaagaggaggtgatgccgggcacgggcgctcctgctgccgtctctgctccaggaagctgcctcctctgggccctctccttcgtctgggaaggcaccagcatgagtcccacacacccagccttctcatttctagaggcttccacctttttatacactcagccttccctctcccaggcaggaggacccccagaccctgttcccctgcagacctcacttctgggagacagagctacagctgggacagctccaagctaccctaacccctcctttcccaggtttctagaatagtgtctggcatgtagtagatgctcaataaacacttgttgaatgaa

SEQ ID NO: 195074 - DNA, 605 bp, Homo sapiens
  Payload ID: 18508
  Gene Name: tripartite motif containing 47
  ENST ID: ENST00000586495
  CDS Start-End: 491-605
atccccttttttccaggcctggactgtggatgcaggctctttgggaacagtgatcctcaggacagcttaatgcctccttgtgcagtcacccctccgccgcccacctcccaacctaactggcttactctctgcctcttccccgccggaggaagttctcaaattcatctgagcaacactgagaccagcggacggccctgtactaggcctcctgtcagagacccgaggcagacacccagtcagcctgcacgccccccaggcgttcaggaaaggcaccagcctgggctgcaggcacctctggcatattatgggacatcgtggccactccagtcccacctgatgcacagataccactccccagtcacccccttctctcccctggcaaggcctgggacccgagtgtagggctgtggcctctgccagacctcacactcatggagggtgttgtccacaggctgagcagtccaaagtcctgagcgccgtggaggaccgcatggacgagctgggtgctggcattgcacagtccaggcgcacagtggccctcatcaagagtgcagccgtagcagagcgggagagggtgagccggctgtttgcagatgctgcggccg

SEQ ID NO: 195075 - DNA, 595 bp, Homo sapiens
  Payload ID: 18508
  Gene Name: tripartite motif containing 47
  ENST ID: ENST00000585333
  CDS Start-End: 1-551
ccccacaagagccctacgaccgcggccggctgggccgcaacgcccactcctgctgcctgcagtggaatggacgcagcttctccgtctggtttcatgggctggaggctcccctgccccaccccttctcgcccacggttggggtctgcctggaatacgctgaccgtgccttggccttctatgctactcaagcctgccttcttcctggagagtgtggacgcccacttgcagatcgggcccctcaagaagtcctgcatatccgtgctgaagaggaggtgatgccgggcacgggcgctcctgctgccgtctctgctccaggaagctgcctcctctgggccctctccttcgtctgggaaggcaccagcatgagtcccacacacccagccttctcatttctagaggcttccacctttttatacactcagccttccctctcccaggcaggaggacccccagaccctgttcccctgcagacctcacttctgggagacagagctacagctgggacagctccaagctaccctaacccctcctttcccaggtttctagaatagtgtctggcatgtagtagatgctcaataaacacttgttgaatgaa

SEQ ID NO: 195076 - DNA, 1445 bp, Homo sapiens
  Payload ID: 18509
  Gene Name: tripartite motif containing 48
  Uniprot ID: Q8IWZ4
  ENST ID: ENST00000417545
  CDS Start-End: 87-761
cttagagggagctgtgttttggtgacctctgaaactcagtactgcagcgaatgagctcctgaccttgaggagtacttaacagaattatgtctcgaagaatcattgtgggaacccttcaaagaacccagcgaaacatgaattctggaatctcgcaagtcttccagagggaactcacctgccccatctgcatgaactacttcatagacccggtcaccatagactgtgggcacagcttttgcaggccctgtttctacctcaactggcaagacatcccaattcttactcagtgctttgaatgcataaagacaatacagcagagaaacctcaaaactaacattcgattgaagaagatggcttcccttgccagaaaagccagtctctggctattcctgagctctgaggagcaaatgtgtggcattcacagggagacaaagaagatgttctgtgaagtggacaggagcctgctctgtttgctgtgctccagctctcaggagcaccggtatcacagacactgtcccgctgagtgggctgctgaggaacactgggagaagcttttaaagaaaatgcagtctttatgggaaaaagcttgtgaaaatcagagaaacctgaatgtggaaaccaccagaatcagccactggaaggcttttggagacatattatacaggagtgagtccgtgctgctgcacatgccccagcctctgaatctagcgctcagggcagggcccatcactggactgagggacaggctcaaccaattctgagtggatattactctgcatcacaatgaagccaacagtcatatcttccgatgtggagatttgagaagcatttgtattggatgtgaccgtcaaaatccgccccatatcactgcaacacctacaagttttcttgcatggggtgctcagactttcacctctggcaaatattactgggaggtccatgtgggggactcttggaattgggcttttggtgtctgtaataagtattggaaagggaagaatcagaatggcaatatatatggagaggagggactctttagtcttgggtgtgttaagaacgacattcagtgcagtctctttaccacctccccaattacactgcagtatgtcccaagacctaccaaccatgtagaattattcctggattgtgaagctagaactgtgagcttcgttgatgttagtcaaagctcccctatatacaccatccctaattgctccttctcacttcctctcagacctatctttttctgtattctcctctgaccagagacaaatcagaaatgtgttcatctgctgtgggaacccctttatcccagaaagccctcttccttgtgccttatcaaacaggacaaataggttcggttttatgtcttgaattgcattctaatgttattaaaactcatttattgtgttactattaaatgtagtaaaaacactaaaagtata

SEQ ID NO: 195077 - DNA, 2163 bp, Homo sapiens
  Payload ID: 18510
  Gene Name: tripartite motif containing 49
  Uniprot ID: P0CI25
  ENST ID: ENST00000329758
  CDS Start-End: 330-1688
ctaatcttccagttgccccctattgactttaaaccaaagctttgattcatgaccactgggatccagccagcgggggatttcttttcctgatggactgtacccaggatctcacatttgcttaagcagctcccacaattgggttcttataaaaggacacggaagagacaagctcagttttctctgaaggagaaggactgcacttagaactgcattttggcgacctctgaaattcagtactgcagtgaatgagcttctgatcttgaggtgaacttaacaaaattatttttggaaaaatcgttgtgggaaccattaaaagaactccaggaaacatgaattctggaatcttacaggtctttcagggggaactcatctgccccctgtgcatgaactacttcatagacccggtcaccatagactgtgggcacagcttttgcaggccttgtttctacctcaactggcaagacatcccatttcttgtccagtgctctgaatgcacaaagtcaaccgagcagataaacctcaaaaccaacattcatttgaagaagatggcttctcttgccagaaaagtcagtctctggctattcctgagctctgaggagcaaatgtgtggcactcacagggagacaaagaagatattctgtgaagtggacaggagcctgctctgtttgctgtgctccagctctcaggagcaccggtatcacagacaccgtcccattgagtgggctgctgaggaacaccgggagaagcttttacagaaaatgcagtctttgtgggaaaaagcttgtgaaaatcacagaaacctgaatgtggaaaccaccagaaccagatgctggaaggattatgtgaatttaaggctagaagcaattagagctgagtatcagaagatgcctgcatttcatcatgaagaagaaaaacataatttggagatgctgaaaaagaaggggaaagaaatttttcatcgacttcatttaagtaaagccaaaatggctcataggatggagattttaagaggaatgtatgaggagctgaacgaaatgtgccataaaccagatgtggagctacttcaggcttttggagacatattacacaggagtgagtccgtgctgctgcacatgccccagcctctgaatccagagctcagtgcagggcccatcactggactgagggacaggctcaaccaattccgagtgcatattactctgcatcatgaagaagccaacaatgatatctttctgtatgaaattttgagaagcatgtgtattggatgtgaccatcaagatgtaccctatttcactgcaacacctagaagttttcttgcatggggtgttcagactttcacctcgggcaaatattactgggaggtccatgtaggggactcctggaattgggcttttggtgtctgtaatatgtatcggaaagagaagaatcagaatgagaagatagatggaaaggcgggactctttcttcttgggtgtgttaagaatgacattcaatgcagtctctttaccacctccccacttatgctgcaatatatcccaaaacctaccagccgagtaggattattcctggattgtgaggctaagactgtgagctttgttgatgttaatcaaagctccctaatatacaccatccctaattgctctttctcacctcctctcaggcctatcttttgctgtattcacttctgaccagagacaaatcagaaatgtgttcacatgctgtgggaacccctttatcccaggaagtcctcttccttgtgccttaacatacaggacaaataggctctattttatgtcttgaattgccttctaatgttatcaaaactcatttattgtgttactattaaatatgctgaaaacgctaaaagtatacgtattggttctttattaaataatttttgaaaaatcattattcatgatcatggcatacagtatattctcttttttttctttatttatgactgtcactgagtgaaataatagatgacagacatgtctgaatgaagtaaaaatcaatggaagacagtcgggatcttttgcttcatgcaaaaaacttggagtgaagtctcaatgataactgggaaatgtttttcttcctctttatctaactatattacacttatccatcaggtttcattgtattaatctatcctttgaggtaata

SEQ ID NO: 195078 - DNA, 1437 bp, Homo sapiens
  Payload ID: 18510
  Gene Name: tripartite motif containing 49
  ENST ID: ENST00000532501
  CDS Start-End: 127-1254
gaactgcattttggcgacctctgaaattcagtactgcagtgaatgagcttctgatcttgaggtgaacttaacaaaattatttttggaaaaatcgttgtgggaaccattaaaagaactccaggaaacatgaattctggaatcttacaggtctttcagggggaactcatctgccccctgtgcatgaactacttcatagacccggtcaccatagactgtgggcacagcttttgcaggccttgtttctacctcaactggcaagacatcccatttcttgtccagtgctctgaatgcacaaagtcaaccgagcagataaacctcaaaaccaacattcatttgaagaagatggcttctcttgccagaaaagtcagtctctggctattcctgagctctgaggagcaaatgtgtggcactcacagggagacaaagaagatattctgtgaagtggacaggagcctgctctgtttgctgtgctccagctctcaggagcaccggtatcacagacaccgtcccattgagtgggctgctgaggaacaccgggagaagcttttacagaaaatgcagtctttgtgggaaaaagcttgtgaaaatcacagaaacctgaatgtggaaaccaccagaaccagatgctggaaggcttttggagacatattacacaggagtgagtccgtgctgctgcacatgccccagcctctgaatccagagctcagtgcagggcccatcactggactgagggacaggctcaaccaattccgagtgcatattactctgcatcatgaagaagccaacaatgatatctttctgtatgaaattttgagaagcatgtgtattggatgtgaccatcaagatgtaccctatttcactgcaacacctagaagttttcttgcatggggtgttcagactttcacctcgggcaaatattactgggaggtccatgtaggggactcctggaattgggcttttggtgtctgtaatatgtatcggaaagagaagaatcagaatgagaagatagatggaaaggcgggactctttcttcttgggtgtgttaagaatgacattcaatgcagtctctttaccacctccccacttatgctgcaatatatcccaaaacctaccagccgagtaggattattcctggattgtgaggctaagactgtgagctttgttgatgttaatcaaagctccctaatatacaccatccctaattgctctttctcacctcctctcaggcctatcttttgctgtattcacttctgaccagagacaaatcagaaatgtgttcacatgctgtgggaacccctttatcccaggaagtcctcttccttgtgccttaacatacaggacaaataggctctattttatgtcttgaattgccttctaatgttatcaaaactcatttattgtgttactattaaatatgctgaaaacgctaaaagtata

SEQ ID NO: 195079 - DNA, 1534 bp, Homo sapiens
  Payload ID: 18511
  Gene Name: tripartite motif containing 49B
  Uniprot ID: A6NDI0
  ENST ID: ENST00000332682
  CDS Start-End: 124-1482
ctgcattttggtgacctctgaaattcagtacggcagtgaatgagcttctgacgttgaggtgaacttaacaaaattatttttggaaaaatcgttgtgggaaccattaaaagaactcagggaaacatgaattctggaatcttacaggtctttcagagggaactcatctgccccatctgcatgaactacttcatagacccggtcaccatagactgtgggcacagcttttgcaggccttgtttctacctcaactggaaagacagcccatttcttgtccagtgctctgaatgcacaaagtcaacagggcagataaacctcaaaaccaacattcatttcaagaagatggcttctcttgctagaaaagtcagtctctggctattcctgagctctgaggagcaaatgtgtggcactcacagggagacaaagaagatgttctgtgaagtggacaggagcctgctctgtttgctgtgctccagctctcaggagcaccgggatcacagacactgtcccattgagtcggctgctgaggaacaccaggagaagcttttacagaaaatgcagtctttgtgggaaaaagcttgtgaaaatcacagaaacctgaatgtggaaaccaccagaaccagatgctggaaggattatgtgaatttaaggctagaagcaattagagctgagtatcagaagatgcctgcatttcaccatgaagaagaaaaacataatttggagatgctgaaaaagaaggggaaagatatttttcatcgacttcatttaagtaaagccaaaatggctcataggagggagattttaagaggaatgtatgaggagctgaacgaaatgtgccataaaccagatgtggagctacttcaggcttttggagacatattacacaggagtgagtccgtgctgctgcacatgccccagcctctgaatccagagctcagtgcagggcccatcactggactgagggacaggctcaaccaattccgagtgcatattactctgcatcatgaagaagccaacagtgatatctttctatgtgaaattttgagaagcatgtgtattggatgtgaccatcaagatgtaccctatttcactgcaacacctagaagttttcttgcatggggtgctcagactttcacctcgggcaaatattactgggaggtccatgtaggggactcctggaattgggcttttggtgtctgtaatatgtattggaaagagaagaatcagaatgagaagatagatggagaggatggactctttcttcttgggtgtgttaagaatgacattcaacgcagtctctttaccacctccccacttctgctgcaatatatcccaagacctaccagccgagtaggattattcctggattgtgaggctaagactgtgagctttgttgatgttaatcaaagctccctaatatacaccatccctaattgctctttctcacctcctctcaggcctatcttttgctgtattcacttctgaccagagacaaatcagaaatgtgttcacatgctgtgggaacccctttatccca

SEQ ID NO: 195080 - DNA, 2162 bp, Homo sapiens
  Payload ID: 18511
  Gene Name: tripartite motif containing 49B
  Uniprot ID: A6NDI0
  ENST ID: ENST00000622138
  CDS Start-End: 330-1688
ctaatcttccagttgccccctattgactttaaaccaaagctttgattcatgaccactgggatccagccagcgggggatttcttttcctgatggactgtacccaggatctcacatttgcttaagcagcccccacaattggattcttataaaaggacacagaagagacaagctcagttttctctgaaggagaaggactgcacttagaactgcattttggtgacctctgaaattcagtacggcagtgaatgagcttctgacgttgaggtgaacttaacaaaattatttttggaaaaatcgttgtgggaaccattaaaagaactcagggaaacatgaattctggaatcttacaggtctttcagagggaactcatctgccccatctgcatgaactacttcatagacccggtcaccatagactgtgggcacagcttttgcaggccttgtttctacctcaactggaaagacagcccatttcttgtccagtgctctgaatgcacaaagtcaacagggcagataaacctcaaaaccaacattcatttcaagaagatggcttctcttgctagaaaagtcagtctctggctattcctgagctctgaggagcaaatgtgtggcactcacagggagacaaagaagatgttctgtgaagtggacaggagcctgctctgtttgctgtgctccagctctcaggagcaccgggatcacagacactgtcccattgagtcggctgctgaggaacaccaggagaagcttttacagaaaatgcagtctttgtgggaaaaagcttgtgaaaatcacagaaacctgaatgtggaaaccaccagaaccagatgctggaaggattatgtgaatttaaggctagaagcaattagagctgagtatcagaagatgcctgcatttcaccatgaagaagaaaaacataatttggagatgctgaaaaagaaggggaaagatatttttcatcgacttcatttaagtaaagccaaaatggctcataggagggagattttaagaggaatgtatgaggagctgaacgaaatgtgccataaaccagatgtggagctacttcaggcttttggagacatattacacaggagtgagtccgtgctgctgcacatgccccagcctctgaatccagagctcagtgcagggcccatcactggactgagggacaggctcaaccaattccgagtgcatattactctgcatcatgaagaagccaacagtgatatctttctatgtgaaattttgagaagcatgtgtattggatgtgaccatcaagatgtaccctatttcactgcaacacctagaagttttcttgcatggggtgctcagactttcacctcgggcaaatattactgggaggtccatgtaggggactcctggaattgggcttttggtgtctgtaatatgtattggaaagagaagaatcagaatgagaagatagatggagaggatggactctttcttcttgggtgtgttaagaatgacattcaacgcagtctctttaccacctccccacttctgctgcaatatatcccaagacctaccagccgagtaggattattcctggattgtgaggctaagactgtgagctttgttgatgttaatcaaagctccctaatatacaccatccctaattgctctttctcacctcctctcaggcctatcttttgctgtattcacttctgaccagagacaaatcagaaatgtgttcacatgctgtgggaacccctttatcccaggaagtcctcttccttgtgccttaacatacaggacaaataggctctattttatatcttgaattgccttctaatgttatcaaaactcatttattgtgttactattaaatatgctgaaaacactaaaagtatatgtattggttctttattaaataatttttgaaaaatcattattcatgatcatggcatacagtatattctctttttttctttatttctgactgtcactgagtgaaataatagatggcagacatgtctgaatgaagtaaaaatcaatggaagacagtcaggatcttttgcttcatgcaaaaaacttggagtgaagtctcaatgataactgggaaatgtttttcttcctctttatctaactatattacacttatccatcaggcttcattgtattaatctatcctttgaggtaata

SEQ ID NO: 195081 - DNA, 2163 bp, Homo sapiens
  Payload ID: 18512
  Gene Name: tripartite motif containing 49C
  Uniprot ID: P0CI26
  ENST ID: ENST00000448984
  CDS Start-End: 330-1688
ctaatcttccagttgccccctattgactttaaaccaaagctttgattcatgaccactgggatccagccagcgggggatttcttttcctggtggactgtacccaggatctcacatttgcttaagcagcccccacaattgggttcttataaaaggacacggaagagacaagctcagttttctctgaaggagaaggactgcacttagaactgcattttggcgacctctgaaattcagtactgcagtgaatgagcttctgaccttgaggtgaacttaacaaaattatttttggaaaaatcgttgtgggaaccattaaaagaactccaggaaacatgaattctggaatcttacaggtctttcagggggaactcatctgccccctgtgcatgaactacttcatagacccggtcaccatagactgtgggcacagcttttgcaggccttgtttctacctcaactggcaagacatcccatttcttgtccagtgctctgaatgcacaaagtcaacagagcagataaacctcaaaaccaacattcatttgaagaagatggcttctcttgccagaaaagtcagtctctggctattcctgagctctgaggagcaaatgtgtggcactcacagggagacaaagaagatattctgtgaagtggacaggagcctgctctgtttgctgtgctccagctctcaggagcaccggtatcacagacaccgtcccattgagtgggctgctgaggaacaccgggagaagcttttacagaaaatgcagtctttgtgggaaaaagcttgtgaaaatcacagaaacctgaatgtggaaaccaccagaaccagatgctggaaggattatgtgaatttaaggctagaagcaattagagctgagtatcagaagatgcctgcatttcatcatgaagaagaaaaacataatttggagatgctgaaaaagaaggggaaagaaatttttcatcgacttcatttaagtaaagccaaaatggctcataggatggagattttaagaggaatgtatgaggagctgaacgaaatgtgccataaaccagatgtggagctacttcaggcttttggagacatattacacaggagtgagtccgtgctgctgcacatgccccagcctctgaatccagagctcagtgcagggcccatcactggactgagggacaggctcaaccaattccgagtgcatattactctgcatcatgaagaagccaacagtgatatctttctgtatgaaattttgagaagcatgtgtattggatgtgaccatcaagatgtaccctatttcactgcaacacctagaagttttcttgcatggggtgttcagactttcacctcgggcaaatattactgggaggtccatgtaggggactcctggaattgggcttttggtgtctgtaatatgtatcggaaggagaagaatcagaatgagaagatagatggaaaggagggactctttcttcttgggtgtattaagaatgacattcaatgcagtctctttaccacctccccacttatgctgcaatatatcccaaaacctaccagccgagtaggattattcctggattgtgaggctaagactgtgagctttgttgatgttaatcaaagctccctaatatacaccatccctaattgctctttctcacctcctctcaggcctatcttttgctgtattcacttctgaccagagacaaatcagaaatgtgttcacatgctgtgggaacccctttatcccaggaagtcctcttccttgtgccttaacatacaggacaaataggctctattttatgtcttgaattgccttctaatgttatcaaaactcatttattgtgttactattaaatatgctgaaaacgctaaaagtatacgtattggttctttattaaataatttttgaaaaatcattattcatgatcatggcatacagtatattctcttttttttctttatttatgactgtcactgagtgaaataatagatgacagacatgtctgaatgaagtaaaaatcaatggaagacagtcgggatcttttgcttcatgcaaaaaacttggagtgaagtctcaatgataactgggaaatgtttttcttcctctttatctaactatattacacttatccatcaggtttcattgtattaatctatcctttgaggtaata

SEQ ID NO: 195082 - DNA, 1651 bp, Homo sapiens
  Payload ID: 18513
  Gene Name: tripartite motif containing 49D1
  Uniprot ID: C9J1S8
  ENST ID: ENST00000420869
  CDS Start-End: 115-1473
ggtgacctctgaaactcagtactgcggcgaatgagctcctgaccttgaggagtacttaacagaattatttctcgaagaatcattgtgggaacccttcaaagaacccagcgaaacatgaattctggaatctcgcaagtcttccagagggaactcacctgccccatctgcctgaactacttcatagacccggtcaccatagactgtgggcacagcttttgcaggccctgtttctacctcaactggcaagacatcccaattcttactcagtgctttgaatgcctaaagacaacacagcagagaaacctcaaaactaacattcgattgaagaagatggcttcccgtgccagaaaagccagtctctggctattcctgagctctgaggagcaaatgtgtggcactcacagggagacaaagaagatattctgtgaagtggacaggagcctgctctgtttgctgtgctccagctctctggagcaccggtatcacagacactgtcccgctgagtgggctgctgaggaacaccgggagaagcttttaaagaaaatgcagtctttatgggaaaaagtttgtgaaaatcagagaaacctgaacgtggaaaccaccagaatcagccactggaaggattatgtgaatgtaaggctagaagctattagagctgagtatcagaagatgcctgcatttcatcatgaagaagaaaaacataatttggagatgctgaaaaagaaggggaaagatatttttcatcgacttcatttaagtaaagccaaaatggctcacaggagggagattttaagaggaacgtatgcggagctgatgaaaatgtgccataaaccagatgtggagctacttcaggcttttggagacatattacacaggagtgagtccgtgctgctgcacatgccccagcctctgaatctagagctcagggcagggcccatcactggactgagggacaggctcaaccaattccgagtggatattactctgcctcataatgaagccaacagtcatatcttccgacgtggagatttgagaagcatttgtattggatgtgaccgtcaaaatgcgccccatatcactgcaacacctacaagttttcttgcatggggtgctcagactttcacctctggcaaatattactgggaggtccatgtgggggactcttggaattgggcctttggtgtctgtaataagtattggaaagggacgaatcagaatggcaatatacatggagaggagggactctttagtcttgggtgtgttaagaatgacattcagtgcagcctctttaccacctccccacttacactgcagtatgtcccaagacctaccaaccatgtaggattattcctggattgtgaagctagaactgtgagcttcgttgatgttaatcaaagctcccctatacacaccatccctaattgctccttctcacctcctctcaggcctatcttttgctgtgttcacctctgaccagagacaaatcagatatgtgttcatctgctgtgggaacccctttatcccagaaagccctcttccttgtgccttatcaaacaggacaaatacgttctgttttatgtcttgaattgcattctaatgttattaaaactcatttattgtgttactattaaatgtggtaaaaacactaaaa

SEQ ID NO: 195083 - DNA, 2164 bp, Homo sapiens
  Payload ID: 18513
  Gene Name: tripartite motif containing 49D1
  Uniprot ID: C9J1S8
  ENST ID: ENST00000530311
  CDS Start-End: 330-1688
taatcttccagttgccccctaatgactttggaccaaagctttgaatcctgaccattgggatccagccagctgaggatttttcttcctaactgactttaacagggatctcatacttgctcaggcagcccatcaactattcttataaaaggacatagaagagacaagctcagttttctccaaaggagaaggagcgcacttagaggaagctgtgttttggtgacctctgaaactcagtactgcggcgaatgagctcctgaccttgaggagtacttaacagaattatttctcgaagaatcattgtgggaacccttcaaagaacccagcgaaacatgaattctggaatctcgcaagtcttccagagggaactcacctgccccatctgcctgaactacttcatagacccggtcaccatagactgtgggcacagcttttgcaggccctgtttctacctcaactggcaagacatcccaattcttactcagtgctttgaatgcctaaagacaacacagcagagaaacctcaaaactaacattcgattgaagaagatggcttcccgtgccagaaaagccagtctctggctattcctgagctctgaggagcaaatgtgtggcactcacagggagacaaagaagatattctgtgaagtggacaggagcctgctctgtttgctgtgctccagctctctggagcaccggtatcacagacactgtcccgctgagtgggctgctgaggaacaccgggagaagcttttaaagaaaatgcagtctttatgggaaaaagtttgtgaaaatcagagaaacctgaacgtggaaaccaccagaatcagccactggaaggattatgtgaatgtaaggctagaagctattagagctgagtatcagaagatgcctgcatttcatcatgaagaagaaaaacataatttggagatgctgaaaaagaaggggaaagatatttttcatcgacttcatttaagtaaagccaaaatggctcacaggagggagattttaagaggaacgtatgcggagctgatgaaaatgtgccataaaccagatgtggagctacttcaggcttttggagacatattacacaggagtgagtccgtgctgctgcacatgccccagcctctgaatctagagctcagggcagggcccatcactggactgagggacaggctcaaccaattccgagtggatattactctgcctcataatgaagccaacagtcatatcttccgacgtggagatttgagaagcatttgtattggatgtgaccgtcaaaatgcgccccatatcactgcaacacctacaagttttcttgcatggggtgctcagactttcacctctggcaaatattactgggaggtccatgtgggggactcttggaattgggcctttggtgtctgtaataagtattggaaagggacgaatcagaatggcaatatacatggagaggagggactctttagtcttgggtgtgttaagaatgacattcagtgcagcctctttaccacctccccacttacactgcagtatgtcccaagacctaccaaccatgtaggattattcctggattgtgaagctagaactgtgagcttcgttgatgttaatcaaagctcccctatacacaccatccctaattgctccttctcacctcctctcaggcctatcttttgctgtgttcacctctgaccagagacaaatcagatatgtgttcatctgctgtgggaacccctttatcccagaaagccctcttccttgtgccttatcaaacaggacaaatacgttctgttttatgtcttgaattgcattctaatgttattaaaactcatttattgtgttactattaaatgtggtaaaaacactaaaagtatgtgtactggttattaattaatttttgaaaaatcattattcatgatcatggcatgaaatatattctctgtttttttttctttatttctgactgccactgagtgaaataatagttgacagacatgtctgaatggagttaaaatcagtggaagagagtcgggatcttttgcttcatgcaaaaacttggagtgaagcgttaatgataactgggaaatgctgtttttctttctctttatctaactgtgttgcacttatccatcatgtttcattgtactaatctatcctttgagttaata

SEQ ID NO: 195084 - DNA, 1442 bp, Homo sapiens
  Payload ID: 18513
  Gene Name: tripartite motif containing 49D1
  ENST ID: ENST00000605881
  CDS Start-End: 135-1262
cttagaggaagctgtgttttggtgacctctgaaactcagtactgcggcgaatgagctcctgaccttgaggagtacttaacagaattatttctcgaagaatcattgtgggaacccttcaaagaacccagcgaaacatgaattctggaatctcgcaagtcttccagagggaactcacctgccccatctgcctgaactacttcatagacccggtcaccatagactgtgggcacagcttttgcaggccctgtttctacctcaactggcaagacatcccaattcttactcagtgctttgaatgcctaaagacaacacagcagagaaacctcaaaactaacattcgattgaagaagatggcttcccgtgccagaaaagccagtctctggctattcctgagctctgaggagcaaatgtgtggcactcacagggagacaaagaagatattctgtgaagtggacaggagcctgctctgtttgctgtgctccagctctctggagcaccggtatcacagacactgtcccgctgagtgggctgctgaggaacaccgggagaagcttttaaagaaaatgcagtctttatgggaaaaagtttgtgaaaatcagagaaacctgaacgtggaaaccaccagaatcagccactggaaggcttttggagacatattacacaggagtgagtccgtgctgctgcacatgccccagcctctgaatctagagctcagggcagggcccatcactggactgagggacaggctcaaccaattccgagtggatattactctgcctcataatgaagccaacagtcatatcttccgacgtggagatttgagaagcatttgtattggatgtgaccgtcaaaatgcgccccatatcactgcaacacctacaagttttcttgcatggggtgctcagactttcacctctggcaaatattactgggaggtccatgtgggggactcttggaattgggcctttggtgtctgtaataagtattggaaagggacgaatcagaatggcaatatacatggagaggagggactctttagtcttgggtgtgttaagaatgacattcagtgcagcctctttaccacctccccacttacactgcagtatgtcccaagacctaccaaccatgtaggattattcctggattgtgaagctagaactgtgagcttcgttgatgttaatcaaagctcccctatacacaccatccctaattgctccttctcacctcctctcaggcctatcttttgctgtgttcacctctgaccagagacaaatcagatatgtgttcatctgctgtgggaacccctttatcccagaaagccctcttccttgtgccttatcaaacaggacaaatacgttctgttttatgtcttgaattgcattctaatgttattaaaactcatttattgtgttactattaaatgtggtaaaaacactaaaagt

SEQ ID NO: 195085 - DNA, 1651 bp, Homo sapiens; identical to SEQ ID NO: 195082
  Payload ID: 18514
  Gene Name: tripartite motif containing 49D2
  Uniprot ID: C9J1S8
  ENST ID: ENST00000623787
  CDS Start-End: 115-1473

SEQ ID NO: 195086 - DNA, 1411 bp, Homo sapiens
  Payload ID: 18514
  Gene Name: tripartite motif containing 49D2
  Uniprot ID: C9J1S8
  ENST ID: ENST00000526396
  CDS Start-End: 1-1359
atgaattctggaatctcgcaagtcttccagagggaactcacctgccccatctgcctgaactacttcatagacccggtcaccatagactgtgggcacagcttttgcaggccctgtttctacctcaactggcaagacatcccaattcttactcagtgctttgaatgcctaaagacaacacagcagagaaacctcaaaactaacattcgattgaagaagatggcttcccgtgccagaaaagccagtctctggctattcctgagctctgaggagcaaatgtgtggcactcacagggagacaaagaagatattctgtgaagtggacaggagcctgctctgtttgctgtgctccagctctctggagcaccggtatcacagacactgtcccgctgagtgggctgctgaggaacaccgggagaagcttttaaagaaaatgcagtctttatgggaaaaagtttgtgaaaatcagagaaacctgaacgtggaaaccaccagaatcagccactggaaggattatgtgaatgtaaggctagaagctattagagctgagtatcagaagatgcctgcatttcatcatgaagaagaaaaacataatttggagatgctgaaaaagaaggggaaagatatttttcatcgacttcatttaagtaaagccaaaatggctcacaggagggagattttaagaggaacgtatgcggagctgatgaaaatgtgccataaaccagatgtggagctacttcaggcttttggagacatattacacaggagtgagtccgtgctgctgcacatgccccagcctctgaatctagagctcagggcagggcccatcactggactgagggacaggctcaaccaattccgagtggatattactctgcctcataatgaagccaacagtcatatcttccgacgtggagatttgagaagcatttgtattggatgtgaccgtcaaaatgcgccccatatcactgcaacacctacaagttttcttgcatggggtgctcagactttcacctctggcaaatattactgggaggtccatgtgggggactcttggaattgggcctttggtgtctgtaataagtattggaaagggacgaatcagaatggcaatatacatggagaggagggactctttagtcttgggtgtgttaagaatgacattcagtgcagcctctttaccacctccccacttacactgcagtatgtcccaagacctaccaaccatgtaggattattcctggattgtgaagctagaactgtgagcttcgttgatgttaatcaaagctcccctatacacaccatccctaattgctccttctcacctcctctcaggcctatcttttgctgtgttcacctctgaccagagacaaatcagatatgtgttcatctgctgtgggaacccctttatccca

SEQ ID NO: 195087 - DNA, 2290 bp, Homo sapiens
  Payload ID: 18515
  Gene Name: tripartite motif containing 5
  Uniprot ID: Q9C035
  ENST ID: ENST00000380027
  CDS Start-End: 785-1765
atttccttctagaagccaggagcaaaggacagacctctctctggtataaggaggaagagattgagaagaggaattctccagagtctattaactatactacatcaacgcctccaagatactatggtacccatcccaggggaagtggggctacaagaacagtataaatatctcctattggcataataaatggtgtaccccaagaatatgccaagggatgttttgtagagattttgagactaaggagatttggaaattgtgtggctattagcagtttcattcataatgaaatttataatcccttaaaaaacttggaggaagataattgcaggaagaacaccttgaataagcagaactcagctgtgagatcaggagcaagaggagcacattggaagaatttcgaaaaagggcaccttttctaatttttaatacttggctgggttaatctgaaactatgtcagaagaagtggcatgataacaagatcctgagactcaagagaaaagggagattgagtgggaatgcctctagttcccacggctcctcctgtgaacagcacagctacacggcccggctgattcattcagagggcgggactcaccaggccctacgtggagaaatgccattggcccatagtttatctttcactttcctgccctgagtgtgagcaagaatttcctgcggttcctctaggaaaattcctttgtgcagatcaggcccgtggattgggatctgtgaacaagaggaacctcagcagccaggacaggcaggagcagtggaatagctactatggcttctggaatcctggttaatgtaaaggaggaggtgacctgccccatctgcctggaactcctgacacaacccctgagcctggactgcggccacagcttctgccaagcatgcctcactgcaaaccacaagaagtccatgctagacaaaggagagagtagctgccctgtgtgccggatcagttaccagcctgagaacatacggcctaatcggcatgtagccaacatagtggagaagctcagggaggtcaagttgagcccagaggggcagaaagttgatcattgtgcacgccatggagagaaacttctactcttctgtcaggaggacgggaaggtcatttgctggctttgtgagcggtctcaggagcaccgtggtcaccacacgttcctcacagaggaggttgcccgggagtaccaagtgaagctccaggcagctctggagatgctgaggcagaagcagcaggaagctgaagagttagaagctgacatcagagaagagaaagcttcctggaagactcaaatacagtatgacaaaaccaacgtcttggcagattttgagcaactgagagacatcctggactgggaggagagcaatgagctgcaaaacctggagaaggaggaggaagacattctgaaaagccttacgaactctgaaactgagatggtgcagcagacccagtccctgagagagctcatctcagatctggagcatcggctgcaggggtcagtgatggagctgcttcagggtgtggatggcgtcataaaaaggacggagaacgtgaccttgaagaagccagaaacttttccaaaaaatcaaaggagagtgtttcgagctcctgatctgaaaggaatgctagaagtgtttagagagctgacagatgtccgacgctactggggctggagtgcaatggcacgatctcggttcactgcaacctccacctctcagattcaagcaattctcctgcctcagcctcccaagtagctgggattacaggtgcccaccaccacccctggctaaatttgtattttcagtagagacggggtttccccatgttggttaggctcgtctagaacctctgacctcaggtgatccacccgcctcggcctcccaaagtgctgggattacaggcgtgagccacggcgcccagcctgtgcttattttcttaaaataatttttgtattaaaaacttcacattaaataagtgctaatgttttattgcatagtagggtgactagagttaacaataacctattgcatatattttgaaatagctagaagagaggattttgaaagttctcaacacaaagaaatgacacatatttgaggtgatggatatgctaattaccctggttcggttattacgcaatgtatacatgtatcaaaacatcacactgtaccacataaatatgtatatttattatttgtcaattaaaagcaaaataaaacaaaaaaccttcatctaatactttggatcattgtgaaaaaataaattcctgaagtataaag

SEQ ID NO: 195088 - DNA, 2991 bp, Homo sapiens
  Payload ID: 18515
  Gene Name: tripartite motif containing 5
  Uniprot ID: Q9C035
  ENST ID: ENST00000380034
  CDS Start-End: 258-1739
gcggttcctctaggaaaattcctttgtgcagatcaggcccgtggattggtgagtgaatcctaaccacgtcttccctggcctgtcttcactcttctccccagaatcaccacttctgcactggtgtctgaaggtgtattgagtgattttgtggagggcagaagtaggaagtctttgggacaaaactgtatttaccttgggatctgtgaacaagaggaacctcagcagccaggacaggcaggagcagtggaatagctactatggcttctggaatcctggttaatgtaaaggaggaggtgacctgccccatctgcctggaactcctgacacaacccctgagcctggactgcggccacagcttctgccaagcatgcctcactgcaaaccacaagaagtccatgctagacaaaggagagagtagctgccctgtgtgccggatcagttaccagcctgagaacatacggcctaatcggcatgtagccaacatagtggagaagctcagggaggtcaagttgagcccagaggggcagaaagttgatcattgtgcacgccatggagagaaacttctactcttctgtcaggaggacgggaaggtcatttgctggctttgtgagcggtctcaggagcaccgtggtcaccacacgttcctcacagaggaggttgcccgggagtaccaagtgaagctccaggcagctctggagatgctgaggcagaagcagcaggaagctgaagagttagaagctgacatcagagaagagaaagcttcctggaagactcaaatacagtatgacaaaaccaacgtcttggcagattttgagcaactgagagacatcctggactgggaggagagcaatgagctgcaaaacctggagaaggaggaggaagacattctgaaaagccttacgaactctgaaactgagatggtgcagcagacccagtccctgagagagctcatctcagatctggagcatcggctgcaggggtcagtgatggagctgcttcagggtgtggatggcgtcataaaaaggacggagaacgtgaccttgaagaagccagaaacttttccaaaaaatcaaaggagagtgtttcgagctcctgatctgaaaggaatgctagaagtgtttagagagctgacagatgtccgacgctactgggttgatgtgacagtggctccaaacaacatttcatgtgctgtcatttctgaagataagagacaagtgagctctccgaaaccacagataatatatggggcacgagggacaagataccagacatttgtgaatttcaattattgtactggcatcctgggctctcaaagtatcacatcagggaaacattactgggaggtagacgtgtccaagaaaactgcttggatcctgggggtatgtgctggcttccaacctgatgcaatgtgtaatattgaaaaaaatgaaaattatcaacctaaatacggctactgggttatagggttagaggaaggagttaaatgtagtgctttccaggatagttccttccatactccttctgttcctttcattgtgcccctctctgtgattatttgtcctgatcgtgttggagttttcctagactatgaggcttgcactgtctcattcttcaatatcacaaaccatggatttctcatctataagttttctcactgttctttttctcagcctgtatttccatatttaaatcctagaaaatgtggagtccccatgactctgtgctcaccaagctcttgaaccttcttacacactcagccccttctgtacagcacctcttgtccaggtgcatctcatacacctgaactcatttgcatcattttaaccatcttttccttgctgtctcccttctttctatttgaacgtccttcactcatcagtaaaatgtaataattgccttgtgccatattgtccccaatattttattgacatttgatagcaatttttttcatcattttccgtactcctaaggaaaactgacctatacctcataaaatgagaccgctatttaggtattacttctgccagatatttatcacccaattgcctctgacactgactaagaagatgaagaaaagcttttcaacagcctttctatatcatcgtgtgataattgttcaccaatgaatgagtccttagccctgtgtcagtttaccctcgatgcccttatttgtgagttaaagagaaaatatcataaatggtatactcttaagtatagaggttttgtatctagaggatctcagttcaactcctgtctctccatataccagcagtgtaactgtgaataacatacttaaatggctgtgcttatttccttttcttttcttttttctttttttttttttttgagatgaagttttgctcttgttccccaggctggagtgcaatggcacgatctcggttcactgcaacctccacctctcagattcaagcaattctcctgcctcagcctcccaagtagctgggattacaggtgcccaccaccacccctggctaaatttgtattttcagtagagacggggtttccccatgttggttaggctcgtctagaacctctgacctcaggtgatccacccgcctcggcctcccaaagtgctgggattacaggcgtgagccacggcgcccagcctgtgcttattttcttaaaataatttttgtattaaaaacttcacattaaataagtgctaatgttttattgcatagtagggtgactagagttaacaataacctattgcatatattttgaaatagctagaagagaggattttgaaagttctcaacacaaagaaatgacacatatttgaggtgatggatatgctaattaccctggttcggttattacgcaatgtatacatgtatcaaaacatcacactgtaccacataaatatgtatatttattatttgtcaattaaaagcaaaataaaacaaaaaaccttcatctaatactttggatcattgtgaaaaaataaattcctgaagtataaagcatcta

SEQ ID NO: 195089 - DNA, 3170 bp, Homo sapiens
  Payload ID: 18515
  Gene Name: tripartite motif containing 5
  Uniprot ID: Q9C035
  ENST ID: ENST00000396847
  CDS Start-End: 237-1280
ctttgtgcagatcaggcccgtggattggtgagtgaatcctaaccacgtcttccctggcctgtcttcactcttctccccagaatcaccacttctgcactggtgtctgaaggtgtattgagtgattttgtggagggcagaagtaggaagtctttgggacaaaactgtatttaccttgggatctgtgaacaagaggaacctcagcagccaggacaggcaggagcagtggaatagctactatggcttctggaatcctggttaatgtaaaggaggaggtgacctgccccatctgcctggaactcctgacacaacccctgagcctggactgcggccacagcttctgccaagcatgcctcactgcaaaccacaagaagtccatgctagacaaaggagagagtagctgccctgtgtgccggatcagttaccagcctgagaacatacggcctaatcggcatgtagccaacatagtggagaagctcagggaggtcaagttgagcccagaggggcagaaagttgatcattgtgcacgccatggagagaaacttctactcttctgtcaggaggacgggaaggtcatttgctggctttgtgagcggtctcaggagcaccgtggtcaccacacgttcctcacagaggaggttgcccgggagtaccaagtgaagctccaggcagctctggagatgctgaggcagaagcagcaggaagctgaagagttagaagctgacatcagagaagagaaagcttcctggaagactcaaatacagtatgacaaaaccaacgtcttggcagattttgagcaactgagagacatcctggactgggaggagagcaatgagctgcaaaacctggagaaggaggaggaagacattctgaaaagccttacgaactctgaaactgagatggtgcagcagacccagtccctgagagagctcatctcagatctggagcatcggctgcaggggtcagtgatggagctgcttcagggtgtggatggcgtcataaaaaggacggagaacgtgaccttgaagaagccagaaacttttccaaaaaatcaaaggagagtgtttcgagctcctgatctgaaaggaatgctagaagtgtttagagagctgacagatgtccgacgctactggggtaaggagaagtcacattatcataagccaccctgcggcttatcattattattatctttatcttttagaattttatgttctctattaggctcatgttttaagatttatgattctccttccaagacacacataacttacccctccttataacttctaaacaaggttcctcccagttttctctcaagtctttatcaagatttctctcatatcacaaataaagttacattatatcccttagctgacctgttaatttttctacagttgatgtgacagtggctccaaacaacatttcatgtgctgtcatttctgaagataagagacaagtgagctctccgaaaccacagataatatatggggcacgagggacaagataccagacatttgtgaatttcaattattgtactggcatcctgggctctcaaagtatcacatcagggaaacattactgggaggtagacgtgtccaagaaaactgcttggatcctgggggtatgtgctggcttccaacctgatgcaatgtgtaatattgaaaaaaatgaaaattatcaacctaaatacggctactgggttatagggttagaggaaggagttaaatgtagtgctttccaggatagttccttccatactccttctgttcctttcattgtgcccctctctgtgattatttgtcctgatcgtgttggagttttcctagactatgaggcttgcactgtctcattcttcaatatcacaaaccatggatttctcatctataagttttctcactgttctttttctcagcctgtatttccatatttaaatcctagaaaatgtggagtccccatgactctgtgctcaccaagctcttgaaccttcttacacactcagccccttctgtacagcacctcttgtccaggtgcatctcatacacctgaactcatttgcatcattttaaccatcttttccttgctgtctcccttctttctatttgaacgtccttcactcatcagtaaaatgtaataattgccttgtgccatattgtccccaatattttattgacatttgatagcaatttttttcatcattttccgtactcctaaggaaaactgacctatacctcataaaatgagaccgctatttaggtattacttctgccagatatttatcacccaattgcctctgacactgactaagaagatgaagaaaagcttttcaacagcctttctatatcatcgtgtgataattgttcaccaatgaatgagtccttagccctgtgtcagtttaccctcgatgcccttatttgtgagttaaagagaaaatatcataaatggtatactcttaagtatagaggttttgtatctagaggatctcagttcaactcctgtctctccatataccagcagtgtaactgtgaataacatacttaaatggctgtgcttatttccttttcttttcttttttctttttttttttttttgagatgaagttttgctcttgttccccaggctggagtgcaatggcacgatctcggttcactgcaacctccacctctcagattcaagcaattctcctgcctcagcctcccaagtagctgggattacaggtgcccaccaccacccctggctaaatttgtattttcagtagagacggggtttccccatgttggttaggctcgtctagaacctctgacctcaggtgatccacccgcctcggcctcccaaagtgctgggattacaggcgtgagccacggcgcccagcctgtgcttattttcttaaaataatttttgtattaaaaacttcacattaaataagtgctaatgttttattgcatagtagggtgactagagttaacaataacctattgcatatattttgaaatagctagaagagaggattttgaaagttctcaacacaaagaaatgacacatatttgaggtgatggatatgctaattaccctggttcggttattacgcaatgtatacatgtatcaaaacatcacactgtaccacataaatatgtatatttattatttgtcaattaaaagcaaaataaaacaaaaaa

SEQ ID NO: 195090 - DNA, 1054 bp, Homo sapiens
  Payload ID: 18515
  Gene Name: tripartite motif containing 5
  ENST ID: ENST00000412903
  CDS Start-End: 427-1054
tccgttctgctggaacacaaacgcgcttctcagtttctctggaggaacttggttggcgaagagcttggcgcttcttgtaaaccttgtcccgctggacaaagacttgtgaaggaacacggagtgccaccaggactccgtggccctccccgcctctctctcctttttcccttcatggcggtgaagctgtggacgcttctcttcaggaggtgagctccagatgagacgccacatcccagcggagtcccggaagggtcaccccgcaggtctaaggcccgcctgttctgtgccgtgacctgtgctaccgaagtcatctgttgctgtagggaggccagggactcagccgatgcctcaatggccaactgcagggatctgtgaacaagaggaacctcagcagccaggacaggcaggagcagtggaatagctactatggcttctggaatcctggttaatgtaaaggaggaggtgacctgccccatctgcctggaactcctgacacaacccctgagcctggactgcggccacagcttctgccaagcatgcctcactgcaaaccacaagaagtccatgctagacaaaggagagagtagctgccctgtgtgccggatcagttaccagcctgagaacatacggcctaatcggcatgtagccaacatagtggagaagctcagggaggtcaagttgagcccagaggggcagaaagttgatcattgtgcacgccatggagagaaacttctactcttctgtcaggaggacgggaaggtcatttgctggctttgtgagcggtctcaggagcaccgtggtcaccacacgttcctcacagaggaggttgcccgggagtaccaagtgaagctccaggcagctctggagatgctgaggcagaagcagcaggaagctgaagagttagaagctgacatcagagaagagaaagcttcctggaagactcaaatacagtatgacaaaaccaacgtcttggcagattttgagcaactgagagacatcctggactgggaggagagcaatgagctgcaaaacctggagaaggaggaggaagaca

SEQ ID NO: 195091 - DNA, 607 bp, Homo sapiens
  Payload ID: 18515
  Gene Name: tripartite motif containing 5
  ENST ID: ENST00000419850
  CDS Start-End: 392-607
cctttgtgcagatcaggcccgtggattggtgagtgaatcctaaccacgtcttccctggcctgtcttcactcttctccccagaatcaccacttctgcactggtgtctgaaggtgtattgagtgattttgtggagggcagaagtaggaagtctttgggacaaaactgtatttaccttgaatgaagccgcggacgcttgcagtgagtgttacagttcttaaaggcggcatgtccggagtttcttccttctgatgttcggatgtgttcagagtttcttctttctggtgggttcgtggtctcgctggctcaggagggaagctgcagaccttcgcgggatctgtgaacaagaggaacctcagcagccaggacaggcaggagcagtggaatagctactatggcttctggaatcctggttaatgtaaaggaggaggtgacctgccccatctgcctggaactcctgacacaacccctgagcctggactgcggccacagcttctgccaagcatgcctcactgcaaaccacaagaagtccatgctagacaaaggagagagtagctgccctgtgtgccggatcagttaccagcctgagaacatacggcctaatcggcat

SEQ ID NO: 195092 - DNA, 2759 bp, Homo sapiens
  Payload ID: 18515
  Gene Name: tripartite motif containing 5
  Uniprot ID: Q9C035
  ENST ID: ENST00000433961
  CDS Start-End: 56-871
gtgaacaagaggaacctcagcagccaggacaggcaggagcagtggaatagctactatggcttctggaatcctggttaatgtaaaggaggaggtgacctgccccatctgcctggaactcctgacacaacccctgagcctggactgcggccacagcttctgccaagcatgcctcactgcaaaccacaagaagtccatgctagacaaaggagagagtagctgccctgtgtgccggatcagttaccagcctgagaacatacggcctaatcggcatgtagccaacatagtggagaagctcagggaggtcaagttgagcccagaggggcagaaagttgatcattgtgcacgccatggagagaaacttctactcttctgtcaggaggacgggaaggtcatttgctggctttgtgagcggtctcaggagcaccgtggtcaccacacgttcctcacagaggaggttgcccgggagtaccaagtgaagctccaggcagctctggagatgctgaggcagaagcagcaggaagctgaagagttagaagctgacatcagagaagagaaagcttcctggaagactcaaatacagtatgacaaaaccaacgtcttggcagattttgagcaactgagagacatcctggactgggaggagagcaatgagctgcaaaacctggagaaggaggaggaagacattctgaaaagccttacgaactctgaaactgagatggtgcagcagacccagtccctgagagagctcatctcagatctggagcatcggctgcaggggtcagtgatggagctgcttcaggacggagaacgtgaccttgaagaagccagaaacttttccaaaaaatcaaaggagagtgtttcgagctcctgatctgaaaggaatgctagaagtgtttagagagctgacagatgtccgacgctactgggttgatgtgacagtggctccaaacaacatttcatgtgctgtcatttctgaagataagagacaagtgagctctccgaaaccacagataatatatggggcacgagggacaagataccagacatttgtgaatttcaattattgtactggcatcctgggctctcaaagtatcacatcagggaaacattactgggaggtagacgtgtccaagaaaactgcttggatcctgggggtatgtgctggcttccaacctgatgcaatgtgtaatattgaaaaaaatgaaaattatcaacctaaatacggctactgggttatagggttagaggaaggagttaaatgtagtgctttccaggatagttccttccatactccttctgttcctttcattgtgcccctctctgtgattatttgtcctgatcgtgttggagttttcctagactatgaggcttgcactgtctcattcttcaatatcacaaaccatggatttctcatctataagttttctcactgttctttttctcagcctgtatttccatatttaaatcctagaaaatgtggagtccccatgactctgtgctcaccaagctcttgaaccttcttacacactcagccccttctgtacagcacctcttgtccaggtgcatctcatacacctgaactcatttgcatcattttaaccatcttttccttgctgtctcccttctttctatttgaacgtccttcactcatcagtaaaatgtaataattgccttgtgccatattgtccccaatattttattgacatttgatagcaatttttttcatcattttccgtactcctaaggaaaactgacctatacctcataaaatgagaccgctatttaggtattacttctgccagatatttatcacccaattgcctctgacactgactaagaagatgaagaaaagcttttcaacagcctttctatatcatcgtgtgataattgttcaccaatgaatgagtccttagccctgtgtcagtttaccctcgatgcccttatttgtgagttaaagagaaaatatcataaatggtatactcttaagtatagaggttttgtatctagaggatctcagttcaactcctgtctctccatataccagcagtgtaactgtgaataacatacttaaatggctgtgcttatttccttttcttttcttttttctttttttttttttttgagatgaagttttgctcttgttccccaggctggagtgcaatggcacgatctcggttcactgcaacctccacctctcagattcaagcaattctcctgcctcagcctcccaagtagctgggattacaggtgcccaccaccacccctggctaaatttgtattttcagtagagacggggtttccccatgttggttaggctcgtctagaacctctgacctcaggtgatccacccgcctcggcctcccaaagtgctgggattacaggcgtgagccacggcgcccagcctgtgcttattttcttaaaataatttttgtattaaaaacttcacattaaataagtgctaatgttttattgcatagtagggtgactagagttaacaataacctattgcatatattttgaaatagctagaagagaggattttgaaagttctcaacacaaagaaatgacacatatttgaggtgatggatatgctaattaccctggttcggttattacgcaatgtatacatgtatcaaaacatcacactgtaccacataaatatgtatatttattatttgtcaattaaaagcaaaataaaacaaaaaaccttcatctaatactttggatcattgtgaaaaaataaattcctgaagtataaa

SEQ ID NO: 195093 - DNA, 767 bp, Homo sapiens
  Payload ID: 18515
  Gene Name: tripartite motif containing 5
  ENST ID: ENST00000438025
  CDS Start-End: 1-563
gtggtcaccacacgttcctcacagaggaggttgcccgggagtaccaagtgaagctccaggcagctctggagatgctgaggcagaagcagcaggaagctgaagagttagaagctgacatcagagaagagaaagcttcctggaagactcaaatacagtatgacaaaaccaacgtcttggcagattttgagcaactgagagacatcctggactgggaggagagcaatgagctgcaaaacctggagaaggaggaggaagacattctgaaaagccttacgaactctgaaactgagatggtgcagcagacccagtccctgagagagctcatctcagatctggagcatcggctgcaggggtcagtgatggagctgcttcagggtgtggatggcgtcataaaaagagctgacagatgtccgacgctactggggctggagtgcaatggcacgatctcggttcactgcaacctccacctctcagattcaagcaattctcctgcctcagcctcccaagtagctgggattacaggtgcccaccaccacccctggctaaatttgtattttcagtagagacggggtttccccatgttggttaggctcgtctagaacctctgacctcaggtgatccacccgcctcggcctcccaaagtgctgggattacaggcgtgagccacggcgcccagcctgtgcttattttcttaaaataatttttgtattaaaaacttcacattaaataagtgctaatgttttattgcatagtagggtgactagagt

SEQ ID NO: 195094 - DNA, 2047 bp, Homo sapiens
  Payload ID: 18516
  Gene Name: tripartite motif containing 50
  Uniprot ID: Q86XT4
  ENST ID: ENST00000333149
  CDS Start-End: 202-1665
agagcatgatggggcacgcgcggtagcgcgaggcggggcatgtaaccatagcgtgcgggtcatgatgaggcacggacgtggggggttaggtggggcacgtaattggagctcgcggggcaggatggggcatctaactggagcgacagagagcacgatggggcacttacaggggccggaggctggcccgggcagtgagtgtggatggcttggcaggtgagcctgccagagctggaggaccggcttcagtgtcccatctgcctggaggtcttcaaggagcccctgatgctgcagtgtggccactcttactgcaagggctgcctggtttccctgtcctgccacctggatgccgagctgcgctgccccgtgtgccggcaggcggtggacggcagcagctccctgcccaacgtctccctggccagggtgatcgaagccctgaggctccctggggacccggagcccaaggtctgcgtgcaccaccggaacccgctcagccttttctgcgagaaggaccaggagctcatctgtggcctctgcggtctgctgggctcccaccaacaccacccggtcacgcccgtctccaccgtctacagccgcatgaaggaggagctcgcagccctcatctctgagctgaagcaggagcagaaaaaggtggatgagctcatcgccaaactggtgaacaaccggacccgaatcgtcaatgagtcggatgtcttcagctgggtgatccgccgcgagttccaggagctgcaccacctggtggatgaggagaaggcccgctgcctggaggggatagggggtcacacccgtggcctggtggcctccctggacatgcagctggagcaggcccagggaacccgggagcggctggcccaagccgagtgtgtgctggaacagttcggcaatgaggaccaccacaagttcatccggaagttccactccatggcctccagagcagagatgccgcaggcccggcccttagaaggcgcattcagccccatctccttcaagccaggcctccaccaggctgacatcaagctgaccgtgtggaaaaggctcttccggaaagttttgccagccccggagcctctcaagttggaccctgccactgcccacccactcctggagctctccaagggcaacacggtggtgcagtgcgggcttctggcccagcggcgagccagccagcctgagcgcttcgactacagcacctgcgtcctggccagccgcggcttctcctgcggccgccactactgggaggtggtggtgggcagcaagagcgactggcgcctgggggtcatcaagggcacagccagccgtaagggcaagctgaacaggtcccccgagcacggcgtgtggctgatcggcctgaaggagggccgggtgtacgaagcctttgcctgcccccgggtacccctgcccgtggccggccacccccaccgcatcgggctctacctgcactatgagcagggcgaactcaccttcttcgatgccgaccgccccgatgacctgcggccgctctacaccttccaggccgacttccagggcaagctctaccccatcctggacacctgctggcacgagaggggcagcaactcgctgcccatggtgctgcccccgcccagcgggcctggccccctcagccccgagcagcccaccaagctgtagggccgcccggagtcctgccggcccacaggcccatcccggcggggcaccggggactcgcgggcttctgctgggtcccgcctgaggtgatatcgtcactgtttaggaaggtcttcaggcctgtgtgtccctggaacatgtaatgatagggaacaggaccccagtccctttcccctcagccaagggtgtatttgtaaacttcggcccccaggccttggcagccagggacacactgaaatccccatggttcctgccacttgctaaccatgctatctgcgcagacgcttccgagggcagaaatagtcccatgtataccttttccatattactgtgaactttcaactactatcaaggataataaatttgacattatttctttctcttt

SEQ ID NO: 195095 - DNA, 1599 bp, Homo sapiens
  Payload ID: 18516
  Gene Name: tripartite motif containing 50
  Uniprot ID: Q86XT4
  ENST ID: ENST00000453152
  CDS Start-End: 126-1589
tttcccacttctgactctgtgcctgctgttccctgctgggaagaaggaaagccagtgatgctggcttgaggctgtagtgggaggcccagcggattgtgagaagccagcccgggcagtgagtgtggatggcttggcaggtgagcctgccagagctggaggaccggcttcagtgtcccatctgcctggaggtcttcaaggagcccctgatgctgcagtgtggccactcttactgcaagggctgcctggtttccctgtcctgccacctggatgccgagctgcgctgccccgtgtgccggcaggcggtggacggcagcagctccctgcccaacgtctccctggccagggtgatcgaagccctgaggctccctggggacccggagcccaaggtctgcgtgcaccaccggaacccgctcagccttttctgcgagaaggaccaggagctcatctgtggcctctgcggtctgctgggctcccaccaacaccacccggtcacgcccgtctccaccgtctacagccgcatgaaggaggagctcgcagccctcatctctgagctgaagcaggagcagaaaaaggtggatgagctcatcgccaaactggtgaacaaccggacccgaatcgtcaatgagtcggatgtcttcagctgggtgatccgccgcgagttccaggagctgcaccacctggtggatgaggagaaggcccgctgcctggaggggatagggggtcacacccgtggcctggtggcctccctggacatgcagctggagcaggcccagggaacccgggagcggctggcccaagccgagtgtgtgctggaacagttcggcaatgaggaccaccacaagttcatccggaagttccactccatggcctccagagcagagatgccgcaggcccggcccttagaaggcgcattcagccccatctccttcaagccaggcctccaccaggctgacatcaagctgaccgtgtggaaaaggctcttccggaaagttttgccagccccggagcctctcaagttggaccctgccactgcccacccactcctggagctctccaagggcaacacggtggtgcagtgcgggcttctggcccagcggcgagccagccagcctgagcgcttcgactacagcacctgcgtcctggccagccgcggcttctcctgcggccgccactactgggaggtggtggtgggcagcaagagcgactggcgcctgggggtcatcaagggcacagccagccgtaagggcaagctgaacaggtcccccgagcacggcgtgtggctgatcggcctgaaggagggccgggtgtacgaagcctttgcctgcccccgggtacccctgcccgtggccggccacccccaccgcatcgggctctacctgcactatgagcagggcgaactcaccttcttcgatgccgaccgccccgatgacctgcggccgctctacaccttccaggccgacttccagggcaagctctaccccatcctggacacctgctggcacgagaggggcagcaactcgctgcccatggtgctgcccccgcccagcgggcctggccccctcagccccgagcagcccaccaagctgtagggccgcccgg

SEQ ID NO: 195096 - DNA, 3466 bp, Homo sapiens
  Payload ID: 18517
  Gene Name: tripartite motif containing 52
  Uniprot ID: Q96A61
  ENST ID: ENST00000611618
  CDS Start-End: 306-1199
gctgcatctgaggcggacgccgcagtgtagggcacaccctgagggtagcgagagacgtgacaggaccgagcagctgggggctgcagcctgctctgtccccaccgatcccagagagaggctgtgagtctggatctgggcgttcgcaccctgagagagggggtcaaagctcccctgcggccccgaggaagaagagcaaggttgaggacagcctcgggtcaccagagtagtttggaggcaggcctgcaggcgcgtccccgctcctcagctccaagctgacgtatctacacctgccggcgggcattaagatggctggttatgccactactcccagccccatgcagacccttcaggaggaagcggtgtgtgccatctgcttggattacttcaaggaccccgtgtccatcagctgtgggcacaacttctgccgagggtgtgtgacccagctgtggagtaaggaggacgaggaggaccagaacgaggaggaagatgaatgggaggaggaggaggacgaggaagcggtgggggccatggatggatgggacggctccattcgagaggtgttgtatcgggggaatgctgacgaagagttgttccaagaccaagatgacgatgaactctggctcggtgacagtggtataactaattgggacaacgtagactatatgtgggacgaggaggaagaagaagaagaggaagatcaggactattacctaggaggcttgagacctgacctgagaattgatgtctaccgagaagaagaaatactggaagcatacgatgaggacgaagatgaagagctgtatcctgacatccacccgcctccttccttgccccttccagggcagttcacctgcccccagtgccgaaagagctttacacgtcgcagctttcgtcccaacttgcagctggccaacatggtccagataattcgccagatgtgccccactccttatcggggaaaccggagtaatgatcagggcatgtgctttaaacaccaggaagccctgaaactcttctgtgaggtggacaaagaggccatctgtgtggtgtgccgagaatccaggagccacaaacagcacagcgtgctgcctttggaggaggtggtgcaggagtaccaggaaataaagttggaaacaactctggtgggaatacttcagatagagcaagaaagcattcacagcaaggcctataatcagtaagatgtgtgaaaagttgggtagccacaggaggtgttcattaaggatatgattccatttatatagctatttctattgcataaccaggacagttttattgttttgaggtcaatgttcttttaaaatttgattttctgtaagaagaggctttttggcccagaaagccttacttattttacatcttccagtttgtccatcccatgagttagagttcgtcttgactctgcaagctagaatcaaagaattatgaaagtaagatcatttagatttgaccaagggcaccattaaatggtgtcaggttttaggaagcagacgggtgtataaaaagaaaatgaacaaagatttcacttattggggatcaggcataactggatgcctggattgtcctgccacccagctgccaccaataaaatcattcatcactctgcaagagggaccagatgcttccatcatcagtactccttgtttttctgttatctcctttgaggtagctaaaaatggcagccaaaaaaaaatgttgaggcttttctcaagtatatactcatgttattttgcagaagatagggtcaacttcttcagttgagttatctgaaagtgttgggcagtgacaccatgccaaacactgttaaattcatgccattaaaaacagtggagtgttctgcaaagcccgattctctgcagctttaagactggacagtattgaaatattcacaggaatcttccaagccgtgaaagcttaatattaaacagcccttttaattgcaaaggagaaaaaaatggagacacttgtgaaaccttgcattctgagtgctgccacaaataaattaaggaattccagaatttcttcatctacttctgcagtcttaactctgaattaatgactgtatatatcaaacttcagatcttaaaaaacatcagctcgcaagaggctgaggcaggagaatgacatgaacctgggaggcggagcttgcagtaagccgagactgagccactgcactccagcctgggcaatagagcaagactccatctcaaaaaaaaaaaaaaatcggctcatcttttattgctgttggttgagatgaatctactgatgaagaaaactgtactttgcttacattcagaataaggctttcaaaactgtgggtgtgctgttttcgtgagccttctacttgaccaccaaagacagtatttttgcagctgtatcaaatgaaccgagttggaggaaattgtataggagtatatcttaatggcactacagcaaactgtgttaaatttgggtttttggcaaagattgaagaaaactggtattcaagatgtactgcagctgtcaccaccaagcatgaactttcactgattacccataacctactggaaatcttcagccttgctgtcagcatagaccactgtgagaaacagtacattccattccagtttgccctgctttttgaagatctaaatgccattccatgttttctgttacatattgaagtttcttggttgccaaagaaaaacggattctgctgaacttgtggacagaacaaccccaaggttggaagaacaatgaaaaataatctatacttgaacatttcaaaagttaaaattttcaacagagttttaacacactgaagcttaaaatacattgacactgaaatgtcaatgggcaaacaccaatttcgccgttcattatgaaatacatcaaacaaaacttgccaaaaatacaaccataaaaatatagcaaatgtatgtatgagcaaactaatgctaaaaatgtctaattttcttggctagtctttcaaggaccagattcatgagtgttatttgaagggaaaaagtgaaatacttggaattattttgagtgatgtgctcctgagcttgttcttaaaatctaccagtggtagcttttggaaagaatgtgtttcataccgatgtgcaggcctcactggaagagcttcaagaggagtttgtgaaactcaaagtctaatggttttgattagaaacttccaggcaaatactccagagaaacttgggtgtaaaatgactaaacagatgaaaaggctttatccactattccatttgctccttacaccttaaaaagcttttttattttttaatgttttgatatatctagctttggggagaaagcagtgcaagagtgttattaaaagcagcttgtgttttcttgcacctttcacaccacccaggaaagaaaagttcaggcttaacagtgacatggctatcacatcatctgaataaattttttccttctaaaatta

SEQ ID NO: 195097 - DNA, 2027 bp, Homo sapiens
  Payload ID: 18518
  Gene Name: tripartite motif containing 54
  Uniprot ID: Q9BYV2
  ENST ID: ENST00000296098
  CDS Start-End: 271-1473
gtcatttgggaaacaaaaggagaattttacagagagagagggatagctaaaactacgtgagcctggcgagggtgcagagcagaaagtagagactgtccgaagactgctatctgggacgagacaagttgttaaagggacaggagagaaagcagagctatttcaagagtgagccacagaagggaatccagaggccatctaagcgaggaagggtctacaggcagtgagtgaaggccaggagcagggcccaggccaggcacgaccaccgaggggatgaacttcacagtgggtttcaagccgctgctaggggatgcacacagcatggacaacctggagaagcagctcatctgccccatctgcctggagatgttctccaaaccagtggtgatcctgccctgccaacacaacctgtgccgcaaatgtgccaacgacgtcttccaggcctcgaatcctctatggcagtcccggggctccaccactgtgtcttcaggaggccgtttccgctgcccatcgtgcaggcatgaggttgtcctggacagacacggtgtctacggcctgcagcgaaacctgctagtggagaacattatcgacatttacaagcaggagtcatccaggccgctgcactccaaggctgagcagcacctcatgtgcgaggagcatgaagaagagaagatcaatatttactgcctgagctgtgaggtgcccacctgctctctctgcaaggtcttcggtgcccacaaggactgtgaggtggccccactgcccaccatttacaaacgccagaagaaacaggatctcactctgttgcccaggctggagtgcagtggcacaaacacaacttactgcagccttgatctcccgagctcaagtgatcctcccatcttagcctcgcagaacactaagattatagatagtgagctcagcgatggcatcgcgatgctggtggcaggcaatgaccgcgtgcaagcagtgatcacacagatggaggaggtgtgccagactatcgaggacaatagccggaggcagaagcagttgttaaaccagaggtttgagagcctgtgcgcagtgctggaggagcgcaagggtgagctgctgcaggcgctggcccgggagcaagaggagaagctgcagcgcgtccgcggcctcatccgtcagtatggcgaccacctggaggcctcctctaagctggtggagtctgccatccagtccatggaagagccacaaatggcgctgtatctccagcaggccaaggagctgatcaataaggtcggggccatgtcgaaggtggagctggcagggcggccggagccaggctatgagagcatggagcaattcaccgtaagggtggagcacgtggccgaaatgctgcggaccatcgacttccagccaggcgcttccggggaggaagaggaggtggccccagacggagaggagggcagcgcggggccggaggaagagcggccggatgggccttaaggcctgcgccgacccgaccctgctcgagagcccgcgctagagtcggggaggatctgcgcagagaccgcagcatcacccaaatcggcgccggccccgggaggatctcaataaagaactcgagcgtcccagacccgtatctcctttcgctgcccaaccccgcagcctgggcttcgaaggcgacccgcccaccatcctgcccttcccagaacctgagaccgtctggggggcggaagccaaatgaacccctattgggcacctctgtgatgccaggagcgaactggtgagcccagcgccctgggaagagggccgagggcggggcggtggtgccgggacctctgaggtcctggggatttggggacccttggggtccacatgcacctggctgacctggctgaaagccgctgtctcggagccccccacagcattttgttcccctcccgctggcccgggggccccaccttcccacgggttcccacgctgctgtgactgccctgcctctacgacaaaagccaacgggtcttcagtacttttattaaaaaatagtcacgcagaca

SEQ ID NO: 195098 - DNA, 1967 bp, Homo sapiens
  Payload ID: 18518
  Gene Name: tripartite motif containing 54
  Uniprot ID: Q9BYV2
  ENST ID: ENST00000380075
  CDS Start-End: 341-1417
acagtaaaattaatctgctctctggggagtaagggacaaacagtgctacccacagagtgaacaagagagagtcatttgggaaacaaaaggagaattttacagagagagagggatagctaaaactacgtgagcctggcgagggtgcagagcagaaagtagagactgtccgaagactgctatctgggacgagacaagttgttaaagggacaggagagaaagcagagctatttcaagagtgagccacagaagggaatccagaggccatctaagcgaggaagggtctacaggcagtgagtgaaggccaggagcagggcccaggccaggcacgaccaccgaggggatgaacttcacagtgggtttcaagccgctgctaggggatgcacacagcatggacaacctggagaagcagctcatctgccccatctgcctggagatgttctccaaaccagtggtgatcctgccctgccaacacaacctgtgccgcaaatgtgccaacgacgtcttccaggcctcgaatcctctatggcagtcccggggctccaccactgtgtcttcaggaggccgtttccgctgcccatcgtgcaggcatgaggttgtcctggacagacacggtgtctacggcctgcagcgaaacctgctagtggagaacattatcgacatttacaagcaggagtcatccaggccgctgcactccaaggctgagcagcacctcatgtgcgaggagcatgaagaagagaagatcaatatttactgcctgagctgtgaggtgcccacctgctctctctgcaaggtcttcggtgcccacaaggactgtgaggtggccccactgcccaccatttacaaacgccagaagagtgagctcagcgatggcatcgcgatgctggtggcaggcaatgaccgcgtgcaagcagtgatcacacagatggaggaggtgtgccagactatcgaggacaatagccggaggcagaagcagttgttaaaccagaggtttgagagcctgtgcgcagtgctggaggagcgcaagggtgagctgctgcaggcgctggcccgggagcaagaggagaagctgcagcgcgtccgcggcctcatccgtcagtatggcgaccacctggaggcctcctctaagctggtggagtctgccatccagtccatggaagagccacaaatggcgctgtatctccagcaggccaaggagctgatcaataaggtcggggccatgtcgaaggtggagctggcagggcggccggagccaggctatgagagcatggagcaattcaccgtaagggtggagcacgtggccgaaatgctgcggaccatcgacttccagccaggcgcttccggggaggaagaggaggtggccccagacggagaggagggcagcgcggggccggaggaagagcggccggatgggccttaaggcctgcgccgacccgaccctgctcgagagcccgcgctagagtcggggaggatctgcgcagagaccgcagcatcacccaaatcggcgccggccccgggaggatctcaataaagaactcgagcgtcccagacccgtatctcctttcgctgcccaaccccgcagcctgggcttcgaaggcgacccgcccaccatcctgcccttcccagaacctgagaccgtctggggggcggaagccaaatgaacccctattgggcacctctgtgatgccaggagcgaactggtgagcccagcgccctgggaagagggccgagggcggggcggtggtgccgggacctctgaggtcctggggatttggggacccttggggtccacatgcacctggctgacctggctgaaagccgctgtctcggagccccccacagcattttgttcccctcccgctggcccgggggccccaccttcccacgggttcccacgctgctgtgactgccctgcctctacgacaaaagccaacgggtcttcagtacttttattaaaaaatagtcacgca

SEQ ID NO: 195099 - DNA, 1960 bp, Homo sapiens
  Payload ID: 18519
  Gene Name: tripartite motif containing 55
  Uniprot ID: Q9BYV6
  ENST ID: ENST00000276573
  CDS Start-End: 227-1849
tcctgtcactggcttatatggacacgtcagcccaccgtcacgtgaccgcaggctgctaaaaacagctccagcacccactccaaaccagggcctgaaacaatgtcctccaccgagagaaacgtaaaggacacttgatcacacaatccctggaataatatccaggaaacacttgctggagccactcgcagcacccttccctggcagcacacttggggacagcgaggagatgagcgcatctctgaattacaaatctttttccaaagagcagcagaccatggataacttagagaagcaactcatctgtcccatctgcttagagatgttcacgaaacctgtggtgattctcccttgtcagcacaacctgtgtaggaaatgtgccagtgatattttccaggcctctaacccgtatttgcccacaagaggaggtaccaccatggcatcagggggccgattccgctgcccatcctgtagacatgaagtggttttggatagacatggggtatatggacttcagaggaacctgctggtggaaaatatcattgacatctacaagcaggagtccaccaggccagaaaagaaatccgaccagcccatgtgcgaggaacatgaagaggagcgcatcaacatctactgtctgaactgcgaagtacccacctgctctctgtgcaaggtgtttggtgcacacaaagactgccaggtggctcccctcactcatgtgttccagagacagaagtctgagctcagtgatggcatcgccatcctcgtgggcagcaacgatcgagtccagggagtgatcagccagctggaagacacctgcaaaactatcgaggaatgttgcagaaaacagaaacaagagctttgtgagaagtttgattacctgtatggcattttggaggagaggaagaatgaaatgacccaagtcattacccgaacccaagaggagaaactggaacatgtccgtgctctgatcaaaaagtattctgatcatttggagaacgtctcaaagttggttgagtcaggaattcagtttatggatgagccagaaatggcagtgtttctgcagaatgccaaaaccctgctaaaaaaaatctcggaagcatcaaaggcatttcagatggagaaaatagaacatggctatgagaacatgaaccacttcacagtcaacctcaatagagaagaaaagataatacgtgaaattgacttttacagagaagatgaagatgaagaagaagaagaaggcggagaaggagaaaaagaaggagaaggagaagtgggaggagaagcagtagaagtggaagaggtagaaaatgttcaaacagagtttccaggagaagatgaaaacccagaaaaagcttcagagctctctcaggtggagctgcaggctgcccctggggcacttccagtttcctctccagagccacctccagccctgccacctgctgcggatgcccctgtgacacagggggaggttgtacccactggctctgagcagaccacagagtctgaaactccagtccctgcagcagcagaaactgcggatcccttgttttaccctagttggtataaaggccaaacccggaaagccaccaccaacccaccttgcaccccagggagcgaaggtctggggcaaatagggcctccaggttctgaggattcgaatgtacggaaggcagaagtggcagcagccgcagcgagtgagagggcagctgtgagtggtaaggaaactagtgcacctgcagctacttctcaggagttagtaatctgcctagcgcttttggcttttcttattcttcactacatctggagtcagattcagtgcttgatttttactttaatggattggatttgaggctcctcccctccagggacaggctgcagctccagcgagtggcagtggagctgattctgagccagctcgccatatcttctccttttcctggttgaactccctaaatgaatg

SEQ ID NO: 195100 - DNA, 2624 bp, Homo sapiens
  Payload ID: 18519
  Gene Name: tripartite motif containing 55
  Uniprot ID: Q9BYV6
  ENST ID: ENST00000353317
  CDS Start-End: 374-1732
tttgttgttgacaactgtcagcttcgacctccttctcctcacaaccccgtctaaatggggtttgtaatcctccttcccacccactctcttcactccctggggcaagaatgttgactcctgctctccgtcacctgtcaggatccatcctcctgtcactggcttatatggacacgtcagcccaccgtcacgtgaccgcaggctgctaaaaacagctccagcacccactccaaaccagggcctgaaacaatgtcctccaccgagagaaacgtaaaggacacttgatcacacaatccctggaataatatccaggaaacacttgctggagccactcgcagcacccttccctggcagcacacttggggacagcgaggagatgagcgcatctctgaattacaaatctttttccaaagagcagcagaccatggataacttagagaagcaactcatctgtcccatctgcttagagatgttcacgaaacctgtggtgattctcccttgtcagcacaacctgtgtaggaaatgtgccagtgatattttccaggcctctaacccgtatttgcccacaagaggaggtaccaccatggcatcagggggccgattccgctgcccatcctgtagacatgaagtggttttggatagacatggggtatatggacttcagaggaacctgctggtggaaaatatcattgacatctacaagcaggagtccaccaggccagaaaagaaatccgaccagcccatgtgcgaggaacatgaagaggagcgcatcaacatctactgtctgaactgcgaagtacccacctgctctctgtgcaaggtgtttggtgcacacaaagactgccaggtggctcccctcactcatgtgttccagagacagaagtctgagctcagtgatggcatcgccatcctcgtgggcagcaacgatcgagtccagggagtgatcagccagctggaagacacctgcaaaactatcgaggaatgttgcagaaaacagaaacaagagctttgtgagaagtttgattacctgtatggcattttggaggagaggaagaatgaaatgacccaagtcattacccgaacccaagaggagaaactggaacatgtccgtgctctgatcaaaaagtattctgatcatttggagaacgtctcaaagttggttgagtcaggaattcagtttatggatgagccagaaatggcagtgtttctgcagaatgccaaaaccctgctaaaaaaaatctcggaagcatcaaaggcatttcagatggagaaaatagaacatggctatgagaacatgaaccacttcacagtcaacctcaatagagaagaaaagataatacgtgaaattgacttttacagagaagatgaagatgaagaagaagaagaaggcggagaaggagaaaaagaaggagaaggagaagtgggaggagaagcagtagaagtggaagaggtagaaaatgttcaaacagagtttccaggagaagatgaaaacccagaaaaagcttcagagctctctcaggtggagctgcaggctgcccctggggcacttccagtttcctctccagagccacctccagccctgccacctgctgcggatgcccctgtgacacagattggatttgaggctcctcccctccagggacaggctgcagctccagcgagtggcagtggagctgattctgagccagctcgccatatcttctccttttcctggttgaactccctaaatgaatgatattcattccaactgctgcccctctgtctgcctggctgagatgcatgtgggcagcaggaagcccaagtgaaattaatattatgcagatgatgaaagggacctctgaacaggatttctgcaaaaatagccccaaactgcaattccatatgacttatctaacatcttggggggaaagaatattttgagaaaatagttgcagaaagcactggaaataataaacttgatcttatacaaatcttctattgtgtggaaaatgttgtgaagggtgtgtaggtgtggtacatgtgtatgtcactaacaagtggcaaatggtgaaaaaagtggtcactatgcttttgtctctcataggcactgactttttgttattatattatggtagctttcatttcctttactctttaacagtgcaggtggtcagtgaaaatcagtgtcaactcagaagtgactgatttatcaatacatggacaaaaagtaaatcattgaccaaagctatgaaatgtttcacaaagttttcctcttttgcataacagatgtcactggatgtacattcagaaatgttctttgaatttggtgacactttcatggtccagaaagctgaaggcctgggcatctcttgtgacatttttctaatattagttttagattttcacgtattaggcactttagttgaatcttccagcaaaagctgtctactttctcttttattcactgtggcaccaatctggtaaattgtagaacaattgcatgtgtttaaatatatatacaaacatatcacacattaaatatatatatatttaaatcatgctttgttaatatttgtcccaccataatgcctccttcagaacataagtgtaactttatatgaactcttaaataaatgatgtttttaaaa

SEQ ID NO: 195101 - DNA, 2914 bp, Homo sapiens
  Payload ID: 18519
  Gene Name: tripartite motif containing 55
  Uniprot ID: Q9BYV6
  ENST ID: ENST00000315962
  CDS Start-End: 374-2020
tttgttgttgacaactgtcagcttcgacctccttctcctcacaaccccgtctaaatggggtttgtaatcctccttcccacccactctcttcactccctggggcaagaatgttgactcctgctctccgtcacctgtcaggatccatcctcctgtcactggcttatatggacacgtcagcccaccgtcacgtgaccgcaggctgctaaaaacagctccagcacccactccaaaccagggcctgaaacaatgtcctccaccgagagaaacgtaaaggacacttgatcacacaatccctggaataatatccaggaaacacttgctggagccactcgcagcacccttccctggcagcacacttggggacagcgaggagatgagcgcatctctgaattacaaatctttttccaaagagcagcagaccatggataacttagagaagcaactcatctgtcccatctgcttagagatgttcacgaaacctgtggtgattctcccttgtcagcacaacctgtgtaggaaatgtgccagtgatattttccaggcctctaacccgtatttgcccacaagaggaggtaccaccatggcatcagggggccgattccgctgcccatcctgtagacatgaagtggttttggatagacatggggtatatggacttcagaggaacctgctggtggaaaatatcattgacatctacaagcaggagtccaccaggccagaaaagaaatccgaccagcccatgtgcgaggaacatgaagaggagcgcatcaacatctactgtctgaactgcgaagtacccacctgctctctgtgcaaggtgtttggtgcacacaaagactgccaggtggctcccctcactcatgtgttccagagacagaagtctgagctcagtgatggcatcgccatcctcgtgggcagcaacgatcgagtccagggagtgatcagccagctggaagacacctgcaaaactatcgaggaatgttgcagaaaacagaaacaagagctttgtgagaagtttgattacctgtatggcattttggaggagaggaagaatgaaatgacccaagtcattacccgaacccaagaggagaaactggaacatgtccgtgctctgatcaaaaagtattctgatcatttggagaacgtctcaaagttggttgagtcaggaattcagtttatggatgagccagaaatggcagtgtttctgcagaatgccaaaaccctgctaaaaaaaatctcggaagcatcaaaggcatttcagatggagaaaatagaacatggctatgagaacatgaaccacttcacagtcaacctcaatagagaagaaaagataatacgtgaaattgacttttacagagaagatgaagatgaagaagaagaagaaggcggagaaggagaaaaagaaggagaaggagaagtgggaggagaagcagtagaagtggaagaggtagaaaatgttcaaacagagtttccaggagaagatgaaaacccagaaaaagcttcagagctctctcaggtggagctgcaggctgcccctggggcacttccagtttcctctccagagccacctccagccctgccacctgctgcggatgcccctgtgacacagggggaggttgtacccactggctctgagcagaccacagagtctgaaactccagtccctgcagcagcagaaactgcggatcccttgttttaccctagttggtataaaggccaaacccggaaagccaccaccaacccaccttgcaccccagggagcgaaggtctggggcaaatagggcctccaggttctgaggattcgaatgtacggaaggcagaagtggcagcagccgcagcgagtgagagggcagctgtgagtggtaaggaaactagtgcacctgcagctacttctcagattggatttgaggctcctcccctccagggacaggctgcagctccagcgagtggcagtggagctgattctgagccagctcgccatatcttctccttttcctggttgaactccctaaatgaatgatattcattccaactgctgcccctctgtctgcctggctgagatgcatgtgggcagcaggaagcccaagtgaaattaatattatgcagatgatgaaagggacctctgaacaggatttctgcaaaaatagccccaaactgcaattccatatgacttatctaacatcttggggggaaagaatattttgagaaaatagttgcagaaagcactggaaataataaacttgatcttatacaaatcttctattgtgtggaaaatgttgtgaagggtgtgtaggtgtggtacatgtgtatgtcactaacaagtggcaaatggtgaaaaaagtggtcactatgcttttgtctctcataggcactgactttttgttattatattatggtagctttcatttcctttactctttaacagtgcaggtggtcagtgaaaatcagtgtcaactcagaagtgactgatttatcaatacatggacaaaaagtaaatcattgaccaaagctatgaaatgtttcacaaagttttcctcttttgcataacagatgtcactggatgtacattcagaaatgttctttgaatttggtgacactttcatggtccagaaagctgaaggcctgggcatctcttgtgacatttttctaatattagttttagattttcacgtattaggcactttagttgaatcttccagcaaaagctgtctactttctcttttattcactgtggcaccaatctggtaaattgtagaacaattgcatgtgtttaaatatatatacaaacatatcacacattaaatatatatatatttaaatcatgctttgttaatatttgtcccaccataatgcctccttcagaacataagtgtaactttatatgaactcttaaataaatgatgtttttaaaagc

SEQ ID NO: 195102 - DNA, 1177 bp, Homo sapiens
  Payload ID: 18519
  Gene Name: tripartite motif containing 55
  Uniprot ID: Q9BYV6
  ENST ID: ENST00000350034
  CDS Start-End: 227-952
tcctgtcactggcttatatggacacgtcagcccaccgtcacgtgaccgcaggctgctaaaaacagctccagcacccactccaaaccagggcctgaaacaatgtcctccaccgagagaaacgtaaaggacacttgatcacacaatccctggaataatatccaggaaacacttgctggagccactcgcagcacccttccctggcagcacacttggggacagcgaggagatgagcgcatctctgaattacaaatctttttccaaagagcagcagaccatggataacttagagaagcaactcatctgtcccatctgcttagagatgttcacgaaacctgtggtgattctcccttgtcagcacaacctgtgtaggaaatgtgccagtgatattttccaggcctctaacccgtatttgcccacaagaggaggtaccaccatggcatcagggggccgattccgctgcccatcctgtagacatgaagtggttttggatagacatggggtatatggacttcagaggaacctgctggtggaaaatatcattgacatctacaagcaggagtccaccaggccagaaaagaaatccgaccagcccatgtgcgaggaacatgaagaggagcgcatcaacatctactgtctgaactgcgaagtacccacctgctctctgtgcaaggtgtttggtgcacacaaagactgccaggtggctcccctcactcatgtgttccagagacagaagtctgagctcagtgatggcatcgccatcctcgtgggcagcaacgatcgagtccagggagtgatcagccagctggaagacacctgcaaaactatcgagattggatttgaggctcctcccctccagggacaggctgcagctccagcgagtggcagtggagctgattctgagccagctcgccatatcttctccttttcctggttgaactccctaaatgaatgatattcattccaactgctgcccctctgtctgcctggctgagatgcatgtgggcagcaggaagcccaagtgaaattaatattatgcagatgatgaaagggacctctgaacaggatttctgcaaaaatagccccaaactgcaattccatatgacttatctaacatcttggggggaaagaatattttgagaaaatagttgcagaaagcactggaaataataaacttgat

SEQ ID NO: 195103 - DNA, 10952 bp, Homo sapiens
  Payload ID: 18520
  Gene Name: tripartite motif containing 56
  Uniprot ID: Q9BRZ2
  ENST ID: ENST00000306085
  CDS Start-End: 298-2565
cctggctgggacggaagttgcaccacaagtacaattagtttcagttttgtttcttttccaggcacccagcaacggcggcctccaggcctcaggccccctcaccatcctagaggtcaagatcagctctggctagttctcacaggtctgacccaacaagtagcactgacatttttacgtttgctggatgtacacacggaagtggaggaggaggaggagaaggaggagggcagctccttagctcaagagcaagtggcccaaggcctcagaagactagaaggaagttcctggccattcagcatggtttcccacgggtcctcgccctccctcctggaggccctgagcagcgacttcctggcctgtaaaatctgcctggagcagctgcgggcacccaagacactgccctgcctgcatacctactgccaagactgcctggcacagctggcggatggcggccgcgtccgctgccccgagtgccgcgagacagtgcctgtgccgcccgagggtgtggcctccttcaagaccaacttcttcgtcaatgggctgctggacctggtgaaggcccgggcctgtggagacctgcgtgccgggaagccagcctgtgccctgtgtcccctggtgggtggcaccagcaccggggggccggccacggcccggtgcctggactgtgccgatgacttgtgccaggcctgtgccgacgggcaccgctgcacccgccagacccacacccaccgcgtggtggacctggtgggctacagggccgggtggtatgatgaggaggcccgggagcgccaagcggcccagtgtccccagcaccccggggaggcactgcgcttcctgtgccagccctgctcacagttgctgtgcagagagtgccgcctagacccccacctggaccacccctgcctgcctctggctgaagctgtgcgtgcccggaggccgggcctggagggactgctggccggtgtggacaataacctggtggagctggaggcagcgcggagggtggagaaggaggcgctagcccggctgcgggagcaggcggcccgggtggggactcaggtggaggaggcggctgagggcgtcctccgggccctgctggcccagaagcaggaggtgctggggcagctacgagcccacgtggaggctgccgaagaagctgctcgggagaggctggcggagcttgagggccgggagcaggtggccagggccgcagccgccttcgcccgccgggtactcagcctggggcgagaggccgagatcctctccctggaaggggcgatcgcacagcggctcaggcagctgcagggctgcccctgggcaccaggcccggccccctgcctgctcccacagctggagctccatcctgggctcctggacaagaactgccaccttcttcggctgtcctttgaggagcagcagccccagaaggatggtgggaaagacggagctggtacccagggaggtgaggagagccagagccggagggaggatgagccgaagactgagagacagggtggagtccagccccaggctggagatggagcccagaccccaaaagaggaaaaagcccagacaacccgagaagagggagcccagaccttggaggaggacagggcccagacaccccacgaggatggaggaccccagccccacaggggtggcagacccaacaagaagaaaaagttcaaaggcaggctcaagtcaatttcccgggagcccagcccagccctggggccgaatctggacggctctggcctcctccccagacccatcttttactgcagtttccccacgcggatgcctggagacaagcggtccccccggatcaccgggctctgtcccttcggtccccgggagatcctggtggcggatgagcagaaccgggcactgaaacgcttctccctcaacggcgactacaagggcaccgtgccggtccctgagggctgctccccttgcagcgtggccgccctgcagagcgcggtggccttctccgctagcgcacggctctatctcatcaaccccaacggcgaagtgcagtggcgcagggccctgagcctctcccaggccagccacgcggtggcggcactgcctagcggggaccgcgtggctgtcagcgtggcgggccacgtggaggtgtacaatatggaaggcagcctggccacccggttcattcctggaggcaaggccagccggggcctgcgggcgctggtgtttctgaccaccagcccccaggggcatttcgtggggtcggactggcagcagaatagtgtggtaatctgtgatgggctgggccaggtggttggggagtacaaggggccaggcctgcatggctgccagccgggctccgtgtctgtggataagaagggctacatctttctgacccttcgagaagtcaacaaggtggtgatcctggacccgaaggggtccctccttggagacttcctgacagcctaccacggcctggaaaagccccgggttaccaccatggtggatggcaggtacctggtcgtgtccctcagtaacgggaccatccacatctttcgggtccgttctccggacagttaaaggggctaggactagggtgagagggagtggggagggagagggcaggaaggaggcagagctgtccgtgggaggtggaggccgaggacattttcctgaagggcaggggttggcaacttttcaacatggagtgccaaactgctaacccgtcttctagtgtgtgagaatagggaccaaggtggtggcgtgaccttaactctcagaagcagaggaggcaggtgggtggagggggatgctgggagttcacctgcctcttgctttttgtgggtggctgctgccaccaccgccgctgctatatagtttaggtttctgaggtttgtgagcctgtcctgctttgcattcttcaaaaccattcctgatagagtagccgagggagagtcttggggccaagaagggcccagggtgggtcaggcgtgtgcactgtggaacagagctgagaccccggccccccttggactggcacagggtcctacagagtcagaggaggcctgagatttcgaatgggcagtgaatggcctcttctgccagccacaggcaggatgctccttgatcacggcatcccccggcggtagtacagggtgagcttgcaggagggtctgcaagtgcagacagcagctggggccaaagaggtgttaggttcaaaggctgcgaagagaataggctactggaaaaccaaacccaacagaattcacgtccaaaaatccacattctccatcgcttctcagccttttggctaagattaagtattaaaaaaaaaccaggctctgccaggcgcagtggctcatgcctataatcccggcactttgggagtctgtggcaggaggattgcttgaggccaggagtttgagaccagcctgggcaacatagcgagaccccatctctacaaaagattaaaaattagctgcgtgtagtagcatatgcctttcaacgtagctactcaggaggctgaggtgggaggatcccttgagccgaggagtttgagtctgcagtgagctatgatcgcaccactgcattccagaccccatctcgaaaaaaaaaaaaaaaaaaaaaaacagaaacaacagaaaaagcaggttatccatcacttctcagctaagatcaagtgttaaaataaataaataaataaataaataaataaataaataaataccaagttatgagtgtcagagcaggggagccctccacgcagccacggagccagtctgagggaagaggtacataggatagaaaaatctctaggctccaacgcttctgcttcggtgtctttccatttcccagggtctatgtgttgccttctcttcattttccagcaaaattccttttgagatatgttggccttcactcggctgaactagggggtgaaggaaggttgtcctctgtgggccactattgctggggaaacagctaaaccctgcaggccaagtggaacttggaggtgccaagaaaacctagaaggtgcaatggggctgcgacggatagaggtgtcaaaccagaagggaggaacccgtcggaggtgggctgtgaccaccggaccttttcataagtggtggcagtggtagaattgagggggcaagtaggcttggagaatgtttttagccaggggctgttgagagatggcagaagggggtcttaatgtggggactgtggacagtggggcattcgtgggaaccagagggattttggacaagtccagatggaatgtgcagggcataggtagagggaaaagaaaatccctttctgggaaaaccatttcttgtttattgaaacaatgcaggacatcatcaaagtccgggtggacacattccattatctacaaattacaaaggtaggcacagcaaagaataatgaagattataagaaaaccaagcgccaggcacggtgactcaagcctgtaatcccagcactctgggaggctggggtgggtggatcactcaaggtcaggagttcgagaccagcctggccaacatggagaaaccccatctctactaaaaatacaaaaattagctaggcgtgggagcgggcgtctgtaatcccagctacttgggaggctgaggcaggagaatcatttgaacccaggaggtggaagttgcagtgagctcagatcgcaccattgcactccagcctgggtaacaagaatgaaactccatctcaaaaaaaaagaaaaagaaaagaaagaaaaccaaggtccctctccctctccctctccccacggtctccctctgcctctctttccatggtcacggtctccctctgatgccgagccgaagctggactgtactgctgccatctcggctcactgcaacctccctgcctgattctcctgcctcagcctgccgagtgcctgcgattgcaggcgcgcgccgccacgcctgactggttttcgtatttttttggtggagacggggtttcactgtgttggccgggctggtctccagctcctaaccgcgagtgatccgccagcctcggcctccggaggtgccgggattgcagacggagtctcgttcactcggtgctcaatgttgcccaggctggagtgcagtgtcgtgatctcggctagctacaacctccacctcccagccgcccgccttggcctcccaaagtgccgagattacagcctctgcccggccgccaccccctctgggaagtgcggagtgtctctgcctggccgcccattgtctgggatgtgaggagcccctctgcccggctgcccagtctgggaagtgaggagcgcctcttcctggccgccatcccatctaggaagtgaggagtgtctctgcccggctgcccatcatctgagatgtggggagcacctcagccccgccgccccgtctgggatgtgaggagcgcctctgcccggccgcgacccagtctgggaggtgaggagcgtctctgcccagccgccccgtctgagaagtgaggagcccctccgcctggcagccgccccgtctgagaagtgaggagcccctccgcccggcagccgccccgtccgggagggaggtggggggtcagccccctcccggccagccgcgccgtccgggagggaggtggggggtcagcccccgcccggccagccgcgccttccgggagggaggtgggggatcagtccccgcccggccagccgccccgcccgggagcgaggtggggggcgcctccgcccggccgctgtcccgtccgggaggtggggggtcgcctctgcccggccgccccgtctgggaggtgaggagcccctctgcccggccaccaccccgtctgggaggtgtacccaacagctcattgagaacgggccatgatgacgatggcggttttgtggaatagaaaagggggaaaggtggggaaaagatagagaaatcagattgttgccgtgtctgtgtagaaagaagtagacatgggagacttcattttgttctgtactaagaaaaattcttctgccttgggatgctgttaatctaagaccttacccccaaccccgtgctctctgaaatatgtgctgtgtccactcagggttaaatggattaagggcggtgcaagatgtgctttgttaaacagatgcttgaaggcagcatgctccttaagagtcatcaccactccctaatctcaagtacccagggacacaaacactgcggaaggccgcagggtcgtctgcctaggaaaaccagagacctttgttcacttgtttatctgctgaccttccctccactattgtcctatgaccctgccaaatccccctctgcgagaaacacccaagaatgatcaataaaaaattaaaaaaaaaaaaaaaaaaagaaaaccaagaagatgggaaaaccatgcagaattgatttgacgaggaaagccttggtctctaatacatgcaatgactagaacagtatttggtcaaagaaccacataagctctgtaccctggaggaaatgtatgcaggcaaggactagtaaaataaaaaataataataattaaaaaaaaaaaaaagaaaggctggacgcggtggctcacacctgtaatcccagcactttgggaggctgaggtgggtggatcacctgaggtcaggagtttgagaccagcctggccactacggtgaaaccccatctctactaaaaatacaaaaattacccgggtgtggtggcgcatgcctgtaatcccagctactggggagtctgaggcaggagactcgcttgaacctgggaggcagagggtgcagcgagccgagttcaccccattgcactccagcctgggtgtcacagtgagactctgtctcaaaaaaataataaataaataattaaatccacttgcagtggtcaaaaataaatgttaaataaatgggtgagaaatcttgcggagaaatagactcctggcactataaaaatgatcctggagaataatttggctagactttgcaagaatgacaaaaatgattataagaatcagttgtctcactttggggaatacattctgggaaaataatgtaagagaaaaaatatttgcatacagacatttgaggctgctctgtatattacaggcaagaactggaaactgttcggctgcagggtgacagctaactagattgtggtttattaggggaatgagcctttctttgtgtatgacaactatgaaaactattgagaagaaatagttacgtgatacagtcataatcctcaaaaacggagaatcaggaattatgatcaaatagtgatagtaacaaggaaaacatctgtctaaataattactgagtagaaataggttcggaatttgtaaatagtcattaatttgggagattggggttttttttgttttgttttttgtttgtttttcattattttgtgctattattcatacgtgtacatttctacttcagtttttattatccattacataacatacatgcttgattatttgcttcaaggaaatacacctttataagtaatactcaataactactgggtttgagaatgaaggtgtcagaacgaatgagattgtcctatgaaagaagaggcaggagccagggaggaggatcccacccggccggggctcagccaggaggcagggccattggggcagggtggcagtccaaggaaccgctctgggaaggtttgcaaaggtcggggtcccccctgccaggtgatcgaattatcgtggagtgtctggaaggcgggggaagttttgttgagttcaccaaataactcagaccaactggaaaccaagtggagtttctacaggaccaactagaatagggatcagctacatgggggcggggggaggggggcagggaacggtgtctgtcttcattgcagctctgtctgcagagccagcactgtgatacctcatagtaggtgctcagtgaatgtctgtgaagtgaattactatctagacaaggatgagactggtatgactctccaaagctttcccacctccaaaacctcggcttgtggggaatctccagtagggggcactgtggacacggttcgcatctgcctcccaaggctgggctccgcgtcaaaaaaaaaaaaaaaaaatgagactgagccaggtgcagtggtcactcctgttatctcagcactttgcgtggccaaggcgggaggatgtcttgaggccaggagttcaagactaggctgggcaacatagcaagaccccatctctacaaaaaaatttttaaattagccagaggtggtggcatgcacccgtagtcccagctgctcgggaggctgaggcagaagattgctcgagcccaggagttcaaggctgcagtgagctctgattgtgccactgcactccagcctgagtgacagagcaaaacctggtttcctaagggggggataaaagagggagagatgagatcggggtgtcccgcttctgtgcatgtggagggggtaactgggaaccgtgtactgtaggggatcgcacaccttggggtggaaacagcagctctccggagttgcatgggagccatgggcagtggtcctggctggtgaaatgattctagccacgtggcccacccagggggcaaaacaatagaaaccttcagaaatgaaacgtcacctggctgcaagaagatagtcccacaggcgccctagagatggggatgccaagtggcttctcgggaagctgtaagaatccacagggcattgtaagatggagggaaatattaagttttcttcgtaaagaggtgaggggggcgagagcagcaaaggacactggaaaatgagaagcatggatgggaagtgttgcattgagcataatttggaggtaaaatctccaacaccgtaactgagtggcctggggacctgatagaaagccctgctcaggactaaggcagagttcccagttatatcgcagatacaaagagaccaggaacacgcttgtaatcacagcacttagggaggctgaggcgggtggatgacctgaggtcaggagttcgagaccagcctagccaacatggtgaaacccccatctctactaaaaatacaaaaattagccaggcgtggtggcacatgcctgtaatcccagctactcaggaggctgaggtgggagaatcgcttgagcccgggaggcaggggttgcagcgagctgagatcgtaccactgcactccagcctgggcaacagagtgagaccctgtctcaaaaagaaaaaaaaaaaagagagaaatcaggaacatcatgaaagatacagcaaaatgttttaccccagcccactgcaccacacctgggattgtgacaattaacttgataaattgttccttttcctgttcggaactgactaggttgtgcgtggatggaccagtgaaaagaaaatcctgtttgggtagggaagagggaagtagaaaacctctttcgtattcttggtgtcaagaaatgggaagagaatgagggagcagagacctgggttgagtgttggctctgcactaaacagctgtgtgatcttggtctagtgccttaacctctctgagcctcagtttgtacatcagtaacattgggataatgacatccacatgcccacttcacagagctgctgtgaggactggatgagaaatgtagagaagtatttcggacaccataaagctcaaatacaaggtgttggttaggaaaagtttcaactgacttgtacccacctgatacccctccatcagcataagcgtgtatgaggatgttaggtacatgtgttgtgagtgaaagctctggaacacccgagtagagctttctgcaaatcagcttctccttcagaggagaccattttgttttgctttccagcagttacttgaagaagccttatctgaagtcacaacagtgacttcaggaatagaagggaccaatggccagcttgctgaaatgtaatgccattcttaaaagccagctaagaatcagaccgtattagttaaggacccataagagtagacatttagaaaaagtgaaaaatggcaagagtggcccaatcttttgagagtttagagaaaatatcatttggaaagggagtagctctccttctattttagccttattattacggtatctataaagcaatgccatattctaaatctgcagaaataaaattctaaggggcgaaagtccaaggcagaagtcaaaagttttgcaaggaaaccgatgaggttgctgacctgagctgggcagggttgaacaggcgagtgccaagatcaaggtctctgattgtctctccttgaaaggtaagcagagaactagggctatcccataaattaagtgggagattggaaaggggtgcggacttctgtattggggagaaggtcttggatgaactggggcagagaactgccagagagagtacctaggaatacgttgttagcaggagaaagaccaagttcagatgcagacttgggaaagtaggtaacttgaccaaaggtagcaaaattagactacccaactggattgtgaatgcagtttatgaaatggatcaggacaggagcaaaaatagattttctagaaactgcagactcctgtgattggagcagtatacaaagtacagcaacatcagactagatctcacctgaggtgctgggtgagaaatcttagggaccagatggaagagggcctgtgtataaagacattaggaaggaggtttgggagggcagcctgacttgtctccagagaaagttagaactggttgacttagcaaccaagggacactgggtcaaagacgaggaatcaggacgtcggtgcctagtgactgagcgccagcccagcccatttctctacattgccatgggctaaacccagtgtgctgtaaactcttcagttcctttggttatggattttgtatcttttctgtgtttcttaataaagttcttttgaaaaatgggaacctttctcagatgggaattttgtatctttcctctgtttcttaataaagttcttttgaaaaattggaa

SEQ ID NO: 195104 - DNA, 1129 bp, Homo sapiens
  Payload ID: 18520
  Gene Name: tripartite motif containing 56
  ENST ID: ENST00000412507
  CDS Start-End: 215-1129
aggcctcaggccccctcaccatcctagaggtcaagatcagctctggctagttctcacaggtctgacccaacaagtagcactgacatttttacgtttgctggatgtacacacggaagtggaggaggaggaggagaaggaggagggcagctccttagctcaagagcaagtggcccaaggcctcagaagactagaaggaagttcctggccattcagcatggtttcccacgggtcctcgccctccctcctggaggccctgagcagcgacttcctggcctgtaaaatctgcctggagcagctgcgggcacccaagacactgccctgcctgcatacctactgccaagactgcctggcacagctggcggatggcggccgcgtccgctgccccgagtgccgcgagacagtgcctgtgccgcccgagggtgtggcctccttcaagaccaacttcttcgtcaatgggctgctggacctggtgaaggcccgggcctgtggagacctgcgtgccgggaagccagcctgtgccctgtgtcccctggtgggtggcaccagcaccggggggccggccacggcccggtgcctggactgtgccgatgacttgtgccaggcctgtgccgacgggcaccgctgcacccgccagacccacacccaccgcgtggtggacctggtgggctacagggccgggtggtatgatgaggaggcccgggagcgccaagcggcccagtgtccccagcaccccggggaggcactgcgcttcctgtgccagccctgctcacagttgctgtgcagagagtgccgcctagacccccacctggaccacccctgcctgcctctggctgaagctgtgcgtgcccggaggccgggcctggagggactgctggccggtgtggacaataacctggtggagctggaggcagcgcggagggtggagaaggaggcgctagcccggctgcgggagcaggcggcccgggtggggactcaggtggaggaggcggctgagggcgtcctccgggccctgctggcccagaagcaggagaatcatttgaacccaggaggtggaagttgcagtgagctcagatcgcaccattgcactccagcctgggtaacaagaatgaaactccatctcaaaaaaaaa

SEQ ID NO: 195105 - DNA, 581 bp, Homo sapiens
  Payload ID: 18520
  Gene Name: tripartite motif containing 56
  ENST ID: ENST00000467847
  CDS Start-End: 386-581
gcaagatcctaccccaactggcaggacctaggcatctctgcccactgggatccccgtctgtgtccttactgcctgctcctcgcaccctggcaccctatacagcaggaccccagtacctgtgcacacaggagggcttccaccatgtttgccacaaggcctgtggactggggacactgaggattcgattattagctaaggccagggactcctggtcttgtcagttctcacaggtctgacccaacaagtagcactgacatttttacgtttgctggatgtacacacggaagtggaggaggaggaggagaaggaggagggcagctccttagctcaagagcaagtggcccaaggcctcagaagactagaaggaagttcctggccattcagcatggtttcccacgggtcctcgccctccctcctggaggccctgagcagcgacttcctggcctgtaaaatctgcctggagcagctgcgggcacccaagacactgccctgcctgcatacctactgccaagactgcctggcacagctggcggatggcggccgcgtccgctgccccgagtgccgcgagacagtgcctgtgc

SEQ ID NO: 195106 - DNA, 3225 bp, Homo sapiens
  Payload ID: 18521
  Gene Name: tripartite motif containing 58
  Uniprot ID: Q8NG06
  ENST ID: ENST00000366481
  CDS Start-End: 49-1509
gggagacggtgcgggcggccgggagcgcagccctccgggaggcgggtcatggcctgggcgccgcccggggagcggctgcgcgaggatgcgcggtgcccggtgtgcctggatttcctgcaggagccggtcagcgtggactgcggccacagcttctgcctcaggtgcatctccgagttctgcgagaagtcggacggcgcgcagggcggcgtctacgcctgtccgcagtgccggggccccttccggccctcgggctttcgccccaaccggcagctggcgggcctggtggagagcgtgcggcggctggggttgggcgcggggcccggggcgcggcgatgcgcgcggcacggcgaggacctgagccgcttctgcgaggaggacgaggcggcgctgtgctgggtgtgcgacgccggccccgagcacaggacgcaccgcacggcgccgctgcaggaggccgccggcagctaccaggtaaagctccagatggctctggaacttatgaggaaagagttggaggacgccttgactcaggaggccaacgtggggaaaaagactgtcatttggaaggagaaagtggaaatgcagaggcagcgcttcagattggagtttgagaagcatcgtggctttctggcccaggaggagcaacggcagctgaggcggctggaggcggaggagcgagcgacgctgcagagactgcgggagagcaagagccggctggtccagcagagcaaggccctgaaggagctggcggatgagctgcaggagaggtgccagcgcccggccctgggtctgctggagggtgtgagaggagtcctgagcagaagtaaggctgtcacaaggctggaagcagagaacatccccatggaactgaagacagcatgctgcatccctgggaggagggagctcttaaggaagttccaagtggatgtaaagctggatcccgccacggcgcacccgagtctgctcttgaccgccgacctgcgcagtgtgcaggatggagaaccatggagggatgtccccaacaaccctgagcgatttgacacatggccctgcatcctgggtttgcagagcttctcatcagggaggcattactgggaggttctggtgggagaaggagcagagtggggtttaggggtctgtcaagacacactgccaagaaagggggaaaccacgccatctcctgagaatggggtctgggccctgtggctgctgaaagggaatgagtacatggtccttgcctccccatcagtgcctcttctccaactggaaagtcctcgctgcattgggattttcttggactatgaagccggtgaaatttcattctacaatgtcacagatggatcttatatctacacattcaaccaactcttctctggtcttcttcggccttactttttcatctgtgatgcaactcctcttatcttgccacccacaacaatagcagggtcaggaaattgggcatccagggatcatttagatcctgcttctgatgtaagagatgatcatctctaaaattctgttcccaagatgcagtcctagcgtagcgaacgttcctggagtggggtgaaggatatcaatatactaagttttaacagataccccatttaggtcagcacttgattcgttgttgctgtgaaatatgtccatgggacaaaagagggaatatgaaatatttgcatatgggaagattatagagcataataattttgtaaatggagcaatctcaacctctatttctagatcacattttcttgatgtcttccttcaaattaatgaccttggattacataaggatttctatgcattcattataatttgttattcctttcaatatccttgtatttcaaatcttccatataagaattagacatggcaattcttaaattgattcagaatggtctgatactattccagtatcacctccttaattctgtttctcctcgttttcctgattttccttctcattctctccttccccgctctgtctctctctccctgtcactctctctctcttgttccttattttttgtttcttacctcttactgtttaacctgttgcttccttctggattaatacatttagagccattcctttatatggtcacatttcctatgactttactcaattacttttaaaatcctttctattctgagactaatttttaagaattacaaagctcattcttctgaatctaatatcactaactcctagactttttccgttttctttggatacactttaagtaggaatttatcagaattttcattcaactcgttctttaatgcagatatttactagttataagaccttaaggctgggtgcagtggctcacgcctgtaatcccagcactttgggaggctgaggcgggtggatcacaagctcaggagttcaagaccagcctggccaacatggtgaaaccctgtctctactaaaaaaaaaaaaaaaatagaaaaattagctgggcatggtggcaggagcctgtaatcccagctattctggaggtggagacaggagaattgcttgaaccctggaggcggaggttgcagtgagccaatatctcaccactgtactccagcccagtgcgagactccatctcaaaaaagaaaaaagacctcaaacaacacttctctctctcttttagctgcttgttatggttcctatacatggaacaattatactggcctcactgtgttatggtaaatatttaaggtcatatttgatattgctggtttgaattcagcttttccatttaaatacattataatgatgatgatgaaatcatgataatatttaacttatttttaaagtatattctgtacctttccaacaaaaaggttaaaagtcattgaaggctaaccttactgccttctttgtatcactgtcttctaaataattattatgtctgggtacagtggctcacgcctgtaatcccagcactttgggaggccgaggtgggcagatcacgaggtcaggagattgagaccatcctggctaacacagtgaaaccccgtctctactaaaaatacaaaaagaaattagctgggcgtggtggtgggtgcctgttgtcccagctacttgggaggctgaggcaggagaatggcatgaacccaggaggcagagcttgtagtgagccgagatcgcgccactgcactccagccggggcaacagagcaagactccatctcaaaaataaataaataaataaataaataaataaataaataaata

SEQ ID NO: 195107 - DNA, 3867 bp, Homo sapiens
  Payload ID: 18522
  Gene Name: tripartite motif containing 59
  Uniprot ID: Q8IWR1
  ENST ID: ENST00000309784
  CDS Start-End: 187-1398
agcccttcggggcagaggagggcggggactcggggcggctctcagcatccgcctggagctcgtggcgctgtgtttccgtgctgtggagttgcctggtccgcttcctccccgcgaataagaataaaagattctggaggagttggagaagagtgtattcagcccccaaaccacgagatcaacaaagaaatgcacaattttgaggaagagttaacttgtcccatatgttatagtatttttgaagatcctcgtgtactgccatgctctcatacattttgtagaaattgtttggaaaacattcttcaggcatctggtaacttttatatatggagacctttacgaattccactcaagtgccctaattgcagaagtattactgaaattgctccaactggcattgaatctttacctgttaattttgcactaagggctattattgaaaagtaccagcaagaagaccatccagatattgtcacctgccctgaacattacaggcaaccattaaatgtttactgtctattagataaaaaattagtttgtggtcattgccttaccataggtcaacatcatggtcatcctatagatgaccttcaaagtgcctatttgaaagaaaaggacactcctcaaaaactgcttgaacagttgactgacacacactggacagatcttacccatcttattgaaaagctgaaagaacaaaaatctcattctgagaaaatgatccaaggcgataaggaagctgttctccagtattttaaggagcttaatgatacattagaacagaaaaaaaaaagtttcctaacggctctctgtgatgttggcaatctaattaatcaagaatatactccacaaattgaaagaatgaaggaaatacgagagcagcagcttgaattaatggcactgacaatatctttacaagaagagtctccacttaaatttcttgaaaaagttgatgatgtacgccagcatgtacagatcttgaaacaaagaccacttcctgaggttcaacccgttgaaatttatcctcgagtaagcaaaatattgaaagaagaatggagcagaacagaaattggacaaattaagaacgttctcattcccaaaatgaaaatttctccaaaaaggatgtcatgttcctggcctggtaaggatgaaaaggaagttgaatttttaaaaattttaaacattgttgtagttacattaatttcagtaatactgatgtcgatactctttttcaaccaacacatcataacctttttaagtgaaatcactttaatatggttttctgaagcctctctatctgtttaccaaagtttatctaacagtctgcataaggtaaagaatatactgtgtcacattttctatttgttgaaggaatttgtgtggaaaatagtttcccattgaaaatgtcaacctgaattgtttaaatgggcttattctgtacattgctaaacaaaaaatggggtagcatggataaagagcaaactaagctttattagtgctgcaactaatataaacaaatgtttatatttgttgcttcttttggttagcaatgatatgtcaaagttatatctgaaatagtcaaatctttgggaaacagaatctagtaacaatttgaaaagtaatacactatcccatttttattggctttatgatggttgacataatgttgctgtgacatttaaacattcttgtaccaatattgtcttttaccattattatatactgcagttaattggctttacagttctttatatatatagcaaaatcctgaaagaacatatacctttattttgatgtggcttgaagcttttgaatgggtgaataaggatgatagaaaggtttcaaaatcaagcaacaaagtcttaaagtgataaggcatggcttaaagatcttttgatcaaacatacctgtgtttgagatagatttaagagccctaaatgcttatcaccattcactccaaataaaactattgcttttggataactgttagagtaaagtggctttttaaaagaaatttttgagactgggtctcaccttgttgcccaggctggagtgtagttgtctggtcatgactcactgcagtttcgaccacccaggctcaatcgatcctcccgcctctgcctctggagcagctgggacaaggcacacacccccatgcctggctaattaaaaaaattgttttttgtagaaacgaggttttgccatattgcccaggttggtctcaaacttctgggctcaagagatctgcccaccttggcctcccaaagtgctgggattacagacgttagccacactgtgcctgggggccagcattttctaatacttgtcatattctatagtttgtgcaaatttaagattgtttttttttctgctcgtcagtcaaatcagttcttggattaaaaactcattcttattagaacagaatcatgttggtaacttggtctgcaacaggttttgatggcatcatgtggactttattcatcttaactcatttaaattttctaccacattcccttaagctaatgcaaaagtaccaacaacttaatcttttttttttttttttttttttttttttgagacggagtcttgctctgtcgcccaggctggagtgcagtggcgtgatctcggctcattgcaagccccgcctcccgggttcacaccattctcctgcctcagcctcccgagtagctgggactacaggcatctgctaccacgcccagctaattttctgtatttttagtagagatggggtttcactgtgttagccaggatggtctctatctcctgacctcatgatccactcgcctcagcctcccaaaatgctgggattataggcgtgagccgccacgcccggcccaacaacttaatcttttattagctttgcttaagagggccaattaaatcaaagccctttagttccctttaacagggactggagttatgatgcatgtgttacgacttttggcccactgtccatgcaactctaagtgcaggttgatttgctttccagaaatcccaaaggggctgctcttggatcaccgaagagccttacctatatcaaatcaaaaagacattctgggtcagattagactatgctcctggccctacagattgcacataaactatcataaatacagctttttcagggaactagttctaaaactcttacctgctgagaataagtcttaacactaagatgactgtattatatcaatttattattagaatcagacttatacctagcacaattaactattgtgtgggcaaagaacatttaaagggcatagtagaggtaaggagagacacatactcagctagagataaaaatactaagttgcactgattacttaaaatactagtcacaccataaaagtgccctgtagtttcaaaaacacgtaagcaatgaaatgttagccattatgtgttaaactacttaatctcatttctgtgatgtgaatatttttaaccccctttttgtagatgagggaactgacaagtgacttgtccaaggccatatagctgtgagaaaacccatgcattctcttttcagagttcatgctatcactcaactttaaagtaggccaagattaatgttggtaagggtttgtaatctgtaagaatgctaaaaacgtaagtatatatatcattttagatttgacattttgtatcttgccagtttttaggagaacttttcattttgttaagtatgcatgaatatagttgagtatatgagtaactggttcttatgctgctgttttgtatttttaccagcaggaagattgcaaaagttgatgtatgtaaatcttgaaatatttctaagttttatgtataacaaaatatgtattttaataaacttcttttgatatttta

SEQ ID NO: 195108 - DNA, 860 bp, Homo sapiens
  Payload ID: 18522
  Gene Name: tripartite motif containing 59
  ENST ID: ENST00000479460
  CDS Start-End: 328-860
ctccccgcggtgagtctaaggacctttacggatgcggagaaggtggttctgagtcctttttcttttcctgtagcacagtctggtgtgcctagtgtgttgggcggggagtcctgggggcgcgacgatggagggagtggcttgggacctgcactcattccctcttgtcccatactggagtttggggagccactttcccgtccctccactgtggagctgcgttcctgtgagggaggaggccctctgtggtggcgaggaataagaataaaagattctggaggagttggagaagagtgtattcagcccccaaaccacgagatcaacaaagaaatgcacaattttgaggaagagttaacttgtcccatatgttatagtatttttgaagatcctcgtgtactgccatgctctcatacattttgtagaaattgtttggaaaacattcttcaggcatctggtaacttttatatatggagacctttacgaattccactcaagtgccctaattgcagaagtattactgaaattgctccaactggcattgaatctttacctgttaattttgcactaagggctattattgaaaagtaccagcaagaagaccatccagatattgtcacctgccctgaacattacaggcaaccattaaatgtttactgtctattagataaaaaattagtttgtggtcattgccttaccataggtcaacatcatggtcatcctatagatgaccttcaaagtgcctatttgaaagaaaaggacactcctcaaaaactgcttgaacagttgactgacacacactggacagatcttacccatcttattgaaaagctgaaagaacaaaaatctcattctgagaaaatgat

SEQ ID NO: 195109 - DNA, 577 bp, Homo sapiens
  Payload ID: 18522
  Gene Name: tripartite motif containing 59
  ENST ID: ENST00000494486
  CDS Start-End: 243-577
gggggcgcgacgatggagggagtggcttgggacctgcactcattccctcttgtcccatactggagtttggggagccactttcccgtccctccactgtggagctgcgttcctgtgagggaggaggccctctgtggtggcgagggtgagctgagcggacgccgccgagtcgaataagaataaaagattctggaggagttggagaagagtgtattcagcccccaaaccacgagatcaacaaagaaatgcacaattttgaggaagagttaacttgtcccatatgttatagtatttttgaagatcctcgtgtactgccatgctctcatacattttgtagaaattgtttggaaaacattcttcaggcatctggtaacttttatatatggagacctttacgaattccactcaagtgccctaattgcagaagtattactgaaattgctccaactggcattgaatctttacctgttaattttgcactaagggctattattgaaaagtaccagcaagaagaccatccagatattgtcacctgccctgaacattacaggcaaccattaaatgtttactgtctattaga

SEQ ID NO: 195110 - DNA, 576 bp, Homo sapiens
  Payload ID: 18522
  Gene Name: tripartite motif containing 59
  ENST ID: ENST00000471155
  CDS Start-End: 234-576
gcgctgtgtttccgtgctgtggagttgcctggtccgcttcctccccgcgaataagaataaaagattctggaggagttggagaagagtgtattcagcccccaaaccacgagatcaacaaattaggtccacaaagatgtgagccccagtttgggtggtggcaccacttgaattttcccatacttaaagctgactcactagaagtcttgggacaagtcatcgaattctataatgaaatgcacaattttgaggaagagttaacttgtcccatatgttatagtatttttgaagatcctcgtgtactgccatgctctcatacattttgtagaaattgtttggaaaacattcttcaggcatctggtaacttttatatatggagacctttacgaattccactcaagtgccctaattgcagaagtattactgaaattgctccaactggcattgaatctttacctgttaattttgcactaagggctattattgaaaagtaccagcaagaagaccatccagatattgtcacctgccctgaacattacaggcaaccattaaatgtttactgtctattagataaaaaat

SEQ ID NO: 195111 - DNA, 603 bp, Homo sapiens
  Payload ID: 18522
  Gene Name: tripartite motif containing 59
  ENST ID: ENST00000496222
  CDS Start-End: 67-603
gtgtttccgtgctgtggagttgcctggtccgcttcctccccgcggtgagtctaaggacctttacggatgcggagaagaataagaataaaagattctggaggagttggagaagagtgtattcagcccccaaaccacgagatcaacaaagaaatgcacaattttgaggaagagttaacttgtcccatatgttatagtatttttgaagatcctcgtgtactgccatgctctcatacattttgtagaaattgtttggaaaacattcttcaggcatctggtaacttttatatatggagacctttacgaattccactcaagtgccctaattgcagaagtattactgaaattgctccaactggcattgaatctttacctgttaattttgcactaagggctattattgaaaagtaccagcaagaagaccatccagatattgtcacctgccctgaacattacaggcaaccattaaatgtttactgtctattagataaaaaattagtttgtggtcattgccttaccataggtcaacatcatggtcatcctatagatgaccttcaaagtgcctatttgaaagaaaaggacactcctcaaaaactgcttgaacag

SEQ ID NO: 195112 - DNA, 601 bp, Homo sapiens
  Payload ID: 18522
  Gene Name: tripartite motif containing 59
  ENST ID: ENST00000468542
  CDS Start-End: 398-601
aagcgattctcctgcctcagcctcgtgagtagctggggttacaggcgcccgctaccacacccggctaatttttgtatttttagtagagacgaggtttcaccatgttggtcaggctggtctgaaactcctgaagagatccgcccacctcggcctctcaaagtgctgggattacaggcgtgagctaccgcgcccggcccgagacccctttcttgtctctgcatagcgcccacccctggcctagagcctcttcagctttccatcactaagctaagctctcacctctactttagcctcttccttacttagacttgtgttatgggcttcctccactctgattaacccatccacatgctccgatcttctcatcttcctgaagtcatttgatacctctcatctaatggttcagccttcactggaaatgcacaattttgaggaagagttaacttgtcccatatgttatagtatttttgaagatcctcgtgtactgccatgctctcatacattttgtagaaattgtttggaaaacattcttcaggcatctggtaacttttatatatggagacctttacgaattccactcaagtgccctaattgcagaagt

SEQ ID NO: 195113 - DNA, 548 bp, Homo sapiens
  Payload ID: 18522
  Gene Name: tripartite motif containing 59
  ENST ID: ENST00000471396
  CDS Start-End: 84-548
gctgtgtttccgtgctgtggagttgcctggtccgcttcctccccgcggtgagtctaaggacctttacggatgcggagaaggaaatgcacaattttgaggaagagttaacttgtcccatatgttatagtatttttgaagatcctcgtgtactgccatgctctcatacattttgtagaaattgtttggaaaacattcttcaggcatctggtaacttttatatatggagacctttacgaattccactcaagtgccctaattgcagaagtattactgaaattgctccaactggcattgaatctttacctgttaattttgcactaagggctattattgaaaagtaccagcaagaagaccatccagatattgtcacctgccctgaacattacaggcaaccattaaatgtttactgtctattagataaaaaattagtttgtggtcattgccttaccataggtcaacatcatggtcatcctatagatgaccttcaaagtgcctatttgaaagaaaaggacactcctcaaaaactgcttgaacagttgactgacaca

SEQ ID NO: 195114 - DNA, 4615 bp, Homo sapiens
  Payload ID: 18522
  Gene Name: tripartite motif containing 59
  ENST ID: ENST00000543469
  CDS Start-End: 216-1187
aactgtgttggtgtttgtggcttttctgaaaacacgatgaagcatcgtgaagataaatatcaaagacagtgaactaacaaccatttttatgacatgagacaataaattgaaaacattaaagataacattattttaattttagaataagaataaaagattctggaggagttggagaagagtgtattcagcccccaaaccacgagatcaacaaagaaatgcacaattttgaggaagagttaacttgtcccatatgttatagtatttttgaagatcctcgtgtactgccatgctctcatacattttgtagaaattgtttggaaaacattcttcaggcatctggtaacttttatatatggagacctttacgaattccactcaagtgccctaattgcagaagtattactgaaattgctccaactggcattgaatctttacctgttaattttgcactaagggctattattgaaaagtaccagcaagaagaccatccagatattgtcacctgccctgaacattacaggcaaccattaaatgtttactgtctattagataaaaaattagtttgtggtcattgccttaccataggtcaacatcatggtcatcctatagatgaccttcaaagtgcctatttgaaagaaaaggacactcctcaaaaactgcttgaacagttgactgacacacactggacagatcttacccatcttattgaaaagctgaaagaacaaaaatctcattctgagaaaatgatccaaggcgataaggaagctgttctccagtattttaaggagcttaatgatacattagaacagaaaaaaaaaagtttcctaacggctctctgtgatgttggcaatctaattaatcaagaatatactccacaaattgaaagaatgaaggaaatacgagagcagcagcttgaattaatggcactgacaatatctttacaagaagagtctccacttaaatttcttgaaaaagttgatgatgtacgccagcatgtacagatcttgaaacaaagaccacttcctgaggttcaacccgttgaaatttatcctcgagtaagcaaaatattgaaagaagaatggagcagaacagaaattggacaaattaagaacgttctcattcccaaaatgaaaatttctccaaaaaggatgtcatgttcctggcctgatgagggaactgacaagtgacttgtccaaggccatatagctgtgagaaaacccatgcattctcttttcagagttcatgctatcactcaactttaaagtaggccaagattaatgttggtaagggtttgtaatctgtaagaatgctaaaaacgtaagtatatatatcattttagatttgacattttgtatcttgccagtttttaggagaacttttcattttgttaagtatgcatgaatatagttgagtatatgagtaactggttcttatgctgctgttttgtatttttaccagcaggaagattgcaaaagttgatgtatgtaaatcttgaaatatttctaagttttatgtataacaaaatatgtattttaataaacttcttttgatattttatttgcactgtcttaatgagacttccatactcaggagtggtagctatgggattttcacatgggttctgggtacttctaattctttgaaacttagtactgcaggctgggtgcagtggctcatgcctatagtccagcactttgggaggctgaggcaggcagatcacttgaggccaggagtttgagaccagcttggccaacatggcaaaaccctgtctaccaaaaacacaaaaattagctgggcactgtggtgtgcacctgtagtcccagctactcatgtggctgaggcacttgaatcgcttgaacccgtgaggcagggttgcagtgagccaagatcttgccacagcactccaccctgggtgatgcagtgagactttcaaaaaaaaaaaaaaaatctgagctctactgcattggttattaaaatataataaaagtattaaattctattttcgcaccaaatgaaaacacttgattatcattatagcactttaaacttacttttcccttatatattcttgatttagaacaaattaccgtacttgaatttccgatcttgctttctttaaatctttatttaaaagtccatgctaataatgtgtttacatttttacagttacattatgatagaaactgttggattttttaaatatctaaaacaatggcccactgaagaaaggaacaattaactctttaattaattccttaggataaatacccagaaatttaacagctagggcagacttctaatacaataccgaaagtccttccaaaaaccaagtggttgccaacttatgtcccttagcattataacattcttgagccaatagtgtaaaaatacgctgacaattttataggcaaacattactcaaggtatcttactttccacttattactaaagtaattaacccctaaatagatgctcctcaacagtgggactacatcctggtaaacctatcataagttgaaactatcaagttgaaatgcatttagtacccggataaacctatcataaagttgaaaatttgtaaattgaaccagtgtaaatcagaggccatcttacttcatactcatgaagcaactatagtgggatatttttcaacttacgagatagcctaggcttgttgaaacactgtcctaatttactggctctctggtaattaagtcataaatggtcaaacatcaaattctagaaaagcatatatttaaattctcatcactataattcagaatgactggtttacaaaaatatgttcatagtatttgggtaataactgtggtgattgtctcaactggcaagctaagtggaatgccttaaagaatctatccaagattagttggcaggcatttccagtgttggtaaatcaaaggcccacgaaggtatgctgagccttgatagcacaaccttgcttaggactttgcctcaactaacatactttttagtttggcaagttacctgaccctccaggtaactcatttttctccatagtctgctacttacaagattgtcatatttttgtaatctagaagcaattatagagaatattttattagactttacaaatgacaactgcataaaacagaaaccagtttcatgatctagtttagggagtatgtattttatacaactcataatcctttacaaatagaaaaaaatcagtaatacactgaatcaacttgaagaatcttcagcataaagttcaacaaagtcccttagatgcaatttcttttggatttacagcaacactttttgttatgttgtatgtcttgtaaattccaataagtctatccgaaatctcaaacatattatttcgaagagaaattattatgaactgtgcattttttgtttgttcctaaagagaaacaaagaaaagtcaaacattaagtaataacaggtaaatcacacaaacatgtaacctcaaatattttttggacaataaacattacattgataacatgtaaaggaatgatggcaggaataattcataaaacagtatttgagtgtgaaaggaatttggttattttgacttctagtggaaaagatctaggaagatgacctaggattctagctgtgattctgctactaatttgcatttttaatttatattttactcctccaaaatggaaatatttggttcaaataaaaaataatttggtctccactgataccagaggagatggagatggagttattagacaataaagaaaaagctcaattgtaagaaataaagaattccatgtgtaatgtttaggatacccctaaaagtttctggaatgaaaatcccaaaatgattacttacatatatataaaatgcaacaatggacacatttttaaaatcaagggctgcatcaatctcatccatgaagtaaaggggagtgggcttgtagtggtgaagagcaaatactaaagccaatgaactaagtgttttctctcctcccgaaaggttgaagatctttttccaacttttcttaggtggtcgaacactgaaatgattaagaaaatcatagtcaaattacctgtaaagctaaagttaagactttgtgatttgctttccataattgagttctactatcttttttaggaatctgtaacttgcttttcacaaatatgaattctcttttctgttattttataaaaacgttattggaggatgcatacataggagcacataccaaagttttaagatttaaagagcaagctaagtattatacttcttgctattctttctccttatcaaatacaatttctcaatcctcatgttaaaaatgccttgaaaatttaagaaaagatgaactagacaaatattttgtaaatactggctgtctgcccctgtaaactgcaagcataaatagcatgcaagcaaattagtatttactagtaaatgaaacaagttgtacatcttgccttcacatcctacctccaagaaatactgagtttggagaatatgtagaaaaaggtaacagtgggattataaactcagcataattacacacctgaacatgattccttcagagaaaggatccaagctgtctacaagctcgagttcggcgtcccctcccaaagt

SEQ ID NO: 195115 - DNA, 3217 bp, Homo sapiens
  Payload ID: 18523
  Gene Name: tripartite motif containing 6
  Uniprot ID: Q9C030
  ENST ID: ENST00000278302
  CDS Start-End: 141-1607
ctgagtctttcggcctgggtggaggacgcggctgcttcaagtccttggctctgatccaggccacagattccaggattctacaggcaggaaacatcttagaaatcagggttgggcaggcaggagccaggagagtagctacaatgacttcaccagtactggtggacatacgagaagaggtgacctgccctatctgcctggagctcctaacagaacccctgagcatagactgtggccacagcttctgccaagcctgcatcacaccaaatggcagggaatcagtgattggtcaagaaggggaaagaagctgccctgtgtgccagaccagctaccagccagggaacctgcggcctaatcggcatctggccaacatagtgaggcggctcagagaggtagtgttgggccctgggaagcagctgaaagcagttctttgtgcagaccatggagaaaaactgcagctcttctgtcaggaggatgggaaggtcatttgctggctttgtgagcggtctcaggagcaccgtggtcaccacacgttcctcgtggaggaggttgcccaggagtaccaggagaagtttcaggagtctctaaagaagctgaagaacgaggagcaggaagctgagaagctaacagcttttatcagagagaagaaaacatcctggaagaatcagatggagcctgagagatgcaggatccagacagagtttaatcagctgcgaaatatcctagacagagtggagcaacgggagctgaaaaagctggaacaggaagagaagaaggggctacgaattatagaagaggctgagaatgatctggtccaccagacccagtcgctgcgagagctcatctcggatctggagcgtcgatgtcaggggtcaacaatggagctgctgcaggatgtgagtgatgtcacagaaaggagtgagttctggaccctgaggaagccagaagctctccctacaaagctgagaagtatgttccgagccccagatctgaaaaggatgctgcgagtgtgtagagagctgacagatgtccaaagctactgggttgacgtgaccctgaatccacacacagctaatttaaatcttgtcctggctaaaaaccggagacaagtgaggtttgtgggagctaaagtatctggaccttcctgtctggaaaagcattatgactgtagtgtcctgggctcccagcacttctcctctggtaagcattactgggaggtagatgtggccaagaagactgcctggatcctgggggtatgcagcaattcactgggacctacattctctttcaaccattttgctcaaaatcacagtgcttactccaggtatcagcctcagagtggatactgggtgattgggttacagcataaccatgaatatagggcctatgaggattcttccccttccctgcttctctccatgacagtgccccctcgccgtgttggggttttcttagattatgaggctggtactgtctccttttataatgtcacaaaccatggcttccccatctacactttctctaaatattactttcccactactctttgtccatattttaatccttgcaactgtgtaattcctatgaccctgcgtcgtccaagctcttgaatattcttctgttcccacccacttctgataagtaccctgaggcttatcagcatgtgattctcccttctgatcttctgtttttctgtgttctcaattcttttgttgttttttggtttttgaatcttttttgagatggaatctcgctctgtcgcccaggctggagtgcactggcgcaatctcggctcactgcaacctctgcctcctgggttcaagcgaacctcctgcctcagcatcccaagtagctgggattacaggcacccaccaccatgcccaactaatttttgtatttttatagagatagggtttcaccgtgttggccaggctgatctcgaactcctgaccgcaagtgatccacccgcctcggtctcccaaagtgctgggattacagatgtgagccgccgcgcccagacagttctttcgttttaaacagttactcagtactaggatgcacccagtggtgagagtaagcatctttgactgatgacaggtcttgaggtggatagggggcgctttcagtattttgccattaagcatagtatttgatgcaggttttttttgattgatgcaggggatcaaatttaggaagttctgatctgttaatttactacaagtttttgtataaaatgaaaactcgtattctacctatgtcttttctgtaaattattgagacaattgtgtatcatttttgttctgttaatgtggcttagtacattgatttacttcaatttgttaccacaacttgctgaaatacaccattattatttgttgtatgcaatactggatttattttgataacgtattgtttagattttgttctcatctatgttaatgaaagaaattggcctgtatttttacattcttgtaatatctttgccaggttctataaaatgcaataataagcaaataaattactttgtttttgtataagtatgtataggattgagctctaaaaccaaaccattataatgataatttgggtagcttcaaactcaaattgaagagagtcttcactacaatcttcactacaacctttggccttcctctctacatttaagagtagcaatagaacaataaaaaaaaatacgtctttcaaattaattgcagtaaaaacaaaagagtagtggggagagaaaaacaatccaatacatatttttctctcagaatagaaagaaaacacaaagagaaaatatgaacaatataaagcacttaaaggaagaggatgatttcttccagcttttccacactctctttatgcgcaggaacaaacagctgttgagtgagctgctatgactttggtagagaggtgcaatatgttttttgaaccagctataaaagaaattaagaggtacatgtgagggtagaaacaaatatcaaggatgagaatggcactggctgtcccatatggtatccaggagccaccaatgtctgttgagtacttcatacatgcctagtctgaattgagatgtgctcaatgtataaaatatataccagatttcaaatacctacttcaaaaaataatgtaaaatatctcactaataacttttcctttgtgtattgcaatgataatatgttggctctattggattaaataaagtatgttattcatttta

SEQ ID NO: 195116 - DNA, 3403 bp, Homo sapiens
  Payload ID: 18523
  Gene Name: tripartite motif containing 6
  Uniprot ID: Q9C030
  ENST ID: ENST00000380097
  CDS Start-End: 243-1793
gccttccgcaaactcctgacctgtgggtccgtccgttcaacggccaaaggctggcggaggagggatcccctgcctttctcggaacggaacggagcagagtcgtgcgtggttgagtttagataaaagccgagtgagcgcgctctgttccttaagattagtttaaggtgccttggattgctctgaagagctttgaccacctgatattgcttacatctggaacttcttggcttctcattccccagatgtgcgggtcagagaggattctacaggcaggaaacatcttagaaatcagggttgggcaggcaggagccaggagagtagctacaatgacttcaccagtactggtggacatacgagaagaggtgacctgccctatctgcctggagctcctaacagaacccctgagcatagactgtggccacagcttctgccaagcctgcatcacaccaaatggcagggaatcagtgattggtcaagaaggggaaagaagctgccctgtgtgccagaccagctaccagccagggaacctgcggcctaatcggcatctggccaacatagtgaggcggctcagagaggtagtgttgggccctgggaagcagctgaaagcagttctttgtgcagaccatggagaaaaactgcagctcttctgtcaggaggatgggaaggtcatttgctggctttgtgagcggtctcaggagcaccgtggtcaccacacgttcctcgtggaggaggttgcccaggagtaccaggagaagtttcaggagtctctaaagaagctgaagaacgaggagcaggaagctgagaagctaacagcttttatcagagagaagaaaacatcctggaagaatcagatggagcctgagagatgcaggatccagacagagtttaatcagctgcgaaatatcctagacagagtggagcaacgggagctgaaaaagctggaacaggaagagaagaaggggctacgaattatagaagaggctgagaatgatctggtccaccagacccagtcgctgcgagagctcatctcggatctggagcgtcgatgtcaggggtcaacaatggagctgctgcaggatgtgagtgatgtcacagaaaggagtgagttctggaccctgaggaagccagaagctctccctacaaagctgagaagtatgttccgagccccagatctgaaaaggatgctgcgagtgtgtagagagctgacagatgtccaaagctactgggttgacgtgaccctgaatccacacacagctaatttaaatcttgtcctggctaaaaaccggagacaagtgaggtttgtgggagctaaagtatctggaccttcctgtctggaaaagcattatgactgtagtgtcctgggctcccagcacttctcctctggtaagcattactgggaggtagatgtggccaagaagactgcctggatcctgggggtatgcagcaattcactgggacctacattctctttcaaccattttgctcaaaatcacagtgcttactccaggtatcagcctcagagtggatactgggtgattgggttacagcataaccatgaatatagggcctatgaggattcttccccttccctgcttctctccatgacagtgccccctcgccgtgttggggttttcttagattatgaggctggtactgtctccttttataatgtcacaaaccatggcttccccatctacactttctctaaatattactttcccactactctttgtccatattttaatccttgcaactgtgtaattcctatgaccctgcgtcgtccaagctcttgaatattcttctgttcccacccacttctgataagtaccctgaggcttatcagcatgtgattctcccttctgatcttctgtttttctgtgttctcaattcttttgttgttttttggtttttgaatcttttttgagatggaatctcgctctgtcgcccaggctggagtgcactggcgcaatctcggctcactgcaacctctgcctcctgggttcaagcgaacctcctgcctcagcatcccaagtagctgggattacaggcacccaccaccatgcccaactaatttttgtatttttatagagatagggtttcaccgtgttggccaggctgatctcgaactcctgaccgcaagtgatccacccgcctcggtctcccaaagtgctgggattacagatgtgagccgccgcgcccagacagttctttcgttttaaacagttactcagtactaggatgcacccagtggtgagagtaagcatctttgactgatgacaggtcttgaggtggatagggggcgctttcagtattttgccattaagcatagtatttgatgcaggttttttttgattgatgcaggggatcaaatttaggaagttctgatctgttaatttactacaagtttttgtataaaatgaaaactcgtattctacctatgtcttttctgtaaattattgagacaattgtgtatcatttttgttctgttaatgtggcttagtacattgatttacttcaatttgttaccacaacttgctgaaatacaccattattatttgttgtatgcaatactggatttattttgataacgtattgtttagattttgttctcatctatgttaatgaaagaaattggcctgtatttttacattcttgtaatatctttgccaggttctataaaatgcaataataagcaaataaattactttgtttttgtataagtatgtataggattgagctctaaaaccaaaccattataatgataatttgggtagcttcaaactcaaattgaagagagtcttcactacaatcttcactacaacctttggccttcctctctacatttaagagtagcaatagaacaataaaaaaaaatacgtctttcaaattaattgcagtaaaaacaaaagagtagtggggagagaaaaacaatccaatacatatttttctctcagaatagaaagaaaacacaaagagaaaatatgaacaatataaagcacttaaaggaagaggatgatttcttccagcttttccacactctctttatgcgcaggaacaaacagctgttgagtgagctgctatgactttggtagagaggtgcaatatgttttttgaaccagctataaaagaaattaagaggtacatgtgagggtagaaacaaatatcaaggatgagaatggcactggctgtcccatatggtatccaggagccaccaatgtctgttgagtacttcatacatgcctagtctgaattgagatgtgctcaatgtataaaatatataccagatttcaaatacctacttcaaaaaataatgtaaaatatctcactaataacttttcctttgtgtattgcaatgataatatgttggctctattggattaaataaagtatgttattcatttta

SEQ ID NO: 195117 - DNA, 2590 bp, Homo sapiens
  Payload ID: 18523
  Gene Name: tripartite motif containing 6
  ENST ID: ENST00000380107
  CDS Start-End: 121-1509
ggaggacgcggctgcttcaagtccttggctctgatccaggccacagattccaggattctacaggcaggaaacatcttagaaatcagggttgggcaggcaggagccaggagagtagctacaatgacttcaccagtactggtggacatacgagaagaggtgacctgccctatctgcctggagctcctaacagaacccctgagcatagactgtggccacagcttctgccaagcctgcatcacaccaaatggcagggaatcagtgattggtcaagaaggggaaagaagctgccctgtgtgccagaccagctaccagccagggaacctgcggcctaatcggcatctggccaacatagtgaggcggctcagagaggaggatgggaaggtcatttgctggctttgtgagcggtctcaggagcaccgtggtcaccacacgttcctcgtggaggaggttgcccaggagtaccaggagaagtttcaggagtctctaaagaagctgaagaacgaggagcaggaagctgagaagctaacagcttttatcagagagaagaaaacatcctggaagaatcagatggagcctgagagatgcaggatccagacagagtttaatcagctgcgaaatatcctagacagagtggagcaacgggagctgaaaaagctggaacaggaagagaagaaggggctacgaattatagaagaggctgagaatgatctggtccaccagacccagtcgctgcgagagctcatctcggatctggagcgtcgatgtcaggggtcaacaatggagctgctgcaggatgtgagtgatgtcacagaaaggagtgagttctggaccctgaggaagccagaagctctccctacaaagctgagaagtatgttccgagccccagatctgaaaaggatgctgcgagtgtgtagagagctgacagatgtccaaagctactgggttgacgtgaccctgaatccacacacagctaatttaaatcttgtcctggctaaaaaccggagacaagtgaggtttgtgggagctaaagtatctggaccttcctgtctggaaaagcattatgactgtagtgtcctgggctcccagcacttctcctctggtaagcattactgggaggtagatgtggccaagaagactgcctggatcctgggggtatgcagcaattcactgggacctacattctctttcaaccattttgctcaaaatcacagtgcttactccaggtatcagcctcagagtggatactgggtgattgggttacagcataaccatgaatatagggcctatgaggattcttccccttccctgcttctctccatgacagtgccccctcgccgtgttggggttttcttagattatgaggctggtactgtctccttttataatgtcacaaaccatggcttccccatctacactttctctaaatattactttcccactactctttgtccatattttaatccttgcaactgtgtaattcctatgaccctgcgtcgtccaagctcttgaatattcttctgttcccacccacttctgataagtaccctgaggcttatcagcatgtgattctcccttctgatcttctgtttttctgtgttctcaattcttttgttgttttttggtttttgaatcttttttgagatggaatctcgctctgtcgcccaggctggagtgcactggcgcaatctcggctcactgcaacctctgcctcctgggttcaagcgaacctcctgcctcagcatcccaagtagctgggattacaggcacccaccaccatgcccaactaatttttgtatttttatagagatagggtttcaccgtgttggccaggctgatctcgaactcctgaccgcaagtgatccacccgcctcggtctcccaaagtgctgggattacagatgtgagccgccgcgcccagacagttctttcgttttaaacagttactcagtactaggatgcacccagtggtgagagtaagcatctttgactgatgacaggtcttgaggtggatagggggcgctttcagtattttgccattaagcatagtatttgatgcaggttttttttgattgatgcaggggatcaaatttaggaagttctgatctgttaatttactacaagtttttgtataaaatgaaaactcgtattctacctatgtcttttctgtaaattattgagacaattgtgtatcatttttgttctgttaatgtggcttagtacattgatttacttcaatttgttaccacaacttgctgaaatacaccattattatttgttgtatgcaatactggatttattttgataacgtattgtttagattttgttctcatctatgttaatgaaagaaattggcctgtatttttacattcttgtaatatctttgccaggttctataaaatgcaataataagcaaataaattactttgtttttgtataagtatgtataggattgagctctaaaaccaaaccattataatgataatttgggtagcttcaaactcaaattgaagagagtcttcactacaatcttcactacaacctttggccttcctctctacatttaagagtagcaatagaacaataaaaaaaaa

SEQ ID NO: 195118 - DNA, 2951 bp, Homo sapiens
  Payload ID: 18523
  Gene Name: tripartite motif containing 6
  Uniprot ID: Q9C030
  ENST ID: ENST00000445329
  CDS Start-End: 400-1341
ggagcagagtcgtgcgtggttgagtttagataaaagccgagtgagcgcgctctgttccttaagattagtttaaggtgccttggattgctctgaagagctttgaccacctgatattgcttacatctggaacttcttggcttctcattccccagatgtgcgggtcagagagaccatggagaaaaactgcagctcttctgtcaggaggatgggaaggtcatttgctggctttgtgagcggtctcaggagcaccgtggtcaccacacgttcctcgtggaggaggttgcccaggagtaccaggagaagtttcaggagtctctaaagaagctgaagaacgaggagcaggaagctgagaagctaacagcttttatcagagagaagaaaacatcctggaagaatcagatggagcctgagagatgcaggatccagacagagtttaatcagctgcgaaatatcctagacagagtggagcaacgggagctgaaaaagctggaacaggaagagaagaaggggctacgaattatagaagaggctgagaatgatctggtccaccagacccagtcgctgcgagagctcatctcggatctggagcgtcgatgtcaggggtcaacaatggagctgctgcaggatgtgagtgatgtcacagaaaggagtgagttctggaccctgaggaagccagaagctctccctacaaagctgagaagtatgttccgagccccagatctgaaaaggatgctgcgagtgtgtagagagctgacagatgtccaaagctactgggttgacgtgaccctgaatccacacacagctaatttaaatcttgtcctggctaaaaaccggagacaagtgaggtttgtgggagctaaagtatctggaccttcctgtctggaaaagcattatgactgtagtgtcctgggctcccagcacttctcctctggtaagcattactgggaggtagatgtggccaagaagactgcctggatcctgggggtatgcagcaattcactgggacctacattctctttcaaccattttgctcaaaatcacagtgcttactccaggtatcagcctcagagtggatactgggtgattgggttacagcataaccatgaatatagggcctatgaggattcttccccttccctgcttctctccatgacagtgccccctcgccgtgttggggttttcttagattatgaggctggtactgtctccttttataatgtcacaaaccatggcttccccatctacactttctctaaatattactttcccactactctttgtccatattttaatccttgcaactgtgtaattcctatgaccctgcgtcgtccaagctcttgaatattcttctgttcccacccacttctgataagtaccctgaggcttatcagcatgtgattctcccttctgatcttctgtttttctgtgttctcaattcttttgttgttttttggtttttgaatcttttttgagatggaatctcgctctgtcgcccaggctggagtgcactggcgcaatctcggctcactgcaacctctgcctcctgggttcaagcgaacctcctgcctcagcatcccaagtagctgggattacaggcacccaccaccatgcccaactaatttttgtatttttatagagatagggtttcaccgtgttggccaggctgatctcgaactcctgaccgcaagtgatccacccgcctcggtctcccaaagtgctgggattacagatgtgagccgccgcgcccagacagttctttcgttttaaacagttactcagtactaggatgcacccagtggtgagagtaagcatctttgactgatgacaggtcttgaggtggatagggggcgctttcagtattttgccattaagcatagtatttgatgcaggttttttttgattgatgcaggggatcaaatttaggaagttctgatctgttaatttactacaagtttttgtataaaatgaaaactcgtattctacctatgtcttttctgtaaattattgagacaattgtgtatcatttttgttctgttaatgtggcttagtacattgatttacttcaatttgttaccacaacttgctgaaatacaccattattatttgttgtatgcaatactggatttattttgataacgtattgtttagattttgttctcatctatgttaatgaaagaaattggcctgtatttttacattcttgtaatatctttgccaggttctataaaatgcaataataagcaaataaattactttgtttttgtataagtatgtataggattgagctctaaaaccaaaccattataatgataatttgggtagcttcaaactcaaattgaagagagtcttcactacaatcttcactacaacctttggccttcctctctacatttaagagtagcaatagaacaataaaaaaaaatacgtctttcaaattaattgcagtaaaaacaaaagagtagtggggagagaaaaacaatccaatacatatttttctctcagaatagaaagaaaacacaaagagaaaatatgaacaatataaagcacttaaaggaagaggatgatttcttccagcttttccacactctctttatgcgcaggaacaaacagctgttgagtgagctgctatgactttggtagagaggtgcaatatgttttttgaaccagctataaaagaaattaagaggtacatgtgagggtagaaacaaatatcaaggatgagaatggcactggctgtcccatatggtatccaggagccaccaatgtctgttgagtacttcatacatgcctagtctgaattgagatgtgctcaatgtataaaatatataccagatttcaaatacctacttcaaaaaataatgtaaaatatctcactaataacttttcctttgtgtattgcaatgataatatgttggctctattggattaaataaagtatgttattcatttta

SEQ ID NO: 195119 - DNA, 468 bp, Homo sapiens
  Payload ID: 18523
  Gene Name: tripartite motif containing 6
  ENST ID: ENST00000424369
  CDS Start-End: 175-468
tgagtctttcggcctgggtggaggacgcggctgcttcaagtccttggctctgatccaggccacagattccaggagaagtttcaggagtctctaaagaagctgaagaacgaggagcaggaagctgagaagctaacagcttttatcagagagaagaaaacatcctggaagaatcagatggagcctgagagatgcaggatccagacagagtttaatcagctgcgaaatatcctagacagagtggagcaacgggagctgaaaaagctggaacaggaagagaagaaggggctacgaattatagaagaggctgagaatgatctggtccaccagacccagtcgctgcgagagctcatctcggatctggagcgtcgatgtcaggggtcaacaatggagctgctgcaggatgtgagtgatgtcacagaaaggagtgagttctggaccctgaggaagccagaagctctccctacaaag

SEQ ID NO: 195120 - DNA, 1398 bp, Homo sapiens
  Payload ID: 18523
  Gene Name: tripartite motif containing 6
  Uniprot ID: Q9C030
  ENST ID: ENST00000506134
  CDS Start-End: 212-1153
aagattagtttaaggtgccttggattgctctgaagagctttgaccacctgatattgcttacatctggaacttcttggcttctcattccccagatgtgcgggtcagagaggagaagtttcaggagtctctaaagaagctgaagaacgaggagcaggaagctgagaagctaacagcttttatcagagagaagaaaacatcctggaagaatcagatggagcctgagagatgcaggatccagacagagtttaatcagctgcgaaatatcctagacagagtggagcaacgggagctgaaaaagctggaacaggaagagaagaaggggctacgaattatagaagaggctgagaatgatctggtccaccagacccagtcgctgcgagagctcatctcggatctggagcgtcgatgtcaggggtcaacaatggagctgctgcaggatgtgagtgatgtcacagaaaggagtgagttctggaccctgaggaagccagaagctctccctacaaagctgagaagtatgttccgagccccagatctgaaaaggatgctgcgagtgtgtagagagctgacagatgtccaaagctactgggttgacgtgaccctgaatccacacacagctaatttaaatcttgtcctggctaaaaaccggagacaagtgaggtttgtgggagctaaagtatctggaccttcctgtctggaaaagcattatgactgtagtgtcctgggctcccagcacttctcctctggtaagcattactgggaggtagatgtggccaagaagactgcctggatcctgggggtatgcagcaattcactgggacctacattctctttcaaccattttgctcaaaatcacagtgcttactccaggtatcagcctcagagtggatactgggtgattgggttacagcataaccatgaatatagggcctatgaggattcttccccttccctgcttctctccatgacagtgccccctcgccgtgttggggttttcttagattatgaggctggtactgtctccttttataatgtcacaaaccatggcttccccatctacactttctctaaatattactttcccactactctttgtccatattttaatccttgcaactgtgtaattcctatgaccctgcgtcgtccaagctcttgaatattcttctgttcccacccacttctgataagtaccctgaggcttatcagcatgtgattctcccttctgatcttctgtttttctgtgttctcaattcttttgttgttttttggtttttgaatcttttttgagatggaatctcgctctgtcgcccaggctggagtgcactggcgcaatctcggctcactgcaacctctgcctcctgggttcaagcgaacctcctgcctcagcatcccaagtagctg

SEQ ID NO: 195121 - DNA, 1060 bp, Homo sapiens
  Payload ID: 18523
  Gene Name: tripartite motif containing 6
  Uniprot ID: Q9C030
  ENST ID: ENST00000515022
  CDS Start-End: 116-1057
aagattagtttaaggtgccttggattgctctgaagagctttgaccacctgatattgcttacatctggaacttcttggcttctcattccccagatgtgcgggtcagagagaatcagatggagcctgagagatgcaggatccagacagagtttaatcagctgcgaaatatcctagacagagtggagcaacgggagctgaaaaagctggaacaggaagagaagaaggggctacgaattatagaagaggctgagaatgatctggtccaccagacccagtcgctgcgagagctcatctcggatctggagcgtcgatgtcaggggtcaacaatggagctgctgcaggatgtgagtgatgtcacagaaaggagtgagttctggaccctgaggaagccagaagctctccctacaaagctgagaagtatgttccgagccccagatctgaaaaggatgctgcgagtgtgtagagagctgacagatgtccaaagctactgggttgacgtgaccctgaatccacacacagctaatttaaatcttgtcctggctaaaaaccggagacaagtgaggtttgtgggagctaaagtatctggaccttcctgtctggaaaagcattatgactgtagtgtcctgggctcccagcacttctcctctggtaagcattactgggaggtagatgtggccaagaagactgcctggatcctgggggtatgcagcaattcactgggacctacattctctttcaaccattttgctcaaaatcacagtgcttactccaggtatcagcctcagagtggatactgggtgattgggttacagcataaccatgaatatagggcctatgaggattcttccccttccctgcttctctccatgacagtgccccctcgccgtgttggggttttcttagattatgaggctggtactgtctccttttataatgtcacaaaccatggcttccccatctacactttctctaaatattactttcccactactctttgtccatattttaatccttgcaactgtgtaattcctatgaccctgcgtcgtccaagctcttgaata

SEQ ID NO: 195122 - DNA, 1767 bp, Homo sapiens
  Payload ID: 18523
  Gene Name: tripartite motif containing 6
  Uniprot ID: Q9C030
  ENST ID: ENST00000507320
  CDS Start-End: 468-1409
gtctttcggcctgggtggaggacgcggctgcttcaagtccttggctctgatccaggccacagattccagaccatggagaaaaactgcagctcttctgtcaggaggatgggaaggtcatttgctggctttgtgagcggtctcaggagcaccgtggtcaccacacgttcctcgtggaggaggttgcccaggagtaccaggagaagtttcaggagtctctaaagaagctgaagaacgaggagcaggaagctgagaagctaacagcttttatcagagagaagaaaacatcctggaaggcaagggagactttttctgaagatgtcctggggcaggaatcatggcaggtcataggagctgagggcaaaggagtccttgtcctgtctgtcctctgatgccatgactagaagagcttccctttgcctggtcctccactatattccttccaaacagggggaggagaggagaatcagatggagcctgagagatgcaggatccagacagagtttaatcagctgcgaaatatcctagacagagtggagcaacgggagctgaaaaagctggaacaggaagagaagaaggggctacgaattatagaagaggctgagaatgatctggtccaccagacccagtcgctgcgagagctcatctcggatctggagcgtcgatgtcaggggtcaacaatggagctgctgcaggatgtgagtgatgtcacagaaaggagtgagttctggaccctgaggaagccagaagctctccctacaaagctgagaagtatgttccgagccccagatctgaaaaggatgctgcgagtgtgtagagagctgacagatgtccaaagctactgggttgacgtgaccctgaatccacacacagctaatttaaatcttgtcctggctaaaaaccggagacaagtgaggtttgtgggagctaaagtatctggaccttcctgtctggaaaagcattatgactgtagtgtcctgggctcccagcacttctcctctggtaagcattactgggaggtagatgtggccaagaagactgcctggatcctgggggtatgcagcaattcactgggacctacattctctttcaaccattttgctcaaaatcacagtgcttactccaggtatcagcctcagagtggatactgggtgattgggttacagcataaccatgaatatagggcctatgaggattcttccccttccctgcttctctccatgacagtgccccctcgccgtgttggggttttcttagattatgaggctggtactgtctccttttataatgtcacaaaccatggcttccccatctacactttctctaaatattactttcccactactctttgtccatattttaatccttgcaactgtgtaattcctatgaccctgcgtcgtccaagctcttgaatattcttctgttcccacccacttctgataagtaccctgaggcttatcagcatgtgattctcccttctgatcttctgtttttctgtgttctcaattcttttgttgttttttggtttttgaatcttttttgagatggaatctcgctctgtcgcccaggctggagtgcactggcgcaatctcggctcactgcaacctctgcctcctgggttcaagcgaacctcctgcctcagcatcccaagtagctgggattacaggcacccaccaccatgcccaactaatttttgtatttttatagagatagggtttcaccgtgttggccaggctgatctcgaactcctgaccgcaagtgatccacccg

SEQ ID NO: 195123 - DNA, 2949 bp, Homo sapiens
  Payload ID: 18523
  Gene Name: tripartite motif containing 6
  ENST ID: ENST00000618326
  CDS Start-End: 153-1340
ggagcagagtcgtgcgtggttgagtttagataaaagccgagtgagcgcgctctgttccttaagattagtttaaggtgccttggattgctctgaagagctttgaccacctgatattgcttacatctggaacttcttggcttctcattccccagatgtgcgggtcagagagaccatggagaaaaactgcagctcttctgtcaggaggatgggaaggtcatttgctggcttgtgagcggtctcaggagcaccgtggtcaccacacgttcctcgtggaggaggttgcccaggagtaccaggagaagtttcaggagtctctaaagaagctgaagaacgaggagcaggaagctgagaagctaacagcttttatcagagagaagaaaacatcctggaagaatcagatggagcctgagagatgcaggatccagacagagtttaatcagctgcgaaatatcctagacagagtggagcaacgggagctgaaaaagctggaacaggaagagaagaaggggctacgaattatagaagaggctgagaatgatctggtccaccagacccagtcgctgcgagagctcatctcggatctggagcgtcgatgtcaggggtcaacaatggagctgctgcaggatgtgagtgatgtcacagaaaggagtgagttctggaccctgaggaagccagaagctctccctacaaagctgagaagtatgttccgagccccagatctgaaaaggatgctgcgagtgtgtagagagctgacagatgtccaaagctactgggttgacgtgaccctgaatccacacacagctaatttaaatcttgtcctggctaaaaaccggagacaagtgaggtttgtgggagctaaagtatctggaccttcctgtctggaaaagcattatgactgtagtgtcctgggctcccagcacttctcctctggtaagcattactgggaggtagatgtggccaagaagactgcctggatcctgggggtatgcagcaattcactgggacctacattctctttcaaccattttgctcaaaatcacagtgcttactccaggtatcagcctcagagtggatactgggtgattgggttacagcataaccatgaatatagggcctatgaggattcttccccttccctgcttctctccatgacagtgccccctcgccgtgttggggttttcttagattatgaggctggtactgtctccttttataatgtcacaaaccatggcttccccatctacactttctctaaatattactttcccactactctttgtccatattttaatccttgcaactgtgtaattcctatgaccctgcgtcgtccaagctcttgaatattcttctgttcccacccacttctgataagtaccctgaggcttatcagcatgtgattctcccttctgatcttctgtttttctgtgttctcaattcttttgttgttttttggtttttgaatcttttttgagatggaatctcgctctgtcgcccaggctggagtgcactggcgcaatctcggctcactgcaacctctgcctcctgggttcaagcgaacctcctgcctcagcatcccaagtagctgggattacaggcacccaccaccatgcccaactaatttttgtatttttatagagatagggtttcaccgtgttggccaggctgatctcgaactcctgaccgcaagtgatccacccgcctcggtctcccaaagtgctgggattacagatgtgagccgccgcgcccagacagttctttcgttttaaacagttactcagtactaggatgcacccagtggtgagagtaagcatctttgactgatgacaggtcttgaggtggatagggggcgctttcagtattttgccattaagcatagtatttgatgcaggttttttttgattgatgcaggggatcaaatttaggaagttctgatctgttaatttactacaagtttttgtataaaatgaaaactcgtattctacctatgtcttttctgtaaattattgagacaattgtgtatcatttttgttctgttaatgtggcttagtacattgatttacttcaatttgttaccacaacttgctgaaatacaccattattatttgttgtatgcaatactggatttattttgataacgtattgtttagattttgttctcatctatgttaatgaaagaaattggcctgtatttttacattcttgtaatatctttgccaggttctataaaatgcaataataagcaaataaattactttgtttttgtataagtatgtataggattgagctctaaaaccaaaccattataatgataatttgggtagcttcaaactcaaattgaagagagtcttcactacaatcttcactacaacctttggccttcctctctacatttaagagtagcaatagaacaataaaaaaaaatacgtctttcaaattaattgcagtaaaaacaaaagagtagtggggagagaaaaacaatccaatacatatttttctctcagaatagaaagaaaacacaaagagaaaatatgaacaatataaagcacttaaaggaagaggatgatttcttccagcttttccacactctctttatgcgcaggaacaaacagctgttgagtgagctgctatgactttggtagagaggtgcaatatgttttttgaaccagctataaaagaaattaagaggtacatgtgagggtagaaacaaatatcaaggatgagaatggcactggctgtcccatatggtatccaggagccaccaatgtctgttgagtacttcatacatgcctagtctgaattgagatgtgctcaatgtataaaatatataccagatttcaaatacctacttcaaaaaataatgtaaaatatctcactaataacttttcctttgtgtattgcaatgataatatgttggctctattggattaaataaagtatgttattcatttt

SEQ ID NO: 195124 - DNA, 3005 bp, Homo sapiens
  Payload ID: 18523
  Gene Name: tripartite motif containing 6
  ENST ID: ENST00000621176
  CDS Start-End: 1-1389
atgacttcaccagtactggtggacatacgagaagaggtgacctgccctatctgcctggagctcctaacagaacccctgagcatagactgtggccacagcttctgccaagcctgcatcacaccaaatggcagggaatcagtgattggtcaagaaggggaaagaagctgccctgtgtgccagaccagctaccagccagggaacctgcggcctaatcggcatctggccaacatagtgaggcggctcagagaggaggatgggaaggtcatttgctggctttgtgagcggtctcaggagcaccgtggtcaccacacgttcctcgtggaggaggttgcccaggagtaccaggagaagtttcaggagtctctaaagaagctgaagaacgaggagcaggaagctgagaagctaacagcttttatcagagagaagaaaacatcctggaagaatcagatggagcctgagagatgcaggatccagacagagtttaatcagctgcgaaatatcctagacagagtggagcaacgggagctgaaaaagctggaacaggaagagaagaaggggctacgaattatagaagaggctgagaatgatctggtccaccagacccagtcgctgcgagagctcatctcggatctggagcgtcgatgtcaggggtcaacaatggagctgctgcaggatgtgagtgatgtcacagaaaggagtgagttctggaccctgaggaagccagaagctctccctacaaagctgagaagtatgttccgagccccagatctgaaaaggatgctgcgagtgtgtagagagctgacagatgtccaaagctactgggttgacgtgaccctgaatccacacacagctaatttaaatcttgtcctggctaaaaaccggagacaagtgaggtttgtgggagctaaagtatctggaccttcctgtctggaaaagcattatgactgtagtgtcctgggctcccagcacttctcctctggtaagcattactgggaggtagatgtggccaagaagactgcctggatcctgggggtatgcagcaattcactgggacctacattctctttcaaccattttgctcaaaatcacagtgcttactccaggtatcagcctcagagtggatactgggtgattgggttacagcataaccatgaatatagggcctatgaggattcttccccttccctgcttctctccatgacagtgccccctcgccgtgttggggttttcttagattatgaggctggtactgtctccttttataatgtcacaaaccatggcttccccatctacactttctctaaatattactttcccactactctttgtccatattttaatccttgcaactgtgtaattcctatgaccctgcgtcgtccaagctcttgaatattcttctgttcccacccacttctgataagtaccctgaggcttatcagcatgtgattctcccttctgatcttctgtttttctgtgttctcaattcttttgttgttttttggtttttgaatcttttttgagatggaatctcgctctgtcgcccaggctggagtgcactggcgcaatctcggctcactgcaacctctgcctcctgggttcaagcgaacctcctgcctcagcatcccaagtagctgggattacaggcacccaccaccatgcccaactaatttttgtatttttatagagatagggtttcaccgtgttggccaggctgatctcgaactcctgaccgcaagtgatccacccgcctcggtctcccaaagtgctgggattacagatgtgagccgccgcgcccagacagttctttcgttttaaacagttactcagtactaggatgcacccagtggtgagagtaagcatctttgactgatgacaggtcttgaggtggatagggggcgctttcagtattttgccattaagcatagtatttgatgcaggttttttttgattgatgcaggggatcaaatttaggaagttctgatctgttaatttactacaagtttttgtataaaatgaaaactcgtattctacctatgtcttttctgtaaattattgagacaattgtgtatcatttttgttctgttaatgtggcttagtacattgatttacttcaatttgttaccacaacttgctgaaatacaccattattatttgttgtatgcaatactggatttattttgataacgtattgtttagattttgttctcatctatgttaatgaaagaaattggcctgtatttttacattcttgtaatatctttgccaggttctataaaatgcaataataagcaaataaattactttgtttttgtataagtatgtataggattgagctctaaaaccaaaccattataatgataatttgggtagcttcaaactcaaattgaagagagtcttcactacaatcttcactacaacctttggccttcctctctacatttaagagtagcaatagaacaataaaaaaaaatacgtctttcaaattaattgcagtaaaaacaaaagagtagtggggagagaaaaacaatccaatacatatttttctctcagaatagaaagaaaacacaaagagaaaatatgaacaatataaagcacttaaaggaagaggatgatttcttccagcttttccacactctctttatgcgcaggaacaaacagctgttgagtgagctgctatgactttggtagagaggtgcaatatgttttttgaaccagctataaaagaaattaagaggtacatgtgagggtagaaacaaatatcaaggatgagaatggcactggctgtcccatatggtatccaggagccaccaatgtctgttgagtacttcatacatgcctagtctgaattgagatgtgctcaatgtataaaatatataccagatttcaaatacctacttcaaaaaataatgtaaaatatctcactaataacttttcctttgtgtattgcaatgataatatgttggctctattggattaaataaagtatgttattcattttacctgtt

SEQ ID NO: 195125 - DNA, 1867 bp, Homo sapiens
  Payload ID: 18524
  Gene Name: tripartite motif containing 60
  Uniprot ID: Q495X7
  ENST ID: ENST00000341062
  CDS Start-End: 196-1611
tcttttctcatccacagggatgaccgctgtattataacctgtggctagtttattgaagaagaaaatcattacacttagattcagacgggctcggccgggcgcggtggctcacgcctgtaatcccagcactttgggaggccgaggcgggtggatcatgaggtcaggagatcgagaccatcctggctaacaagctcgatggagtttgtgacagccctggtgaacctccaagaggagtctagctgtcccatctgtctggagtacttgaaagacccagtgaccatcaactgtgggcacaacttctgtcgctcctgcctcagtgtatcctggaaggatctagatgatacctttccctgtcctgtctgccgtttttgctttccatacaagagcttcaggaggaacccccagctccgtaatttgactgaaattgctaaacaactccagattaggaggagcaagagaaagaggcagaaagagaatgccatgtgtgaaaaacacaaccagtttctgaccctcttctgtgttaaagatctagagatcttatgtacacagtgcagtttctccactaaacaccagaagcactacatttgccctattaagaaagctgcctcttatcacagagaaattctagaaggtagccttgagcccttgaggaataatatagaacgagttgaaaaagtgataattctgcaaggcagcaaatcagtggagctgaaaaagaaggtagaatataagagggaagaaataaattctgagtttgagcaaataagattgtttttacagaatgaacaagagatgattcttaggcagatacaagatgaagagatgaacattttagcaaaactaaatgaaaaccttgtagaactttcagattatgtttccacattaaaacatctactgagggaggtagagggcaagtctgtgcagtcaaacctggaattactgacacaagctaagagtatgcaccacaagtatcaaaacctaaaatgccctgaactcttttcatttagattaacaaaatatggtttcagtcttcctcctcaatattctggcttggacagaattatcaagccatttcaagtagatgtgattctagatctcaacacagcacatcctcaacttcttgtctctgaggatagaaaagctgtgcgatatgaaagaaaaaaacgaaacatttgttatgacccaaggagattttatgtctgccctgctgtcctaggctctcagagatttagttctggccgacattactgggaagtagaagtgggaaacaaacctaaatggatattgggtgtgtgtcaagactgtcttcttaggaactggcaggatcagccatcagttctgggcggattctgggcaattgggcgatacatgaagagtggttatgttgcgtcaggtcctaagacaacccagcttctgccagtagtaaaacccagtaaaattggtatttttctggactatgaattgggtgatctttccttttataatatgaatgataggtctattctctatacttttaacgattgtttcacagaagccgtttggccttatttctatactggaacagattccgaacctcttaaaatctgctcagtatcagattctgaaagataaggaactggtaaatgggtctgtttcagtttttgtaggtaacttagccagtaaatttaatctcatttctggactctttaagttttaccactgaaaaccagagtcgatttttctcctaaatttttggcaactataagatgttcataatgccactttcatatattctatgaatatcaattgtcaggtgctttgatttctaagataaaatattttagaattatgttacttaacatgtccaataaaatgttttcaaattgcc

SEQ ID NO: 195126 - DNA, 1888 bp, Homo sapiens
  Payload ID: 18524
  Gene Name: tripartite motif containing 60
  Uniprot ID: Q495X7
  ENST ID: ENST00000512596
  CDS Start-End: 217-1632
acttccggtggagcagccaaccaccgcgctggtcaattgtatgcctaaaactcgaaaaccaaggcgcccagggttgtgtgagggtttccgctctgcgccccgcggggttccatgggtcctgcacagcatcaggcctgagccgccggtccaactgctccaggtcatcagtttgccccatcattggttaaggtggtattctctacattataaagctcgatggagtttgtgacagccctggtgaacctccaagaggagtctagctgtcccatctgtctggagtacttgaaagacccagtgaccatcaactgtgggcacaacttctgtcgctcctgcctcagtgtatcctggaaggatctagatgatacctttccctgtcctgtctgccgtttttgctttccatacaagagcttcaggaggaacccccagctccgtaatttgactgaaattgctaaacaactccagattaggaggagcaagagaaagaggcagaaagagaatgccatgtgtgaaaaacacaaccagtttctgaccctcttctgtgttaaagatctagagatcttatgtacacagtgcagtttctccactaaacaccagaagcactacatttgccctattaagaaagctgcctcttatcacagagaaattctagaaggtagccttgagcccttgaggaataatatagaacgagttgaaaaagtgataattctgcaaggcagcaaatcagtggagctgaaaaagaaggtagaatataagagggaagaaataaattctgagtttgagcaaataagattgtttttacagaatgaacaagagatgattcttaggcagatacaagatgaagagatgaacattttagcaaaactaaatgaaaaccttgtagaactttcagattatgtttccacattaaaacatctactgagggaggtagagggcaagtctgtgcagtcaaacctggaattactgacacaagctaagagtatgcaccacaagtatcaaaacctaaaatgccctgaactcttttcatttagattaacaaaatatggtttcagtcttcctcctcaatattctggcttggacagaattatcaagccatttcaagtagatgtgattctagatctcaacacagcacatcctcaacttcttgtctctgaggatagaaaagctgtgcgatatgaaagaaaaaaacgaaacatttgttatgacccaaggagattttatgtctgccctgctgtcctaggctctcagagatttagttctggccgacattactgggaagtagaagtgggaaacaaacctaaatggatattgggtgtgtgtcaagactgtcttcttaggaactggcaggatcagccatcagttctgggcggattctgggcaattgggcgatacatgaagagtggttatgttgcgtcaggtcctaagacaacccagcttctgccagtagtaaaacccagtaaaattggtatttttctggactatgaattgggtgatctttccttttataatatgaatgataggtctattctctatacttttaacgattgtttcacagaagccgtttggccttatttctatactggaacagattccgaacctcttaaaatctgctcagtatcagattctgaaagataaggaactggtaaatgggtctgtttcagtttttgtaggtaacttagccagtaaatttaatctcatttctggactctttaagttttaccactgaaaaccagagtcgatttttctcctaaatttttggcaactataagatgttcataatgccactttcatatattctatgaatatcaattgtcaggtgctttgatttctaagataaaatattttagaattatgttacttaacatgtccaataaaatgttttcaaattgcc

SEQ ID NO: 195127 - DNA, 389 bp, Homo sapiens
  Payload ID: 18524
  Gene Name: tripartite motif containing 60
  ENST ID: ENST00000507119
  CDS Start-End: 118-389
aaactcgaaaaccaaggcgcccagggttgtgtgagggtttccgctctgcgccccgcggggttccatgggtcctgcacagcatcaggcctgagccgccggtccaactgctccagctcgatggagtttgtgacagccctggtgaacctccaagaggagtctagctgtcccatctgtctggagtacttgaaagacccagtgaccatcaactgtgggcacaacttctgtcgctcctgcctcagtgtatcctggaaggatctagatgatacctttccctgtcctgtctgccgtttttgctttccatacaagagcttcaggaggaacccccagctccgtaatttgactgaaattgctaaacaactccagattaggaggagcaagagaaagaggca

SEQ ID NO: 195128 - DNA, 1674 bp, Homo sapiens
  Payload ID: 18524
  Gene Name: tripartite motif containing 60
  Uniprot ID: Q495X7
  ENST ID: ENST00000508504
  CDS Start-End: 234-1649
caggtcatcagtttgccccatcattggttaaggtggtattctctacattataaagggatgaccgctgtattataacctgtggctagtttattgaagaagaaaatcattacacttagattcagacgggctcggccgggcgcggtggctcacgcctgtaatcccagcactttgggaggccgaggcgggtggatcatgaggtcaggagatcgagaccatcctggctaacaagctcgatggagtttgtgacagccctggtgaacctccaagaggagtctagctgtcccatctgtctggagtacttgaaagacccagtgaccatcaactgtgggcacaacttctgtcgctcctgcctcagtgtatcctggaaggatctagatgatacctttccctgtcctgtctgccgtttttgctttccatacaagagcttcaggaggaacccccagctccgtaatttgactgaaattgctaaacaactccagattaggaggagcaagagaaagaggcagaaagagaatgccatgtgtgaaaaacacaaccagtttctgaccctcttctgtgttaaagatctagagatcttatgtacacagtgcagtttctccactaaacaccagaagcactacatttgccctattaagaaagctgcctcttatcacagagaaattctagaaggtagccttgagcccttgaggaataatatagaacgagttgaaaaagtgataattctgcaaggcagcaaatcagtggagctgaaaaagaaggtagaatataagagggaagaaataaattctgagtttgagcaaataagattgtttttacagaatgaacaagagatgattcttaggcagatacaagatgaagagatgaacattttagcaaaactaaatgaaaaccttgtagaactttcagattatgtttccacattaaaacatctactgagggaggtagagggcaagtctgtgcagtcaaacctggaattactgacacaagctaagagtatgcaccacaagtatcaaaacctaaaatgccctgaactcttttcatttagattaacaaaatatggtttcagtcttcctcctcaatattctggcttggacagaattatcaagccatttcaagtagatgtgattctagatctcaacacagcacatcctcaacttcttgtctctgaggatagaaaagctgtgcgatatgaaagaaaaaaacgaaacatttgttatgacccaaggagattttatgtctgccctgctgtcctaggctctcagagatttagttctggccgacattactgggaagtagaagtgggaaacaaacctaaatggatattgggtgtgtgtcaagactgtcttcttaggaactggcaggatcagccatcagttctgggcggattctgggcaattgggcgatacatgaagagtggttatgttgcgtcaggtcctaagacaacccagcttctgccagtagtaaaacccagtaaaattggtatttttctggactatgaattgggtgatctttccttttataatatgaatgataggtctattctctatacttttaacgattgtttcacagaagccgtttggccttatttctatactggaacagattccgaacctcttaaaatctgctcagtatcagattctgaaagataaggaactggtaaatgggtctgtttca

SEQ ID NO: 195129 - DNA, 1582 bp, Homo sapiens
  Payload ID: 18525
  Gene Name: tripartite motif containing 61
  Uniprot ID: Q5EBN2
  ENST ID: ENST00000329314
  CDS Start-End: 614-1243
aactgccaaccaccgcgcaggctgagccccaggcaggaagcagcccacttggtggggttggggtatgagtccttcctcgcgggggctcggtgggtcctgagtattctttggccggatttgctgatccgtctgctccagcataggttcacaaagtacagtccgcaggccagcagcatcatctgggaacttaggaaaaaaccagccctactgagtcagaaactggggatgtggcccaggcaatcttttaccaagacctccaggtgattataatgcaaggaaggattccctatcttggacctgaggctgctttcttgaagaaaacttgactttatttcatttagtgggaagagcagcagcccagctattaagttctaatatgcaataggctgcaggctgtgaagtgttcgtggcagtagactctgaagctaaggagctgagggcttaacaagtttctagaagctgccatcaacatgccaagtcagtaaaactgatagttgatcagatttcaaggtctggggagtatatccactgtgtactgggtcttgagctctagagagctaggccttgctaaaataaaagaattaccttacctaccatctttgttcaagtctcaatggaatttgttacggccctggctgacctccgagcagaggctagctgtcccatctgtctggactacttgaaagacccagtgaccatcagctgtgggcataacttctgtctctcctgcatcattatgtcctggaaggatctacatgatagtttcccctgccccttttgccacttttgctgtccagaaaggaaatttataagcaatccccagctgggtagtttgactgaaattgctaagcaactccagataagaagcaagaagaggaagaggcaggaagagaagcatgtgtgtaagaagcataatcaggttttgactttcttctgtcagaaagacctagagcttttatgtccaaggtgcagtttgtccactgatcaccagcatcactgtgtttggcccataaagaaggctgcctcctatcataggaaaaaactggaggaatacaatgcaccgtggaaggagagagtggaactaattgaaaaagtcataactatgcaaaccaggaaatcactggaactgaagaaaaagatggagtctccttctgtcaccaggctggagtgcagttgcacgatctcggctcacttcaacctccgcctcccgggatcaagcgattcttctgcctctggctcctgagtagctgggactacagagatggttgcccaggctggtctggaactcctgacctcaagcgatcttcctgccttgacctcccaaagtgctgggattatagccatgctgccaaccatgtgtagggtatgtatatgttcctataccataataaaattttaattacatttgtaaggtatgtaattatatgtatttctgtataatatgtacatataaatatgctaattaatacaagaacatattgaattataatcaatatatataattttagatgtatattggaatgtttatctttctaataatacaaaactgatggttaaaaaataaaatgcacaaactccccaa

SEQ ID NO: 195130 - DNA, 630 bp, Homo sapiens
  Payload ID: 18525
  Gene Name: tripartite motif containing 61
  Uniprot ID: Q5EBN2
  ENST ID: ENST00000616332
  CDS Start-End: 1-630
atggaatttgttacggccctggctgacctccgagcagaggctagctgtcccatctgtctggactacttgaaagacccagtgaccatcagctgtgggcataacttctgtctctcctgcatcattatgtcctggaaggatctacatgatagtttcccctgccccttttgccacttttgctgtccagaaaggaaatttataagcaatccccagctgggtagtttgactgaaattgctaagcaactccagataagaagcaagaagaggaagaggcaggaagagaagcatgtgtgtaagaagcataatcaggttttgactttcttctgtcagaaagacctagagcttttatgtccaaggtgcagtttgtccactgatcaccagcatcactgtgtttggcccataaagaaggctgcctcctatcataggaaaaaactggaggaatacaatgcaccgtggaaggagagagtggaactaattgaaaaagtcataactatgcaaaccaggaaatcactggaactgaagaaaaagatggagtctccttctgtcaccaggctggagtgcagttgcacgatctcggctcacttcaacctccgcctcccgggatcaagcgattcttctgcctctggctcctga

SEQ ID NO: 195131 - DNA, 3437 bp, Homo sapiens
  Payload ID: 18526
  Gene Name: tripartite motif containing 62
  Uniprot ID: Q9BVG3
  ENST ID: ENST00000291416
  CDS Start-End: 235-1662
ccactacctctagactgccctcccgggctggcgtcccacggagtctcagccgcgcaccccttcctcgcgttaccctccttccggacagcaccccctcccttctccggtagctcctacccctgcctgtgcgggcctcgtccccgcgcccagccctcggtgctgcctccgacagcgccgcgctctctcagccgcccccctgcccctcgggcccccctctctgctgcccctggcgccatggcgtgcagcctcaaggacgagctgctgtgctccatctgcctgagcatctaccaggacccggtgagcctgggctgcgagcattacttctgccgccgctgcatcacggagcactgggtgcggcaggaggcgcagggcgcccgcgactgccccgagtgccggcgcacgttcgccgagcccgcgctggcgcccagcctcaagctggccaacatcgtggagcgctacagctccttcccgctggacgccatcctcaacgcgcgccgcgccgcgcgaccctgccaggcgcacgacaaggtcaagctcttctgcctcacggaccgcgcgcttctctgcttcttctgcgacgagcctgcactgcacgagcagcatcaggtcaccggcatcgacgacgccttcgacgagctgcagagggagctgaaggaccaacttcaggcccttcaagacagcgagcgggaacacaccgaagcgctgcagctgctcaagcgacaactggcggagaccaagtcttccaccaagagcctgcggaccactatcggcgaggccttcgagcggctgcaccggctgctgcgtgaacgccagaaggccatgctagaggagctggaggcggacacggcccgcacgctgaccgacatcgagcagaaagtccagcgctacagccagcagctgcgcaaggtccaggagggagcccagatcctgcaggagcggctggctgaaaccgaccggcacaccttcctggctggggtggcctcactgtccgagcggctcaagggaaaaatccatgagaccaacctcacatatgaagacttcccgacctccaagtacacaggccccctgcagtacaccatctggaagtccctgttccaggacatccacccagtgccagccgccctaaccctggacccgggcacagcccaccagcgcctgatcctgtcggacgactgcaccattgtggcttacggcaacttgcacccacagccactgcaggactcgccaaagcgcttcgatgtggaggtgtcggtgctgggttctgaagccttcagtagtggcgtccactactgggaggtggtggtggcggagaagacccagtgggtgatcgggctggcacacgaagccgcaagccgcaagggcagcatccagatccagcccagccgcggcttctactgcatcgtgatgcacgatggcaaccagtacagcgcctgcacggagccctggacgcggcttaacgtccgggacaagcttgacaaggtgggtgtcttcctggactatgaccaaggcttgctcatcttctacaatgctgatgacatgtcctggctctacaccttccgcgagaagttccctggcaagctctgctcttacttcagccctggccagagccacgccaatggcaagaacgttcagccgctgcggatcaacaccgtccgcatctagtccaggcagaaggagaccacaacctcctgggaccactgccacctgcaagagccctgcccaggagatagaagacctggactccagcccaccgtggccactggagacctcaggccagttgtttaccctccagcctccagtctgtaaaatggaggttgcattccctacttcctaaactctcttccagcatcgatgttctgtagctctgaccttgatagggatacagctttgatccaaggatgtgacatggcttctcctcagggcaacccctgcccaaccctcatccccatcttctcaggggcaggggactaccttccagtgtctccctccagcccagccctgacctcaggaagtgtcagagcatggccagtagttggcagcccgaaagacacacagcaccctcttatgtcccatggcctaagacttacccctgaccaagctagtgatgggccatttacccttgaccccagtccacagtggtcacaggtagtacctggtcctagggttgcctgagagccaacctctcctgccacccccacaccaagaactatatggttcctacttctcccactgatctgctggtcagtgatgatgctgtggcctgtggaaggcacctggtagttgagtccacacattatagtcatgtgccaccaccttcctgcccacaggccgagggacagggtgagggtatacccaaagctgatgcagagcccattagcctaaaagcaactgcaggacaagcctccctggatgatcgaggtccccagtagctctgaacaagagtccagccaaccctcttcagccaggcctctgtgacctgctagggtgcaggaggcttccagaagcagttgttgtaattaggacccaagcactgggaggggctgttggctggaccccttgtcagacttggcatctatctcagttaggatcctgctgcagaaaacaagagccacttgtagctggtttaattagacaaggatttactacctggcccctggtggcttgcaaaattgttggaagagctggagaagcagactctgctgaatttccaggaactcccagcgccagattcatcatgtctgttgtgaccaggaaagctgcccccatctgcaggaagccactatgccagaaagctgctgactgcagaactaggctccctctgccacggtccgtgccagccaatagatgtcctgaggcctgcccctctcccacttcactcagttcccaaatctaaatttttacaagagattctgtttgggggaacttaagtcagatccagaaccttggctgcaagggagtctgggaaatgtcatttccctagaaggaagttagggtgggtggagcaagccccacctgcgtttttctgccacagcatccaatcgtgaagaactcgggagagggtggagtccacatctagggttgtcctgccccttggctctatccctgcccagaggtgggaactggaggagtgggctgcaagactgagcctaaatgtctccccggccttgacttttctttctagtcctggggcctagattctgcacttggggtctctgacacaacacaccatcccaaagtagccggaagagctaaacacagggggttcttaaaatggctgcccccgccacccgggcctcccttgggcaaaaggaattgtcagccctaccccaacccttcaactaccagaatctgggccaccccagcagtatttttatttaaaatgttgcccattttatgagttatgatcaatttgtattaaattaaagttacagatgtca

SEQ ID NO: 195132 - DNA, 1638 bp, Homo sapiens
  Payload ID: 18526
  Gene Name: tripartite motif containing 62
  Uniprot ID: Q9BVG3
  ENST ID: ENST00000543586
  CDS Start-End: 99-1163
tctcaggttcctaacccccagagaggggatccgattcagtctcagccgccccctccaggcctcatgtgaccattggagcccttcccaaggcttccttcatgccagagaagacagcagtggatcagccttggacgcaagccctgagggagctgaaggaccaacttcaggcccttcaagacagcgagcgggaacacaccgaagcgctgcagctgctcaagcgacaactggcggagaccaagtcttccaccaagagcctgcggaccactatcggcgaggccttcgagcggctgcaccggctgctgcgtgaacgccagaaggccatgctagaggagctggaggcggacacggcccgcacgctgaccgacatcgagcagaaagtccagcgctacagccagcagctgcgcaaggtccaggagggagcccagatcctgcaggagcggctggctgaaaccgaccggcacaccttcctggctggggtggcctcactgtccgagcggctcaagggaaaaatccatgagaccaacctcacatatgaagacttcccgacctccaagtacacaggccccctgcagtacaccatctggaagtccctgttccaggacatccacccagtgccagccgccctaaccctggacccgggcacagcccaccagcgcctgatcctgtcggacgactgcaccattgtggcttacggcaacttgcacccacagccactgcaggactcgccaaagcgcttcgatgtggaggtgtcggtgctgggttctgaagccttcagtagtggcgtccactactgggaggtggtggtggcggagaagacccagtgggtgatcgggctggcacacgaagccgcaagccgcaagggcagcatccagatccagcccagccgcggcttctactgcatcgtgatgcacgatggcaaccagtacagcgcctgcacggagccctggacgcggcttaacgtccgggacaagcttgacaaggtgggtgtcttcctggactatgaccaaggcttgctcatcttctacaatgctgatgacatgtcctggctctacaccttccgcgagaagttccctggcaagctctgctcttacttcagccctggccagagccacgccaatggcaagaacgttcagccgctgcggatcaacaccgtccgcatctagtccaggcagaaggagaccacaacctcctgggaccactgccacctgcaagagccctgcccaggagatagaagacctggactccagcccaccgtggccactggagacctcaggccagttgtttaccctccagcctccagtctgtaaaatggaggttgcattccctacttcctaaactctcttccagcatcgatgttctgtagctctgaccttgatagggatacagctttgatccaaggatgtgacatggcttctcctcagggcaacccctgcccaaccctcatccccatcttctcaggggcaggggactaccttccagtgtctccctccagcccagccctgacctcaggaagtgtcagagcatggccagtagttggcagcccgaaagacacacagcaccctcttatgtcccatggcctaagacttacccctgaccaagctagtgatgggccatttacccttgaccccagtccacagt

SEQ ID NO: 195133 - DNA, 1770 bp, Homo sapiens
  Payload ID: 18527
  Gene Name: tripartite motif containing 63, E3 ubiquitin protein ligase
  Uniprot ID: Q969Q1
  ENST ID: ENST00000374272
  CDS Start-End: 140-1201
gacagaattcgggcaccaggagaaggaagccaacaggatccgacccggtgttttgtgacaaaggcaagacccccaggtctacttagagcaaagttagtagaggaggcagctaggcgtggctctcattccttcccacagaatggattataagtcgagcctgatccaggatgggaatcccatggagaacttggagaagcagctgatctgccctatctgcctggagatgtttaccaagccagtggtcatcttgccgtgccagcacaacctgtgccggaagtgtgccaatgacatcttccaggctgcaaatccctactggaccagccggggcagctcagtgtccatgtctggaggccgtttccgctgccccacctgccgccacgaggtgatcatggatcgtcacggagtgtacggcctgcagaggaacctgctggtggagaacatcatcgacatctacaaacaggagtgctccagtcggccgctgcagaagggcagtcaccccatgtgcaaggagcacgaagatgagaaaatcaacatctactgtctcacgtgtgaggtgcccacctgctccatgtgcaaggtgtttgggatccacaaggcctgcgaggtggccccattgcagagtgtcttccagggacaaaagactgaactgaataactgtatctccatgctggtggcggggaatgaccgtgtgcagaccatcatcactcagctggaggattcccgtcgagtgaccaaggagaacagtcaccaggtaaaggaagagctgagccagaagtttgacacgttgtatgccatcctggatgagaagaaaagtgagttgctgcagcggatcacgcaggagcaggagaaaaagcttagcttcatcgaggccctcatccagcagtaccaggagcagctggacaagtccacaaagctggtggaaactgccatccagtccctggacgagcctgggggagccaccttcctcttgactgccaagcaactcatcaaaagcattgtggaagcttccaagggctgccagctggggaagacagagcagggctttgagaacatggacttctttactttggatttagagcacatagcagacgccctgagagccattgactttgggacagatgaggaagaggaagaattcattgaagaagaagatcaggaagaggaagagtccacagaagggaaggaagaaggacaccagtaaggagctggatgaatgagaggcccccagatgcagagagactggagagggtggggaggggcccagcggccttggtgacaggcccagggtgggaggggtcggggcccctggaggggcaatggggaggtgatgtcttctctctgctcagagagcagggactagggtaggaccctcaccgctgcgtccagcagacactgaaccagaattggaaacgtgcttgaaacaatcacacaggacacttttctacattggtgcaaaatggaatattttgtacatttttaaaatgtgatttttgtatatacttgtatatgtatgccaatttggtgctttttgtaaaggaacttttgtataataatgcctggtcgttgggtgacctgcgattgtcagaaagaggggaaggaagccaggttgatacagctgcccacttcctttcctgagcaggaggatggggtagcactcacagggacgatgtgctgtatttcagtgcctatcccagacatacggggtggtaactgagtttgtgttatatgttgttttaataaatgcacaatgctctcttcctgttcttcaaa

SEQ ID NO: 195134 - DNA, 2691 bp, Homo sapiens
  Payload ID: 18528
  Gene Name: tripartite motif containing 64
  Uniprot ID: A6NGJ6
  ENST ID: ENST00000533122
  CDS Start-End: 3-1352
acatggattcagacgacctgcaagtcttccagaatgagctcatttgctgcatttgcgtgaactacttcatagatccggtcaccattgactgtgggcacagcttttgcaggccctgcctctgcctctgctcagaagaaggcagagcaccaatgcgctgcccttcgtgcagaaaaatctcagagaagcccaacttcaacaccaatgtggtactcaaaaagctgtcttccctagccagacagaccagacctcagaacatcaacagctcagacaatatctgtgtgctccatgaggagactaaggagctcttctgtgaggctgacaagagattgctctgtgggccctgctctgagtcaccagagcacatggctcacagccacagcccaataggatgggctgctgaggaatgcagggagaaacttataaaggaaatggactatttatgggaaatcaatcaagagacaagaaacaatctaaatcaggaaactagaacatttcattcgttaaaggactatgtgtcagtaaggaagaggataatcactattcaatatcaaaagatgcctatatttctcgatgaggaggagcaacggcatctgcaggcactggaaagagaagcagaagagcttttccaacaactacaagacagtcaagtgagaatgacccaacatttagaaaggatgaaagacatgtacagagagctgtgggagacatgccacgtgcctgacgtggagctgctccaggatgtgagaaatgtatcagcaaggactgatttggcacagatgcaaaagccccagccagtgaacccagagctcacttcatggtgcataactggagtcctagacatgctcaacaacttcagagtggatagtgctctgagcacggaaatgattccttgctatataagcctttctgaggatgtgagatatgtgatatttggagatgaccatctcagtgctcccacggatccccagggagtggacagctttgctgtgtggggagcgcaagcattcacctccggcaagcattactgggaggtggatgtgaccctctcctccaactggattctgggagtctgtcaagattccaggactgcagatgccaatttcgttattgattctgatgaaagattttttttaatttcctcaaagaggagcaatcactatagtctctccaccaactctccacctttaattcagtatgtgcaaaggcctctgggtcaagttggggtgtttctggattatgataatggatctgtgagtttttttgatgtttctaaaggttctcttatctatggttttcctccttcctccttctcttcccctctgaggcctttcttttgctttggttgtacatgaaaagttggtttcacgatgatttattgtgacctcccacatatgaggcaaatactgtcctaagacactatgtgcgagagcctgtgagctcattgtaacttcatggaatgtaattactatgtggttatgaatgggataaccaccttgaatgtgtacttttgttaattaaattattttaattaataagttattgtggaatctttactagaacatcaataatggttttttcgtactagttttgttgagattcattcatttactgtaaaagtcatgttctaatgtatttaattcagatattgttagtatatcacacttgagcagccatcagagctctctactacctgtgaacttttatcacttccagaagaatcccaatacacattaacattaattctccttttaccctcccccattccttgacagcacttaatctactttttatgtttttgcattcaggtaaataaaatcatacaatgtaagttctttttttaatctgatttctttttcagagagtatgttttcagtttgtacacactgtaaaccatttgtcttagtcgtatatttcaaccaggctggggtagaataatgaagtggtggatatctcatcttacaaagaataaaaggagtgctttttttctttttaagtctgagcaagttaggttgacctcacagactttattatgtctcaacaacctagttattaatcacatttcagctcatacaacagtttttcagtgctgggttgctctgctgttacatcttctctgaatatattatatcaggttataatattaagaaaactcttatacttattactaccagattgaaaagtccaagggggcaatggcagtatttgtcttctttgctaatatattacaattattcaatgcaatttttagaatagattacacagtaaataagatgagtaaatggataagtagaggagttaacatgtataaatactattctaacattaagaaacttttccaaaatataagtaacaaaataggacagaacatactaatgaatatctatcaaaagataagaaataaattgattttcagattcatatcaaagataacactattatgttggggtttaaaataattgtagcataatttttacagggttgatttcaattgtcttaggttttttcatataaactatggaaagaggaaggttcctatataagatgatggggaacaggaacaggacttagaataatggaggctgtccttatttaaactgacatataattacttgctaagcataaagtggtataaaccttcttatgcagtagaaagaacaaactttggttacatttcaaataagaatccagatg

SEQ ID NO: 195135 - DNA, 2689 bp, Homo sapiens
  Payload ID: 18529
  Gene Name: tripartite motif containing 64B
  Uniprot ID: A6NI03
  ENST ID: ENST00000329862
  CDS Start-End: 1-1350
atggattcagacgacctgcaagtcttccagaatgagctcatttgctgcatttgcgtgaactacttcatagatccggtcaccattgactgtgggcacagcttttgcaggccctgcctctgcctctgctcagaagaaggcagagcaccaatgcgctgcccttcgtgcagaaaaacctcagagaagcccaacttcaacaccaatctggtactcaaaaagctgtcttccctagccagacagaccagacctcagaacatcaacagctcagacaatatctgtgtgctccatgaggagactaaggagctcttctgtgaggctgacaagagattgctctgtgggccctgctctgagtcaccagagcacatggctcacagccacagcccaataggatgggctgctgaggaatgcagggagaaacttataaaggaaatggactatttatgggaaatcaatcaagagacaagaaacaatctaaatcaggaaactagcacatttcattcgttaaaggactatgtgtcagtaaggaagaggataatcactattcaatatcaaaagatgcctatatttctcgatgaggaggagcaacggcatctgcaggcactggaaagagaagcagaagagcttttccaacaactacaagacagtcaagtgagaatgacccaacatttagaaaggatgaaagacatgtacagagagctgtgggagacatgccacatgcctgacgtggtgctgctccaggatgtgagaaatgtatcagcaaggactgatttggcacagatgcaaaagccccagccagtgaacccagagctcacttcatggtgcataactggagtcctagacatgctcaacaacttcagagtggatagtgctctgagcacggaaatgattccttgctatataagcctttctgaggatgtgagatatgtgatatttggagatgaccatctcagtgctcccacggatccccagggagtggacagctttgctgtgtggggagcgcaagcattcacctccggcaagcattactgggaggtggatgtgaccctctcctccaactggattctgggagtctgtcgagattccaggactgcagatgccaatttcgttattgattctgatgaaagattttttttaatttcctcaaagaggagcaatcactatagtctctccaccaactctccacctttaattcagtatgtgcaaaggcctctgggtcgagttggggtgtttctggattatgataatggatctgtgagtttttttgatgtttctaaaggttctcttatctatggttttcctccttcctccttctcttcccctctgaggcctttcttttgctttggttgtacatgaaaagttggtttcacgatgatttattgtgacctcccacatatgaggcaaatactgtcctaagacactatgtgcgagagcctgtgagctcattgtaacttcatggaatgtaattactatgtggttatgaatgggataaccaccttgaatgtgtacttttgttaattaaattattttaattaataagttattgtggaatctttactagaacatcaataatggtttttttgtactagttttgttgagattcattcatttactgtaaaagtcatgttctaatgtatttaattcagatattgttagtatatcacacttgagcagccatcagagctctctactacctgtgaacttttatcacttccagaagaatcccaatacacattaacattaattctccttttaccctcccccattccttgacagcacttaatctactttttatgtttttgcattcaggtaaataaaatcatacaatgtaagttctttttttaatctgatttctttttcagagagtatgttttcagtttgtacacactgtaaaccatttgtcttagtcgtatatttcaaccaggctggggtagaataatgaagtggtggatatctcatcttacaaagaataaaaagagtgctttttttctttttaagtctgagcaagttaggttgacctcacagactttattatgtctcaacaacctagttattaatcacatttcagctcatacaacagtttttcagtgctgggttgctctgctattacatcttctctgaatatattatatcaggttataatattaagaaaactcttatacttattactaccagattgaaaagtccaagggggcaatggcagtatttgtcttctttgctaatatattacaattattcaatgcaatttttagaatagattacacagtaaataagatgagtaaatggataagtagaggagttaacatgtataaatactattctaacattaagaaacttttccaaaatataagtaacaaaataggacagaacatactaatgaatatctatcaaaagataagaaataaattgattttcagattcatatcaaagataacactattatgttggggtttaaaataattgtagcataatttttacagggttgatttcaattgtcttaggttttttcatataaactatggaaagaggaaggttcctatataagatgatggggaacaggaacaggacttagaataatggaggctgtccttatttaaactgacatataattacttgctaagcataaagtggtataaaccttcttatgcagtagaaagaacaaactttggttacatttcaaataagaatccagatg

SEQ ID NO: 195136 - DNA, 1344 bp, Homo sapiens
  Payload ID: 18530
  Gene Name: tripartite motif containing 64C
  ENST ID: ENST00000530230
  CDS Start-End: 1-1344
atggattcagacaccctgcgagtcttccagaatgagctcatttgctgcatttgcgtgaactacttcatagacccggtcaccactgactgtgtgcacagcttttgcaggccctgcctctgcctctgctcagaagaaggcagagcaccaatgcgctgccctttgtgcagaaaaatctcagagaagcccaacttcaacaccaatgtggcactcaaaaagctggcttccctagccagacagaccagacctcagaacatcaacagctcagacaatatctgtgtgctccatgaggagactaaggagctcttctgtgaggctgacaagagattgctctgtgggccctgctctgagtcaccagagcacatggctcacagccacagcccaataggatgggctgctgaggaatgcagggtacagaaacttataaaggaaatggactatttatggaaaatcaatcaagagacacaaaacaatctaaatcaggaaactagcaaattttgttcattagtggaagacaaaagaaatagaatagtatatagatatcaaaagatgcatatatttctcgatgaggaggagcaacggcatctgcaggcactggaaagagaagcaaaagagcttttccaacaactacaagacagtcaagtgagaatgacccaacatttagaagggatgaaagacatgtacagagagctgtgggagacataccacatgcctgacgtggagctgctccaggatgtgggaaatatatcggcaagaactgatttggcacagatgccaaagccccagccagtgaacccagagctcacttcatggtgcataactggagtcctagacatgctcaacaacttcagagtggataatgctctgagtacagaaatgactccttgctatataagcctttctgaggatgtgagacgtgtgatatttggagatgaccatcgcagtgcacccatggatccccaaggagtggagagctttgctgtgtggtgtgcgcaagcattcacctccggcaagcattactgggaagtggatgtgacccactcctccaactggattctgggagtctgtcgagattctaggacagcagataccaatatagttattgattctgacaaaacatttttttcaatttcttcaaagacgagcaatcactatagtctctccaccaattctccacctttaatccagtatgtgcaaaggcctctgggttgggttggggtgtttctggattatgataatggatctgtgagtttttttgatgtttctaaaggttctcttatctatggttttcctccttcctccttctcttcccctctgaggcctttcttttgctttggttgtacatga

SEQ ID NO: 195137 - DNA, 1353 bp, Homo sapiens
  Payload ID: 18530
  Gene Name: tripartite motif containing 64C
  ENST ID: ENST00000617704
  CDS Start-End: 1-1353
atggattcagacaccctgcgagtcttccagaatgagctcatttgctgcatttgcgtgaactacttcatagacccggtcaccactgactgtgtgcacagcttttgcaggccctgcctctgcctctgctcagaagaaggcagagcaccaatgcgctgccctttgtgcagaaaaatctcagagaagcccaacttcaacaccaatgtggcactcaaaaagctggcttccctagccagacagaccagacctcagaacatcaacagctcagacaatatctgtgtgctccatgaggagactaaggagctcttctgtgaggctgacaagagattgctctgtgggccctgctctgagtcaccagagcacatggctcacagccacagcccaataggatgggctgctgaggaatgcagggtacagaaacttataaaggaaatggactatttatggaaaatcaatcaagagacacaaaacaatctaaatcaggaaactagcaaattttgttcattagtggactatgtgtcattaaggaaggtgataatcactattcagtatcaaaagatgcatatatttctcgatgaggaggagcaacggcatctgcaggcactggaaagagaagcaaaagagcttttccaacaactacaagacagtcaagtgagaatgacccaacatttagaagggatgaaagacatgtacagagagctgtgggagacataccacatgcctgacgtggagctgctccaggatgtgggaaatatatcggcaagaactgatttggcacagatgccaaagccccagccagtgaacccagagctcacttcatggtgcataactggagtcctagacatgctcaacaacttcagagtggataatgctctgagtacagaaatgactccttgctatataagcctttctgaggatgtgagacgtgtgatatttggagatgaccatcgcagtgcacccatggatccccaaggagtggagagctttgctgtgtggtgtgcgcaagcattcacctccggcaagcattactgggaagtggatgtgacccactcctccaactggattctgggagtctgtcgagattctaggacagcagataccaatatagttattgattctgacaaaacatttttttcaatttcttcaaagacgagcaatcactatagtctctccaccaattctccacctttaatccagtatgtgcaaaggcctctgggttgggttggggtgtttctggattatgataatggatctgtgagtttttttgatgtttctaaaggttctcttatctatggttttcctccttcctccttctcttcccctctgaggcctttcttttgctttggttgtacatga

SEQ ID NO: 195138 - DNA, 3439 bp, Homo sapiens
  Payload ID: 18531
  Gene Name: tripartite motif containing 65
  Uniprot ID: Q6PJ69
  ENST ID: ENST00000269383
  CDS Start-End: 67-1620
agcgcgcgaggcccgcggtccctttaagacgcccggggcccgcctggctctcgccgccgccgggccatggccgcgcagctgctggaggagaagctgacctgcgccatctgcctggggctctaccaggacccagtgacgctgccctgcggccacaacttctgcggggcctgcatccgggactggtgggaccgctgcggaaaggcgtgccccgagtgccgggagccctttcccgacggcgccgagctgcgccgcaacgtggccctcagcggcgtgctggaggtggtgcgcgccgggcccgcccgggatcccggccccgatcccggccccggccccgaccctgccgcgcgctgcccccgccacgggcggccgctggagctcttctgccggaccgagggccgctgtgtgtgcagcgtgtgcaccgtgcgcgagtgtcgcctccacgagcgggcgctgctggatgccgagcgcctcaagcgcgaggcccagctgagagccagcctggaggttacccagcagcaggccacccaggccgaaggccagctactagagctgcgcaagcaaagcagccagatccagaactcggcctgcatcttggcctcctgggtctccggcaagttcagcagcctgctacaggccctggaaatacagcacacgacagcactgaggagcatcgaggtggccaagacgcaggcgctggcacaggctcgagacgaggagcagcggctgcgggtccatttggaggctgtggctcgccatggctgcaggatccgggagctcctggagcaggtggatgagcagaccttcctgcaggaatcgcagctcctccagcccccagggcctcttgggccactgacccctctgcagtgggatgaagaccaacagctgggtgacctgaagcagttgctaagccggctgtgtggcctcctcttggaagaggggagccaccctggggcaccagccaagcctgtggacttagcccccgtggaggccccaggtcccctggcaccggtcccaagcacagtttgtccactgaggaggaaactctggcagaattatcgcaatctgacctttgatccagtcagcgccaaccgtcacttctatctgtcgcgccaggaccagcaggtgaagcactgtcgtcagtcccggggcccaggcgggcccggcagctttgagctctggcaggtgcaatgtgcccagagcttccaggccgggcaccactactgggaggtgcgcgcgtcagaccactcggtgacactgggcgtctcctacccgcaactgccacggtgcaggctggggccccacacagacaacattggccggggaccctgctcctgggggctctgcgtccaggaggacagcctccaggcctggcacaacggggaagcccagcgcctcccaggggtgtcagggcggctcctgggcatggatttggacctggcctcaggctgcctcaccttctacagcctggagccccagacccagcccctgtacaccttccatgccctcttcaaccagcccctcacccccgtcttctggctcctcgagggtaggaccctgaccctgtgccatcagccaggggctgtgttccctctggggccccaggaagaggtgctcagctgaagaaggcatgggatggagccctggcatagctgccaccatgcctatgtgcccaagagctgcccagcttcagcttggggactggaggaccagctgttggcctctctgttaactcagaaagagatgggaggttgggggaggtgagcataaacgcagagttcactgttgcagcctttttgaaggggacacagtctaggagggggataaatgggatgcccttgccccagagagaacccagttctaggtactgtctgggcctgggaggcgagagcagtgcccaggggacttctgggcttacaggacagcgtgtgtgacaaaattcagatctacctgaacttgcctctggagatgataagggccaaaggagcagtcagggaggggcggtgagccagagtagtcccagggggagacagattcctccctcctccccgcctgcagctctctttaattttttgtaacatttggagagacgtccgtcctgtcttgtagtctttttattttgtgcatccttataattgtattctacaaacaattttgttttctgcatttaaacatttttgtgtttttaggagatggtcttgctctgtcactcaggctggagtacagtggcacaatcatggctcactgcagcctcgagctcctgagctcaaaggatcctcccacctcagcctccagagtagctcagattacagtgttttctgaagtttcctgacttaacataagcatttttcacatgattgaaaattttcactgattgctgtagtcattctaatgactatcaagtttatttatccattattggacatttaaatttctttctttttagctatacaaacattgatgtgttttttttgagacaggatctccatctgtcacccaggctggtgtgcaggggtgcggtcatgggctcatgggattctcctacctcagcctcctgagtagctgggattacaggtgtatgccaccacgcctggcttatgatgaatatttctgagtgggatgtttggccacatttatggtcatgtatgtaggctgttacctcaagtgagtcactcagggaacaatgagcacttgaagatttttttatacaaaaggccacagtgaggccaccttgagtcaagccgactaaggcccctcaaccctgtcactaagcagcacgtgacactggcaggaccttcatctccagcatcccacccctgggtgtgggactttggggcagccgtgtgtgcaggtgtcggcacaggctagctcctcctggtttggtgtggtgtttgccattgcagagcaagctgccacgaagacccctgggcatgattttgcttgtatttccggaagtggggttgctgggtcatagggcaggtgtaattttttttacttgaaatgttccacttcttgttctgggaggtggttccaagggtgtctgcttttggccaggcgcagtggctcacgcttgtaatcccagcactttgggaggccgaggcaggcggatcacaaggtcaggagttcgagaccagcctggccaacaaggcaaaaccccgtctctactaaaaatacaaaaattagccgggcatggtggtgtgcgcctgtaatcccagctactggggaggctgaggcagaagaatcgcttgaacccaggaggtgaggttgcagtgagctgagattgcaccactggactacagcctgggtgacagagcgagactctgtctcaaaaaaaaaaaaaaaaagggagggctgtctgctttttgtaacttgaaaaactggacatctatgttatatgtactcatggataaatatttcacaataaaactttttaaaaggataa

SEQ ID NO: 195139 - DNA, 865 bp, Homo sapiens
  Payload ID: 18531
  Gene Name: tripartite motif containing 65
  ENST ID: ENST00000543309
  CDS Start-End: 1-865
gggcgctgctggatgccgagcgcctcaagcgcgaggcccagctgagagccagcctggaggttacccagcagcaggccacccaggccgaaggccagctactagagctgcgcaagcaaagcagccagatccagaactcggcctgcatcttggcctcctgggtctccggcaagttcagcagcctgctacaggccctggaaatacagcacacgacagcactgaggagcatcgaggtggccaagacgcaggcgctggcacaggctcgagacgaggagcagcggctgcgggtccatttggaggctgtggctcgccatggctgcaggatccgggagctcctggagcaggtggatgagcagaccttcctgcaggaatcgcagctcctccagcccccagggcctcttgggccactgacccctctgcagtgggatgaagaccaacagctgggtgacctgaagcagttgctaagccggctgtgtggcctcctcttggaagaggggagccaccctggggcaccagccaagcctgtggacttagcccccgtggattatcgcaatctgacctttgatccagtcagcgccaaccgtcacttctatctgtcgcgccaggaccagcaggtgaagcactgtcgtcagtcccggggcccaggcgggcccggcagctttgagctctggcaggtgcaatgtgcccagagcttccaggccgggcaccactactgggaggtgcgcgcgtcagaccactcggtgacactgggcgtctcctacccgcaactgccacggtgcaggctggggccccacacagacaacattggccggggaccctgctcctgggggctctgcgtccaggaggacagcctccaggcctggcacaa

SEQ ID NO: 195140 - DNA, 886 bp, Homo sapiens
  Payload ID: 18531
  Gene Name: tripartite motif containing 65
  ENST ID: ENST00000540128
  CDS Start-End: 1-733
gctgacctgcgccatctgcctggggctctaccaggacccagtgacgctgccctgcggccacaacttctgcggggcctgcatccgggactggtgggaccgctgcggaaaggcgtgccccgagtgccgggagccctttcccgacggcgccgagctgcgccgcaacgtggccctcagcggcgtgctggaggtggtgcgcgccgggcccgcccgggatcccggccccgatcccggccccggccccgaccctgccgcgcgctgcccccgccacgggcggccgctggagctcttctgccggaccgagggccgctgtgtgtgcagcgtgtgcaccgtgcgcgagtgtcgcctccacgagcgggcgctgctggatgccgagcgcctcaagcgcgaggcccagctgagagccagcctggaggttacccagcagcaggccacccaggccgaaggccagctactagagctgcgcaagcaaagcagccagatccagaactcggcctgcatcttggcctcctgggtctccggcaagttcagcagcctgctacaggccctggaaatacagcacacgacagcactgaggagcatcgaggtggccaagacgcaggcgctggcacaggctcgagacgaggagcagcggctgcgggtccatttggaggctgtggctcgccatggctgcaggatccgggagctcctggagcaggtggatgagcagaccttcctgcagattatcgcaatctgacctttgatccagtcagcgccaaccgtcacttctatctgtcgcgccaggaccagcaggtgaagcactgtcgtcagtcccggggcccaggcgggcccggcagctttgagctctggcaggtgcaatgtgcccagagcttccaggccgggcaccact

SEQ ID NO: 195141 - DNA, 644 bp, Homo sapiens
  Payload ID: 18531
  Gene Name: tripartite motif containing 65
  ENST ID: ENST00000591668
  CDS Start-End: 1-412
gctcctggagcaggtggatgagcagaccttcctgcaggaatcgcagctcctccagcccccagggcctcttgggccactgacccctctgcagtgggatgaagaccaacagctgggtgacctgaagcagttgctaagccggctgtgtggcctcctcttggaagaggggagccaccctggggcaccagccaagcctgtggacttagcccccgtggaggccccaggtcccctggcaccggtcccaagcacagtttgtccactgaggaggaaactctggcagaattatcgcaatctgacctttgatccagtcagcgccaaccgtcacttctatctgtcgcgccaggaccagcaggttgaatcctgttccctgaaaaagacgtattcggatcctaacccccaggacctgtggctgtgaccttatttggaaatagagtattttcagatgtgactgagttaagatgagggcatactggagtagagcgtgccctaatccaacaactggtgtcctgataagaggaaatgggcaccgggcacagtggctcacgcctgtaatcctagcactttgggaggctgaggcaggcagattactcgagcccagcagtttgagtgggcaacagagcaagactccctaaaaaaaaaaaaaaaaa

SEQ ID NO: 195142 - DNA, 396 bp, Homo sapiens
  Payload ID: 18531
  Gene Name: tripartite motif containing 65
  ENST ID: ENST00000592642
  CDS Start-End: 1-273
ccactgacccctctgcagtgggatgaagaccaacagctgggtgacctgaagcagttgctaagccggctgtgtggcctcctcttggaagaggggagccaccctggggcaccagccaagcctgtggacttagcccccgtggattatcgcaatctgacctttgatccagtcagcgccaaccgtcacttctatctgtcgcgccaggaccagcaggttgaatcctgttccctgaaaaagacgtattcggatcctaacccccaggacctgtggctgtgaccttatttggaaatagagtattttcagatgtgactgagttaagatgagggcatactggagtagagcgtgccctaatccaacaactggtgtcctgataagaggaaatgggcaccgggcacagtg

SEQ ID NO: 195143 - DNA, 9753 bp, Homo sapiens
  Payload ID: 18532
  Gene Name: tripartite motif containing 66
  Uniprot ID: O15016
  ENST ID: ENST00000299550
  CDS Start-End: 196-3846
gacagatttcaatgtctgttgaaggcccccccacaccctccttcagtgccgggggcatggagggatatcttgggctcctgctgttttttaaaatgatgcgagctcatctcctgtcctgggtgtgaacgagtatatcttaccagggatgtaactgaacatttttttctgcattgtgttcctactgagcaacccaagatggccaggaactgctctgagtgcaaggagaagagggcagcacatatcctctgcacctactgcaatcgctggctgtgcagctcttgcacagaggaacaccgacacagccctgtccccgggggcccattctttcctcgggcccagaagggatctccaggagtgaatggtggtcccggagacttcaccttgtattgtcctctacacacacaggaagtactcaagctattctgtgagacatgtgatatgctcacttgccatagctgcctagtggtggaacacaaagaacacaggtgcagacatgttgaagaagttttgcaaaaccagaggatgcttctggaaggtgtgactacacaggtggcacataagaaatccagtctacagacatctgcaaagcaaattgaggacaggatttttgaagtgaagcatcagcataggaaggtggaaaaccagatcaaaatggccaagatggttctgatgaatgagctgaacaaacaggccaatgggctaatagaggaattagaggggattactaatgagagaaagcggaagctggaacagcagttacagagcatcatggttctcaaccgtcagtttgagcatgtgcagaatttcatcaactgggctgtctgcagcaaaaccagtgtcccttttcttttcagcaaagagctgattgtgtttcagatgcagcgattgctggagacaagttgtaacacagatcctggctccccttggagtatcagattcacctgggagcctaacttctggaccaagcagctagcttctcttggctgcataactactgaaggtggacaaatgtccagggcagatgctcctgcttatggaggcttacaggggtcatcacccttttatcaaagccaccagtctccagtggctcagcaagaggctcttagccacccctcacacaagttccagtctccagcagtgtgctcctcatctgtgtgctgctcccactgctccccagtctcgccttccctcaaaggccaggtccccccacccagcatacacccagcccacagcttcaggcagccccctgagatggtgccccagcagctggggtctctgcagtgctctgccctgctgcccagggagaaagagctggcctgcagccctcatccaccaaagctgctgcagccctggctggaaacccagccccccgtggagcaggagagcacatcccagcggctggggcagcagctgacttcccagcccgtgtgcattgtccccccacaggatgttcagcaaggagcccatgcccagcccaccttacagacaccctctatccaagtccagtttggccaccaccagaagctgaagctcagtcactttcagcagcagccacagcagcagctaccacctccaccaccacccctcccccatcccccacctccccttccccctcccccacagcagccacacccacctcttcctccatcccagcatctggcttctagtcagcacgagagccctcctggccctgcctgttctcagaacatggacataatgcatcacaagtttgagctggaggaaatgcagaaggacttggagcttcttctccaggctcaacagcccagcctgcaactgagtcagaccaaatctcctcagcatcttcagcaaaccattgtggggcagatcaactacatcgtgaggcagccagcacctgtccagtcccagagccaggaggagaccctgcaggctacagatgagcccccagcatctcagggctcaaagccggctctccctcttgacaagaatactgctgctgccttgccccaggcgtctggggaagaaacccctctcagtgtccccccagtggacagcaccatccagcactcctctccaaatgtggtgagaaagcactccacctcgctgagcatcatgggcttttccaacactctggagatggagttgtcatctaccaggttggagaggcccctagagccacagatccagagtgtgagcaacctgacagctggtgccccccaggcagtaccaagcctgctgagtgctccccccaaaatggtgtccagcctgacaagtgttcaaaaccaggccatgcccagcctgacaaccagtcacctacagactgtgcccagccttgtgcatagcacattccagtccatgcccaacctgataagtgactcccctcaggctatggcaagcctggcaagtgatcaccctcaggctgggcccagcctaatgtctggtcacacccaggctgtgccgagtctggcaacttgtcctctgcagagcatccctccagtttctgacatgcagccagaaactgggtccagctccagttctggccgaacttcagggagcctgtgtcccagagatggggctgatccctccctggagaatgctctgtgtaaggtaaaactggaggagccaattaacctctctgtgaagaaacctccactggcgccagtggtcagcacgtctacagctctgcagcagtaccagaacccaaaagagtgtgagaattttgaacaaggagccctagagctggatgcaaaagagaaccagagcatcagagccttcaatagtgagcataagattccctatgtgcgactggagcgactcaagatctgtgctgcctcctcaggagagatgcctgtgttcaaactgaagccacagaagaatgatcaggatgggagcttcctgctgatcatcgagtgtggcactgagtcctccagcatgtccattaaggtcagccaggacagactgtctgaggccacccaggccccaggtctggagggaagaaaggtcactgtcacttctttggctgggcagcggccaccagaagtggagggcacatctcctgaagaacacagactcattcctcgaaccccaggagccaagaagggccccccagccccaatagagaatgaggacttctgtgctgtttgcctcaatggcggagagttactgtgctgtgaccgctgccccaaagtgttccacctctcctgccatgtgccagccttgctcagcttcccagggggagagtgggtgtgtaccttgtgccgcagcctgacccagcccgagatggagtacgactgtgagaatgcctgctataaccagcctggaatgcgggcatctcctggcctaagcatgtatgaccagaagaagtgtgagaagctggtattgtccttgtgctgcaataacctcagcctgcccttccatgaacctgtcagccccctggcccggcattattaccagattatcaagaggcccatggacctgtcaatcatccggaggaagctgcaaaagaaggacccagctcactataccaccccagaggaggtggtatcagatgtgcgcctcatgttctggaactgtgctaagttcaattatcctgactccgaggttgcagaggctggccgctgcctggaagtgttctttgagggctggttgaaggagatctacccggagaaacggtttgcccagccaaggcaggaggactcagactccgaggaggtgtctagtgagagtggatgttccactccccagggcttcccgtggcctccctacatgcaggagggcatccaacccaagaggcggcgacgacatatggagaatgaaagagcaaaaagaatgtcatttcgcctggccaacagcatctctcaggtgtgagagccaaaaggagactgggcactctggcagctgttgtcccatactgtcgaccattcctccccatcttgcagcttatcctcttcagagtgtggatggtagatgagtcttgttgaactgtgtagtgctcttctttgccatttgcatctacagcatttatttgggagccgtagtacatccactacagagaagatttcagtaataaacaggaaagaggaaggtatttattattaccagagtaatcagatgtataggctccacttgacaagaccacacctggttaggctcgggaaaacctactttccttggtgaatttttttctgcctgggaaagcagacccgtctaaccttttagtgtccagggctcaggagccatgtatacatctgaactcctcctgggctcagaagtgggtaaaagaagggagagaggtttagacatatggcaggactgtgatccctggcccagcacagccaaagactgtcactgtttgcctttgcttgtcctgtctggatagaggcacctgccatgtgcagactagtggaggcttctagaggccataggtctcaatttgtgcctatttgggttctaacggttttcagggtatttgttttgcatagtcactttcctgatgttgacataggtggctgctgtgaaaatgctgtggatggtgtgacattcttgactgagctgggtggctgtggagagaccacttaaatcttctggttcagatttcacttacagacttagtaagatgtccacttcagagcccgccctctgtgctacttactctgggctaatcacacttctttagggtgagaacctgccttcctagaagtgactgttggtgcttgtcagtggccatacccttcatcatcctcattcagaggtatggatcgtgagttctgcttgtgaatactgtgagacagctgctgtctgcttcaggtccagagttccatgggtggagagagtaacccacaaccagctcactcctctgggcctctcctcctgcttaaagattctagttctcaacctctccaagttcatgagccaaagatcagaagtgagtcttctgaccagcccgcctccaggctgtctacagccccaaaaaagccaacacttttctggcagccctttttgttggaggttagagaaggcctcagggaccaacaggggccagatctagacattcctgggggaagtttgtctaaggtggacagggggaaaaatcaagaggcaaaaagccagtgtcctttggtgaccatgaagcaacctcagagccttagttctcctagaatgcagagagaagcattctggaagccatgggaacaggagctcgaggctgcatcctgaatgcatctgcatggccctcgcagggtgtttgtgaggatactggaggtcaggctacctcccaagcaagggcttggttgagaaggaacccattgctcatattgttgggggagctatgaacctgacatgtcagtggccaggactgagacagctctccctggtcctgtcattgcatggctaatttcaggggagtctgaggtcatggctttatttttgctaacagatgaagttcaaggatgttcttgtttgtagggcctttgctaatgagcagttttttaattagaaaacatttcttctctctttgtgagttgatggtattgctcatttccttctctacccaacctgagagatcatcttcactttaaagcaaaccatgccccttggcttgccattctttcagcagcacatgccacgttctaagcagatgggcttccgtgatcccgttttctagtttggggtaactgagtcttgaatgctttactagtccggcaatctttggacttaggcttctgccctttgagactcacatgactttctggtttggggtctggtcatttccctttcaatttttgaatctccttctctgttcagttggcttggcaaagtaccctctgttctcatgtcactaattcctgctctaggtcatctttcctttgtgcagcccacattcccaccatcctgtgaactttgttgtacttggtgttgggcaactggtgagtgttgtgacaggctcagacctgatccttcctcaggagcaattggagaccacaaatttaaagcagaaatacctgttaaaagcttggctttccttatatgagtgaggctcccagcttgggtgtggcctcctgggctcacggatcagcttgctgggccagagggggtcttagtaatgtgctagagagacacatgctcccttctcatcgtagagagcctgcatgctgagaggctccctttacacacctgcctctcgctggcttttcctttagacctagccaccagtgttttgaatcatggttttgttttgtttttgcatgcaaaaaccagaacatgacttagaaattaaaaaaaaaaaaatcctactagccaagtgactgcctgcagaggctcttcattaacatttgggctgatcctgcttttgacttattcccataatggcccagttttgaagtcagccaagtccttttgtccttgacaacatcatgcagtggaaatacggtgagttctagattcttatgggacagcatgcagccctagaggaaaaattgacttcttgggtatgctgagaaataagacagtaaaatggcttcagttgatgcaaggggattttagttaaaaattggttcaggatttttaaattttattttattttttggctgggcgcggtggctcacgcctgtaatcccagcactttgggaggctgaggtgggtggatcacctaaggacagcagttcgagaccagcctggccaacatagtgaaaccctgtctctactaaaaatacaaatatcagccaggtgtgatggcacatgcctgtaatcccagctacttgggaggctgaggcaggagaattgcttgaatccgggaggtggaggttgcagtgagctgagatcatgccattgcattccagcctgggcaacagaacgagactccgtctcaaaaaaaaaaaaattggttcaggatgaacttgcagagcactcttccacagaacatggttaggttagccctgcctgacttctagcaattgctaactatacaccttgcctgcctctaggacccctacctgagtggcaaccataccttccatatgctctgttccatggcagtccctgccatcccccaccagcggactctggctccctccctgtacccatttctagcaacagctccttgcctggctgctaagacggaggcgcctccttgtttgttcctgggctctgttctgctccctctctcactccatggagtcacttatagtcttcctttctgaacgccagaattgagcctttgctccttctggatcaccccttcctgggcttcttctccatccctcagtactgctaaaattgccctgctcctttagtccatttccatgacctcagccctctctctcctctccttgtcttttaactttctcctggacttcttcctctccccagcatgaacccagagcctatcacacactgatgtttttgtcagcatcctgaactttctcatgcccttcaactttatttatttatttatttatttattttttattttttgagagagagagtctcactctgtcatgcaggctggagtgcagtggtatgatgtcggctcattgcaacctctgccttctgggctcaggtgatcctcccatctcagcctcctgagtagctgggactacaggtgcatgccaccatgcctggctaatttttctactttaggtagagatggagtttcgccatgttgctcaagctggtatcaacactcctgggctcaagcagtctgcttcccttggcctcccaaagtgctgggattacaggcgtgagccactgcgccaggcgtatccccttcaattttgctgaaactatcagccattctccattttcggcatcatcatatttgctgcttccacctcctgggctgctatgcatgacagattcacagttggcagcctcagttgagctctcagtgttgactggaaattctttaacttgttgtgatccctttttttttccccacccatgcctccatctttgtcctccacaaatgactgagctcactgtctacttcacagaagacagcccctaaagcaagagcttccttgcctgctgttcctctctcccctctcattcatctgtgtctgtaactctccccaacccctccattcttgctcctatttaattctctatatcttgaatcctgttgtatgtcctccaagactgctccctcgcttactccactgctcccactccctggagtctccagcctctgtctccactggttacctccacacagcctgcaaacaagttctccacaagattaaaacagcatttctcagagtctgttaccccttacacattttccttgttaaccaagttacttttaaaaagatcctttttaaactgattcttcctcagctgttcttcagccctctatactttttcataaaagtcaccagtgactgcccagttgccaaatagaatgaatacctttcagtgctcagctgtcttgacctctccgcagcatttcacaccacccaccaaccctcagtgaaacaacctcctcccttagcttttatgacaccacaagtctctggattctcagagaatccagaaaaacaagtctctggattctctcctcttacctctcagcccacacaggctgagctgtccttgaaacctagatgggggaaatgtctgtggctgtctgtggtctcttcttttcaggagttgggtagggaggaagaatcacagctgctcctgcttcctctgtctgtctctctatttcctgagtcccttccttttcctgaactcagttctcctcatgccaaccatgtttatgagctcctgctgggaggacagcatctgtgagtccttccctctgtctctcccagacaacacagaggttttagcctgtttgctaagagaccccatctaagtcagcccaagggtgtggattaggttttacagcatccaggccgcagtctggctaaactggattaccaggctggtgggcagctcctcaccatgatcctgcaccagttagagcctgctgtagttgggaaggagcctgggattgtggtaagatgtgtttccgtgcatgtcagtgctgctaaccaggaggagaacctggcagggtgggtgcctgctgctgataacattcggatggagggagactagggagcgcggtggctgctcccttgctggggctcagctggagtcagcatgactccttatatcagggcctttcccacctgtgctgatcaccaccacctgcttgctccagttgtttctggagttggaggcagctattggttgctttcttggaggtaaggaggtatatactagaaagatatctgatttgagagtctgaacaccaaaatttttggctctttccattatgagctgtgtaaccttggatacagtttcctcatctataaagttgtggtgggagaatggctgagaacagtgatctctcagctctccagctgtaaagatgttaattatgattttaactctcaagatcaggccacataaggaacaggggaattccaggggtgggacacagctgggggagtccagaccagggcagggaaaggagactcacaagccaaacagagctgctttggggaaagttcttatcagctggtgctgcttcctgagccatatgcccattcctcaagctgtacccctttcttggctatgtaggatgagttcctcctaggcccttgttaggagtggctattggattctaagcggttggggcatgagggaggatattttaaagggaagtatagctgattttaaaagaacctatacattcaagaacaaataaaaaacagcacttttctttaccaagaa

SEQ ID NO: 195144 - DNA, 10086 bp, Homo sapiens
  Payload ID: 18532
  Gene Name: tripartite motif containing 66
  ENST ID: ENST00000402157
  CDS Start-End: 442-4179
atttgctccgtaaggactgcttccagggcttgatacaggagctagggcagattgccaaggctcatgagactgttgcagatgccacagcctagctgagattctccccagcaactaggaagatgggtctgcgtcacctctcaggtactgaggagaccagctgggcaagatcttcaaaagctaatgatggggaccagagcaaagacatatgaacaggtatttaaaatgcaatgtgatattcgttgtactggaaggatgttcagggtgctgcgggaacccagaagagggactaattaactcatcccgggggaaattgatcttgctgctcaaaggtggaacatttgaacagagctcatctcctgtcctgggtgtgaacgagtatatcttaccagggatgtaactgaacatttttttctgcattgtgttcctactgagcaacccaagatggccaggaactgctctgagtgcaaggagaagagggcagcacatatcctctgcacctactgcaatcgctggctgtgcagctcttgcacagaggaacaccgacacagccctgtccccgggggcccattctttcctcgggcccagaagggatctccaggagtgaatggtggtcccggagacttcaccttgtattgtcctctacacacacaggaagtactcaagctattctgtgagacatgtgatatgctcacttgccatagctgcctagtggtggaacacaaagaacacagacatgttgaagaagttttgcaaaaccagaggatgcttctggaaggtgtgactacacaggtggcacataagaaatccagtctacagacatctgcaaagcaaattgaggacaggatttttgaagtgaagcatcagcataggaaggtggaaaaccagatcaaaatggccaagatggttctgatgaatgagctgaacaaacaggccaatgggctaatagaggaattagaggggattactaatgagagaaagcggaagctggaacagcagttacagagcatcatggttctcaaccgtcagtttgagcatgtgcagaatttcatcaactgggctgtctgcagcaaaaccagtgtcccttttcttttcagcaaagagctgattgtgtttcagatgcagcgattgctggagacaagttgtaacacagatcctggctccccttggagtatcagattcacctgggagcctaacttctggaccaagcagctagcttctcttggctgcataactactgaaggtggacaaatgtccagggcagatgctcctgcttatggaggcttacaggggtcatcacccttttatcaaagccaccagtctccagtggctcagcaagaggctcttagccacccctcacacaagttccagtctccagcagtgtgctcctcatctgtgtgctgctcccactgctccccagtctcgccttccctcaaaggccaggtccccccacccagcatacacccagcccacagcttcaggcagccccctgagatggtgccccagcagctggggtctctgcagtgctctgccctgctgcccagggagaaagagctggcctgcagccctcatccaccaaagctgctgcagccctggctggaaacccagccccccgtggagcaggagagcacatcccagcggctggggcagcagctgacttcccagcccgtgtgcattgtccccccacaggatgttcagcaaggagcccatgcccagcccaccttacagacaccctctatccaagtccagtttggccaccaccagaagctgaagctcagtcactttcagcagcagccacagcagcagctaccacctccaccaccacccctcccccatcccccacctccccttccccctcccccacagcagccacacccacctcttcctccatcccagcatctggcttctagtcagcacgagagccctcctggccctgcctgttctcagaacatggacataatgcatcacaagtttgagctggaggaaatgcagaaggacttggagcttcttctccaggctcaacagcccagcctgcaactgagtcagaccaaatctcctcagcatcttcagcaaaccattgtggggcagatcaactacatcgtgaggcagccagcacctgtccagtcccagagccaggaggagaccctgcaggctacagatgagcccccagcatctcagggctcaaagccggctctccctcttgacaagaatactgctgctgccttgccccaggcgtctggggaagaaacccctctcagtgtccccccagtggacagcaccatccagcactcctctccaaatgtggtgagaaagcactccacctcgctgagcatcatgggcttttccaacactctggagatggagttgtcatctaccaggttggagaggcccctagagccacagatccagagtgtgagcaacctgacagctggtgccccccaggcagtaccaagcctgctgagtgctccccccaaaatggtgtccagcctgacaagtgttcaaaaccaggccatgcccagcctgacaaccagtcacctacagactgtgcccagccttgtgcatagcacattccagtccatgcccaacctgataagtgactcccctcaggctatggcaagcctggcaagtgatcaccctcaggctgggcccagcctaatgtctggtcacacccaggctgtgccgagtctggcaacttgtcctctgcagagcatccctccagtttctgacatgcagccagaaactgggtccagctccagttctggccgaacttcagggagcctgtgtcccagagatggggctgatccctccctggagaatgctctgtgtaagatggaaagtgaggattccactcgcttcactgacttactgggacaaggtcccatagtccccggtctggatgctcccaaggacttggccatcccctcagaactggaggagccaattaacctctctgtgaagaaacctccactggcgccagtggtcagcacgtctacagctctgcagcagtaccagaacccaaaagagtgtgagaattttgaacaaggagccctagagctggatgcaaaagagaaccagagcatcagagccttcaatagtgagcataagattccctatgtgcgactggagcgactcaagatctgtgctgcctcctcaggagagatgcctgtgttcaaactgaagccacagaagaatgatcaggatgggagcttcctgctgatcatcgagtgtggcactgagtcctccagcatgtccattaaggtcagccaggacagactgtctgaggccacccaggccccaggtctggagggaagaaaggtcactgtcacttctttggctgggcagcggccaccagaagtggagggcacatctcctgaagaacacagactcattcctcgaaccccaggagccaagaagggccccccagccccaatagagaatgaggacttctgtgctgtttgcctcaatggcggagagttactgtgctgtgaccgctgccccaaagtgttccacctctcctgccatgtgccagccttgctcagcttcccagggggagagtgggtgtgtaccttgtgccgcagcctgacccagcccgagatggagtacgactgtgagaatgcctgctataaccagcctggaatgcgggcatctcctggcctaagcatgtatgaccagaagaagtgtgagaagctggtattgtccttgtgctgcaataacctcagcctgcccttccatgaacctgtcagccccctggcccggcattattaccagattatcaagaggcccatggacctgtcaatcatccggaggaagctgcaaaagaaggacccagctcactataccaccccagaggaggtggtatcagatgtgcgcctcatgttctggaactgtgctaagttcaattatcctgactccgaggttgcagaggctggccgctgcctggaagtgttctttgagggctggttgaaggagatctacccggagaaacggtttgcccagccaaggcaggaggactcagactccgaggaggtgtctagtgagagtggatgttccactccccagggcttcccgtggcctccctacatgcaggagggcatccaacccaagaggcggcgacgacatatggagaatgaaagagcaaaaagaatgtcatttcgcctggccaacagcatctctcaggtgtgagagccaaaaggagactgggcactctggcagctgttgtcccatactgtcgaccattcctccccatcttgcagcttatcctcttcagagtgtggatggtagatgagtcttgttgaactgtgtagtgctcttctttgccatttgcatctacagcatttatttgggagccgtagtacatccactacagagaagatttcagtaataaacaggaaagaggaaggtatttattattaccagagtaatcagatgtataggctccacttgacaagaccacacctggttaggctcgggaaaacctactttccttggtgaatttttttctgcctgggaaagcagacccgtctaaccttttagtgtccagggctcaggagccatgtatacatctgaactcctcctgggctcagaagtgggtaaaagaagggagagaggtttagacatatggcaggactgtgatccctggcccagcacagccaaagactgtcactgtttgcctttgcttgtcctgtctggatagaggcacctgccatgtgcagactagtggaggcttctagaggccataggtctcaatttgtgcctatttgggttctaacggttttcagggtatttgttttgcatagtcactttcctgatgttgacataggtggctgctgtgaaaatgctgtggatggtgtgacattcttgactgagctgggtggctgtggagagaccacttaaatcttctggttcagatttcacttacagacttagtaagatgtccacttcagagcccgccctctgtgctacttactctgggctaatcacacttctttagggtgagaacctgccttcctagaagtgactgttggtgcttgtcagtggccatacccttcatcatcctcattcagaggtatggatcgtgagttctgcttgtgaatactgtgagacagctgctgtctgcttcaggtccagagttccatgggtggagagagtaacccacaaccagctcactcctctgggcctctcctcctgcttaaagattctagttctcaacctctccaagttcatgagccaaagatcagaagtgagtcttctgaccagcccgcctccaggctgtctacagccccaaaaaagccaacacttttctggcagccctttttgttggaggttagagaaggcctcagggaccaacaggggccagatctagacattcctgggggaagtttgtctaaggtggacagggggaaaaatcaagaggcaaaaagccagtgtcctttggtgaccatgaagcaacctcagagccttagttctcctagaatgcagagagaagcattctggaagccatgggaacaggagctcgaggctgcatcctgaatgcatctgcatggccctcgcagggtgtttgtgaggatactggaggtcaggctacctcccaagcaagggcttggttgagaaggaacccattgctcatattgttgggggagctatgaacctgacatgtcagtggccaggactgagacagctctccctggtcctgtcattgcatggctaatttcaggggagtctgaggtcatggctttatttttgctaacagatgaagttcaaggatgttcttgtttgtagggcctttgctaatgagcagttttttaattagaaaacatttcttctctctttgtgagttgatggtattgctcatttccttctctacccaacctgagagatcatcttcactttaaagcaaaccatgccccttggcttgccattctttcagcagcacatgccacgttctaagcagatgggcttccgtgatcccgttttctagtttggggtaactgagtcttgaatgctttactagtccggcaatctttggacttaggcttctgccctttgagactcacatgactttctggtttggggtctggtcatttccctttcaatttttgaatctccttctctgttcagttggcttggcaaagtaccctctgttctcatgtcactaattcctgctctaggtcatctttcctttgtgcagcccacattcccaccatcctgtgaactttgttgtacttggtgttgggcaactggtgagtgttgtgacaggctcagacctgatccttcctcaggagcaattggagaccacaaatttaaagcagaaatacctgttaaaagcttggctttccttatatgagtgaggctcccagcttgggtgtggcctcctgggctcacggatcagcttgctgggccagagggggtcttagtaatgtgctagagagacacatgctcccttctcatcgtagagagcctgcatgctgagaggctccctttacacacctgcctctcgctggcttttcctttagacctagccaccagtgttttgaatcatggttttgttttgtttttgcatgcaaaaaccagaacatgacttagaaattaaaaaaaaaaaaatcctactagccaagtgactgcctgcagaggctcttcattaacatttgggctgatcctgcttttgacttattcccataatggcccagttttgaagtcagccaagtccttttgtccttgacaacatcatgcagtggaaatacggtgagttctagattcttatgggacagcatgcagccctagaggaaaaattgacttcttgggtatgctgagaaataagacagtaaaatggcttcagttgatgcaaggggattttagttaaaaattggttcaggatttttaaattttattttattttttggctgggcgcggtggctcacgcctgtaatcccagcactttgggaggctgaggtgggtggatcacctaaggacagcagttcgagaccagcctggccaacatagtgaaaccctgtctctactaaaaatacaaatatcagccaggtgtgatggcacatgcctgtaatcccagctacttgggaggctgaggcaggagaattgcttgaatccgggaggtggaggttgcagtgagctgagatcatgccattgcattccagcctgggcaacagaacgagactccgtctcaaaaaaaaaaaaattggttcaggatgaacttgcagagcactcttccacagaacatggttaggttagccctgcctgacttctagcaattgctaactatacaccttgcctgcctctaggacccctacctgagtggcaaccataccttccatatgctctgttccatggcagtccctgccatcccccaccagcggactctggctccctccctgtacccatttctagcaacagctccttgcctggctgctaagacggaggcgcctccttgtttgttcctgggctctgttctgctccctctctcactccatggagtcacttatagtcttcctttctgaacgccagaattgagcctttgctccttctggatcaccccttcctgggcttcttctccatccctcagtactgctaaaattgccctgctcctttagtccatttccatgacctcagccctctctctcctctccttgtcttttaactttctcctggacttcttcctctccccagcatgaacccagagcctatcacacactgatgtttttgtcagcatcctgaactttctcatgcccttcaactttatttatttatttatttatttattttttattttttgagagagagagtctcactctgtcatgcaggctggagtgcagtggtatgatgtcggctcattgcaacctctgccttctgggctcaggtgatcctcccatctcagcctcctgagtagctgggactacaggtgcatgccaccatgcctggctaatttttctactttaggtagagatggagtttcgccatgttgctcaagctggtatcaacactcctgggctcaagcagtctgcttcccttggcctcccaaagtgctgggattacaggcgtgagccactgcgccaggcgtatccccttcaattttgctgaaactatcagccattctccattttcggcatcatcatatttgctgcttccacctcctgggctgctatgcatgacagattcacagttggcagcctcagttgagctctcagtgttgactggaaattctttaacttgttgtgatccctttttttttccccacccatgcctccatctttgtcctccacaaatgactgagctcactgtctacttcacagaagacagcccctaaagcaagagcttccttgcctgctgttcctctctcccctctcattcatctgtgtctgtaactctccccaacccctccattcttgctcctatttaattctctatatcttgaatcctgttgtatgtcctccaagactgctccctcgcttactccactgctcccactccctggagtctccagcctctgtctccactggttacctccacacagcctgcaaacaagttctccacaagattaaaacagcatttctcagagtctgttaccccttacacattttccttgttaaccaagttacttttaaaaagatcctttttaaactgattcttcctcagctgttcttcagccctctatactttttcataaaagtcaccagtgactgcccagttgccaaatagaatgaatacctttcagtgctcagctgtcttgacctctccgcagcatttcacaccacccaccaaccctcagtgaaacaacctcctcccttagcttttatgacaccacaagtctctggattctcagagaatccagaaaaacaagtctctggattctctcctcttacctctcagcccacacaggctgagctgtccttgaaacctagatgggggaaatgtctgtggctgtctgtggtctcttcttttcaggagttgggtagggaggaagaatcacagctgctcctgcttcctctgtctgtctctctatttcctgagtcccttccttttcctgaactcagttctcctcatgccaaccatgtttatgagctcctgctgggaggacagcatctgtgagtccttccctctgtctctcccagacaacacagaggttttagcctgtttgctaagagaccccatctaagtcagcccaagggtgtggattaggttttacagcatccaggccgcagtctggctaaactggattaccaggctggtgggcagctcctcaccatgatcctgcaccagttagagcctgctgtagttgggaaggagcctgggattgtggtaagatgtgtttccgtgcatgtcagtgctgctaaccaggaggagaacctggcagggtgggtgcctgctgctgataacattcggatggagggagactagggagcgcggtggctgctcccttgctggggctcagctggagtcagcatgactccttatatcagggcctttcccacctgtgctgatcaccaccacctgcttgctccagttgtttctggagttggaggcagctattggttgctttcttggaggtaaggaggtatatactagaaagatatctgatttgagagtctgaacaccaaaatttttggctctttccattatgagctgtgtaaccttggatacagtttcctcatctataaagttgtggtgggagaatggctgagaacagtgatctctcagctctccagctgtaaagatgttaattatgattttaactctcaagatcaggccacataaggaacaggggaattccaggggtgggacacagctgggggagtccagaccagggcagggaaaggagactcacaagccaaacagagctgctttggggaaagttcttatcagctggtgctgcttcctgagccatatgcccattcctcaagctgtacccctttcttggctatgtaggatgagttcctcctaggcccttgttaggagtggctattggattctaagcggttggggcatgagggaggatattttaaagggaagtatagctgattttaaaagaacctatacattcaagaacaaataaaaaacagcacttttctttaccaagaa

SEQ ID NO: 195145 - DNA, 858 bp, Homo sapiens
  Payload ID: 18532
  Gene Name: tripartite motif containing 66
  ENST ID: ENST00000530502
  CDS Start-End: 1-858
gctggatgcaaaagagaaccagagcatcagagccttcaatagtgagcataagattccctatgtgcgactggagcgactcaagatctgtgctgcctcctcaggagagatgcctgtgttcaaactgaagccacagaagaatgatcaggatgggagcttcctgctgatcatcgagtgtggcactgagtcctccagcatgtccattaagcggccaccagaagtggagggcacatctcctgaagaacacagactcattcctcgaaccccaggagccaagaagggccccccagccccaatagagaatgaggacttctgtgctgtttgcctcaatggcggagagttactgtgctgtgaccgctgccccaaagtgttccacctctcctgccatgtgccagccttgctcagcttcccagggggagagtgggtgtgtaccttgtgccgcagcctgacccagcccgagatggagtacgactgtgagaatgcctgctataaccagcctggaatgcgggcatctcctggcctaagcatgtatgaccagaagaagtgtgagaagctggtattgtccttgtgctgcaataacctcagcctgcccttccatgaacctgtcagccccctggcccggcattattaccagattatcaagaggcccatggacctgtcaatcatccggaggaagctgcaaaagaaggacccagctcactataccaccccagaggaggtggtatcagatgtgcgcctcatgttctggaactgtgctaagttcaattatcctgactccgaggttgcagaggctggccgctgcctggaagtgttctttgagggctggttgaaggagatctacccggagaaacggtttgccca

SEQ ID NO: 195146 - DNA, 3936 bp, Homo sapiens
  Payload ID: 18533
  Gene Name: tripartite motif containing 67
  Uniprot ID: Q6ZTA4
  ENST ID: ENST00000366653
  CDS Start-End: 1-2352
atggaggaagagctgaagtgtcccgtgtgcggctctctgtttcgggagcctatcatcctgccctgttcccacaatgtctgcctgccttgcgctcgcaccatcgcggtgcagaccccggacggtgagcagcacctgccccagccgctcctgctttcccggggatcggggctgcaggcgggcgccgccgccgctgcctctctggagcacgacgctgcggctggcccggcctgcggcggtgcaggcgggagtgcagctggcggcctcggcggcggtgcgggaggtggcggagaccacgcggacaagctcagcttgtacagcgagacagacagcggctacgggtcctacaccccgagcctcaagtcccccaacggggttcgcgtgctgcccatggtgcccgcaccacccggctcctcggctgcggcggctcggggtgccgcctgctcctcgctgtcctcgtcttcgagctccatcacgtgcccgcagtgccaccgcagcgcatccctggaccaccgcggcctgcgcggcttccagcgcaaccggctgctcgaggccatcgtgcagcggtaccagcagggccgcggggccgtgccggggacgtctgcagccgcggcggtggccatctgccagctgtgcgaccgcaccccgccagagccagcagccacgctctgcgagcagtgcgacgtcctctactgctctgcctgccagctcaagtgccatccatcccggggacccttcgccaagcatcgcctggtgcagccgccgccgccgccgccgccgcccgccgaggcagcctccgggcccactggcaccgcccagggcgcccccagcggaggcggcggctgcaagagcccgggaggcgcgggggcgggggcgactgggggcagcacggcccgcaagttccccacgtgtcccgagcatgaaatggagaactacagcatgtactgcgtgagctgtcgaaccccggtgtgttatctgtgcctggaggagggccggcacgccaagcacgaggtgaagccgctgggggccatgtggaagcagcacaaggcacaactatctcaggccttaaatggagtttcagataaggcaaaggaagcaaaggagtttctggttcagctaaagaacatattgcagcagatccaggaaaacggactggactacgaagcctgcctcgttgctcagtgtgatgcccttgtggatgctttaactcgtcagaaagccaagctgctcaccaaggtgactaaagagagggaacacaagttgaagatggtttgggaccagatcaatcactgcacattgaagctgcgtcagtccaccggactgatggagtactgcctggaggtgatcaaggagaacgacccctccgggttcttacagatctcagatgctctgatcaagcgcgtccaggtgtctcaggagcagtgggtcaaaggcgccctggagccgaaagtgtctgcggagtttgatctgactttggacagcgagccgctgctgcaggccatccaccagctggacttcattcagatgaaatgtagggtgccacccgtccccctactgcagctggagaaatgctgcacccgtaacaacagcgtcacgctggcctggaggatgccacccttcacccacagccccgtggacggctacatcctggagctggacgacggtgccgggggacagttccgggaagtgtacgtcggtaaggagactttgtgtaccatcgacggtcttcacttcaacagcacctacaacgcccgagtcaaagctttcaactcttctggtgtcgggccttacagtaaaactgtcgtcctgcagacatccgatgtggcctggttcacatttgaccccaactctgggcatcgggacatcattttatccaatgacaaccagacagccacctgcagcagctatgacgaccgggtggtgctgggcacagctgcgttctccaagggcgtgcactactgggagctgcacgtggaccggtacgacaaccacccagaccccgccttcggggtggccagggccagcgtggtcaaggacatgatgctgggcaaggatgacaaggcctgggccatgtatgtggacaacaaccgcagctggttcatgcactgcaactcccacaccaacaggacggaaggtggcgtgtgcaagggggccaccgtgggcgtgctgctggacctgaataagcacactctcaccttcttcatcaacgggcagcagcagggccccacagccttcagccacgtggacggggtcttcatgccagccctcagcctcaaccgcaacgtgcaggtcaccctgcacacaggattggaagtgccgactaacctggggcggccaaagctgtcaggcaattagccccgctccagctcggcactgtgcctgtgacagtgacattcacaggcaaaacgcccaccattctcactaagctcaaataacccacaaaagcaggatatgcaaatcatgggtgcaacctggcagcgtggagtgtcatagaaacacattttcttggggacgcagggaatgggtccacgggccatgctcacagctgccactgtcagtggcaaaggaaggtacgtgtgtcacccttattccacccagacattacgaacactccccaagaaggacctttctcaagggagtcagcattcgggcttcatgtctatgtttcctgccatctgttttcaaagcttgtctttttttggagggagaggaaggtagactttgagactggcctcctgagagcggcagtcaggagctgcgctgtaatcccacgccccgggtgttggccctccgtggggaccttgcctcctcagagtcccgagattgcagattctcatcatgctgagaaagttatcttttagcttcttggtcctagagtctttagtagcacctgccacttgcagacccaatgcaggattgatagaaagggacattaatcattcatgcttgacttttgcctctctcactgaagtgttagaaccttttaaaatggcttcctttattaatcagccaattgtgttctctctctctcttcctccatccttcatttcttctccctccctccttctctttctctcttcttctctctctccttccttccctcctttgctctctctttcttcctttcctccttctctcttactttcctccatccctgcctctttcttccctctttcgctctctttccctccctccttctctctctctctcacacacacacaggcatgacagtctcctaaaattaattcactcagttcttagttcttaaatccacgtgaaaacacaagaattttaacaactatgtcataggtcttcgcctggtgatggctcctttctgaaactggcagcccaagaagttaactgaaaatgcatccagattgctcttctgagctgaaccactctcagactcataagcatttaaaatgggagaccctgggaaagcctgttctagtcagtccaccctattgtcattatgaaagcatcatgaacacaagtggcccctgtggcaggccgggacggctctgccctgatgcagtgggcgggatctctggggaaggcaggaaatagaagggcagtatcaggtaccttgtctcccagcttcccactgtgagactgggtgtgccgagtctgacctgccagggcaggactctggaaacaccaggcttctcccttgagatccacattgattcatccacacctctcagagacagctcatggcaggggttttgagcctgccaggctcttgttcccagggaacccttcctctcctccctcctctcatcttcccagtcacctgccacctccagctccacctggtagtaacatttctctctccttttaaaaagaatatattttgtcaagcattttatttctgaggctgagaagtgacttgtcaatttgctggactggatttttataaaattcgcccattcaccagca

SEQ ID NO: 195147 - DNA, 2166 bp, Homo sapiens
  Payload ID: 18533
  Gene Name: tripartite motif containing 67
  Uniprot ID: Q6ZTA4
  ENST ID: ENST00000449018
  CDS Start-End: 1-2166
atggaggaagagctgaagtgtcccgtgtgcggctctctgtttcgggagcctatcatcctgccctgttcccacaatgtctgcctgccttgcgctcgcaccatcgcggtgcagaccccggacggcgggagtgcagctggcggcctcggcggcggtgcgggaggtggcggagaccacgcggacaagctcagcttgtacagcgagacagacagcggctacgggtcctacaccccgagcctcaagtcccccaacggggttcgcgtgctgcccatggtgcccgcaccacccggctcctcggctgcggcggctcggggtgccgcctgctcctcgctgtcctcgtcttcgagctccatcacgtgcccgcagtgccaccgcagcgcatccctggaccaccgcggcctgcgcggcttccagcgcaaccggctgctcgaggccatcgtgcagcggtaccagcagggccgcggggccgtgccggggacgtctgcagccgcggcggtggccatctgccagctgtgcgaccgcaccccgccagagccagcagccacgctctgcgagcagtgcgacgtcctctactgctctgcctgccagctcaagtgccatccatcccggggacccttcgccaagcatcgcctgggcgcccccagcggaggcggcggctgcaagagcccgggaggcgcgggggcgggggcgactgggggcagcacggcccgcaagttccccacgtgtcccgagcatgaaatggagaactacagcatgtactgcgtgagctgtcgaaccccggtgtgttatctgtgcctggaggagggccggcacgccaagcacgaggtgaagccgctgggggccatgtggaagcagcacaaggcacaactatctcaggccttaaatggagtttcagataaggcaaaggaagcaaaggagtttctggttcagctaaagaacatattgcagcagatccaggaaaacggactggactacgaagcctgcctcgttgctcagtgtgatgcccttgtggatgctttaactcgtcagaaagccaagctgctcaccaaggtgactaaagagagggaacacaagttgaagatggtttgggaccagatcaatcactgcacattgaagctgcgtcagtccaccggactgatggagtactgcctggaggtgatcaaggagaacgacccctccgggttcttacagatctcagatgctctgatcaagcgcgtccaggtgtctcaggagcagtgggtcaaaggcgccctggagccgaaagtgtctgcggagtttgatctgactttggacagcgagccgctgctgcaggccatccaccagctggacttcattcagatgaaatgtagggtgccacccgtccccctactgcagctggagaaatgctgcacccgtaacaacagcgtcacgctggcctggaggatgccacccttcacccacagccccgtggacggctacatcctggagctggacgacggtgccgggggacagttccgggaagtgtacgtcggtaaggagactttgtgtaccatcgacggtcttcacttcaacagcacctacaacgcccgagtcaaagctttcaactcttctggtgtcgggccttacagtaaaactgtcgtcctgcagacatccgatgtggcctggttcacatttgaccccaactctgggcatcgggacatcattttatccaatgacaaccagacagccacctgcagcagctatgacgaccgggtggtgctgggcacagctgcgttctccaagggcgtgcactactgggagctgcacgtggaccggtacgacaaccacccagaccccgccttcggggtggccagggccagcgtggtcaaggacatgatgctgggcaaggatgacaaggcctgggccatgtatgtggacaacaaccgcagctggttcatgcactgcaactcccacaccaacaggacggaaggtggcgtgtgcaagggggccaccgtgggcgtgctgctggacctgaataagcacactctcaccttcttcatcaacgggcagcagcagggccccacagccttcagccacgtggacggggtcttcatgccagccctcagcctcaaccgcaacgtgcaggtcaccctgcacacaggattggaagtgccgactaacctggggcggccaaagctgtcaggcaattag

SEQ ID NO: 195148 - DNA, 9320 bp, Homo sapiens
  Payload ID: 18533
  Gene Name: tripartite motif containing 67
  ENST ID: ENST00000444294
  CDS Start-End: 859-3204
gggaggggattcccgagccagccggacgctcgccctccgcccgccggctgcagcgtcgcgcggcccaaggtcagaggcgccgcaggagcagcagctgggaaccagggaagcgggtcaatcccggccgcagggagaaagccccagggcgcagtcagccggcgtccacagccgcccaggagtagggtgagcggctgtctccgggccggtcgggtcccgccgaggtggccgcggccccagcgacccggcgggtggcggcccaggggtcggcgagcaggcagctggagccccaccttcggctcccgggcgctgtccgccgcctcgtggtgctgatcccagccccacggctgagcggccttcgcacctgcctgtctcacctcgctatcaccccgataaggagttgggccggggcagaaggggggcctcggggtagccgcccaccggagccaggggctgaagcagcgagcgcacagcagcccggccgctggtcctggggtggagaggaggcgcgcgctgcagccggcggcggcgctggtgctgattcatcacctaaagctcctcgcaggccaccgcgagggcagccgaccggctccggaatctggccgcaggttgaagccgctggtgcgggaccctcgggcaggaggtgaggaccccctcccttctctcgcccctcaatcatcttagggcggtggctacaggacagagagaggggcgtgcccctcggctgtgaagtgggcatgcccgtgtgatgcccccgcccgtcgtctcaccggggcgcaccgcgctggtcctcctccgccagtctcccgagctccggccattcatccccagcgcagagcagcgctggcagccggcgccgcgatggaggaagagctgaagtgtcccgtgtgcggctctctgtttcgggagcctatcatcctgccctgttcccacaatgtctgcctgccttgcgctcgcaccatcgcggtgcagaccccggacggtgagcagcacctgccccagccgctcctgctttcccggggatcggggctgcaggcgggcgccgccgccgctgcctctctggagcacgacgctgcggctggcccggcctgcggcggtgcaggcgggagtgcagctggcggcctcggcggcggtgcgggaggtggcggagaccacgcggacaagctcagcttgtacagcgagacagacagcggctacgggtcctacaccccgagcctcaagtcccccaacggggttcgcgtgctgcccatggtgcccgcaccacccggctcctcggctgcggcggctcggggtgccgcctgctcctcgctgtcctcgtcttcgagctccatcacgtgcccgcagtgccaccgcagcgcatccctggaccaccgcggcctgcgcggcttccagcgcaaccggctgctcgaggccatcgtgcagcggtaccagcagggccgcggggccgtgccggggacgtctgcagccgcggcggtggccatctgccagctgtgcgaccgcaccccgccagagccagcagccacgctctgcgagcagtgcgacgtcctctactgctctgcctgccagctcaagtgccatccatcccggggacccttcgccaagcatcgcctggtgcagccgccgccgccgccgccgccgcccgccgaggcagcctccgggcccactggcaccgcccagggcgcccccagcggaggcggcggctgcaagagcccgggaggcgcgggggcgggggcgactgggggcagcacggcccgcaagttccccacgtgtcccgagcatgaaatggagaactacagcatgtactgcgtgagctgtcgaaccccggtgtgttatctgtgcctggaggagggccggcacgccaagcacgaggtgaagccgctgggggccatgtggaagcagcacaaggcacaactatctcaggccttaaatggagtttcagataaggcaaaggaagcaaaggagtttctggttcagctaaagaacatattgcagcagatccaggaaaacggactggactacgaagcctgcctcgttgctcagtgtgatgcccttgtggatgctttaactcgtcagaaagccaagctgctcaccaaggtgactaaagagagggaacacaagttgaagatggtttgggaccagatcaatcactgcacattgaagctgcgtcagtccaccggactgatggagtactgcctggaggtgatcaaggagaacgacccctccgggttcttacagatctcagatgctctgatcaagcgcgtccaggtgtctcaggagcagtgggtcaaaggcgccctggagccgaaagtgtctgcggagtttgatctgactttggacagcgagccgctgctgcaggccatccaccagctggacttcattcagatgaaattgccacccgtccccctactgcagctggagaaatgctgcacccgtaacaacagcgtcacgctggcctggaggatgccacccttcacccacagccccgtggacggctacatcctggagctggacgacggtgccgggggacagttccgggaagtgtacgtcggtaaggagactttgtgtaccatcgacggtcttcacttcaacagcacctacaacgcccgagtcaaagctttcaactcttctggtgtcgggccttacagtaaaactgtcgtcctgcagacatccgatgtggcctggttcacatttgaccccaactctgggcatcgggacatcattttatccaatgacaaccagacagccacctgcagcagctatgacgaccgggtggtgctgggcacagctgcgttctccaagggcgtgcactactgggagctgcacgtggaccggtacgacaaccacccagaccccgccttcggggtggccagggccagcgtggtcaaggacatgatgctgggcaaggatgacaaggcctgggccatgtatgtggacaacaaccgcagctggttcatgcactgcaactcccacaccaacaggacggaaggtggcgtgtgcaagggggccaccgtgggcgtgctgctggacctgaataagcacactctcaccttcttcatcaacgggcagcagcagggccccacagccttcagccacgtggacggggtcttcatgccagccctcagcctcaaccgcaacgtgcaggtcaccctgcacacaggattggaagtgccgactaacctggggcggccaaagctgtcaggcaattagccccgctccagctcggcactgtgcctgtgacagtgacattcacaggcaaaacgcccaccattctcactaagctcaaataacccacaaaagcaggatatgcaaatcatgggtgcaacctggcagcgtggagtgtcatagaaacacattttcttggggacgcagggaatgggtccacgggccatgctcacagctgccactgtcagtggcaaaggaaggtacgtgtgtcacccttattccacccagacattacgaacactccccaagaaggacctttctcaagggagtcagcattcgggcttcatgtctatgtttcctgccatctgttttcaaagcttgtctttttttggagggagaggaaggtagactttgagactggcctcctgagagcggcagtcaggagctgcgctgtaatcccacgccccgggtgttggccctccgtggggaccttgcctcctcagagtcccgagattgcagattctcatcatgctgagaaagttatcttttagcttcttggtcctagagtctttagtagcacctgccacttgcagacccaatgcaggattgatagaaagggacattaatcattcatgcttgacttttgcctctctcactgaagtgttagaaccttttaaaatggcttcctttattaatcagccaattgtgttctctctctctcttcctccatccttcatttcttctccctccctccttctctttctctcttcttctctctctccttccttccctcctttgctctctctttcttcctttcctccttctctcttactttcctccatccctgcctctttcttccctctttcgctctctttccctccctccttctctctctctctcacacacacacaggcatgacagtctcctaaaattaattcactcagttcttagttcttaaatccacgtgaaaacacaagaattttaacaactatgtcataggtcttcgcctggtgatggctcctttctgaaactggcagcccaagaagttaactgaaaatgcatccagattgctcttctgagctgaaccactctcagactcataagcatttaaaatgggagaccctgggaaagcctgttctagtcagtccaccctattgtcattatgaaagcatcatgaacacaagtggcccctgtggcaggccgggacggctctgccctgatgcagtgggcgggatctctggggaaggcaggaaatagaagggcagtatcaggtaccttgtctcccagcttcccactgtgagactgggtgtgccgagtctgacctgccagggcaggactctggaaacaccaggcttctcccttgagatccacattgattcatccacacctctcagagacagctcatggcaggggttttgagcctgccaggctcttgttcccagggaacccttcctctcctccctcctctcatcttcccagtcacctgccacctccagctccacctggtagtaacatttctctctccttttaaaaagaatatattttgtcaagcattttatttctgaggctgagaagtgacttgtcaatttgctggactggatttttataaaattcgcccattcaccagcaccaactgtgcgtccttggttctgccttcctgttcagacaccgcgcctgctttctgagtaactgcctgccggagccatgcaggtaccccccctccactcagcaggcccgacaatcctacctcaaagctcatgctcttggtctgcaaggctgcttggtccgctgtctctgcagatgtggccggcaaggccagctgccccgtctccaggagctgctcggtgctgtgttgcagtctctgctgcggagcctgggagctatctgcttcatggaagtctaggtcttgcctcttccttgtcatctcaccaagcggtttctgggtctcctcctcccatcccagagccctgtccagagctcttggtggtgacacacaagacctgggaccctgtgtccttgcccgcacctctgcctctgtctcccatatccctgcagcttcatccttagccatagctctgggtggcctttgcttggagcatggagacgatccctaaagattgaggatgaagaggagccaccactttcctggggccaaggaagccatcagctttgggaagtgtctagctctcttctgaaaaaaaaacaggcctacaccctgcccccagaatgagagtgggctaggcagggctgcctggtgacagcagcttctcacaggggagccctggggaaggctgtggagcctccaccatcaccacagcccaggtcaccaggtggccccagctctgcagaagaatcgcccatcattggagcacaagttgcctggggctaccctgaacctaacccctttgagggagcagcatccaggtcaggagagaagtggaaagtgcaggagggtaatgccctcaaatccggtggcctctttcagaaaaaagttccctgaagtccagagaggtgcagccaggactccctcctccccactgccaccctgagcttgggggctgggattctcccttttctgactcctccaggagcccagaagcaatacggccgatgccagggacagcatccagctctccttcacagacacctctcctgtcttcagcacaaaacaccttcaatgttctgacttcaaagagaacgacaggtccgtgccacacacttgtgtttttgagggatcagaaaagtgaagaaggaacttatcaattcctcatggccaggaaggtcccgggtttcagagtagaaatgacagacaggtcatggaattctcatccaccatcgaattccataacacgttacatcatggtggcacatttgtacatacatataaatgatatcaagatgaggcttttgttgggctggctgaggagtaacttggtgtaaatctatcaagcagtttcagtgaaaaaggaattcaaagtagtttaaaaatgtcgagttccattgcattgtaaatagtgcctctgtaatgtggttctgcagttgttctttgctagtgagcaagcttggtcaaagtgtatgccttttccttttaaaattaatctcttccgaaaatatccactagcacctcactgcatacatagcatcccagctcctaattcaaagcaggggaaggtatttccccaaagcctgcttttcctctctctgttctccttgggaaaataatgattccaattaaagaggacaccagtaatactgacccacaaggtaactgacctaaacactataaaactgtatatatttccaggctgcatcttcagcctgatatgtactttgtagttgcaacagcgccctaggtgccctatggcccaccaagtttgaggagggtggtgctttccggattgagcctgggcaggctctgtggagctcaccaagagagctgggggcaggcccaccctcctctttgcgccctttctctccctcttggtgcccctgccctccgccccaccacagcactctcaggaaaggatcagaatgcaggatctttgtgtatttcttccagggatatttgcatttaagccttaattctcattgcaagcgaaaggcttggtccccctgggaaggcgggtttcggcaccggtgggcaggtggttcagtgtcaaggaggctgctgctggtcccatggccacctgctggctttgaggtagtgagggagggtcaatccttagggggagtcaacatgtgaatgctaaagaacactgctgcacagcccgtggggtggcgccagggtttctcaacctctactgacattttgcgataggttctgtatgccgtaggatgtttagcaacatccctggtctctacccatcatctgccagtagcaacccccaagttaggtgtgacaaccaaaagtatctgtcgacattgctaggtatctcctgggggcctccacaagttgagaaccaccaggttatgccagtggtttgtcatgcatggatctgtagagggactgtggcgctccggctgctttgttccatagaaagcctgtatgtgacaaagctgccagcctttatcttgatacccaagcccaggattttccatgtgtcttcagggggcaggtaggggaaaatggggtgagccacctccaacagatgccaacctgttgggtcttgaattttcactcactgaagatgccccctgcccgctccccacttcctagaaagcaaaactcgttacctttgttttccttggccacattttactggaagcaacaggaacttcttaatgggtttgtggccctcaattggtttttaaaaaaatctaacagatcttattggcaaatattcaagatggtgatgctggaaaatttcaggacttttcttttgcaagtgagccggtagctgtgtttgttgaccacattctttggcagttcctcccagaagatcaaaggatcctgcagctttaacctaatatctaggctgtaaaaatatgagggcaggtttcgggcaggatgtattgatcagacaccaagttcagccctcggttacttccctcttttaacctggctttaatagtgattcatggtatgagtgggggccaatctcttatcctttctgtgcctcagtatccccacctgaaatgagactagtcatactaacctacctcctctgatgtattgtgaggattatacaataacatttttaaagaaaaaaagtgcagtctttcatctctggcatctaagctaatgattcccattcagtgactcaaacctgtggggggcgttccagtgttctctgaccagtgtcttccatccaagcctccttgtgaccagggcaaggagctgcctggcctccagtgggtaaaatagacctttaagacaggtttcctatgaccatagaaagtaacaccccatatgtttccattcccggcgaggcctgtttgaatggcgctctgtgtgagtgctatgaacaggctacctgtcagcagtctcactgcgaggcctcaaggcctctgtgagcagaagcccctttaaaccaaggaaggacactaacccaggcctctgccttctttgttacctaagttctggtatctaaggggtctctcatctcacagcttgcctcctttgtttcgaggggtctctgcagtgtgaatgggtttgaaatccagtgtggatagcacgaagagatgcaactgagccgaagttttgaaggctggttgggctagtgggtcatcatgtcactttcagatgactgataaccgctgggactgctggggcttcaccagcacgagctatgcaggttgggggaggccctggctttttcaatgattgacgttgacatcagtcaggagctgggagttgagacctccagggaagtctcgtccggatccatcgctcttctctcaaggagcacagtcctgggaaaggcctagggacctgtgggccggtgatgcgggcactgcagaccaggccaggccctcgggtaaagctctgaggagaggccaaaaccaggcttcaggttcgggaaggtgactgcttgcaactgcagtagcaggaacatgtcaggtgcttactgggtgagacccagccggggaagcctctccaactcctcctagccctggaaaccagacacccagagccccaggctttctcggcacccagaagaagtggggagcgggcaaagcagaaaacattcaatgcatgatgtaggattgctgcgttggcactaagctgttgtattaagcatgagaggtgtttgtttaacgttggcaaagggatttaacaagaaacaaaaagcttcgcgtccttgttttgaccgtcgacagaagtccaattttcttgcctttctttatccccatttctcctccctccccttcccccatcacatccactttcggtcactcgttgttggtatttggtggcagctcttggtcctattgctgtggatgttccactgaaaacacggggggtagcggggagtggtaaggaaagcaacttttttctaatttttgtattggtatccacaagcgtttgtattttttgaattgcaaacactgtgttttctggtctttgggggttagttgaactttctgtattaccttttggaaaacctgagttttaccacagtcttaagcagatttgaaataaattcttttgacactgccaa

SEQ ID NO: 195149 - DNA, 3352 bp, Homo sapiens
  Payload ID: 18534
  Gene Name: tripartite motif containing 68
  Uniprot ID: Q6AZZ1
  ENST ID: ENST00000300747
  CDS Start-End: 291-1748
attggctgccgtcccgcgagcggggcctagagccgggtgtagtattctgggagctgcgggctactgggcctgcgctgccgggctttgggttctgggcctctgccgctctctggccctaagtgctgagctgccgggaacggcagcttctgacgctgggccattggacgctgcggaaccaggcttcttcactttgagtttccgccgcgaagcgccagtccgggccgaggagggagcctttactacttctccctggtttcattcatgttctgaggagggtgtgagaaggaaccatggatcccacagccttggtggaagccattgtggaagaagtggcctgtcccatctgtatgaccttcctgagggagcccatgagcattgactgtggccacagcttctgccacagctgtctctctggactctgggagatcccaggagaatcccagaactggggttacacctgtcccctctgtcgagctcctgtccagccaaggaacctgcggcctaattggcagctggccaatgttgtagaaaaagtccgtctgctaaggctacatccaggaatggggctgaagggtgacctgtgtgagcgccatggggaaaagctgaagatgttctgcaaagaggatgtcttgataatgtgtgaggcctgcagccagtccccagagcatgaggcccacagtgttgtgccaatggaggatgttgcctgggagtacaagtgggaacttcatgaggccctcgaacatctgaagaaagagcaagaagaggcctggaagcttgaagttggtgaaaggaaacgaactgccacctggaagatacaggtggaaacccgaaaacagagtattgtatgggagtttgaaaaataccagcgattactagagaaaaagcagccaccacatcggcagctgggggcagaggtagcagcagctctggccagcctacagcgggaggcagcggagaccatgcagaaactggagttgaaccatagcgagctcatccagcagagccaggtcctgtggaggatgattgcagagttgaaagagaggtcgcagaggcctgtccgctggatgttgcaggatattcaggaagtgttaaacaggagcaaatcttggagcttgcagcagccagaaccaatctccctggagttgaagacagattgccgtgtgctggggctaagagagatcctgaagacttatgcagctgatgtgcgcttggatccagatactgcttactcccgtctcatcgtgtctgaggacagaaaacgtgtgcactatggagacaccaaccagaaactgccagacaatcctgagagattttaccgctataatatcgtcctgggaagccagtgcatctcctcaggccggcactactgggaggtggaggtgggagacaggtctgagtggggcctgggagtatgtaagcaaaatgtagaccggaaggaggtggtctacttatccccccactatggattctgggtgataaggctgaggaagggaaatgagtaccgagcaggcaccgatgagtacccaatcctgtccttgccggtccctcctcgccgggtgggaatcttcgtggattatgaggcccatgacatttctttctacaatgtgactgactgtggctcccacatcttcactttcccccgctatcccttccctgggcgcctcctgccctattttagtccttgctacagcattggaaccaacaacactgctcctctggccatctgctccctggatggggaggactaagaaagctaccaccctaaccagagaggcttggaattgggcctggcccccatggggcttggaggaccgagccactgacaggtatcccctgaaactgagctgagcccagtatccaaggattcctctgtctgatcctttggtctttgctaccaggctgaagtctgtcatgaaaccacttattttaaaaagcagaggcccagtcaaatgagcattgcatcccatgagggaagcacgacagggctgatggtgaggatcagagcagttctaaggtgactcgttggggtaaggatcaggactttgtccatgtagtagccaaccaccctcttccctgattcccgtccggtgtcacagttcagtcagtgaggatgatgaagtagatacagtcttcaggacaccattagatgggctttcccaataggccaaaaaaatgctgcgcatacccagagctggttgttgtgctgaggccagtcagaggatgcttcccctgaggtttgctataactaagcaacctttatgtgactctcaccttctgacctcctggcaagagaaattcagtgcagcagggggacacagacctgcccaagccaccccactgccgttccctctctgagcacaagctgggcaaatcactgtcccttggactccaggagaccagtgtcctagtcttgccttttttctctaagtggcaggatcagaaaacctgcgagctttagtttgtattttcactttatgaatgaggaaactgaaatggccttaagggagcaagttatttctttttttttgacacggagtctcactctgttgcccaggctggagtgcagtggcacgatctcggctcactgcaggctctgcctcctgggttcacgccattctcctgcctcagcttcccgagtagctgggactacaggcgcccaccacgacgcctggctcatttttttgtatttttagtagagacggagtttcaccatgttagctaggatggtctcgatctcctgacctcatgatccgccctcctcagcctcccacagtgctgggattagaggcatgagccactgcgcccggcccctggagcaagttatttcttacaaagctgctgaaggtaagattatcaaaattataaagcatttttcacactcaagtgaaacaaggttgacaaactcacttcgcaggtcacatgcctatacatcacttattatatttgggtctgaaacttctcacatgtttgggaggttttatgtgtcctcattgggaaaatgggtgtaattcagcataaaacctcatatgattgtcctgcctcatggagctgttgtatagatcccagatccatcccatgatttgttcctgtctgaggcatagaggcaggcaagccgtggattttgcacatggtgactttcccactgtgccatgatacagtctgcatcttatagcagtgcctttgtctcagggcctctgctggcagtctagaccttttgggcagaaaggagcttcaaatggctgtgataaggaatattaaaaattgtgtttctactttaattgtattggctgttcatgtatgtaggagttaaaataggccaaactggagaaataaacgcattctgtccaccatg

SEQ ID NO: 195150 - DNA, 3187 bp, Homo sapiens
  Payload ID: 18534
  Gene Name: tripartite motif containing 68
  ENST ID: ENST00000531101
  CDS Start-End: 236-799
gcgggctactgggcctgcgctgccgggctttgggttctgggcctctgccgctctctggccctaagtgctgagctgccgggaacggcagcttctgacgctgggccattggacgctgcggaaccaggcttcttcactttgagtttccgccgcgaagcgccagtccgggccgaggagggagcctttactacttctccctggtttcattcatgttctgaggagggtgtgagaaggaaccatggatcccacagccttggtggaagccattgtggaagaagtggcctgtcccatctgtatgaccttcctgagggagcccatgagcattgactgtggccacagcttctgccacagctgtctctctggactctgggagatcccaggagaatcccagaactggggttacacctgtcccctctgtcgagctcctgtccagccaaggaacctgcggcctaattggcagctggccaatgttgtagaaaaagtccgtctgctaaggctacatccaggaatggggctgaagggtgacctgtgtgagcgccatggggaaaagctgaagatgttctgcaaagaggatgtcttgataatgtgtgaggcctgcagccagtccccagagcatgaggcccacagtgttgtgccaatggaggatgttgcctgggagtacaagtgggaacttcatgaggccctcgaacatctgaagaaagagcaagaagaggcctggaagcttgaagttggtgaaaggaaacgaactgccacctggaaggcaggtggaaacccgaaaacagagtattgtatgggagtttgaaaaataccagcgattactagagaaaaagcagccaccacatcggcagctgggggcagaggtagcagcagctctggccagcctacagcgggaggcagcggagaccatgcagaaactggagttgaaccatagcgagctcatccagcagagccaggtcctgtggaggatgattgcagagttgaaagagaggtcgcagaggcctgtccgctggatgttgcaggatattcaggaagtgttaaacaggagcaaatcttggagcttgcagcagccagaaccaatctccctggagttgaagacagattgccgtgtgctggggctaagagagatcctgaagacttatgcagctgatgtgcgcttggatccagatactgcttactcccgtctcatcgtgtctgaggacagaaaacgtgtgcactatggagacaccaaccagaaactgccagacaatcctgagagattttaccgctataatatcgtcctgggaagccagtgcatctcctcaggccggcactactgggaggtggaggtgggagacaggtctgagtggggcctgggagtatgtaagcaaaatgtagaccggaaggaggtggtctacttatccccccactatggattctgggtgataaggctgaggaagggaaatgagtaccgagcaggcaccgatgagtacccaatcctgtccttgccggtccctcctcgccgggtgggaatcttcgtggattatgaggcccatgacatttctttctacaatgtgactgactgtggctcccacatcttcactttcccccgctatcccttccctgggcgcctcctgccctattttagtccttgctacagcattggaaccaacaacactgctcctctggccatctgctccctggatggggaggactaagaaagctaccaccctaaccagagaggcttggaattgggcctggcccccatggggcttggaggaccgagccactgacaggtatcccctgaaactgagctgagcccagtatccaaggattcctctgtctgatcctttggtctttgctaccaggctgaagtctgtcatgaaaccacttattttaaaaagcagaggcccagtcaaatgagcattgcatcccatgagggaagcacgacagggctgatggtgaggatcagagcagttctaaggtgactcgttggggtaaggatcaggactttgtccatgtagtagccaaccaccctcttccctgattcccgtccggtgtcacagttcagtcagtgaggatgatgaagtagatacagtcttcaggacaccattagatgggctttcccaataggccaaaaaaatgctgcgcatacccagagctggttgttgtgctgaggccagtcagaggatgcttcccctgaggtttgctataactaagcaacctttatgtgactctcaccttctgacctcctggcaagagaaattcagtgcagcagggggacacagacctgcccaagccaccccactgccgttccctctctgagcacaagctgggcaaatcactgtcccttggactccaggagaccagtgtcctagtcttgccttttttctctaagtggcaggatcagaaaacctgcgagctttagtttgtattttcactttatgaatgaggaaactgaaatggccttaagggagcaagttatttctttttttttgacacggagtctcactctgttgcccaggctggagtgcagtggcacgatctcggctcactgcaggctctgcctcctgggttcacgccattctcctgcctcagcttcccgagtagctgggactacaggcgcccaccacgacgcctggctcatttttttgtatttttagtagagacggagtttcaccatgttagctaggatggtctcgatctcctgacctcatgatccgccctcctcagcctcccacagtgctgggattagaggcatgagccactgcgcccggcccctggagcaagttatttcttacaaagctgctgaaggtaagattatcaaaattataaagcatttttcacactcaagtgaaacaaggttgacaaactcacttcgcaggtcacatgcctatacatcacttattatatttgggtctgaaacttctcacatgtttgggaggttttatgtgtcctcattgggaaaatgggtgtaattcagcataaaacctcatatgattgtcctgcctcatggagctgttgtatagatcccagatccatcccatgatttgttcctgtctgaggcatagaggcaggcaagccgtggattttgcacatggtgactttcccactgtgccatgatacagtctgcatcttatagcagtgcctttgtctcagggcctctgctggcagtctagaccttttgggcagaaaggagcttcaaatggctgtg

SEQ ID NO: 195151 - DNA, 874 bp, Homo sapiens
  Payload ID: 18534
  Gene Name: tripartite motif containing 68
  ENST ID: ENST00000526337
  CDS Start-End: 449-874
agagccgggtgtagtattctgggagctgcgggctactgggcctgcgctgccgggctttgggttctgggcctctgccgctctctggccctaagtgctgagctgccgggaacggcagcttctgacgctgggccattggacgctgcggaaccaggcttcttcactttgagtttccgccgcgaagcgccagtccgggccgaggagggagtgggaacttcatgaggccctcgaacatctgaagaaagagcaagaagaggcctggaagcttgaagttggtgaaaggaaacgaactgccacctggaagatacaggtggaaacccgaaaacagagtattgtatgggagtttgaaaaataccagcgattactagagaaaaagcagccaccacatcggcagctgggggcagaggtagcagcagctctggccagcctacagcgggaggcagcggagaccatgcagaaactggagttgaaccatagcgagctcatccagcagagccaggtcctgtggaggatgattgcagagttgaaagagaggtcgcagaggcctgtccgctggatgttgcaggatattcaggaagtgttaaacaggagcaaatcttggagcttgcagcagccagaaccaatctccctggagttgaagacagattgccgtgtgctggggctaagagagatcctgaagacttatgcagctgatgtgcgcttggatccagatactgcttactcccgtctcatcgtgtctgaggacagaaaacgtgtgcactatggagacaccaaccagaaactgccagacaatcctgagagattttaccgctataatatcgtcctgggaagccagtgcatctcctcaggccggcactactgggaggtggaggtggga

SEQ ID NO: 195152 - DNA, 764 bp, Homo sapiens
  Payload ID: 18534
  Gene Name: tripartite motif containing 68
  ENST ID: ENST00000533021
  CDS Start-End: 170-764
gctgagctgccgggaacggcagcttctgacgctgggccattggacgctgcggaaccaggcttcttcactttgagtttccgccgcgaagcgccagtccgggccgaggagggagcctttactacttctccctggtttcattcatgttctgaggagggtgtgagaaggaaccatggatcccacagccttggtggaagccattgtggaagaagtggcctgtcccatctgtatgaccttcctgagggagcccatgagcattgactgtggccacagcttctgccacagctgtctctctggactctgggagatcccaggagaatcccagaactggggttacacctgtcccctctgtcgagctcctgtccagccaaggaacctgcggcctaattggcagctggccaatgttgtagaaaaagtccgtctgctaaggctacatccaggaatggggctgaagggtgacctgtgtgagcgccatggggaaaagctgaagatgttctgcaaagaggatgtcttgataatgtgtgaggcctgcagccagtccccagagcatgaggcccacagtgttgtgccaatggaggatgttgcctgggagtacaagatacaggtggaaacccgaaaacagagtattgtatgggagtttgaaaaataccagcgattactagagaaaaagcagccaccacatcggcagctgggggcagaggtagcagcagctctggccagcctacagcgggaggcagcggagaccatgcagaaactggagttgaacc

SEQ ID NO: 195153 - DNA, 1901 bp, Homo sapiens
  Payload ID: 18535
  Gene Name: tripartite motif containing 69
  Uniprot ID: Q86WT6
  ENST ID: ENST00000329464
  CDS Start-End: 344-1846
ggggagctatgaaccttaagattagaccactaactcgaatctaaatgagctgcccttgtctcctacaaaagaaaagttgggcaggtagggtattctaatgagggtttctctttctcttaagcaaatgatgatcaaagttaactgacaaactgtcacggaatctgccagacctcactctggccttgctgcttctctccagctcctgaacttttctttcttccatcatgctctgagcccattccttgaaaactaaaaggtccctgactcccagtctgcagccatcctgggcctgctgagctctgattcaagtgcctgcctctgccccttggtgggctgaagcttcatggaggtatccaccaacccctcctccaacatcgatccaggcgactatgttgaaatgaatgattcaatcacccacctaccctctaaagtggtgatacaagatattactatggagctacactgccctctgtgcaatgattggttccgagacccactgatgctaagctgtggccacaacttctgtgaagcctgtatccaagacttttggaggctgcaagcaaaggaaacattctgtcctgagtgtaagatgctatgtcagtataacaactgtacattcaaccctgtactggacaagttggtagagaagattaagaagttacccttactcaagggccatccacagtgcccagagcatggagagaacctgaaactgttcagtaaaccagatgggaaactgatctgctttcaatgcaaggatgctcggttgtctgtggggcagtctaaggagttcctgcaaatctctgatgctgtccatttcttcacggaggagcttgccatccaacagggtcaactggagacaactctgaaggagcttcagaccctgaggaacatgcagaaggaagctattgctgctcacaaggaaaacaagctacatctgcagcaacatgtgtccatggagtttctaaagctgcatcagttcctgcacagcaaagaaaaggacattttaactgagctccgggaagaggggaaagccttgaatgaggagatggagttgaatctgagccagcttcaggagcaatgtctcttagccaaggatatgttggtgagcattcaggcaaagacggaacaacagaactccttcgactttctcaaagacatcacaactctcttacatagcttggagcaaggaatgaaggtgctggcaaccagagagcttatttccagaaagctgaacctgggccagtacaaaggtcctatccagtacatggtatggagggaaatgcaggacactctctgcccaggcctgtctccactaactctggaccctaaaacagctcacccaaatctggtgctctccaaaagccaaaccagcgtctggcatggtgacattaagaagataatgcctgatgatcctgagaggtttgactcaagtgtggctgtactgggctcaagaggcttcacctctggaaagtggtactgggaagtagaagtagcaaagaagacaaaatggacagttggagttgtcagagaatccatcattcggaagggcagctgtcctctaactcctgagcaaggattctggcttttaagactaaggaaccaaactgatctaaaggctctggatttgccttctttcagtctgacactgactaacaacctcgacaaggtgggcatatacctggattatgaaggaggacagttgtccttctacaatgctaaaaccatgactcacatttacaccttcagtaacactttcatggagaaactttatccctacttctgcccctgccttaatgatggtggagagaataaagaaccattgcacatcttacatccacagtaatgagtcataatattatacaaattcagagtgttattaaagaggtattgaaatattt

SEQ ID NO: 195154 - DNA, 1222 bp, Homo sapiens
  Payload ID: 18535
  Gene Name: tripartite motif containing 69
  Uniprot ID: Q86WT6
  ENST ID: ENST00000338264
  CDS Start-End: 140-1165
gaacttttctttcttccatcatgctctgagcccattccttgaaaactaaaaggtccctgactcccagtctgcagccatcctgggcctgctgagctctgattcaagtgcctgcctctgccccttggtgggctgaagcttcatggaggaggagcttgccatccaacagggtcaactggagacaactctgaaggagcttcagaccctgaggaacatgcagaaggaagctattgctgctcacaaggaaaacaagctacatctgcagcaacatgtgtccatggagtttctaaagctgcatcagttcctgcacagcaaagaaaaggacattttaactgagctccgggaagaggggaaagccttgaatgaggagatggagttgaatctgagccagcttcaggagcaatgtctcttagccaaggatatgttggtgagcattcaggcaaagacggaacaacagaactccttcgactttctcaaagacatcacaactctcttacatagcttggagcaaggaatgaaggtgctggcaaccagagagcttatttccagaaagctgaacctgggccagtacaaaggtcctatccagtacatggtatggagggaaatgcaggacactctctgcccaggcctgtctccactaactctggaccctaaaacagctcacccaaatctggtgctctccaaaagccaaaccagcgtctggcatggtgacattaagaagataatgcctgatgatcctgagaggtttgactcaagtgtggctgtactgggctcaagaggcttcacctctggaaagtggtactgggaagtagaagtagcaaagaagacaaaatggacagttggagttgtcagagaatccatcattcggaagggcagctgtcctctaactcctgagcaaggattctggcttttaagactaaggaaccaaactgatctaaaggctctggatttgccttctttcagtctgacactgactaacaacctcgacaaggtgggcatatacctggattatgaaggaggacagttgtccttctacaatgctaaaaccatgactcacatttacaccttcagtaacactttcatggagaaactttatccctacttctgcccctgccttaatgatggtggagagaataaagaaccattgcacatcttacatccacagtaatgagtcataatattatacaaattcagagtgttattaaagaggtattgaaatatttta

SEQ ID NO: 195155 - DNA, 391 bp, Homo sapiens
  Payload ID: 18535
  Gene Name: tripartite motif containing 69
  ENST ID: ENST00000561170
  CDS Start-End: 1-391
gagcaatgtctcttagccaaggatatgttggacatcacaactctcttacatagcttggagcaaggaatgaaggtgctggcaaccagagagcttatttccagaaagctgaacctgggccagtacaaaggtcctatccagtacatggtatggagggaaatgcaggacactctctgcccaggcctgtctccactaactctggaccctaaaacagctcacccaaatctggtgctctccaaaagccaaaccagcgtctggcatggtgacattaagaagataatgcctgatgatcctgagaggtttgactcaagtgtggctgtactgggctcaagaggcttcacctctggaaagtggtactgggaagtagaagtagcaaagaagacaaaatggacag

SEQ ID NO: 195156 - DNA, 1017 bp, Homo sapiens
  Payload ID: 18535
  Gene Name: tripartite motif containing 69
  ENST ID: ENST00000561043
  CDS Start-End: 171-962
actctggccttgctgcttctctccagctcctgaacttttctttcttccatcatgctctgagcccattccttgaaaactaaaaggtccctgactcccagtctgcagccatcctgggcctgctgagctctgattcaagtgcctgcctctgccccttggtgggctgaagcttcatggaggaggagcttgccatccaacagggtcaactggagacaactctgaaggagcttcagaccctgaggaacatgcagaaggaagctattgctgctcacaaggacatcacaactctcttacatagcttggagcaaggaatgaaggtgctggcaaccagagagcttatttccagaaagctgaacctgggccagtacaaaggtcctatccagtacatggtatggagggaaatgcaggacactctctgcccaggcctgtctccactaactctggaccctaaaacagctcacccaaatctggtgctctccaaaagccaaaccagcgtctggcatggtgacattaagaagataatgcctgatgatcctgagaggtttgactcaagtgtggctgtactgggctcaagaggcttcacctctggaaagtggtactgggaagtagaagtagcaaagaagacaaaatggacagttggagttgtcagagaatccatcattcggaagggcagctgtcctctaactcctgagcaaggattctggcttttaagactaaggaaccaaactgatctaaaggctctggatttgccttctttcagtctgacactgactaacaacctcgacaaggtgggcatatacctggattatgaaggaggacagttgtccttctacaatgctaaaaccatgactcacatttacaccttcagtaacactttcatggagaaactttatccctacttctgcccctgccttaatgatggtggagagaataaagaaccattgcacatcttacatccacagtaatgagtcataatattatacaaattcagagtgttattaaagaggtattgaaatattt

SEQ ID NO: 195157 - DNA, 2486 bp, Homo sapiens
  Payload ID: 18535
  Gene Name: tripartite motif containing 69
  Uniprot ID: Q86WT6
  ENST ID: ENST00000559390
  CDS Start-End: 929-2431
agtgttttagcctatccagttccgggagtttgcacgcagacgctctgcttcgtgaccttggctctgctctgtgggcgccgcccccagcctgggcgcgtccatcgtcgagtaccttctcctctgcctccccctccctctgcttctatctctctccaattgccctccctggcctgcggccgcccggtcctccttcccagcccagtgcagccaggcacccgggttcggcttgctcaggtctctgtccgggactgggaagccacggagggccgggaaagtggcacactcctggagctcaagcttcctactctctcatcgctgaataactaccgggcaggactgggtggaacagacagcatatttaggtcattgatgggctgctgggtggatggagctggaaagtgatgggcactgctttctggggctgcccaggttccttccgagggctcgcttttcctgggcagagcgggaaagaggaggggcaggccggtcgcgaaacgcaaatagtcgagaatagcgatccggggagaagcaggtgtctgtggggcccaagagaagtaccatctcgagcatccttagtccagaaatggggagctatgaaccttaagattagaccactaactcgaatctaaatgagctgcccttgtctcctacaaaagaaaagttgggcaggtagggtattctaatgagggtttctctttctcttaagcaaatgatgatcaaagttaactgacaaactgtcacggaatctgccagacctcactctggccttgctgcttctctccagctcctgaacttttctttcttccatcatgctctgagcccattccttgaaaactaaaaggtccctgactcccagtctgcagccatcctgggcctgctgagctctgattcaagtgcctgcctctgccccttggtgggctgaagcttcatggaggtatccaccaacccctcctccaacatcgatccaggcgactatgttgaaatgaatgattcaatcacccacctaccctctaaagtggtgatacaagatattactatggagctacactgccctctgtgcaatgattggttccgagacccactgatgctaagctgtggccacaacttctgtgaagcctgtatccaagacttttggaggctgcaagcaaaggaaacattctgtcctgagtgtaagatgctatgtcagtataacaactgtacattcaaccctgtactggacaagttggtagagaagattaagaagttacccttactcaagggccatccacagtgcccagagcatggagagaacctgaaactgttcagtaaaccagatgggaaactgatctgctttcaatgcaaggatgctcggttgtctgtggggcagtctaaggagttcctgcaaatctctgatgctgtccatttcttcacggaggagcttgccatccaacagggtcaactggagacaactctgaaggagcttcagaccctgaggaacatgcagaaggaagctattgctgctcacaaggaaaacaagctacatctgcagcaacatgtgtccatggagtttctaaagctgcatcagttcctgcacagcaaagaaaaggacattttaactgagctccgggaagaggggaaagccttgaatgaggagatggagttgaatctgagccagcttcaggagcaatgtctcttagccaaggatatgttggtgagcattcaggcaaagacggaacaacagaactccttcgactttctcaaagacatcacaactctcttacatagcttggagcaaggaatgaaggtgctggcaaccagagagcttatttccagaaagctgaacctgggccagtacaaaggtcctatccagtacatggtatggagggaaatgcaggacactctctgcccaggcctgtctccactaactctggaccctaaaacagctcacccaaatctggtgctctccaaaagccaaaccagcgtctggcatggtgacattaagaagataatgcctgatgatcctgagaggtttgactcaagtgtggctgtactgggctcaagaggcttcacctctggaaagtggtactgggaagtagaagtagcaaagaagacaaaatggacagttggagttgtcagagaatccatcattcggaagggcagctgtcctctaactcctgagcaaggattctggcttttaagactaaggaaccaaactgatctaaaggctctggatttgccttctttcagtctgacactgactaacaacctcgacaaggtgggcatatacctggattatgaaggaggacagttgtccttctacaatgctaaaaccatgactcacatttacaccttcagtaacactttcatggagaaactttatccctacttctgcccctgccttaatgatggtggagagaataaagaaccattgcacatcttacatccacagtaatgagtcataatattatacaaattcagagtgttattaaagaggtattgaaatattt

SEQ ID NO: 195158 - DNA, 1211 bp, Homo sapiens
  Payload ID: 18535
  Gene Name: tripartite motif containing 69
  Uniprot ID: Q86WT6
  ENST ID: ENST00000558329
  CDS Start-End: 319-1158
acctcactctggccttgctgcttctctccagctcctgaacttttctttcttccatcatgctctgagcccattccttgaaaactaaaaggtccctgactcccagtctgcagccatcctgggcctgctgagctctgattcaagtgcctgcctctgccccttggtgggctgaagcttcatggaggaggagcttgccatccaacagggtcaactggagacaactctgaaggagcttcagaccctgaggaacatgcagaaggaagctattgctgctcacaaggtttccaggaaaacaagctacatctgcagcaacatgtgtccatggagtttctaaagctgcatcagttcctgcacagcaaagaaaaggacattttaactgagctccgggaagaggggaaagccttgaatgaggagatggagttgaatctgagccagcttcaggagcaatgtctcttagccaaggatatgttggacatcacaactctcttacatagcttggagcaaggaatgaaggtgctggcaaccagagagcttatttccagaaagctgaacctgggccagtacaaaggtcctatccagtacatggtatggagggaaatgcaggacactctctgcccaggcctgtctccactaactctggaccctaaaacagctcacccaaatctggtgctctccaaaagccaaaccagcgtctggcatggtgacattaagaagataatgcctgatgatcctgagaggtttgactcaagtgtggctgtactgggctcaagaggcttcacctctggaaagtggtactgggaagtagaagtagcaaagaagacaaaatggacagttggagttgtcagagaatccatcattcggaagggcagctgtcctctaactcctgagcaaggattctggcttttaagactaaggaaccaaactgatctaaaggctctggatttgccttctttcagtctgacactgactaacaacctcgacaaggtgggcatatacctggattatgaaggaggacagttgtccttctacaatgctaaaaccatgactcacatttacaccttcagtaacactttcatggagaaactttatccctacttctgcccctgccttaatgatggtggagagaataaagaaccattgcacatcttacatccacagtaatgagtcataatattatacaaattcagagtgttattaaagaggtattgaaatat

SEQ ID NO: 195159 - DNA, 1262 bp, Homo sapiens
  Payload ID: 18535
  Gene Name: tripartite motif containing 69
  Uniprot ID: Q86WT6
  ENST ID: ENST00000560442
  CDS Start-End: 319-1209
acctcactctggccttgctgcttctctccagctcctgaacttttctttcttccatcatgctctgagcccattccttgaaaactaaaaggtccctgactcccagtctgcagccatcctgggcctgctgagctctgattcaagtgcctgcctctgccccttggtgggctgaagcttcatggaggaggagcttgccatccaacagggtcaactggagacaactctgaaggagcttcagaccctgaggaacatgcagaaggaagctattgctgctcacaaggtttccaggaaaacaagctacatctgcagcaacatgtgtccatggagtttctaaagctgcatcagttcctgcacagcaaagaaaaggacattttaactgagctccgggaagaggggaaagccttgaatgaggagatggagttgaatctgagccagcttcaggagcaatgtctcttagccaaggatatgttggtgagcattcaggcaaagacggaacaacagaactccttcgactttctcaaagacatcacaactctcttacatagcttggagcaaggaatgaaggtgctggcaaccagagagcttatttccagaaagctgaacctgggccagtacaaaggtcctatccagtacatggtatggagggaaatgcaggacactctctgcccaggcctgtctccactaactctggaccctaaaacagctcacccaaatctggtgctctccaaaagccaaaccagcgtctggcatggtgacattaagaagataatgcctgatgatcctgagaggtttgactcaagtgtggctgtactgggctcaagaggcttcacctctggaaagtggtactgggaagtagaagtagcaaagaagacaaaatggacagttggagttgtcagagaatccatcattcggaagggcagctgtcctctaactcctgagcaaggattctggcttttaagactaaggaaccaaactgatctaaaggctctggatttgccttctttcagtctgacactgactaacaacctcgacaaggtgggcatatacctggattatgaaggaggacagttgtccttctacaatgctaaaaccatgactcacatttacaccttcagtaacactttcatggagaaactttatccctacttctgcccctgccttaatgatggtggagagaataaagaaccattgcacatcttacatccacagtaatgagtcataatattatacaaattcagagtgttattaaagaggtattgaaatat

SEQ ID NO: 195160 - DNA, 1222 bp, Homo sapiens; identical to SEQ ID NO: 195154
  Payload ID: 18535
  Gene Name: tripartite motif containing 69
  Uniprot ID: Q86WT6
  ENST ID: ENST00000618398
  CDS Start-End: 140-1165

SEQ ID NO: 195161 - DNA, 1901 bp, Homo sapiens
  Payload ID: 18535
  Gene Name: tripartite motif containing 69
  ENST ID: ENST00000621836
  CDS Start-End: 344-1846
ggggagctatgaaccttaagattagactactaactcgaatctaaatgagctgcccttgtctcctacaaaagaaaagttgggcaggtagggtattctaatgagggtttctctttctcttaagcaaatgatgatcaaagttaactgacaaactgtcacggaatctgccagacctcactctggccttgctgcttctctccagctcctgaacttttctttcttccatcatgctctgagcccattccttgaaaactaaaaggtccctgactcccagtctgcagccatcctgggcctgctgagctctgattcaagtgcctgcctctgccccttggtgggctgaagcttcatggaggtatccaccaacccctcctccaacatcaatccaggcgactatgttgaaatgaatgattcaatcacccacctaccctctaaagtggtgatacaagatattactatggagctacactgccctctgtgcaatgattggttccgagacccactgatgctaagctgtggccacaacttctgtgaagcctgtatccaagacttttggaggctgcaagcaaaggaaacattctgtcctgagtgtaagatgctatgtcagtataacaactgtacattcaaccctgtactggacaagttggtagagaagattaagaagttacccttactcaagggccatccacagtgcccagagcatggagagaacctgaaactgttcagtaaaccagatgggaaactgatctgctttcaatgcaaggatgctcggttgtctgtggggcagtctaaggagttcctgcaaatctctgatgctgtccatttcttcacggaggagcttgccatccaacagggtcaactggagacaactctgaaggagcttcagaccctgaggaacatgcagaaggaagctattgctgctcacaaggaaaacaagctacatctgcagcaacatgtgtccatggagtttctaaagctgcatcagttcctgcacagcaaagaaaaggacattttaactgagctccgggaagaggggaaagccttgaatgaggagatggagttgaatctgagccagcttcaggagcaatgtctcttagccaaggatatgttggtgagcattcaggcaaagacggaacaacagaactccttcgactttctcaaagacatcacaactctcttacatagcttggagcaaggaatgaaggtgctggcaaccagagagcttatttccagaaagctgaacctgggccagtacaaaggtcctatccagtacatggtatggagggaaatgcaggacactctctgcccaggcctgtctccactaactctggaccctaaaacagctcacccaaatctggtgctctccaaaagccaaaccagcgtctggcatggtgacattaagaagataatgcctgatgatcctgagaggtttgactcaagtgtggctgtactgggctcaagaggcttcacctctggaaagtggtactgggaagtagaagtagcaaagaagacaaaatggacagttggagttgtcagagaatccatcattcggaagggcagctgtcctctaactcctgagcaaggattctggcttttaagactaaggaaccaaactgatctaaaggctctggatttgccttctttcagtctgacactgactaacaacctcgacaaggtgggcatatacctggattatgaaggaggacagttgtccttctacaatgctaaaaccatgactcacatttacaccttcagtaacactttcatggagaaactttatccctacttctgcccctgccttaatgatggtggagagaataaagaaccattgcacatcttacatccacagtaatgagtcataatattatacaaattcagagtgttattaaagaggtattgaaatattt

SEQ ID NO: 195162 - DNA, 1017 bp, Homo sapiens; identical to SEQ ID NO: 195156
  Payload ID: 18535
  Gene Name: tripartite motif containing 69
  ENST ID: ENST00000633859
  CDS Start-End: 171-962

SEQ ID NO: 195163 - DNA, 1262 bp, Homo sapiens; identical to SEQ ID NO: 195159
  Payload ID: 18535
  Gene Name: tripartite motif containing 69
  Uniprot ID: Q86WT6
  ENST ID: ENST00000633106
  CDS Start-End: 319-1209

SEQ ID NO: 195164 - DNA, 2486 bp, Homo sapiens
  Payload ID: 18535
  Gene Name: tripartite motif containing 69
  ENST ID: ENST00000633414
  CDS Start-End: 929-2431
agtgttttagcctatccagttccgggagtttgcacgcagacgctctgcttcgtgaccttggctctgctctgtgggcgccgcccccagcctgggcgcgtccatcgtcgagtaccttctcctctgcctccccctccctctgcttctatctctctccaattgccctccctggcctgcggccgcccggtcctccttcccagcccagtgcagccaggcacccgggttcggcttgctcaggtctctgtccgggactgggaagccacggagggccgggaaagtggcacactcctggagctcaagcttcctactctctcatcgctgaataactaccgggcaggactgggtggaacagacagcatatttaggtcattgatgggctgctgggtggatggagctggaaagtgatgggcactgctttctggggctgcccaggttccttccgagggctcgcttttcctgggcagagcgggaaagaggaggggcaggccggtcgcgaaacgcaaatagtcgagaatagcgatccggggagaagcaggtgtctgtggggcccaagagaagtaccatctcgagcatccttagtccagaaatggggagctatgaaccttaagattagactactaactcgaatctaaatgagctgcccttgtctcctacaaaagaaaagttgggcaggtagggtattctaatgagggtttctctttctcttaagcaaatgatgatcaaagttaactgacaaactgtcacggaatctgccagacctcactctggccttgctgcttctctccagctcctgaacttttctttcttccatcatgctctgagcccattccttgaaaactaaaaggtccctgactcccagtctgcagccatcctgggcctgctgagctctgattcaagtgcctgcctctgccccttggtgggctgaagcttcatggaggtatccaccaacccctcctccaacatcaatccaggcgactatgttgaaatgaatgattcaatcacccacctaccctctaaagtggtgatacaagatattactatggagctacactgccctctgtgcaatgattggttccgagacccactgatgctaagctgtggccacaacttctgtgaagcctgtatccaagacttttggaggctgcaagcaaaggaaacattctgtcctgagtgtaagatgctatgtcagtataacaactgtacattcaaccctgtactggacaagttggtagagaagattaagaagttacccttactcaagggccatccacagtgcccagagcatggagagaacctgaaactgttcagtaaaccagatgggaaactgatctgctttcaatgcaaggatgctcggttgtctgtggggcagtctaaggagttcctgcaaatctctgatgctgtccatttcttcacggaggagcttgccatccaacagggtcaactggagacaactctgaaggagcttcagaccctgaggaacatgcagaaggaagctattgctgctcacaaggaaaacaagctacatctgcagcaacatgtgtccatggagtttctaaagctgcatcagttcctgcacagcaaagaaaaggacattttaactgagctccgggaagaggggaaagccttgaatgaggagatggagttgaatctgagccagcttcaggagcaatgtctcttagccaaggatatgttggtgagcattcaggcaaagacggaacaacagaactccttcgactttctcaaagacatcacaactctcttacatagcttggagcaaggaatgaaggtgctggcaaccagagagcttatttccagaaagctgaacctgggccagtacaaaggtcctatccagtacatggtatggagggaaatgcaggacactctctgcccaggcctgtctccactaactctggaccctaaaacagctcacccaaatctggtgctctccaaaagccaaaccagcgtctggcatggtgacattaagaagataatgcctgatgatcctgagaggtttgactcaagtgtggctgtactgggctcaagaggcttcacctctggaaagtggtactgggaagtagaagtagcaaagaagacaaaatggacagttggagttgtcagagaatccatcattcggaagggcagctgtcctctaactcctgagcaaggattctggcttttaagactaaggaaccaaactgatctaaaggctctggatttgccttctttcagtctgacactgactaacaacctcgacaaggtgggcatatacctggattatgaaggaggacagttgtccttctacaatgctaaaaccatgactcacatttacaccttcagtaacactttcatggagaaactttatccctacttctgcccctgccttaatgatggtggagagaataaagaaccattgcacatcttacatccacagtaatgagtcataatattatacaaattcagagtgttattaaagaggtattgaaatattt

SEQ ID NO: 195165 - DNA, 1211 bp, Homo sapiens; identical to SEQ ID NO: 195158
  Payload ID: 18535
  Gene Name: tripartite motif containing 69
  Uniprot ID: Q86WT6
  ENST ID: ENST00000631740
  CDS Start-End: 319-1158

SEQ ID NO: 195166 - DNA, 391 bp, Homo sapiens; identical to SEQ ID NO: 195155
  Payload ID: 18535
  Gene Name: tripartite motif containing 69
  ENST ID: ENST00000631458
  CDS Start-End: 1-391

SEQ ID NO: 195167 - DNA, 2840 bp, Homo sapiens
  Payload ID: 18536
  Gene Name: tripartite motif containing 7
  Uniprot ID: Q9C029
  ENST ID: ENST00000274773
  CDS Start-End: 63-1598
gcgtcctgtgaggtccagtggccgcccaggcgcgaccagatctgggtgcgcggagagcgcgcatggcggctgtgggaccgcggaccggccccggaaccggcgccgaggctctagcgctggcggcagagctgcagggcgaggcgacgtgctccatctgcctagagctctttcgtgagccggtgtccgtcgagtgcggccacagcttctgccgcgcctgcatagggcgctgctgggagcgcccgggcgcggggtctgttggggccgccacccgcgcgccccccttcccactgccctgtccgcagtgccgcgagcccgcgcgccccagtcagctgcggcccaaccggcagctggcggcagtggccacgctcctgcggcgcttcagcctgcccgcggctgccccgggagagcacgggtctcaggcggccgcggcccgggcagcggctgcccgctgcgggcagcatggcgaacccttcaagctctactgccaggacgacggacgcgccatctgcgtggtgtgcgaccgcgcccgcgagcaccgcgagcacgccgtgctgccgctggacgaggcggtgcaggaggccaaggagctcttggagtccaggctgagggtcttgaagaaggaactggaggactgtgaggtgttccggtccacggaaaagaaggagagcaaggagctgctgaaacagatggcagcggagcaggagaaggtgggggcagagttccaggcactgagggctttcctggtggagcaggagggtcggctgctaggccgcctggaggaactgtcccgggaggtggcacagaagcagaatgagaacctggcccagctcggggttgagatcacccagctgtccaagctcagcagccagatccaggagacagctcaaaagcctgaccttgactttctccaggaattcaaaagcacgctgagcaggtgtagcaatgtgcctggccccaagccaaccacagtctcttctgagatgaagaataaagtctggaatgtttctctcaagacctttgtcttaaaagggatgctgaagaagttcaaagaggaccttcggggagagctggagaaagaggagaaagtggagctcaccttggatcccgacacggccaacccgcgcctcatcctctctctggatcttaagggcgtgcgcctcggcgagcgggcccaggacctgcccaaccacccctgccgcttcgacaccaacacccgcgtcctggcgtcctgcggcttctcctcgggccggcatcactgggaggtggaggtgggctctaaggacggctgggcctttggcgtggcccgcgagagcgtgcgccgaaagggcctgacgcccttcactcccgaggagggcgtctgggccctgcagctcaacggcggccagtactgggccgtgaccagccccgagcggtcgcccctcagctgcgggcacctgtcgcgcgtgcgggtggccctggacctggaggtgggagccgtgtccttctacgctgtggaggacatgcgccacctctacaccttccgcgtcaacttccaggagcgcgtgttcccgcttttctctgtttgctccacgggcacctacttgcgaatctggccttgaggggcactgctggggagctcctgtctctgggctgccggtgggaggggatgtcgcctccccagagatgcctggtccgtcttgggtctgccctccgtgctcctgacccctgctgcccaagagagcctgctacagacacaaccccgaggcaggagagtgactgtggccaaccgagcaggggaacaggggctttggactcctgagggtgttcccttcctgaggtcacatgtggatttggccagagccttcaggaggtggaggccggtgaggtcaggagcccagctctccagggggcttctgccctgactgggaagggtgcctggctccctaaaacaatgtcaaagccagtcctgctgttctctgttgccagggggcaggtctgggcctgggccaaccacgtttgttatcatggctgctgccttctggacagctgccagctctgccttgagaggttgtgggacctctggatccagctgacctgacaggtcatctactcagggaggagccctgtgctcccagctcagaggacagtctgggccagaactggaaggagacatctgtcccgtctttgagtgacaagcccgggacaacagccagtgggcatcacggctctccagcactccttagccggaggatacagagtgatgggtgcatcctgaccaatgcgacaaccaacacgtgctctcacaaacccctgactcccgcactttccagtgccaaagtacaaacgctgcttggataaggagagcaaagcttctggaactttatttactctttctttttaattttcttttaagagactgggtcttgctatgttgcccaggctggtcttgaactcctggcctcaagtgatcctccagtttccatctccctaagagctgggattacaggtgtgagccgctgtacccgaactttttttgtttttgcttctggaactttgaaacacaaaacacaagttggcacttacaattttaaagatgcagccagctctaaacaacacacagagcacaaatatgctcctgacggactcaggaaaatgccaacagcagagcaccctggtgccaaggccttctcagcccatgccctggagggcattcccctggccagcctcagccccttgtctacttgttctccagcttctgggtagctgggcttctggaagggtggcagtgggctactccctgctcagcgctcccctgggaagggggtgaggagatgaaaatgaaactatgagctgtctttgga

SEQ ID NO: 195168 - DNA, 1228 bp, Homo sapiens
  Payload ID: 18536
  Gene Name: tripartite motif containing 7
  Uniprot ID: Q9C029
  ENST ID: ENST00000334421
  CDS Start-End: 184-849
ccgtagtcaacgtgcgcctcccctcccggctcccagccgggcgcgccccgggctcgagtctctgcctgcccagtggcagccccgcccttcctctcccagtgggccctcggcgcccagctccgcgtcctgtgaggtccagtggccgcccaggcgcgaccagatctgggtgcgcggagagcgcgcatggcggctgtgggaccgcggaccggccccggaaccggcgccgaggctctagcgctggcggcagagctgcagggcgaggcgacgtgctccatctgcctagagctctttcgtgagccggtgtccgtcgagtgcggccacagcttctgccgcgcctgcatagggcgctgctgggagcgcccgggcgcggggtctgttggggccgccacccgcgcgccccccttcccactgccctgtccgcagtgccgcgagcccgcgcgccccagtcagctgcggcccaaccggcagctggcggcagtggccacgctcctgcggcgcttcagcctgcccgcggctgccccgggagagcacgggtctcaggcggccgcggcccgggcagcggctgcccgctgcgggcagcatggcgaacccttcaagctctactgccaggacgacggacgcgccatctgcgtggtgtgcgaccgcgcccgcgagcaccgcgagcacgccgtgctgccgctggacgaggcggtgcaggaggccaaggagctcttggagtccaggctgagggtcttgaagaaggaactggaggactgtgaggtgttccggtccacggaaaagaaggagagcaaggagctgctggtgagccaggcacccgcaggccccccgtgggacattacagaggcctgagaactcagcaccagggctcggtgtgtgtggtgttggagtgtgtgctatggaaccgcagaatcgatttcagaaagataatagagtccatattatatagggtgtccacataattgttgtacaaaccagagctttttaaagtgaaaagcagtgctaaaataattattgcaaaacaactggcttaaactggagctgtcccagcgaatcaggacgctcagtcactctgatattacgtaacataccagttagggcctgcggaagcatcttgtaatggaacacattactatttctgcagagaaacatggatattcaataagtgggaatattaatacaataaagagcctcatggcatgttttgtcaacaaaacagtagtgaaaaaaa

SEQ ID NO: 195169 - DNA, 2851 bp, Homo sapiens
  Payload ID: 18536
  Gene Name: tripartite motif containing 7
  Uniprot ID: Q9C029
  ENST ID: ENST00000393315
  CDS Start-End: 699-1610
tgcgcgacgtcccccacggacttggcgatgttcttcctgtctgttcggagcctctagcctggtctgcgtctccgcagctctctgcccgcgggaagtctccggcacagccacgcagccgctgcccccactcttatctctttccccgaagcgggctctgctcaaagtccccacctcgtggaactgagtgagaggacctcgccaagatgtccagggagggggctcccgggttaagccgcgcacctagagccgtctgactgtgccaacgctgtcgattctgggggccctttctttgctattttctcgctgagcctcagcgagggtgtgtgcaggggtgagggcggggcggggaggctcgggcggcagtccccagtctctccttgctggcccatcctgctccaactctcccagccacggggcttcctggtgggggggcggagagtagaggagacgactaggggtagggctgccggagcttgtgtttcagtctggctggtccagcagatgcttttggggaagcaagatcccgagaccttcagagtcacctcgcagtgtaacctgtagcctgtagagatgacttctacccggcctccccctcagagctcttggagtccaggctgagggtcttgaagaaggaactggaggactgtgaggtgttccggtccacggaaaagaaggagagcaaggagctgctgaaacagatggcagcggagcaggagaaggtgggggcagagttccaggcactgagggctttcctggtggagcaggagggtcggctgctaggccgcctggaggaactgtcccgggaggtggcacagaagcagaatgagaacctggcccagctcggggttgagatcacccagctgtccaagctcagcagccagatccaggagacagctcaaaagcctgaccttgactttctccaggaattcaaaagcacgctgagcaggtgtagcaatgtgcctggccccaagccaaccacagtctcttctgagatgaagaataaagtctggaatgtttctctcaagacctttgtcttaaaagggatgctgaagaagttcaaagaggaccttcggggagagctggagaaagaggagaaagtggagctcaccttggatcccgacacggccaacccgcgcctcatcctctctctggatcttaagggcgtgcgcctcggcgagcgggcccaggacctgcccaaccacccctgccgcttcgacaccaacacccgcgtcctggcgtcctgcggcttctcctcgggccggcatcactgggaggtggaggtgggctctaaggacggctgggcctttggcgtggcccgcgagagcgtgcgccgaaagggcctgacgcccttcactcccgaggagggcgtctgggccctgcagctcaacggcggccagtactgggccgtgaccagccccgagcggtcgcccctcagctgcgggcacctgtcgcgcgtgcgggtggccctggacctggaggtgggagccgtgtccttctacgctgtggaggacatgcgccacctctacaccttccgcgtcaacttccaggagcgcgtgttcccgcttttctctgtttgctccacgggcacctacttgcgaatctggccttgaggggcactgctggggagctcctgtctctgggctgccggtgggaggggatgtcgcctccccagagatgcctggtccgtcttgggtctgccctccgtgctcctgacccctgctgcccaagagagcctgctacagacacaaccccgaggcaggagagtgactgtggccaaccgagcaggggaacaggggctttggactcctgagggtgttcccttcctgaggtcacatgtggatttggccagagccttcaggaggtggaggccggtgaggtcaggagcccagctctccagggggcttctgccctgactgggaagggtgcctggctccctaaaacaatgtcaaagccagtcctgctgttctctgttgccagggggcaggtctgggcctgggccaaccacgtttgttatcatggctgctgccttctggacagctgccagctctgccttgagaggttgtgggacctctggatccagctgacctgacaggtcatctactcagggaggagccctgtgctcccagctcagaggacagtctgggccagaactggaaggagacatctgtcccgtctttgagtgacaagcccgggacaacagccagtgggcatcacggctctccagcactccttagccggaggatacagagtgatgggtgcatcctgaccaatgcgacaaccaacacgtgctctcacaaacccctgactcccgcactttccagtgccaaagtacaaacgctgcttggataaggagagcaaagcttctggaactttatttactctttctttttaattttcttttaagagactgggtcttgctatgttgcccaggctggtcttgaactcctggcctcaagtgatcctccagtttccatctccctaagagctgggattacaggtgtgagccgctgtacccgaactttttttgtttttgcttctggaactttgaaacacaaaacacaagttggcacttacaattttaaagatgcagccagctctaaacaacacacagagcacaaatatgctcctgacggactcaggaaaatgccaacagcagagcaccctggtgccaaggccttctcagcccatgccctggagggcattcccctggccagcctcagccccttgtctacttgttctccagcttctgggtagctgggcttctggaagggtggcagtgggctactccctgctcagcgctcccctgggaagggggtgaggagatgaaaatgaaactatgagctgtctttgg

SEQ ID NO: 195170 - DNA, 2320 bp, Homo sapiens
  Payload ID: 18536
  Gene Name: tripartite motif containing 7
  Uniprot ID: Q9C029
  ENST ID: ENST00000393319
  CDS Start-End: 778-1767
ctgcagcctgcctggaagctgaaggaaaggtgggggcattgtaggacaccttgaacccaggtctcccaacttcacaggactcccttcctccgcccaggagttttaaggaagaggaacttcctggtgggacatattgagtgccaaacgtgtgttcacataaaaaatcaagagatcagggcatgagtctgcatctgaaaactcgagtaaaaaatccggtgtatgctgttaatggaaagaacagaatatgacacttgcatgccgcatattctcacttcgttccttgggggtgtgctgctacctctggtcactggcatcggacttttcttccttctttctactttcctacatctcccaagttttgtattttgagcatgtgttagcattataactgctaaacaggaaagatggcctttaaaaagaaagtgaagtgtaaaagtttgagggtgatgaaataaatgtgcttgaggaagaaaaagcaatctcagtttaatcctatggttgccccaggaggcactaatttatcccttctgcttttcaagtgaggaagctgcagcttggcgtagttctggggggagtatgaagctgccttggtttaggtgatggagcacaggtccacagacatgtgtgggtgcatctgtggcaggggagaaaagagcatgtgtccagactacagcttgttcagagctgggacactgacaatagagcacgcactgcgtgcgtaggtgggtgtgtctccgatcctccagcagtgacagggacgaagccttgccctgtgggatgactcaggccactggccaaatgttatgtctccatgttcaagtccctctccaacttctcctcctgggacagaaacagatggcagcggagcaggagaaggtgggggcagagttccaggcactgagggctttcctggtggagcaggagggtcggctgctaggccgcctggaggaactgtcccgggaggtggcacagaagcagaatgagaacctggcccagctcggggttgagatcacccagctgtccaagctcagcagccagatccaggagacagctcaaaagcctgaccttgactttctccaggaattcaaaagcacgctgagcaggtgtagcaatgtgcctggccccaagccaaccacagtctcttctgagatgaagaataaagtctggaatgtttctctcaagacctttgtcttaaaagggatgctgaagaagttcaaagaggaccttcggggagagctggagaaagaggagaaagtggagctcaccttggatcccgacacggccaacccgcgcctcatcctctctctggatcttaagggcgtgcgcctcggcgagcgggcccaggacctgcccaaccacccctgccgcttcgacaccaacacccgcgtcctggcgtcctgcggcttctcctcgggccggcatcactgggaggtggaggtgggctctaaggacggctgggcctttggcgtggcccgcgagagcgtgcgccgaaagggcctgacgcccttcactcccgaggagggcgtctgggccctgcagctcaacggcggccagtactgggccgtgaccagccccgagcggtcgcccctcagctgcgggcacctgtcgcgcgtgcgggtggccctggacctggaggtgggagccgtgtccttctacgctgtggaggacatgcgccacctctacaccttccgcgtcaacttccaggagcgcgtgttcccgcttttctctgtttgctccacgggcacctacttgcgaatctggccttgaggggcactgctggggagctcctgtctctgggctgccggtgggaggggatgtcgcctccccagagatgcctggtccgtcttgggtctgccctccgtgctcctgacccctgctgcccaagagagcctgctacagacacaaccccgaggcaggagagtgactgtggccaaccgagcaggggaacaggggctttggactcctgagggtgttcccttcctgaggtcacatgtggatttggccagagccttcaggaggtggaggccggtgaggtcaggagcccagctctccagggggcttctgccctgactgggaagggtgcctggctccctaaaacaatgtcaaagccagtcctgctgttctctgttgccagggggcaggtctgggcctgggccaaccacgtttgttatcatggctgctgccttctggacagctgccagctctgccttgagaggttgtgggacctctggatccagctgacctgacaggtcatctactcagggaggagccctgtgctcccagctcagaggacagtctgggccagaactggaaggagaca

SEQ ID NO: 195171 - DNA, 1954 bp, Homo sapiens
  Payload ID: 18536
  Gene Name: tripartite motif containing 7
  Uniprot ID: Q9C029
  ENST ID: ENST00000422067
  CDS Start-End: 490-1401
tgcgcgacgtcccccacggacttggcgatgttcttcctgtctgttcggagcctctagcctggtctgcgtctccgcagctctctgcccgcgggaagtctccggcacagccacgcagccgctgcccccactcttatctctttccccgaagcgggctctgctcaaagtccccacctcgtggaactgagtgagaggacctcgccaagatgtccagggagggggctcccgggttaagccgcgcacctagagccgtctgactgtgccaacgctgtcgattctgggggccctttctttgctattttctcgctgagcctcagcgagggagctcttggagtccaggctgagggtcttgaagaaggaactggaggactgtgaggtgttccggtccacggaaaagaaggagagcaaggagctgctggtgagccaggcacccgcaggccccccgtgggacattacagaggcctgagaactcagcaccagggctcgaaacagatggcagcggagcaggagaaggtgggggcagagttccaggcactgagggctttcctggtggagcaggagggtcggctgctaggccgcctggaggaactgtcccgggaggtggcacagaagcagaatgagaacctggcccagctcggggttgagatcacccagctgtccaagctcagcagccagatccaggagacagctcaaaagcctgaccttgactttctccaggaattcaaaagcacgctgagcaggtgtagcaatgtgcctggccccaagccaaccacagtctcttctgagatgaagaataaagtctggaatgtttctctcaagacctttgtcttaaaagggatgctgaagaagttcaaagaggaccttcggggagagctggagaaagaggagaaagtggagctcaccttggatcccgacacggccaacccgcgcctcatcctctctctggatcttaagggcgtgcgcctcggcgagcgggcccaggacctgcccaaccacccctgccgcttcgacaccaacacccgcgtcctggcgtcctgcggcttctcctcgggccggcatcactgggaggtggaggtgggctctaaggacggctgggcctttggcgtggcccgcgagagcgtgcgccgaaagggcctgacgcccttcactcccgaggagggcgtctgggccctgcagctcaacggcggccagtactgggccgtgaccagccccgagcggtcgcccctcagctgcgggcacctgtcgcgcgtgcgggtggccctggacctggaggtgggagccgtgtccttctacgctgtggaggacatgcgccacctctacaccttccgcgtcaacttccaggagcgcgtgttcccgcttttctctgtttgctccacgggcacctacttgcgaatctggccttgaggggcactgctggggagctcctgtctctgggctgccggtgggaggggatgtcgcctccccagagatgcctggtccgtcttgggtctgccctccgtgctcctgacccctgctgcccaagagagcctgctacagacacaaccccgaggcaggagagtgactgtggccaaccgagcaggggaacaggggctttggactcctgagggtgttcccttcctgaggtcacatgtggatttggccagagccttcaggaggtggaggccggtgaggtcaggagcccagctctccagggggcttctgccctgactgggaagggtgcctggctccctaaaacaatgtcaaagccagtcctgctgttctctgttgccagggggcaggtctgggcctgggccaaccacgtttgttatcatggctgctgccttctggacagctgccagctctgccttgagaggttgtgggacctctggatccagctgacctgacaggtcatctactcagggaggagccctgtgctcccagctcagaggacagtctgggccagaactggaaggagaca

SEQ ID NO: 195172 - DNA, 8685 bp, Homo sapiens
  Payload ID: 18537
  Gene Name: tripartite motif containing 71, E3 ubiquitin protein ligase
  Uniprot ID: Q2Q1W2
  ENST ID: ENST00000383763
  CDS Start-End: 64-2670
gctctctcctcctcctcctcctcttcctctctggtctcctccctcctccgggctgggttgcaaatggcttcgttccccgagaccgatttccagatctgcttgctgtgcaaggagatgtgcggctcgccggcgccgctctcctccaactcgtccgcgtcgtcgtcctcctcgcagacgtccacgtcgtcggggggcggcggcgggggccctggggcggcggcgcgccgcctacacgtcctgccctgcctgcacgccttctgccgcccctgcctcgaggcgcaccggctgccggcggcgggcggcggcgcggcgggagagccgctcaagctgcgctgccccgtgtgcgaccagaaagtagtgctagccgaggcggcgggtatggacgcgctgccttcgtccgccttcctgcttagcaacctgctcgacgcggtggtggccactgccgacgagccgccgcccaagaacgggcgcgccggcgctccggcgggagcgggcggccacagcaaccaccggcaccacgctcaccacgcgcacccgcgcgcgtccgcctccgcgccgccactcccgcaggcgccgcagccgcccgcgccttcccgctcggcacccggcggccctgccgcttccccgtcggcgctgctgctccgccgtcctcacggctgcagctcgtgcgatgagggcaacgcagcttcttcgcgctgcctcgactgccaggagcacctgtgcgacaactgcgtccgagcgcaccagcgcgtgcgcctcaccaaggaccactacatcgagcgcggcccgccgggtcccggtgccgcagcagcggcgcagcagctcgggctcgggccgccctttcccggcccgcccttctccatcctctcagtgtttcccgagcgcctcggcttctgccagcaccacgacgacgaggtgctgcacctgtactgtgacacttgctctgtacccatctgtcgtgagtgcacaatgggccggcatgggggccacagcttcatctacctccaggaggcactgcaggactcacgggcactcaccatccagctgctggcagatgcccagcagggacgacaggcaatccagctgagcatcgagcaggcccagacggtggcggaacaggtggagatgaaggcgaaggttgtgcagtcggaggtcaaagccgtgacggcgaggcataagaaagccctggaggaacgcgagtgtgagctgctgtggaaggtagaaaagatccgccaggtgaaagccaagtctctgtacctgcaggtggagaagctgcggcaaaacctcaacaagcttgagagcaccatcagtgccgtgcagcaggtcctggaggagggtagagcgctagacatcctactggcccgagaccggatgctggcccaggtgcaggagctgaagaccgtgcggagcctcctgcagccccaggaagacgaccgagtcatgttcacaccccccgatcaggcactgtaccttgccatcaagtcttttggctttgttagcagcggggcctttgccccactcaccaaggccacaggcgatggcctcaagcgtgccctccagggtaaggtggcctccttcacagtcattggttatgaccacgatggtgagccccgcctctcaggaggcgacctgatgtcggctgtggtcctgggccctgatggcaacctgtttggtgcagaggtgagtgatcagcagaatgggacatacgtggtgagttaccgaccccagctggagggtgagcacctggtatctgtgacactgtgcaaccagcacattgagaacagccctttcaaggtggtggtcaagtcaggccgcagctacgtgggcattgggctcccgggcctgagcttcggcagtgagggtgacagcgatggcaagctctgccgcccttggggtgtgagtgtagacaaggagggctacatcattgtcgccgaccgcagcaacaaccgcatccaggtgttcaagccctgcggcgccttccaccacaaattcggcaccctgggctcccggcctgggcagttcgaccgaccagccggcgtggcctgtgacgcctcacgcaggatcgtggtggctgacaaggacaatcatcgcatccagatcttcacgttcgagggccagttcctcctcaagtttggtgagaaaggaaccaagaatgggcagttcaactacccttgggatgtggcggtgaattctgagggcaagatcctggtctcagacacgaggaaccaccggatccagctgtttgggcctgatggtgtcttcctaaacaagtatggcttcgagggggctctctggaagcactttgactccccacggggtgtggccttcaaccatgagggccacttggtggtcactgacttcaacaaccaccggctcctggttattcaccccgactgccagtcggcacgctttctgggctcggagggcacaggcaatgggcagttcctgcgcccacaaggggtagctgtggaccaggaagggcgcatcattgtggcggattccaggaaccatcgggtacagatgtttgaatccaacggcagcttcctgtgcaagtttggtgctcaaggcagcggctttgggcagatggaccgcccttccggcatcgccatcacccccgacggaatgatcgttgtggtggactttggcaacaatcgaatcctcgtcttctaattgcatttcctaggtttctgtgtttggggtgtgtgtgcgtgtctctctctctctctctctctttctctttctctctctttttgaatttcaaagaagaaacagtctcagggaaatttcttttttcttttttttttttaaagagaacaagaaaagtacaacattgcttaagtcctacctcatctttatttttttacagatgaatgtacttatcttttctgcagggattgagcctgtgaagtgataatttctatctacctcataaatctttacatttccttctgcaacaggccctcttcccctcctcagtggagtttgcatttccctcttcccctgcgtggggcatgatatgcacaagcctggcatctgtatggctgggagggcactggatgtgtgtggtggggtgtattctgtagattgagccaaggaaacacaaaaaaaaactactaagtaaaaaaacaaaaaactataaaacatggaaaaaataggatttgaaatgcataattatagaatacctgtgttcttgagaatactgtttatatggggtttagattatgttgtgttgttttgatctttttggaaaatcttctctttttaaatgctgcaacagagaaatttcctctgttctctgtttatacctcagtgtgtttaacatcctcttctgcatcgtttcttgatcttagacgttgtggctgtggcttgctagccaagaaaagcagacccttcatattttagggtatataatctttgtttcttttaagggagggtgtgtgcatgtttgtttcaaagccatcttgcacccaagtagtaaagctgaaaatgacacactgcctcccaaagaacctctccttttcacactttggtttcttaaaaaagtatatagatggtagctcaggatttttgattaaacatattctcaaaagttatgctttcttattttgctgttaggttataaagggttaaatggaaggaaaaaggaaattaacctcgttctcagagagagggttttcaggcatgggctgacgtggacatgaatgtgggtggacatgcgtgtgctgagggagtcagggagcacattaaagaacaaggcacccccaaactataggaactccacagaaagggcagggtctgccctgacccgcgagtgcatgttgttctgtagtgctaggggtttcttttcctaagaagagtaggcaaaggaaagaacttttattttacaagcacaattttttcctgctttgaaagttcagggaaatagaaggtttgaaagtcaaattaataccaacagcccagtcccacaccctctgcttgggtcactttttataggattgtttgcacccaggccatgctttaggacctcatggttaacatgaatccccccgccccctctccccccaaggcctttgaccataaaggatctagaaaccaaattgtcccaacctgaaatgtaggatgtaatgtcttttcttaaacctgtaactcggtaccaaagaatgaaaatttaaggctcccactgcagaactgtggggtagaatctgtgtcactttacaggattggttggttgtaagctggacttgggtacaaaacttgtgcttctgggcattgtctgtctttcaagtgcaaagcagatgtagctgataccctgcttgtcagaacccagtgggttcctgcaatgccccaaatactgaaataagaaccaaattctggaggagccctcctcagggaaaagagggactctcaaacaaacgtcagtgacttacaagggagacctcttgtttaaagacttatggatcaacttctgttcctctgtttaagagaaatttctattgcaaaatgggtatcgttttaaatgagcagaacagattaacaaatggagcaatttgtttctgttatcccaatagaaaaggagatgatggggacagtgtgacaagtcaatcaagttgcttttcccgtacacctcttttggacgtttaatttactactactacaagctactctgtctcttcccattgctttaattctagggtttctgagtgaccaaaatgggaaggaaaaaaaaaacctcatctcacagaggagaactgcatgcaataaaagattcaaaagttggaaagtagcttcaaactgctgctggctcccagctgctgttacagggtgggaaggtgttaggaaatgttgtttgttagaagctccttttactgtagaatttaatagtgaatccttccccaatgcctattcagttgccttttggccgttaagctctaagttctttggtaaagagttaatataattaaacatttttactgttttctattttggagtaacttggtgctgatcttccttccctttccccagctgcccaacaagccaccctttaaacaccaaagacaactggttttaaatgcttgaaaaaaattttattgaggagatggatcttgattaaaatcttttcatcatcattttcattctgctcttttctttctaatttccccagatgtaggaaaattttgggacctgaatgagaaatgttcttggtgcataacagtaactagagctccttatttgacattttactatggatgtgatcgaaaagccaagattttcgctccatggctgaaattatcaggtcttaatttacagacttgtaaatttgcaggcttagagcaactagaactatcccctgaaataggtgtgtaggtcagagatactacctctttgtcctcagtggtggtatatctatctccttacctttctgtacccaaaatggtgcatgactggtatttgagaaacatggtcacatttggaaagcttttgtttttaaaacattggcggtttttcctgcccgtggttgactcctgacccatagggattggtgcgaagcactttggagagtgtttattgtatgatgtgaaatgttctaaatcaaagaaagatgataaaagccaacatttggcagtccctagtgtgaaactgtgaaaagtacctgtgtttaaatgcataatctcctgcccgggtaatgccaggtagccaggagttgggtcaaagaagggagtcgtcatcctgatggaaaaaataaggtcctgggtattatgaggtaggagaataaaaaggtttctggggagtaagtatgacaattactagtccccatggaggtctgatctggtcaggtggcaagggttgggtggggtatgatgtaagctcagtttatgtgtggagatgcccattgggtttggatatataggtttgagtattgagatgtttaaaggacatctaacccataggtaaaaactacttttgcttgacactgacttaacatttcaaaagtgttatttttggtcccaagatctaatgctgtctcagaacatgtgccctgttgtggctgcaagtggcactcaagttgactagagcacagtgacctgggttgtaccccaagtgcactaactcctcaatgcccttttaagtctaacttatttgggaaacacataacaaagggtaccataaaccgaatccaaattacgtgttgggccaaaaatgttgccagaactgaggcactttgtgatggagttgcaagagatagcttgagatcggctcagtctgatttattctagttaagccaaagcttaattatttgaggaggaaagtcttttaggcttgaagcagcaaaatactgtttatatatgtgttaccttcctcgttggaagattctacgattgctctgttctggtaggtggtgaaagatatgccaaagttttaggcttgtttttctgatcttatttttttaatccagtggtgccaaaaagtatttagggtatgtttaaggtatatttaaaacatcactctgaatgagtttccaacagtctggggctgtataaaagtcacactcttgtacttgcaggtgatggtgtcacagggccagggcctccagagctctacggctttctctggttttctatagggccaagggcacaggacgcagcattccagaccacactgactgcttttgctgagtttctacctcacttgtggcaagtcatctacctcatgttagcatctgacaggtctcaaaaagaatagtattaatccagtgggcagtgggtgggagtgggaagctacctctaaaagaaatgttaccataaatctacaactgatttctcccaggagaaatgttctacttaccttgaaagagaaatgtcaggcaaatgtagtcataaatccaagtagttcttagcaatctggcttttccccctcaaaaagaattatgcataccattactgttgttcagtattatgaaactactggttaatctgacctattggaggacttaactacaaataaagacctttaggtctctttctcttcaagagaaaaatattttatctgtatttcgaatgtctgcaaataataccctttaggagcaattctaaaggtctagatcttggaaacatcaaatatttgaagggaatgagaatcctcttgacttcatgattgtatttgtagctctctggacccggcaggacgttcatcaccatgatgttgcaacaatcactgttttgactgagcagtgactgttgaagtgtgtattgctcttttgttttgtttttatttttttctaccaaaggtaacatgttgacgggttttttttttccttgtttattaaatacttgataaagttgagaagcacattaccaggatatactgtattgaccctcccacctctcttctgccctaatttttggttgtttggaagagaggagggtcctaagaccactgtcattatcatgaggggcttataaatgtcatggtgaagaaatacctcaatgatgtctatttttaaaactgatcttacgggttaacaagccagcctggtgggatattttccatcatcatttaaccaataatggttctaaaagttttgtgtatccacatggtcttagacctccttttaatgattgtattaacttacaagctcaggtagtatttttcttaagactctatctcagagcacactgactgaatgttgatgtgtgtagcaaagtgtttactttctttaaataaccagctctgtaactctgtaagttctttgtgtttctagcagtctgtgtagttgtctttcttcagaggaagatttttcacatttctggggttttcttgcttttagggtggtaagattcctttctttttttcccttttctcctaaaatcgatgcaggtaagggtgggtgggtaaggggtgttgttttttaactagcatgttagttatacttgggtgggtgggagggttgttaaactgaatcttgcttaatactgtccattagctctcatgccgggtcagcaaaatgctttaatttttaactgcagaacatgtgactcggttgagtctttttgtcttttttttttttaaataaacaattgggggaattaatgtgggcaagttgccttatgttagaatgactaagttaaacctcttaatttgtatttgtccaaggcagacatgatataaggaatatgcactaccgtagtaactcccctggccgcagaaaccacactgcaagcctgtccggggtggggtgctgactgccatttgccacttttaaatgggcactgccgtggtaatgtgaatcccatcaatgcagtagatgggtggggaaatgaagatttccccccaaacctttaggcaaaagtgagtttttgtttggttgattttgggtttttttcccccctcctcttttggctttcacattttaaatcttaaatgttactattgcaggccgcaggcatgacaggcaatgagcaggtgaagaaccaatggaaaagtgttcaaaaactcctgtgttagctaacaggcttctgaatgtatcactgtggtccacagagaaggctggaggaggtagcaaggagatgctgtatcagctactacagccttaaaacaaagttggtgtctctttggactttaaaattgttcctatgcagcttattttatttttgtttaatcaaataaacgagggtttttccatggcta

SEQ ID NO: 195173 - DNA, 8500 bp, Homo sapiens
  Payload ID: 18538
  Gene Name: tripartite motif containing 72, E3 ubiquitin protein ligase
  Uniprot ID: Q6ZMU5
  ENST ID: ENST00000322122
  CDS Start-End: 285-1718
ttttagaacggtttccggaagtgatgggagggattgggcagggcagctaaatatagtcctggggccatggctcagtctgggagggtcttccgctgagcactgtgtgcccatcacgcgtggtgtccactgccagctgcccctgtgagtccctgtccttgcttggagcctgctgcttgtctcagatccttggacccagccctgaccccagtccagctaagctcaaccctgaccggtcctccttcgagactctttcagcctaagatctccaaccagacctgcccgccatgtcggctgcgcccggcctcctgcaccaggagctgtcctgcccgctgtgcctgcagctgttcgacgcgcccgtgacagccgagtgcggccacagtttctgccgcgcctgcctaggccgcgtggccggggagccggcggcggatggcaccgttctctgcccctgctgccaggcccccacgcggccgcaggcactcagcaccaacctgcagctggcgcgcctggtggaggggctggcccaggtgccgcagggccactgcgaggagcacctggacccgctgagcatctactgcgagcaggaccgcgcgctggtgtgcggagtgtgcgcctcactcggctcgcaccgcggtcatcgcctcctgcctgccgccgaggcccacgcacgcctcaagacacagctgccacagcagaaactgcagctgcaggaggcatgcatgcgcaaggagaagagtgtggctgtgctggagcatcagctggtggaggtggaggagacagtgcgtcagttccggggggccgtgggggagcagctgggcaagatgcgggtgttcctggctgcactggagggctccttggaccgcgaggcagagcgtgtacggggtgaggcaggggtcgccttgcgccgggagctggggagcctgaactcttacctggagcagctgcggcagatggagaaggtcctggaggaggtggcggacaagccgcagactgagttcctcatgaaatactgcctggtgaccagcaggctgcagaagatcctggcagagtctcccccacccgcccgtctggacatccagctgccaattatctcagatgacttcaaattccaggtgtggaggaagatgttccgggctctgatgccagcgctggaggagctgacctttgacccgagctctgcgcacccgagcctggtggtgtcttcctctggccgccgcgtggagtgctcggagcagaaggcgccgccggccggggaggacccgcgccagttcgacaaggcggtggcggtggtggcgcaccagcagctctccgagggcgagcactactgggaggtggatgttggcgacaagccgcgctgggcgctgggcgtgatcgcggccgaggccccccgccgcgggcgcctgcacgcggtgccctcgcagggcctgtggctgctggggctgcgcgagggcaagatcctggaggcacacgtggaggccaaggagccgcgcgctctgcgcagccccgagaggcggcccacgcgcattggcctttacctgagcttcggcgacggcgtcctctccttctacgatgccagcgacgccgacgcgctcgtgccgctttttgccttccacgagcgcctgcccaggcccgtgtaccccttcttcgacgtgtgctggcacgacaagggcaagaatgcccagccgctgctgctcgtgggtcccgaaggcgccgaggcctgagccgccggacgggtagtggaggggcgcgggggcctgggttgaagcttaggtctccttggtcgggtctgacgggagaagggtggggagcgggttgccagggcccagggggctgggaactgggggatctcccagaatactgacaagcgtggggtaggactggcttggtggctcatgcctgtaatcccagcactttgggagacggaggcgggtggatcacctgaggtcaggagttcaagaccagcctggccaacatggtgaaactcctctctactgaaaatacaaaaatgagctgggcgcggtggcatacgcctgtaatcccagctagttgggaggctgaggcaggataattgcttgaacccaggaggtggaggttgcagtgagcagacattgcggcactgcactctagcctgggtgacaagagtgagactctgtctcaaaaaaaaaaaaaagtgtgggggttggcatggcctggggactgctggtgaggggttggagtgacgctggggacaagacccagtggggtagggagatctggagtcaggtcagtggggaaatcagaatttgggaaccaggaggcctgagaattccaggaagaaactaaggttgagcgagggagggacagggccaggttgggggattgatgggaggagcttgagaacctgtagataaggggctccttttgcctcacactcccctcctccttaggccttgggtcccccgctccagattcaccttacccaaaagccttctccttagttctccaccttaggcatgcattaaaatcacctttttaaagcccttagccatgacttgttaaagcatagggtgctaagtttctgatttagtaggttggacaggtcaaaaatgctcatttcttttttttatttcttttttttttttttttttttttttttgagacagagtcttgctctgtcactcaaggctagagtgcagtggtgccatctcggctcactgcaacctctgcctccagggttcaagcaattctcatgcctcagcctcccaagtagctgggactacagacgcccgccaccacacctggctatttatttttatttttagtaggggtttcactatgttggccaagctggtctcgaactcctgacctcaagtgattcacccgccttggcctcccatagtgctgggattacagacatgagccactgcacctggctgaaaatgctcatttttttttttttaatttagtttttgtagaaatggtgtctcgttacattgcccaggctgatcttgaactcttggcctcaggtgatcctcctgccttggccttccaagtgctgggattacaggtgtgagccaccacgccctgccaaaaatgtgcatttctagcaggttcccaggtgacgctgctggccacaggggctgacgctgcgggaagccctgacctagtgcacaacccattgggctcttcactgtcagtgtagaggcataggtccaaaatatgtttccccagtcaaaaacatgtaaggtttgcaccaggagtggaaggaaacaaacaaacataaaccaaagcaaagacacttaagggctgggtactcatgcctgtaaacccaacactttgggagtttgaggcaggaggctcatttgaggccaggagtttgagaccagcctggggaacatagtgagaccctgttgcaacaaaaaccagaaaaacaacaaaaagaagacattggaaaatggctggagctgattctaggtgaataaacaaccctcgacttaacttgctttgcctctgggatatgtttatcgagcgtcttgaacgttgaggaagccagccaagagaaagagcctgatgccaaggtcacactggtccctgctgctcatggggaagagaaggcccccaactagatgtcccagaactggccgctccccacttacttgctggttcacaccttctttggttttagcgcacagggcatttcttgggctctggagtaaccactgaggccagagtgagagtccctcttccctggagggagaggcctttggggatccagacaggcttctctcctgagggaagacgctggcctggggtcactcattttcacggggagggtgtgctggcgggatgggtggaagggcctggggccccggcagcccattgcggaggttttctcgggagatggtgggtatgggactaagggtgaaagggaagttgtgagttgggtaagaaaggcctgaggatctggcaggggaaggcggcacacctgggtgtgtctcccagaggaaggcctgtggagccctggcttcaggagacagaagagaggattaacggtagaagctctttcatgttagaaaataaaacaatatagctaagggattatttggttgtaaaatccaacaccattaataaaactgttatattctgactccttcctcattaaatccacatgaaaagacatgtgacctactgcaaggcctcctaattgccctccagcctttaatcctgacttggtaatgtttccaaaaatgcaaatgtggtcacgggactcagttgctcaaaactttcaacaactccctcttgcctacaggataaagcccccagtctttggcttagcatttgagctgttctgccattttttttgttggttggtttgtttgttttgtttgagacagagtctcgctctgtcgcccaggctggagtgcagtggtgtgatcaccgtaacctccgcctcctaggttcaagggattctcctgcctcagcctcccgagtagctgggattacaggtgcccgccaggctggtctcgaactcctgacctcaggtgatccacccattttggcctcccaaagtgctgggattacaggctggccttccagcttcatctgtttttagttaaaaaacaatttttttttttgagacaaggtcttgctctgtcgcacaggctggagtgcaatggtgtgattgtggctcactgcagccttgacctcctgggctcacatgatcctcccactccagcctcctgagtagataggatggcaggcacccatcaccatgcctgactattttttattttttgtattttggtagagatgaggtctcactatgttgctcatgctggtctcgagctcctggcctcaagcgatcctcccatcttggcttcccaaagtgttgggattacaggtgtgagccactgagcccagcccagcttcatcttttattttattattattttttgagatggagtctcaccgtgtcacccaggttagagtgcagtggtgtgatcttggctcactgcaacctctgcctcccaggttcaagtgatcctcctgcctcagcctcccgagtagctgggactataggcaggtgacactacgcctagctgatttttgtatttctagtggggacaggggcttcactatgttggccagcctggtctcgaactcctgacctcaggggatcccccaactcggcctcccaaagtactaggattacaggcttgaaccgccgcgcccagccccagcttcatcttaaaaagaaaagttctctgttttaatatctaacagggcaaatattgaaagataaaaccacataacaaaagctctttgggatcctagtgttggggaaaggctgctgtccattgactgtcactgaactctctgtcattgctcaggctaaggactggccacagtgagggagggacctgtggtctcctgtgttgctcctcaccctgtagactgtgggctgtgggctgtgtccagcctcaccttggatcaccgccctgtgcatgtctacactctggctatgctgaactgaactgctggggtctctgcacctccttttttttttttttttttttgagatgcagtcttgctctgtcgcccaggctggagtgcaatggtgctatctcagctcactgcaacctctgcctcccaggttcaagtgattctcctgcctcagcctccgcagtagctaggattacaggcacccaccaccacgccaggttagttttttcatttttatttgtatttttagtagaggcggggttttgccatgttggccaggctgatctcgaactcctgacctcaaatgatctgcccgcctcagcctcccaaagtgctgggattacaggcatgagctgtcgggcctggcccctgcacttcttttttaggaatgtcagttccctcccacttatccttcatggctctcccaaaacaccaccatttcctgtcctctcttgaccttctaggcctccaggaagaatcagttactctcctctctggatcgcccagcagctcctccaccatgtgtagcccacggcattgaattgtctacacacaggccatggtgtctggagggatggtggtatctgagacccaaagcctccttctgaggaaatgggtactctgagaagcagatgccaagataggattaaatgggcagagattttaggagggaagatgcccatgtgagggaagatggggagggccatcagaccgtgtcgcaagtctgctgttcgtgtgggagggagggagggaaggctcttgtggcgtctccggcagccagagccaccgtccaaacactcctgtgccttccgggacccgggctggctttagtctccctgcagagctgagtaatgtatgctgccttttgttggaattatatcaggaaactttctttcgaagctgccacaggttctttctgcgtatagttgccccagcttgagctgcatgcattgaaggaaatggcccatggctgactgagtgaggtgggctttgtgggaaaagctgcgtaatccaggtggtccttgtcgggtggggctgcctgacccaggcagggtctccctggggatgtaggaaggtgaaatgtgaacagagaaaggagttcctccagcacatgtgttctaaagcaccagcgtcccctccgtgagtccctcctctccacgggaacgctggaaacccccagaaactggctgccaagacatttcctgtgtttcctgacatctttaggtagcataatagcaaacttgaacctgccaaggccatgataaaactgcaagcaagaacatttatcgtggccaggtgcagtggctcacgcctgtaatcccagcacttttggaggttgaggcgggtgaatcacctgaggtcaggagttcgagaccagtctggtcaacatggtgaaaccccatctttactaaaaatacaaaaattagccaggcatggtggtgcatgcctgcaatcccagctactcaggaggctgaggcaggagaatcacttgaacctgggaggcagaggttccgatgagctgagatcgggccactgcattccagtctgggtgagagagttaaaacaggaattaaaagaaattaaagaatgtgtaagcaaaaactcagttgtatgtaagaaaaccccattcaccctgaggaagagaaagagctaaagtcctttaaaaattaactgcctgtttttctgtggatagtgagccttatctctctccctttcccaggcattgtgaagaccctgtttctctagctgtgcagctgcaaggtcactaggcagataaactcaagtcataaaacatgtttttccttgaaaagtaaaaaatgatgtaatgcatgtctcaactgaataactgtctttgtttcttgcttctgtaatatgcttccccctgcacagatctccccctgccccacaaaatgcttaaaaggtaaccggagccgggcgtggtggctcacgcctgtaatcccagcactttgggaggctgaggcaggcggatcatgaggtcaggagatcgagaccgtcctggttaacatgttgaaaccccgtctctactaaaaatacaaaaaattagccgggcgtggtggcaggcacctgtagtcccagctacttgggaggctgaggcaggagaatggcctgaacccgggaggcggagcttgcagtgagccgagatggcgccactacactccagcctgggtgacagagcgagactccgcctcaaaaaaaaaaaaaaaaaaaggtaaccggactctttgttcagggctcagtctttttggatgttaatctgaccgggccagtgcacctaactaaataataaataataagtatcctcctcaacctcttggtctctctgattcctaaattatcccactgcagaatgagactctgtctcaaaggaaaaaaaagaaaatttattgagaccttattatgcgtcaatagctctctattcagaatctcactgatcttcgcaaccctggatctcacaacaacgagagccccactaggttgcctcttttgttttgttttgttttttttttgagatggagtctcactgtctcccaggctggagtgcagtggcgtgatctcggctcactgcaacctccgccctctgggttcacgccattctcctgcctcagcctcccaagtagctgggactacaggcgcccgccaccatgcctggttaatttttttgtatttttagtagagacggggtttcaccatgtttgccaggatggtctccatctcctgacctcgtgatccgcccgcctcggcctcccaaagtgctgggattacaggcgtgagccaccgcgtccggcttaggttgcctcttatactgggttcacgcatcccctgggtgcatgacagtctgaccacaaaggaccccggtccacagaagcatgatgcatcttggagtatcgactttatgccaatattcttcttcttgatactggtggtggtgagaaagttgggtaatttaaccaaaagtaaaaatcaagatgtcacgttcccattaaaacaaacatagagtaca

SEQ ID NO: 195174 - DNA, 1573 bp, Homo sapiens
  Payload ID: 18538
  Gene Name: tripartite motif containing 72, E3 ubiquitin protein ligase
  Uniprot ID: Q6ZMU5
  ENST ID: ENST00000613872
  CDS Start-End: 215-1024
ctcagtctgggagggtcttccgctgagcactgtgtgcccatcacgcgtggtgtccactgccagctgcccctgtgagtccctgtccttgcttggagcctgctgcttgtctcagatccttggacccagccctgaccccagtccagctaagctcaaccctgaccggtcctccttcgagactctttcagcctaagatctccaaccagacctgcccgccatgtcggctgcgcccggcctcctgcaccaggagctgtcctgcccgctgtgcctgcagctgttcgacgcgcccgtgacagccgagtgcggccacagtttctgccgcgcctgcctaggccgcgtggccggggagccggcggcggatggcaccgttctctgcccctgctgccaggcccccacgcggccgcaggcactcagcaccaacctgcagctggcgcgcctggtggaggggctggcccaggtgccgcagggccactgcgaggagcacctggacccgctgagcatctactgcgagcaggaccgcgcgctggtgtgcggagtgtgcgcctcactcggctcgcaccgcggtcatcgcctcctgcctgccgccgaggcccacgcacgcctcaagacacagctgccacagcagaaactgcagctgcaggaggcatgcatgcgcaaggagaagagtgtggctgtgctggagcatcagctggtggaggtggaggagacagtgcgtcagttccggggggccgtgggggagcagctgggcaagatgcgggtgttcctggctgcactggagggctccttggaccgcgaggcagagcgtgtacggggtgaggcaggggtcgccttgcgccgggagctggggagcctgaactcttacctggagcagctgcggcagatggagaaggtcctggaggaggtggcggacaagccgcagactgagttcctcatgaaatactgcctggtgaccagcaggctgcagaagatcctggcagagtctcccccacccgcccgtctggacatccagctgccaattatctcctgacctcaagtgattcacccgccttggcctcccatagtgctgggattacagacatgagccactgcacctggctgaaaatgctcatttttttttttttaatttagtttttgtagaaatggtgtctcgttacattgcccaggctgatcttgaactcttggcctcaggtgatcctcctgccttggccttccaagtgctgggattacaggtgtgagccaccacgccctgccaaaaatgtgcatttctagcaggttcccaggtgacgctgctggccacaggggctgacgctgcgggaagccctgacctagtgcacaacccattgggctcttcactgtcagtgtagaggcataggtccaaaatatgtttccccagtcaaaaacatgtaaggtttgcaccaggagtggaaggaaacaaacaaacataaaccaaagcaaagacacttaagggctgggtactcatgcctgtaaacccaacactttgggagtttgaggcaggaggctcatttgaggccaggagtttgagaccagcctggggaacatagtgagaccctgttgc

SEQ ID NO: 195175 - DNA, 1358 bp, Homo sapiens
  Payload ID: 18539
  Gene Name: tripartite motif containing 73
  Uniprot ID: Q86UV7
  ENST ID: ENST00000323819
  CDS Start-End: 201-953
gagcatgatggggcatgtgcgggagcgccaggcggggcatgtaaccagagcgtgcggggcatgatggggcacggacatggggggttaggtggggcacgtaattggagctcgcggggcaggatggggcatctaactggagcgacagagagcacgatggggcacttacaggggccggaggctggcccgggcagtgagtgtggatggcttggcaggtgagcctgctggagctggaggaccggcttcagtgtcccatctgcctggaggtcttcaaggagtccctaatgctacagtgcggccactcctactgcaagggctgcctggtttccctgtcctaccacctggacaccaaggtgcgctgccccatgtgctggcaggtggtggacggcagcagctccttgcccaacgtctccctggcctgggtgatcgaagccctgaggctccctggggacccggagcccaaggtctgcgtgcaccaccggaacccgctcagccttttctgcgagaaggaccaggagctcatctgtggcctctgcggtctgctgggctcccaccaacaccacccggtcacgcccgtctccaccgtctgcagccgcatgaaggaggagctcgcagccctcttctctgagctgaagcaggagcagaagaaggtggatgagctcatcgccaaactggtgaaaaaccggacccgaatcgtcaatgagtcggatgtcttcagctgggtgatccgccgcgagttccaggagctgcgccacccggtggacgaggagaaggcccgctgcctggaggggatagggggtcacacccgtggcctggtggcctccctggacatgcagctggagcaggcccagggaacccgggagcggctggcccaagccgagtgtgtgctggaacagttcggcaatgaggaccaccatgagttcatctggaagttccactccatggcctccaggtaataaccttggagagagctcagccagggtctggtggctgcgggcacgggcatctcagctccactggttcctccattcagcttaaccagcgcctcccaagcagctgcctatagctggctctataactgagcctggggaagatagaggaaagtcacgtccctgccttcaagggtctcgcagacaggtggggaggcagatggtgaactgtgggtacctagaacagcagaagttcactcaagctacagaaatactagaggagggtagctcatgcctgcaatcccagtactttgggaggccaaggcaggagtattgctggaggccgggagttcgagaccagcctggccaatgtagtaacacccccgtctctacaaaaaatacaaaaataaaaaaattagttgggcatggtgg

SEQ ID NO: 195176 - DNA, 1425 bp, Homo sapiens
  Payload ID: 18539
  Gene Name: tripartite motif containing 73
  ENST ID: ENST00000450434
  CDS Start-End: 661-1020
ggatgacgtccttcagcacgccccggtcccccgagatgtccagcatcctctgacttaaccgctcgtacagggactgatggagaatgaaagccaggcctcagagccgcagacccacccggccacccctcagcgtctacgcccccgaaacgtctgggccctcacctggccgggggcgtcgtccccttccaggactccctggtttaacgcgcttccccccatgtcctagctgccctccctgtggcgtgagccttcggcctggtgcgccccgctgcccttcctggctgtgactctggtggggttccgaaggcccctttatgcccggcagacccctaccgacggcggcattacattctggggccacgaggaggcactcatcgtttcgttccaaccgccgccaacggccctggccctcgcgagctctggaactacagaggtcgcacggtggtggacggcagcagctccttgcccaacgtctccctggcctgggtgatcgaagccctgaggctccctggggacccggagcccaaggtctgcgtgcaccaccggaacccgctcagccttttctgcgagaaggaccaggagctcatctgtggcctctgcggtctgctgggctcccaccaacaccacccggtcacgcccgtctccaccgtctgcagccgcatgaaggaggagctcgcagccctcttctctgagctgaagcaggagcagaagaaggtggatgagctcatcgccaaactggtgaaaaaccggacccgaatcgtcaatgagtcggatgtcttcagctgggtgatccgccgcgagttccaggagctgcgccacccggtggacgaggagaaggcccgctgcctggaggggatagggggtcacacccgtggcctggtggcctccctggacatgcagctggagcaggcccagggaacccgggagcggctggcccaagccgagtgtgtgctggaacagttcggcaatgaggaccaccatgagttcatctggaagttccactccatggcctccaggtaataaccttggagagagctcagccagggtctggtggctgcgggcacgggcatctcagctccactggttcctccattcagcttaaccagcgcctcccaagcagctgcctatagctggctctataactgagcctggggaagatagaggaaagtcacgtccctgccttcaagggtctcgcagacaggtggggaggcagatggtgaactgtgggtacctagaacagcagaagttcactcaagctacagaaatactagaggagggtagctcatgcctgcaatcccagtactttgggaggccaaggcaggagtattgctggaggccgggagttcgagaccagcctggccaatgtagtaacacccccgtctctacaaaaaatacaaaaataaaaaaattagttgggcatggtgg

SEQ ID NO: 195177 - DNA, 1286 bp, Homo sapiens
  Payload ID: 18539
  Gene Name: tripartite motif containing 73
  ENST ID: ENST00000447409
  CDS Start-End: 140-889
ggcgtccagctgcacttcccacttctgactctgtgcctgctgttccctgctgggaagaagaaaagccagtgatgctggcttgaggccatagtgggaggcccagtggatcctgagaagctagcccgggcagtgagtgtggatggcttggcaggtgagcctgctggagctggaggaccggcttcagtgtcccatctgcctggaggtcttcaaggagtccctaatgctacagtgcggccactcctactgcaagggctgcctggtttccctgtcctaccacctggacaccaaggtgcgctgccccatgtgctggcaggtggtggacggcagcagctccttgcccaacgtctccctggcctgggtgatcgaagccctgaggctccctggggacccggagcccaaggtctgcgtgcaccaccggaacccgctcagccttttctgcgagaaggaccaggagctcatctgtggcctctgcggtctgctgggctcccaccaacaccacccggtcacgcccgtctccaccgtctgcagccgcatgaaggaggagctcgcagccctcttctctgagctgaagcaggagcagaagaaggtggatgagctcatcgccaaactggtgaaaaaccggacccgaatcgtcaatgagtcggatgtcttcagctgggtgatccgccgcgagttccaggagctgcgccacccggtggacgaggagaaggcccgctgcctggaggggatagggggtcacacccgtggcctggtggcctccctggacatgcagctggagcaggcccagggaacccgggagcggctggcccaagccgagtgtgtgctggaacagttcggcaatgaggaccaccatgagttcatctggttccactccatggcctccaggtaataaccttggagagagctcagccagggtctggtggctgcgggcacgggcatctcagctccactggttcctccattcagcttaaccagcgcctcccaagcagctgcctatagctggctctataactgagcctggggaagatagaggaaagtcacgtccctgccttcaagggtctcgcagacaggtggggaggcagatggtgaactgtgggtacctagaacagcagaagttcactcaagctacagaaatactagaggagggtagctcatgcctgcaatcccagtactttgggaggccaaggcaggagtattgctggaggccgggagttcgagaccagcctggccaatgtagtaacacccccgtctctacaaaaaatacaaaaataaaaaaattagttggg

SEQ ID NO: 195178 - DNA, 1321 bp, Homo sapiens
  Payload ID: 18539
  Gene Name: tripartite motif containing 73
  ENST ID: ENST00000430211
  CDS Start-End: 74-922
atctaactggagcgacagagagcacgatggggcacttacaggggccggaggctggcccgggcagtgagtgtggatggcttggcaggtgagcctgctggagctggaggaccggcttcagtgtcccatctgcctggaggtcttcaaggagtccctaatgctacagtgcggccactcctactgcaagggctgcctggtttccctgtcctaccacctggacaccaaggtgcgctgccccatgtgctggcaggtggtggacggcagcagctccttgcccaacgtctccctggcctgggtgatcgaagccctgaggctccctggggacccggagcccaaggtctgcgtgcaccaccggaacccgctcagccttttctgcgagaaggaccaggagctcatctgtggcctctgcggtctgctgggctcccaccaacaccacccggtcacgcccgtctccaccgtctgcagccgcatgaaggaggagctcgcagccctcttctctgagctgaagcaggagcagaagaaggtggatgagctcatcgccaaactggtgaaaaaccggacccgaatcgtcaatgagtcggatgtcttcagctgggtgatccgccgcgagttccaggagctgcgccacccggtggacgaggagaaggcccgctgcctggaggggatagggggtcacacccgtggcctggtggcctccctggacatgcagctggagcaggcccagggaacccgggagcggctggcccaagccgagtgtgtgctggaacagttcggcaatgaggaccaccatgagttcatctggaagttccactccatggcctccagattgacaaagactgaagaactggagaagaagtggcgaaacgggctcgcagcgtcgcattccctaccccagcaggtgcgcccgcagcgtcgcactccctagcccggcagaacgtgaagcagctgtacgcgctggtgtgcgaaacgcagcgctactccgccgtgctggatgccgtgatctccagcgccggcctcctcagtgcgaagaagctgcagccgcacctggccaagggtaggggcggggcggggaagtgaaccccgacggtcagcgctttgtcatctggtttcagccccgctgccgtgcacggcgggactggagcaagtcgctcacctgaaatgagtatgagcagaccttccctgggttacgaattgagatgggatgaaaatgctttaacttcgagtgttttgaaggattaaataaccgaagtacaaagtagtagtagcggagacagtaaggaagtcgggcgtggcggcgcgcacctgtggtcccagctactcggaa

SEQ ID NO: 195179 - DNA, 1169 bp, Homo sapiens
  Payload ID: 18539
  Gene Name: tripartite motif containing 73
  Uniprot ID: Q86UV7
  ENST ID: ENST00000437796
  CDS Start-End: 20-772
gcccgggcagtgagtgtggatggcttggcaggtgagcctgctggagctggaggaccggcttcagtgtcccatctgcctggaggtcttcaaggagtccctaatgctacagtgcggccactcctactgcaagggctgcctggtttccctgtcctaccacctggacaccaaggtgcgctgccccatgtgctggcaggtggtggacggcagcagctccttgcccaacgtctccctggcctgggtgatcgaagccctgaggctccctggggacccggagcccaaggtctgcgtgcaccaccggaacccgctcagccttttctgcgagaaggaccaggagctcatctgtggcctctgcggtctgctgggctcccaccaacaccacccggtcacgcccgtctccaccgtctgcagccgcatgaaggaggagctcgcagccctcttctctgagctgaagcaggagcagaagaaggtggatgagctcatcgccaaactggtgaaaaaccggacccgaatcgtcaatgagtcggatgtcttcagctgggtgatccgccgcgagttccaggagctgcgccacccggtggacgaggagaaggcccgctgcctggaggggatagggggtcacacccgtggcctggtggcctccctggacatgcagctggagcaggcccagggaacccgggagcggctggcccaagccgagtgtgtgctggaacagttcggcaatgaggaccaccatgagttcatctggaagttccactccatggcctccaggtaataaccttggagagagctcagccagggtctggtggctgcgggcacgggcatctcagctccactggttcctccattcagcttaaccagcgcctcccaagcagctgcctatagctggctctataactgagcctggggaagatagaggaaagtcacgtccctgccttcaagggtctcgcagacaggtggggaggcagatggtgaactgtgggtacctagaacagcagaagttcactcaagctacagaaatactagaggagggtagctcatgcctgcaatcccagtactttgggaggccaaggcaggagtattgctggaggccgggagttcgagaccagcctggccaatgtagtaacacccccgtctctacaaaaaatacaaaaataaaaaaattagttggg

SEQ ID NO: 195180 - DNA, 1350 bp, Homo sapiens
  Payload ID: 18540
  Gene Name: tripartite motif containing 74
  Uniprot ID: Q86UV6
  ENST ID: ENST00000285805
  CDS Start-End: 201-953
gagcatgatggggcatgtgcgggagcgccaggcggggcatgtaaccagagcgtgcggggcatgatggggcacggacatggggggttaggtggggcacgtaattggagctcgcggggcaggatggggcatctaactggagcgacagagagcacgatggggcacttacaggggccggaggctggcccgggcagtgagtgtggatggcttggcaggtgagcctgctggagctggaggactggcttcagtgtcccatctgcctggaggtcttcaaggagtccctaatgctacagtgcggccactcctactgcaagggctgcctggtttccctgtcctaccacctggacaccaaggtgcgctgccccatgtgctggcaggtggtggacggcagcagctccttgcccaacgtctccctggcctgggtgatcgaagccctgaggctccctggggacccggagcccaaggtctgcgtgcaccaccggaacccgctcagccttttctgcgagaaggaccaggagctcatctgtggcctctgcggtctgctgggctcccaccaacaccacccggtcacgcccgtctccaccgtctgcagccgcatgaaggaggagctcgcagccctcttctctgagctgaagcaggagcagaagaaggtggatgagctcatcgccaaactggtgaaaaaccggacccgaatcgtcaatgagtcggatgtcttcagctgggtgatccgccgcgagttccaggagctgcgccacccggtggacgaggagaaggcccgctgcctggaggggatagggggtcacacccgtggcctggtggcctccctggacatgcagctggagcaggcccagggaacccgggagcggctggcccaagccgagtgtgtgctggaacagttcggaaatgaggaccaccatgagttcatctggaagttccactccatggcctccaggtaataaccttggagagagctcagccagggtctggtggctgcgggcacgggcatctcagctccactggttcctccattcagcttaaccagcgcctcccaagcagctgcctatagctggctctataactgagcctggggaagatagaggaaagtcacgtccctgccttcaagggtctcgcagacaggtggggaggcagatggtgaactgtgggtacctagaacagcagaagttcactcaagctacagaaatactagaggagggtagctcatgcctgcaatcccagtactttgggaggccaaggcaggagtattgctggaggccgggagttcgagaccagcctggccaatgtagtaacacccccgtctctacaaaaaatacaaaaataaaaaaattagttggg

SEQ ID NO: 195181 - DNA, 1286 bp, Homo sapiens
  Payload ID: 18540
  Gene Name: tripartite motif containing 74
  Uniprot ID: Q86UV6
  ENST ID: ENST00000395244
  CDS Start-End: 140-889
ggcgtccagctgcacttcccacttctgactctgtgcctgctgttccctgctgggaagaagaaaagccagtgatgctggcttgaggccatagtgggaggcccagtggatcctgagaagctagcccgggcagtgagtgtggatggcttggcaggtgagcctgctggagctggaggactggcttcagtgtcccatctgcctggaggtcttcaaggagtccctaatgctacagtgcggccactcctactgcaagggctgcctggtttccctgtcctaccacctggacaccaaggtgcgctgccccatgtgctggcaggtggtggacggcagcagctccttgcccaacgtctccctggcctgggtgatcgaagccctgaggctccctggggacccggagcccaaggtctgcgtgcaccaccggaacccgctcagccttttctgcgagaaggaccaggagctcatctgtggcctctgcggtctgctgggctcccaccaacaccacccggtcacgcccgtctccaccgtctgcagccgcatgaaggaggagctcgcagccctcttctctgagctgaagcaggagcagaagaaggtggatgagctcatcgccaaactggtgaaaaaccggacccgaatcgtcaatgagtcggatgtcttcagctgggtgatccgccgcgagttccaggagctgcgccacccggtggacgaggagaaggcccgctgcctggaggggatagggggtcacacccgtggcctggtggcctccctggacatgcagctggagcaggcccagggaacccgggagcggctggcccaagccgagtgtgtgctggaacagttcggaaatgaggaccaccatgagttcatctggttccactccatggcctccaggtaataaccttggagagagctcagccagggtctggtggctgcgggcacgggcatctcagctccactggttcctccattcagcttaaccagcgcctcccaagcagctgcctatagctggctctataactgagcctggggaagatagaggaaagtcacgtccctgccttcaagggtctcgcagacaggtggggaggcagatggtgaactgtgggtacctagaacagcagaagttcactcaagctacagaaatactagaggagggtagctcatgcctgcaatcccagtactttgggaggccaaggcaggagtattgctggaggccgggagttcgagaccagcctggccaatgtagtaacacccccgtctctacaaaaaatacaaaaataaaaaaattagttggg

SEQ ID NO: 195182 - DNA, 1353 bp, Homo sapiens
  Payload ID: 18541
  Gene Name: tripartite motif containing 77
  Uniprot ID: I1YAP6
  ENST ID: ENST00000398290
  CDS Start-End: 1-1353
atggcttctgctatcacgcagtgttctaccagtgagctcacctgctcgatctgcacagactatttgacagaccctgtcaccatttgttgtgggcacagattttgtagtccctgtctctgcctcttgtgggaagatacactaactcctaattgctgccctgtgtgcagggaaatatcacagcaaatgtacttcaaacgcattatttttgctgagaaacaagttattcctacaagagaatcagtcccctgccagttatcaagctctgccatgctgatctgtaggagacaccaggaaatcaagaacctcatctgtgaaactgataggagcctgctgtgttttctatgctctcaatccccaaggcatgctactcacaaacactatatgacaagggaggctgatgaatactataggaagaaactcctgattcaaatgaagtccatctggaaaaaaaaacagaaaaatcaaagaaatctaaacagagagaccaacataatcggaacatgggaagtttttataaatttgcggagcatgatgatcagtgctgaatatcctaaggtgtgtcaatacctccgtgaagaagagcaaaagcacgtagagagcctggcaagagaaggcaggataatttttcagcaactcaagagaagtcaaactagaatggctaagatgggtatactcctgagagaaatgtatgagaaactgaaggaaatgagctgtaaagcagatgtgaacctgcctcaggatttgggagacgtaatgaaaaggaatgagtttctgaggctggccatgcctcagcctgtgaacccacagctcagtgcatggaccatcactggggtgtcagaaaggcttaacttcttcagagtgtatatcaccttggatcgtaagatatgcagtaatcacaagcttctgttcgaagacctaaggcatttgcagtgcagccttgatgatacagacatgtcctgtaatccaacaagtacacagtatacttcttcatggggagctcagatcctcagctctggcaaacattactgggaggtggatgtgaaagactcttgtaattgggttataggactttgcagagaagcctggacaaagaggaatgacatgcgacttgactctgagggtatctttctactcctgtgtctcaaagtggatgaccatttcagtctcttctctacctccccactgttacctcactatattccaaggccccaaggctggctaggggtgttcctggattatgaatgtgggatagtgagctttgttaatgttgcccaaagttccctcatttgtagtttcctctcacgcatcttctattttcctctcagacctttcatttgccacggatctaaataa

SEQ ID NO: 195183 - DNA, 705 bp, Homo sapiens
  Payload ID: 18541
  Gene Name: tripartite motif containing 77
  ENST ID: ENST00000534392
  CDS Start-End: 1-705
tccccaaggcatgctactcacaaacactatatgacaagggaggctgatgaatactataggaagaaactcctgattcaaatgaagtccatctggaaaaaaaaacagaaaaatcaaagaaatctaaacagagagaccaacataatcggaacatgggaagatttgggagacgtaatgaaaaggaatgagtttctgaggctggccatgcctcagcctgtgaacccacagctcagtgcatggaccatcactggggtgtcagaaaggcttaacttcttcagagtgtatatcaccttggatcgtaagatatgcagtaatcacaagcttctgttcgaagacctaaggcatttgcagtgcagccttgatgatacagacatgtcctgtaatccaacaagtacacagtatacttcttcatggggagctcagatcctcagctctggcaaacattactgggaggtggatgtgaaagactcttgtaattgggttataggactttgcagagaagcctggacaaagaggaatgacatgcgacttgactctgagggtatctttctactcctgtgtctcaaagtggatgaccatttcagtctcttctctacctccccactgttacctcactatattccaaggccccaaggctggctaggggtgttcctggattatgaatgtgggatagtgagctttgttaatgttgcccaaagttccctcatt

SEQ ID NO: 195184 - DNA, 2831 bp, Homo sapiens
  Payload ID: 18542
  Gene Name: tripartite motif containing 8
  Uniprot ID: Q9BZR9
  ENST ID: ENST00000302424
  CDS Start-End: 123-1778
agcgaccgtcggggccggctggggccggagctcggggctcggtgggcctacagcggctccggacggacccccggggctggggagtcggggaggcctgccccggccccctgcccgcggccgccatggcggagaattggaagaactgcttcgaggaggagctcatctgccctatctgcctgcacgttttcgtggagccagtgcagctgccgtgcaaacacaacttctgccggggctgcatcggcgaggcgtgggccaaggacagcggcctcgtacgctgcccagagtgcaaccaggcctacaaccagaagccgggcctggagaagaacctgaagctcaccaacatcgtggagaagttcaatgccctgcacgtggagaagccgccggcggcgctgcactgcgtgttctgccgccgcggccccccgctgcccgcgcagaaggtctgcctgcgctgcgaggcgccctgctgccagtcccacgtgcagacgcacctgcagcagccctccaccgcccgcgggcacctcctggtggaggcggacgacgtgcgggcctggagctgcccgcagcacaacgcctaccgcctctaccactgcgaggccgagcaggtggccgtgtgccagtactgctgctactacagcggcgcgcatcagggacactcggtgtgcgacgtggagatccgaaggaatgaaatccggaagatgctcatgaagcagcaggaccggctggaggagcgagagcaggacattgaggaccagctgtacaaactcgagtcagacaagcgcctggtggaggagaaagtgaaccaactgaaggaggaagttcggctgcagtacgagaagctgcaccagctgctggacgaggacctgcggcagacagtggaggtcctagacaaggcccaggccaagttctgcagcgagaacgcagcgcaggcgctgcacctcggggagcgcatgcaggaggccaagaagctgctgggctccctgcagctgctctttgataagacggaggatgtcagcttcatgaagaacaccaagtctgtgaaaatcctgatggacaggacccagacctgcacgagcagcagcctttcccccactaagatcggccacctgaactccaagctcttcctgaacgaagtggccaagaaggagaagcagctgcggaaaatgctagaaggccccttcagcacgccggtgcccttcctgcagagtgtccccctgtacccttgcggcgtgagcagctctggggcggaaaagcgcaagcactcaacggccttcccagaggccagtttcctagagacgtcgtcgggccctgtgggcggccagtacggggcggcgggcacagccagcggtgagggccagtctgggcagcccctggggccctgcagctccacgcagcacttggtggccctgccgggcggcgcccaaccagtgcactcaagccccgtgttccccccatcgcagtatcccaatggctccgccgcccagcagcccatgctcccccagtatggcggccgcaagattctcgtctgttctgtggacaactgttactgttcttccgtggccaaccatggcggccaccagccctacccccgctccggccactttccctggacagtgccctcgcaggagtactcacacccgctcccgcccacaccctccgtcccccagtcccttcccagcctggcggtcagagactggcttgacgcctcccagcagcccggccaccaggatttctacagggtgtatgggcagccgtccaccaaacactacgtgacgagctaacgccacgcaggcggcggggcgctggggaatcttcctccccagcccccgggctcgggagttatgcatccagagacctgcccttctaccttcctcgcctcccctcttcctcattccattgccccaggtcttttccttttggattttgttttggttttggctttgtttttgatttttttttattatgaatctcctggacgcagaggtgacagtgggagctggcctgggccaggacggcaggtggccctggagatgggaaagtgtctgtgtcgaggcgctgagctctctctctgtttctccttttttcctctactccttccccttcacacccccgtggctggaaggaacctcggcttccctgaaagcttgggggtcccacccttcttaccccacccgggaggaacgcccagggccccgggcttgtttctcctcttgttttccttttgggcagtttgatcactgatcgagtaaggaatgacctttagattgtgcgacttttgtttttgtttttttaaatttttttaaaccaagaatgatttctcctgcttccttctcctcaccatcttcccagacggagttcaaaggccacttctcaagcagcttttggcaccttcagcctcagagtggaatcttttaaagacaggacccctatgtccaggaaaggggaaaaggaactttgccaatgatagtgaccacagcaaaagcaaataataataatattaataataataaagagaaataaaataataaaataaaaaacaatagcacagcccttgttgaggtcagcagggaggaggggctgcccggagttgggtccttgcctggattttgacacagcaacttcctgtagtgagcactttgtatgaatcgtggacttcctgttctcaaggcgcaggtatttattctgtatctgtctagagcacacaccaaaatccaaccttctaataaacatgatggcgcagtcccactccctgcctcgcctgttcccctatcccccccaggcctgggatcttcaggcgtcggtgtggggaggggcccctgccctccttgccttga

SEQ ID NO: 195185 - DNA, 891 bp, Homo sapiens
  Payload ID: 18542
  Gene Name: tripartite motif containing 8
  ENST ID: ENST00000462202
  CDS Start-End: 1-891
gcactgcgtgttctgccgccgcggccccccgctgcccgcgcagaaggtctgcctgcgctgcgaggcgccctgctgccagtcccacgtgcagacgcacctgcagcagccctccaccgcccgcgggcacctcctggtggaggcggacgacgtgcgggcctggagctgcccgcagcacaacgcctaccgcctctaccactgcgaggccgagcaggtggccgtgtgccagtactgctgctactacagcggcgcgcatcagggacactcggtgtgcgacgtggagatccgaaggaatgaaatccgggagaaagtgaaccaactgaaggaggaagttcggctgcagtacgagaagctgcaccagctgctggacgaggacctgcggcagacagtggaggtcctagacaaggcccaggccaagttctgcagcgagaacgcagcgcaggcgctgcacctcggggagcgcatgcaggaggccaagaagctgctgggctccctgcagctgctctttgataagacggaggatgtcagcttcatgaagaacaccaagtctgtgaaaatcctgatggacaggacccagacctgcacgagcagcagcctttcccccactaagatcggccacctgaactccaagctcttcctgaacgaagtggccaagaaggagaagcagctgcggaaaatgctagaaggccccttcagcacgccggtgcccttcctgcagagtgtccccctgtacccttgcggcgtgagcagctctggggcggaaaagcgcaagcactcaacggccttcccagaggccagtttcctagagacgtcgtcgggccctgtgggcggccagtacggggcggcgggcacagccagcggtgagggccagtctgggcagcccctggggccctg

SEQ ID NO: 195186 - DNA, 5284 bp, Homo sapiens
  Payload ID: 18543
  Gene Name: tripartite motif containing 9
  Uniprot ID: Q9C026
  ENST ID: ENST00000298355
  CDS Start-End: 1123-3255
aaactacgggcactcagaaatagacaaactgttcttgcctcaaccgaaccaaaggcccagcgggcctcgaaaaagctcagccaggtgctttgggaggccgcgaggaggaagaaggatccgtggaaggaagcacgttcacaccacggcactgaggcctctgggccgagctataatttaaagcatgaaacgaaggggtcatagattctgactaatgctgaccatttccatcggttacccagttgaatctcatgtcgacactaggaaatcgactttatacatgctctttaggaaacgagggacgcaggatgaaagaagccaagagtgtcgccagggcttgcgccagcgccgtcagactcccgggatgggggagctccagggcacggcgtcagcggattcacggagaaggagaaaagccccactgccgtgcagaagcctaggcccgggtgagacgcctgcgaaggctgccagcagcggaagagaaggggcgtcctccgtgctgcgcagcactcgcccgcggtaggtgggcgcggagctcagagctgggagccaaacgcaaacgctggcgagaagccccagccccctccggcagcccactcgctgcggggaggggtttctcacgcccccagctcctgggagactgcaccggaggtcggaagtaagccgggcgaggatgaatcatcccgcctaactcctccttcccggtcccctagcctccgcacgccggcccccttcagagatcttgcagccgcgagcgaagactgccctatcctcagactctaccgaaccccctgtggcctgcggagacgaggagacggacgggtctggtggccaatgagagcttcgatctcttgccccccgcccaatgggccgctgctcatgggccggggcgggactaggagggcaggtaggggcggtccgggctggcgcgcggcgcggcggctacgcggctgcggctcacagagctagcgcctctctgggtgtccgtgccagtgctgcgcgggaaggcaccaccaccacagccgccgccgctggccagggtgctggacaagacgggcccgtcggccacctcgccagctcaggcacccgctgcagccgtcgctgtctcctcccagaccggtccccatggaggagatggaagaggagttgaaatgccccgtgtgcggctccttctatcgggagcccatcatcctgccctgctctcacaatttgtgtcaggcgtgcgcccgcaacatcctggtgcagaccccagagtctgaatccccccagagccatcgggccgcgggctccggggtctccgactatgactatctggacctggacaagatgagcctatacagcgaggcggacagcggctatggctcctacggggggttcgccagcgcccccactaccccgtgccagaagtcccccaacggcgtccgcgtgtttcccccggctatgccgccaccggccacccacttgtcaccggccctggccccggtgccccgcaactcctgtatcacctgcccccagtgtcaccgcagcctcatcctggatgaccgggggctccgcggcttccccaagaatcgcgtactggaaggggtaattgaccgctaccagcagagcaaagccgcggccctcaagtgccagctctgcgagaaggcgcccaaggaagccaccgtcatgtgcgaacagtgcgatgtcttctactgcgatccgtgccgcctgcgctgccacccgccccgggggcccctagccaagcaccgcctggtgcccccggcccagggtcgtgtgagccggaggctgagcccacgcaaggtctccacctgcacagaccacgagctggagaaccacagcatgtactgcgtgcaatgcaagatgcccgtgtgctaccagtgcttggaggagggcaaacactccagccacgaagtcaaggctctgggggccatgtggaaactacataagagccagctctcccaggcgctgaacggactgtcagacagggccaaagaagccaaggagtttctggtacagctgcgcaacatggtccagcagatccaggagaacagtgtggagtttgaagcctgtctggtggcccaatgtgatgccctcatcgatgccctcaacagaagaaaagcccagctgctggcccgcgtcaacaaggagcatgagcacaagctgaaggtggttcgagatcagatctctcactgcacagtgaaattgcgccagaccacaggtctcatggagtactgcttggaggtgattaaggaaaatgatcctagtggttttttgcagatttctgacgccctcataagaagagtgcacctgactgaggatcagtggggtaaaggcacactcactccaaggatgaccacggactttgacttgagtctggacaacagccctctgctgcaatccatccaccagctggatttcgtgcaagtgaaagcttcctctccagtcccagcaacccctatcctacagctggaggaatgttgtacccacaacaacagcgctacgttgtcctggaaacagccacctctgtccacggtgcccgccgatggatacattctggagctggatgatggcaacggtggtcaattccgggaggtgtatgtggggaaggagacaatgtgcactgtggatggtcttcacttcaacagcacatacaacgctcgggtcaaggccttcaacaaaacaggagtcagcccgtacagcaagaccctggtcctccaaacgtctgaggtggcctggtttgctttcgaccctggctcggcgcactcggacatcatcctctccaatgacaacctgacagtgacctgtagtagctatgatgaccgggtggtgctagggaagactggcttctccaagggcatccactactgggagctcacggtagatcgctatgacaaccaccctgatcctgcctttggtgtggctcgcatggacgtgatgaaggatgtgatgttaggaaaagacgacaaagcttgggcaatgtatgtggacaataaccggagctggttcatgcacaacaactcgcacaccaacagaactgagggagggatcacaaaaggggccacaattggggtcctcctcgacttaaatagaaaaaacttgacattttttatcaacgatgaacaacaaggtcccatagcatttgataacgtggagggcctcttcttccctgcggtcagcctgaacaggaacgtgcaggtcacgctgcacaccgggctcccagtccccgacttctactccagcagagcatcaatagcctaaggatgtgccgtggaggcgccagctgcctgttcttacctccgcctgcgagagccacagcaaggagctcagccagccgtggtggggtgcagagttggcaggagtgggagaaggaggagagaaaagctggtcctctgcagtctttacacccacagctctgcccttttccctttcaacctctcctccgctgtcatgcctgcttccgcttccatgtccaacaattctaaccaacaaaggacctagacagcccaccaagtcacttggttcccactcccagattttgcttttatttaacttaattttttatgtaggtgagttatattttctttcttttctgatcaggttattggtgacttactggactggcaccgccaggagaaaattctcctgctaactttttttcttaagctttctgtcaaacaatgaggttgtagggggaggtagggaagaatgagctgaatttgtagcatacagcttacctgctagaatgttcttaccctcttacctctcctgtagcgttagctctgcagagctaagctttgggagaatgaatctatcactgagaagttttactactcattgaagcacaaaaatatccgctacacaggttcacatcagggtaggatcgttaggatggctctataattaggataggccagaaccctggccactgtataaaattggaaagtctctaagacacaggcaaaccaggggacttaatgatttggttcgtttatttaataaaagcttttaattgagaacctactattgaccaggcactgttcaagacactagaacattatgttctagacactgtggggacacagtggtgaacagacaggcatggtctctgcccttcggagcttatattccagtaggagaaaaagcaaaaataaaataattataaatggtcatatgtactagaaaggaaatgggcaagggtcaaagagactcatgggcaagatctttcaggcttcctagaatgatgctaaaaatccacacattctggccatagcaccagaaatgtaccaactcaatgccttttcagctgcactatttaattatggtacctgctgccactcatcacagagcccttcttggtagaaatgatgtcagcattcttatttgctgatgctgctatgataccacgccttaaaaattgacagttgaaaaaaaaaagagtgaccagagggcaaaggacccattctcagtaatgggagatcttgagttgcagtccacagcattcacattctcaggataaacatgcttgtctccatatatactatctgtgcctgttatgaatgaaaaatccatccactctgctgccattcacagcctaattttctggagtagtccaaacaatgtttggaaaaacatgggactgtatgtcattactatgactgatagcagaataataatgcatcttacttctatatagagatagacttacataggttacccttgaaattcattagtttgtcataaagttttaggaaaggtaggacccggaaagaagttctaattagttgtctaaatatttttcagtgagccaagaaattcaccatgaaaaaacaagaataacaaatagaagggaagagataggatgggaaagctaacaaattaaagttttggcaaaaaggaatatatgtaaatagctaattatttacttttgtgcttactttatttagattatttctatcagttacaatctttttctagttaagtgtacctaatttatggaatgggtgctatcctgtttatgtgtgtcttggtttttcttggctacagaaaaactgttgcagggcaacactagtttgatatttgatttactctccaatgagactcaatggctgggccgtggtagactcatagttcctcttgttctttattaaattcatcctgctaattagatttctagtgacttgtaacatgtagtttacactgaattgcaattacagatgcatacaactactatactagaaaaaattgtcatttctgatgtgccaataaatgatttttatgagagaataaa

SEQ ID NO: 195187 - DNA, 3312 bp, Homo sapiens
  Payload ID: 18543
  Gene Name: tripartite motif containing 9
  Uniprot ID: Q9C026
  ENST ID: ENST00000338969
  CDS Start-End: 391-2799
agagatcttgcagccgcgagcgaagactgccctatcctcagactctaccgaaccccctgtggcctgcggagacgaggagacggacgggtctggtggccaatgagagcttcgatctcttgccccccgcccaatgggccgctgctcatgggccggggcgggactaggagggcaggtaggggcggtccgggctggcgcgcggcgcggcggctacgcggctgcggctcacagagctagcgcctctctgggtgtccgtgccagtgctgcgcgggaaggcaccaccaccacagccgccgccgctggccagggtgctggacaagacgggcccgtcggccacctcgccagctcaggcacccgctgcagccgtcgctgtctcctcccagaccggtccccatggaggagatggaagaggagttgaaatgccccgtgtgcggctccttctatcgggagcccatcatcctgccctgctctcacaatttgtgtcaggcgtgcgcccgcaacatcctggtgcagaccccagagtctgaatccccccagagccatcgggccgcgggctccggggtctccgactatgactatctggacctggacaagatgagcctatacagcgaggcggacagcggctatggctcctacggggggttcgccagcgcccccactaccccgtgccagaagtcccccaacggcgtccgcgtgtttcccccggctatgccgccaccggccacccacttgtcaccggccctggccccggtgccccgcaactcctgtatcacctgcccccagtgtcaccgcagcctcatcctggatgaccgggggctccgcggcttccccaagaatcgcgtactggaaggggtaattgaccgctaccagcagagcaaagccgcggccctcaagtgccagctctgcgagaaggcgcccaaggaagccaccgtcatgtgcgaacagtgcgatgtcttctactgcgatccgtgccgcctgcgctgccacccgccccgggggcccctagccaagcaccgcctggtgcccccggcccagggtcgtgtgagccggaggctgagcccacgcaaggtctccacctgcacagaccacgagctggagaaccacagcatgtactgcgtgcaatgcaagatgcccgtgtgctaccagtgcttggaggagggcaaacactccagccacgaagtcaaggctctgggggccatgtggaaactacataagagccagctctcccaggcgctgaacggactgtcagacagggccaaagaagccaaggagtttctggtacagctgcgcaacatggtccagcagatccaggagaacagtgtggagtttgaagcctgtctggtggcccaatgtgatgccctcatcgatgccctcaacagaagaaaagcccagctgctggcccgcgtcaacaaggagcatgagcacaagctgaaggtggttcgagatcagatctctcactgcacagtgaaattgcgccagaccacaggtctcatggagtactgcttggaggtgattaaggaaaatgatcctagtggttttttgcagatttctgacgccctcataagaagagtgcacctgactgaggatcagtggggtaaaggcacactcactccaaggatgaccacggactttgacttgagtctggacaacagccctctgctgcaatccatccaccagctggatttcgtgcaagtgaaagtcccagcaacccctatcctacagctggaggaatgttgtacccacaacaacagcgctacgttgtcctggaaacagccacctctgtccacggtgcccgccgatggatacattctggagctggatgatggcaacggtggtcaattccgggaggtgtatgtggggaaggagacaatgtgcactgtggatggtcttcacttcaacagcacatacaacgctcgggtcaaggccttcaacaaaacaggagtcagcccgtacagcaagaccctggtcctccaaacgtctgaggacacagattcagaagaacagaccctcccttttccagtgccttcggaaagattgccgctccgtagaatgagtcctttctcctccacccttaatctacaacccagcttccccgggagatcctactttgatttccgatcctcaccccaccagctgagcttgcattcctctttacagtctctcaatgcaccgggatgcaattttgagacacaatctgcaccttactctcaattagttgacattaaaaagctgttggcagtggcctggtttgctttcgaccctggctcggcgcactcggacatcatcctctccaatgacaacctgacagtgacctgtagtagctatgatgaccgggtggtgctagggaagactggcttctccaagggcatccactactgggagctcacggtagatcgctatgacaaccaccctgatcctgcctttggtgtggctcgcatggacgtgatgaaggatgtgatgttaggaaaagacgacaaagcttgggcaatgtatgtggacaataaccggagctggttcatgcacaacaactcgcacaccaacagaactgagggagggatcacaaaaggggccacaattggggtcctcctcgacttaaatagaaaaaacttgacattttttatcaacgatgaacaacaaggtcccatagcatttgataacgtggagggcctcttcttccctgcggtcagcctgaacaggaacgtgcaggtaagcaccctgcccctgaggttaaacagctgttgctggctaccggttcaaaggctgcccagggccgttcaatccaaccgaagagagggaagctgacagcgtaaggcccagaccaagatatgaaggagaggaggagagaaagggatcagcactggcaacttattttattccacgccaagcataagcaccttctttatacttggacgcagactagttaatagcacataggaaactagaattctcttcatggttggctaatgatcatctctgtagctctagtttcacctctaaatagaaacgaaagcctttaaccaactggcatgaaaacaaatagaatgacttaacaaagctcaggagtgcctgagaagaggtgagggtgtaagactgaagcattagtatcattatcagaaaatctgagcatcttctctgcactcttgtttggctctgttaggtcctaaggggtagaaaacatagtccctacctacaacttagtcaattattatttattatagaataaaacaacagcttctcatttattcattcagcaaatatctatagaatgcctttaatgtgccaggcacagttataagtgtctgggatacatcagtg

SEQ ID NO: 195188 - DNA, 3726 bp, Homo sapiens
  Payload ID: 18543
  Gene Name: tripartite motif containing 9
  Uniprot ID: Q9C026
  ENST ID: ENST00000360392
  CDS Start-End: 138-1790
gccagtgctgcgcgggaaggcaccaccaccacagccgccgccgctggccagggtgctggacaagacgggcccgtcggccacctcgccagctcaggcacccgctgcagccgtcgctgtctcctcccagaccggtccccatggaggagatggaagaggagttgaaatgccccgtgtgcggctccttctatcgggagcccatcatcctgccctgctctcacaatttgtgtcaggcgtgcgcccgcaacatcctggtgcagaccccagagtctgaatccccccagagccatcgggccgcgggctccggggtctccgactatgactatctggacctggacaagatgagcctatacagcgaggcggacagcggctatggctcctacggggggttcgccagcgcccccactaccccgtgccagaagtcccccaacggcgtccgcgtgtttcccccggctatgccgccaccggccacccacttgtcaccggccctggccccggtgccccgcaactcctgtatcacctgcccccagtgtcaccgcagcctcatcctggatgaccgggggctccgcggcttccccaagaatcgcgtactggaaggggtaattgaccgctaccagcagagcaaagccgcggccctcaagtgccagctctgcgagaaggcgcccaaggaagccaccgtcatgtgcgaacagtgcgatgtcttctactgcgatccgtgccgcctgcgctgccacccgccccgggggcccctagccaagcaccgcctggtgcccccggcccagggtcgtgtgagccggaggctgagcccacgcaaggtctccacctgcacagaccacgagctggagaaccacagcatgtactgcgtgcaatgcaagatgcccgtgtgctaccagtgcttggaggagggcaaacactccagccacgaagtcaaggctctgggggccatgtggaaactacataagagccagctctcccaggcgctgaacggactgtcagacagggccaaagaagccaaggagtttctggtacagctgcgcaacatggtccagcagatccaggagaacagtgtggagtttgaagcctgtctggtggcccaatgtgatgccctcatcgatgccctcaacagaagaaaagcccagctgctggcccgcgtcaacaaggagcatgagcacaagctgaaggtggttcgagatcagatctctcactgcacagtgaaattgcgccagaccacaggtctcatggagtactgcttggaggtgattaaggaaaatgatcctagtggttttttgcagatttctgacgccctcataagaagagtgcacctgactgaggatcagtggggtaaaggcacactcactccaaggatgaccacggactttgacttgagtctggacaacagccctctgctgcaatccatccaccagctggatttcgtgcaagtgaaagcttcctctccagtcccagcaacccctatcctacagctggaggaatgttgtacccacaacaacagcgctacgttgtcctggaaacagccacctctgtccacggtgcccgccgatggatacattctggagctggatgatggcaacggtggtcaattccgggaggtgtatgtggggaaggagacaatgtgcactgtggatggtcttcacttcaacagcacatacaacgctcgggtcaaggccttcaacaaaacaggagtcagcccgtacagcaagaccctggtcctccaaacgtctgagggtaaggcccttcagcagtatccctcagagcgagaactgcgtggcatctaaagtggctggcaagcccggaggtaaccccaccactgcccacattcctgaagtgtttccatgacttgctctgcattctgcacagagccgctgttcctctcctgcctttagagagcctatggtatgtggatgtgatcaaaccaaagattccacatcggcagttccaatggcttgggccggcggcttcctttgataacaatctaaataagctgcagttgaagaagctgaaaaatgaaggcctgaatgtgcccctggtgtgtaagacaaatgtatctaggctctagagcaggctcccattctccaccgatacacatcatgtgccagttttgcccagatgattctaaattactctgtagtacttgcttgttctgagggtgggacctaggttctttccagtcgtggatttgtatgactgaatgtgtttcaaatgggtggtggggtgctagagctgtttagagagggcctgttggctgctcctggcttacccacttagactgcctccgtttcatacccaaagcggaggccgtcagcaccaggattgagacttcctgtgggcaccaaacaggaagagaccagcaacttcgcattacccgccattttcatctttgccagtcccttcagtcttggctaggctaccgagagccaccatacaaggttcatctctagagaatttttgcttcttagctatactttaaatattttggtcatcaaagacaagtaatgtgtctcagatgagaggcttgaatttgatggccagatataacctctgaggcttttaacattttcattttaagagtaagcaagacacatgaaattaaacctacaaggaggtatttgtggctggtgccaaagcattctgacactttggggtgtcattttaatcaaagaaatcacccccccacctcaccgggattctccataacttccctctgcagaactaattatgttgattttgttcaagttcaagatgttagctaaaagaactatggtggtgttttttttcccacttcccacaaacctcaacatgtgccagtcaccctaaaatgcttcacatggttaaaaacaagcacaattttgaatcctacagcaaggatgaaaggcccctagccgtgaaaacagtgctttggggagcagttgtcagtctaagtgatgctattccaagagaaggatatgctgagggaaaatgcccacatgacctgttcccatttggagtacagtgatgtggtagctacagcttcccccagaattatcattttagcaccttctctcagggatgacctatcagtttgagagcagttgcctcttttctcaaaataccatactaactgctaaagccctccaagagtctttcctagatgcaacgcagaaggcccttgctggtgatggcctcatttcccatgtgtgtacaaggtggtttgattgaagagtgaagtgcatgcctgcagagcagagagaaatttgtagcaatgttgctaatatgtgttatcagatctgcgggaaaactatttctattcataatacatcatgggaatcatactattctggtaaaaatcagttattagcataacagcctgagcacttatgtctctcgtttcatcctgcaggaggatgtagcgcctcagtttattttaatgttcataagattatggtgtctaatttaataaattacaggattggaactgcgatccttggtaccacagtcacagaactgggggtcattttctagatgaaacaaacggaacaagttctcttccaacaaagaaactgtactgtagaaattaatttcctccatgaattttatatattgtgtacaaatataaggtatgtatctgaatacaaagaaaagcctatcatcatatagatatcagtattctctgttactgcacagaagtaattttctcatgatgaaataaagttcacacacatactttctccataa

SEQ ID NO: 195189 - DNA, 1797 bp, Homo sapiens
  Payload ID: 18544
  Gene Name: tripartite motif family-like 1
  Uniprot ID: Q8N9V2
  ENST ID: ENST00000332517
  CDS Start-End: 141-1547
acagaagagataagggtttcttgtcataacaacataggaacaggtcacccgcgtgttactcaaaactgtaggacggcagtgagggctttgctaatcccagaacagaggtgtaacctggctgcatatccagcctcgagaaaatgtctacagcagatctgatggagaacctcagggaggaactcacctgtttcatctgcttagactatttcagcagcccagtgaccaccgagtgtgggcacagcttttgtctggtgtgtctcctcaggagctgggaggaacataacacacctttatcttgtcctgagtgctggaggaccttggagggcccgcatttccagtcaaacgagcgtctggggaggctggccagcatcgccaggcagctccggtcccaggtgctgcagagcgaggatgagcagggcagctacgggaggatgcccaccactgccaaggcgctctccgatgacgagcagggtggaagcgccttcgtagcccagagccatggtgcaaacagagtgcatctctccagcgaggctgaggagcatcacagagagaaactccaggaaatcctgaatcttttgcgtgtaaggagaaaggaagctcaggctgtactaacccatgagaaggagagagtgaaactgtgccaggaagaaacaaagacttgtaaacaggttgttgtgtcagaatacatgaaaatgcaccagttcctgaaggaagaggagcagctgcaactccagctactagaacaggaagagaaagagaacatgaggaagctgaggaacaatgagatcaaactgacccagcaaatcagaagcctaagcaaaatgatcgcacagattgagtcctcaagtcaaagctcggctttcgaatctcttgaggaagtgagaggagccctggaaaggagcgagccactcttgcttcagtgtccagaggccaccaccacagagctgagtctgtgccgcatcacgggaatgaaggagatgctaagaaaattcagcacggagataacgctggacccagccacagctaatgcctatctcgtgttgtcggaggatctgaagagtgtgaaatatgggggaagcagacagcagctacccgacaacccggaaagatttgaccagtctgcgactgtgctgggtactcagatcttcaccagtgggagacactactgggaggtggaggtgggaaacaagaccgagtgggaagtgggcatctgcaaggactctgtgagcagaaaggggaatctccccaagccacctggggacctgttctcactaataggtttaaaaatcggagatgattacagcctctgggtctcgtcacctttgaaaggtcagcacgtcagagagcctgtgtgtaaggttggtgtcttcctggactatgaatctggacatatagcattctacaacgggacggatgaatccctcatctacagcttcccgcaggcttctttccaagaggccctcaggcctatcttttccccctgcctcccaaatgaggggacaaacacagaccctctcaccatctgctcactgaacagccacgtctgaggggcgtgccctgagccgtcacagcgggcgatgtctgagaccaagacacaactattaagacgatgaaggcatcgacagtattaatgtcaggtgatctgaaataaactcccgtaaccccaccccacccccaagagtttccattaacttgatcccattatgaacagccacattacacaatcaacttcaaccccaatagaagagagctgatcatattctgtgtctttaagtaaatgtattctctgggctaccc

SEQ ID NO: 195190 - DNA, 1305 bp, Homo sapiens
  Payload ID: 18545
  Gene Name: tripartite motif family-like 2
  ENST ID: ENST00000326754
  CDS Start-End: 1-1269
tgcttccagtcccaggagcacaaacatcacatggtgtgtgggatacaagaggctgctgagaattacaggaagttattccaggaaatattgaacacatcgagggagaaacttgaagcagctaaaagcatattgactgatgagcaagaaagaatggcgatgattcaggaagaggaacaaaattttaaaaagatgattgagtctgagtatagtatgagactccggttgttgaatgaagagtgtgagcagaatctccagagacagcaggaatgcatatctgacttgaacctgagagaaacccttctgaatcaagcgatcaagcttgccaccgagctagaggagatgttccaggaaatgctacagagactgggccgtgtggggagagagaacatggagaaactgaaggagagtgaagccagggcttctgaacaggtccgcagcctcctaaagctcatcgtggagcttgagaaaaagtgtggggaaggcaccttggcattgctcaagtgccttgatcttgaaattcggcctccagaactgcgagaaatgaatttctgctgtgcagaagctactcagtctatgaatgcaaaatactctttagaaaggagcaagtcactgctgcttgagcatctggagcccgctcatatcacagacctgagtttatgccacataagaggactcagcagcatgttcagagtactccagagacatttaacattggatcctgaaacagctcatccctgcctggcactatctgaggacctgagaactatgagattgagacatgggcagcaggatggggctggcaacccagaaagattggatttcagtgccatggtgctggctgcggagagcttcacctcagggaggcactactgggaggtggacgtggaaaaggcaaccaggtggcaagtgggcatataccacggctctgcagacgcgaagggcagcacggccagagcttccggagagaaagtcttgctcacggggtcggtgatggggaccgagtggactctctgggtcttcccccctctgaaaaggctcttcctggaaaagaagttggacacagttggcgttttccttgactgcgaacacgggcagatatcattctacaatgtgaccgagatgtccctcatttacaatttctcccattgcgccttccaaggagctctcaggcctgtgttttccctctgtatcccaaatggagacacaagtccagactccctcaccatcttacaacatggtccttcttgtgatgctactgttagcccttaatcttctgtgtgtaaaatccaagaccacgagacacca

SEQ ID NO: 195191 - DNA, 1006 bp, Homo sapiens
  Payload ID: 18545
  Gene Name: tripartite motif family-like 2
  ENST ID: ENST00000503475
  CDS Start-End: 1-357
gaagaggaacaaaattttaaaaagatgattgagtctgagtatagtatgagactccggttgttgaatgaagagtgtgagcagaatctccagagacagcaggaatgcatatctgacttgaacctgagagaaacccttctgaatcaagcgatcaagcttgccaccgagctagaggagatgttccaggaaatgctacagagactgggccgtgtggggagagagaacatggagaaactgaaggagagtgaagccagggcttctgaacaggtccgcagcctcctaaagctcatcgtggagcttgagaaaaagtgtggggaaggcaccttggcattgctcaaggagcaagtcactgctgcttgagcatctggagcccgctcatatcacagacctgagtttatgccacataagaggactcagcagcatgttcagagtactccagagacatttaacattggatcctgaaacagctcatccctgcctggcactatctgaggacctgagaactatgagattgagacatgggcagcaggatggggctggcaacccagaaagattggatttcagtgccatggtgctggctgcggagagcttcacctcagggaggcactactgggaggtggacgtggaaaaggcaaccaggtggcaagtgggcatataccacggctctgcagacgcgaagggcagcacggccagagcttccggagagaaagtcttgctcacggggtcggtgatggggaccgagtggactctctgggtcttcccccctctgaaaaggctcttcctggaaaagaagttggacacagttggcgttttccttgactgcgaacacgggcagatatcattctacaatgtgaccgagatgtccctcatttacaatttctcccattgcgccttccaaggagctctcaggcctgtgttttccctctgtatcccaaatggagacacaagtccagactccctcaccatcttacaacatggtccttcttgtgatgctactgttagcccttaa

SEQ ID NO: 195192 - DNA, 1639 bp, Homo sapiens
  Payload ID: 18545
  Gene Name: tripartite motif family-like 2
  Uniprot ID: Q8N7C3
  ENST ID: ENST00000512729
  CDS Start-End: 226-1539
aagcaggcagctgccagaaatttgttggatttgaggagtccagagcgccgacccgctctgtctgcgtggacttatttccttggatcttcgtggactctgaagttgccaagtgtgtgtgcctgctccagaaaacaaaggaagccaccattttttctcattcacagtgcagggagatacctcagtagaagcatacagtccagtcttcaactagggacccctaccaggatgtccaaaaggctcagccctcagttacagcacaacatcacagaagatgcctattgtgaaacacacctggaaccaacacggctgttctgtgatgttgaccaaatcacactctgcagcaaatgcttccagtcccaggagcacaaacatcacatggtgtgtgggatacaagaggctgctgagaattacaggaagttattccaggaaatattgaacacatcgagggagaaacttgaagcagctaaaagcatattgactgatgagcaagaaagaatggcgatgattcaggaagaggaacaaaattttaaaaagatgattgagtctgagtatagtatgagactccggttgttgaatgaagagtgtgagcagaatctccagagacagcaggaatgcatatctgacttgaacctgagagaaacccttctgaatcaagcgatcaagcttgccaccgagctagaggagatgttccaggaaatgctacagagactgggccgtgtggggagagagaacatggagaaactgaaggagagtgaagccagggcttctgaacaggtccgcagcctcctaaagctcatcgtggagcttgagaaaaagtgtggggaaggcaccttggcattgctcaagaatgcaaaatactctttagaaaggagcaagtcactgctgcttgagcatctggagcccgctcatatcacagacctgagtttatgccacataagaggactcagcagcatgttcagagtactccagagacatttaacattggatcctgaaacagctcatccctgcctggcactatctgaggacctgagaactatgagattgagacatgggcagcaggatggggctggcaacccagaaagattggatttcagtgccatggtgctggctgcggagagcttcacctcagggaggcactactgggaggtggacgtggaaaaggcaaccaggtggcaagtgggcatataccacggctctgcagacgcgaagggcagcacggccagagcttccggagagaaagtcttgctcacggggtcggtgatggggaccgagtggactctctgggtcttcccccctctgaaaaggctcttcctggaaaagaagttggacacagttggcgttttccttgactgcgaacacgggcagatatcattctacaatgtgaccgagatgtccctcatttacaatttctcccattgcgccttccaaggagctctcaggcctgtgttttccctctgtatcccaaatggagacacaagtccagactccctcaccatcttacaacatggtccttcttgtgatgctactgttagcccttaatcttctgtgtgtaaaatccaagaccacgagacaccagaaagttggagaacaagactttgaaagaatttgtgtaaactaacccaataaaaagcgttccagg

SEQ ID NO: 195193 - DNA, 1242 bp, Homo sapiens
  Payload ID: 18545
  Gene Name: tripartite motif family-like 2
  ENST ID: ENST00000503141
  CDS Start-End: 1-357
gaagaggaacaaaattttaaaaagatgattgagtctgagtatagtatgagactccggttgttgaatgaagagtgtgagcagaatctccagagacagcaggaatgcatatctgacttgaacctgagagaaacccttctgaatcaagcgatcaagcttgccaccgagctagaggagatgttccaggaaatgctacagagactgggccgtgtggggagagagaacatggagaaactgaaggagagtgaagccagggcttctgaacaggtccgcagcctcctaaagctcatcgtggagcttgagaaaaagtgtggggaaggcaccttggcattgctcaaggagcaagtcactgctgcttgagcatctggagcccgctcatatcacagacctgagtttatgccacataagaggactcagcagcatgttcagagtactccagactgtttatggagcgagtcacaaacacagagaagatgtttaaaactgaagctatgcacagttacctgggggcagtgaaggagaatatactacttgaaagaagaagtcccaggaccaagccctgaaagatcacaatagttagaggctgggcagaaagagatgagaggaacagtcagagataggaagaagacgtattcatgcaggtgtgaggaattcattgagcctgcgtgttctcagcgacatttaacattggatcctgaaacagctcatccctgcctggcactatctgaggacctgagaactatgagattgagacatgggcagcaggatggggctggcaacccagaaagattggatttcagtgccatggtgctggctgcggagagcttcacctcagggaggcactactgggaggtggacgtggaaaaggcaaccaggtggcaagtgggcatataccacggctctgcagacgcgaagggcagcacggccagagcttccggagagaaagtcttgctcacggggtcggtgatggggaccgagtggactctctgggtcttcccccctctgaaaaggctcttcctggaaaagaagttggacacagttggcgttttccttgactgcgaacacgggcagatatcattctacaatgtgaccgagatgtccctcatttacaatttctcccattgcgccttccaaggagctctcaggcctgtgttttccctctgtatcccaaatggagacacaagtccagactccctcaccatcttacaacatggtccttcttgtgatgctactgttagcccttaa

SEQ ID NO: 195194 - DNA, 1329 bp, Homo sapiens
  Payload ID: 18546
  Gene Name: tripartite motif-containing 51
  Uniprot ID: Q9BSJ1
  ENST ID: ENST00000244891
  CDS Start-End: 222-1151
tgccatctctgtgtccccttaagcatgtctgttatgagcttccttgacttcacacctctcagatttgacaaacatgaggagaaacaaagcaaactctcttttctgtgggttaatttgtctctcattttgggtccttcgtatatcagagtgtgaatgatactttattgtcctcacttgtgcttcaattcgtggctgttttgcaggaggagctcctaaaaaaaatgcagtctttatgggaaaaagcttgtgaaaatctcagaaatctgaacatggaaaccacaagaaccagatgctggaaggattatgtgagtttaaggatagaagcaatcagagctgaatatcagaagatgcctgcatttctccatgaagaagagcaacatcacttggaaaggctgcgaaaggagggcgaggacatttttcagcaactcaatgaaagcaaagccagaatggaacattccagggagcttttaagaggaatgtatgaggatctgaagcaaatgtgccataaagcagatgtggagctactccaggcttttggagacatattacacaggtatgagtctctgctgctgcaagtgtctgagcctgtgaatccagagctcagtgcagggcccatcactggactgctggacagcctcagtggattcagagttgattttactctgcagcctgaaagagccaatagtcatatcttcctgtgtggagatttgagaagcatgaatgttggatgtgaccctcaagatgatcccgatatcactggaaaatctgaatgttttcttgtatggggggctcaggctttcacatctggcaaatattattgggaggttcatatgggggactcttggaattgggcttttggtgtctgtaacaattattggaaagagaagagacagaatgacaagatagatggagaggagggactctttcttcttggatgtgttaaggaggacactcactgcagtctctttaccacctccccacttgtggtgcaatatgttccaagacctaccagcacagtaggattattcctggattgtgaaggtagaaccgtgagctttgttgatgttgatcaaagttccctgatatacaccatccccaattgctccttctcacctcctctcaggcctatcttttgctgtagtcacttctgaccagagaaaagtcagaaatgtgcctgtatgctctgggaacctgtttatcccagaaagccctctttttcgcacctcatcaaacagaacaaataagttatatttaatgtctttagttgcattctaatgtcatcaaaactcatttatagtgtttctattaaatatggtgaaaacattaaaa

SEQ ID NO: 195195 - DNA, 1629 bp, Homo sapiens
  Payload ID: 18546
  Gene Name: tripartite motif-containing 51
  Uniprot ID: Q9BSJ1
  ENST ID: ENST00000449290
  CDS Start-End: 93-1451
gcagggaatgagctcctgatcttggggagtacttaaaagaattttttcttggaagaattactgcaggaaacattcatagaaccttgggaaacatgaattctggaatcttgcaagtcttccagagggcactcacctgtcccatctgcatgaactacttcctagacccagtcaccatagactgtgggcacagcttttgccggccctgtttgtacctcaactggcaagacacggcagttcttgctcagtgctctgaatgcaagaagacaacgcggcagagaaacctcaacactgacatttgtttgaagaacatggctttcattgccagaaaagccagcctccggcaattccttagctctgaggagcaaatatgtgggatgcacagagagacaaagaagatgttctgtgaagtggacaagagcctgctctgtttgccgtgctccaactctcaggagcaccggaatcacatacactgtcccattgagtgggctgctgaggaacgccgggaggagctcctaaaaaaaatgcagtctttatgggaaaaagcttgtgaaaatctcagaaatctgaacatggaaaccacaagaaccagatgctggaaggattatgtgagtttaaggatagaagcaatcagagctgaatatcagaagatgcctgcatttctccatgaagaagagcaacatcacttggaaaggctgcgaaaggagggcgaggacatttttcagcaactcaatgaaagcaaagccagaatggaacattccagggagcttttaagaggaatgtatgaggatctgaagcaaatgtgccataaagcagatgtggagctactccaggcttttggagacatattacacaggtatgagtctctgctgctgcaagtgtctgagcctgtgaatccagagctcagtgcagggcccatcactggactgctggacagcctcagtggattcagagttgattttactctgcagcctgaaagagccaatagtcatatcttcctgtgtggagatttgagaagcatgaatgttggatgtgaccctcaagatgatcccgatatcactggaaaatctgaatgttttcttgtatggggggctcaggctttcacatctggcaaatattattgggaggttcatatgggggactcttggaattgggcttttggtgtctgtaacaattattggaaagagaagagacagaatgacaagatagatggagaggagggactctttcttcttggatgtgttaaggaggacactcactgcagtctctttaccacctccccacttgtggtgcaatatgttccaagacctaccagcacagtaggattattcctggattgtgaaggtagaaccgtgagctttgttgatgttgatcaaagttccctgatatacaccatccccaattgctccttctcacctcctctcaggcctatcttttgctgtagtcacttctgaccagagaaaagtcagaaatgtgcctgtatgctctgggaacctgtttatcccagaaagccctctttttcgcacctcatcaaacagaacaaataagttatatttaatgtctttagttgcattctaatgtcatcaaaactcatttatagtgtttctattaaatatggtgaaaacattaaaa

SEQ ID NO: 195196 - DNA, 3536 bp, Homo sapiens
  Payload ID: 18547
  Gene Name: tripeptidyl peptidase I
  Uniprot ID: O14773
  ENST ID: ENST00000299427
  CDS Start-End: 62-1753
ggtggtggaatatagagctcatgtgatccgtcacatgacagcagatccgcggaagggcagaatgggactccaagcctgcctcctagggctctttgccctcatcctctctggcaaatgcagttacagcccggagcccgaccagcggaggacgctgcccccaggctgggtgtccctgggccgtgcggaccctgaggaagagctgagtctcacctttgccctgagacagcagaatgtggaaagactctcggagctggtgcaggctgtgtcggatcccagctctcctcaatacggaaaatacctgaccctagagaatgtggctgatctggtgaggccatccccactgaccctccacacggtgcaaaaatggctcttggcagccggagcccagaagtgccattctgtgatcacacaggactttctgacttgctggctgagcatccgacaagcagagctgctgctccctggggctgagtttcatcactatgtgggaggacctacggaaacccatgttgtaaggtccccacatccctaccagcttccacaggccttggccccccatgtggactttgtggggggactgcaccgttttcccccaacatcatccctgaggcaacgtcctgagccgcaggtgacagggactgtaggcctgcatctgggggtaaccccctctgtgatccgtaagcgatacaacttgacctcacaagacgtgggctctggcaccagcaataacagccaagcctgtgcccagttcctggagcagtatttccatgactcagacctggctcagttcatgcgcctcttcggtggcaactttgcacatcaggcatcagtagcccgtgtggttggacaacagggccggggccgggccgggattgaggccagtctagatgtgcagtacctgatgagtgctggtgccaacatctccacctgggtctacagtagccctggccggcatgagggacaggagcccttcctgcagtggctcatgctgctcagtaatgagtcagccctgccacatgtgcatactgtgagctatggagatgatgaggactccctcagcagcgcctacatccagcgggtcaacactgagctcatgaaggctgccgctcggggtctcaccctgctcttcgcctcaggtgacagtggggccgggtgttggtctgtctctggaagacaccagttccgccctaccttccctgcctccagcccctatgtcaccacagtgggaggcacatccttccaggaacctttcctcatcacaaatgaaattgttgactatatcagtggtggtggcttcagcaatgtgttcccacggccttcataccaggaggaagctgtaacgaagttcctgagctctagcccccacctgccaccatccagttacttcaatgccagtggccgtgcctacccagatgtggctgcactttctgatggctactgggtggtcagcaacagagtgcccattccatgggtgtccggaacctcggcctctactccagtgtttggggggatcctatccttgatcaatgagcacaggatccttagtggccgcccccctcttggctttctcaacccaaggctctaccagcagcatggggcaggactctttgatgtaacccgtggctgccatgagtcctgtctggatgaagaggtagagggccagggtttctgctctggtcctggctgggatcctgtaacaggctggggaacacccaacttcccagctttgctgaagactctactcaacccctgaccctttcctatcaggagagatggcttgtcccctgccctgaagctggcagttcagtcccttattctgccctgttggaagccctgctgaaccctcaactattgactgctgcagacagcttatctccctaaccctgaaatgctgtgagcttgacttgactcccaaccctaccatgctccatcatactcaggtctccctactcctgccttagattcctcaataagatgctgtaactagcattttttgaatgcctctccctccgcatctcatctttctcttttcaatcaggcttttccaaagggttgtatacagactctgtgcactatttcacttgatattcattccccaattcactgcaaggagacctctactgtcaccgtttactctttcctaccctgacatccagaaacaatggcctccagtgcatacttctcaatctttgctttatggcctttccatcatagttgcccactccctctccttacttagcttccaggtcttaacttctctgactactcttgtcttcctctctcatcaatttctgcttcttcatggaatgctgaccttcattgctccatttgtagatttttgctcttctcagtttactcattgtcccctggaacaaatcactgacatctacaaccattaccatctcactaaataagactttctatccaataatgattgatacctcaaatgtaagatgcgtgatactcaacatttcatcgtccaccttcccaaccccaaacaattccatctcgtttcttcttggtaaatgatgctatgctttttccaaccaagccagaaacctgtgtcatcttttcaccccaccttcaatcaacaagtcctcaatcaacaagtcctactgactgcacatcttaaatatatctttatcagtccacaagtccttccaattatatttcccaagtatatctagaacttatccacttatatccccactgctactaccttagtttagggctatattctcttgaaaaaaagtgtccttacttcctgccaatccccaagtcatcttccagagtaaaatgcaaatcccatcaggccacttggatgaaaacccttcaaggattactggatagaattcaggctttcccctccagcccccaatcatagctcacaaaccttccttgctatttgttcttaagtaaaaaatcatttttcctcctccctccccaaaccccaaggaactctcactcttgctcaagctgttccgtccccttaccacccctgatacaactgccaggttaatttccagaattcttgcaagactcagttcagaagtcaccttctttcgtgaatgttttgattccctgaggctactttattttggtatggctgaaaaatcctagattttctaaacaaaacctgtttgaatcttggttctgatatggactaggagagagactgggtcaagtaagcttatctccctgaggctgtttcctcgtctgttaagtgtgaatatcaatacctgcctttcataatcaccagggaataaagtggaataatgttgataacagtgcttggcacctggaagtaggtggcagatgttaacgcccttcctcccttgcactgcgccccctgtgcctacctctagcattgtaacgaccacgtagtattgaaatggccagtttacttgtctgccttcctttccaagaccgttggtgcctagaggactagaatcgtgtcctatttaactttgtgttcccaggtcctagctcaggagttggcaaataagaattaaatgtctgctacaccgaaaacctca

SEQ ID NO: 195197 - DNA, 560 bp, Homo sapiens
  Payload ID: 18547
  Gene Name: tripeptidyl peptidase I
  ENST ID: ENST00000436873
  CDS Start-End: 30-560
acatgacagcagatccgcggaagggcagaatgggactccaagcctgcctcctagggctctttgccctcatcctctctggcaaatgcagttacagcccggagcccgaccagcggaggacgctgcccccaggctgggtgtccctgggccgtgcggaccctgaggaagagctgagtctcacctttgccctgagacagcagaatgtggaaagactctcggagctggtgcaggctgtgtcggatcccagctctcctcaatacggaaaatacctgaccctagagaatgtggctgatctggtgaggccatccccactgaccctccacacggtgcaaaaatggctcttggcagccggagcccagaagtgccattctgtgatcacacaggactttctgacttgctggctgagcatccgacaagcagagctgctgctccctggggctgagtttcatcactatgtgggaggacctacggaaacccatgttgccggcatgagggacaggagcccttcctgcagtggctcatgctgctcagtaatgagtcagccctgccacatgtgcatactg

SEQ ID NO: 195198 - DNA, 561 bp, Homo sapiens
  Payload ID: 18547
  Gene Name: tripeptidyl peptidase I
  ENST ID: ENST00000528571
  CDS Start-End: 23-142
agcagatccgcggaagggcagaatgggactccaagcctgcctcctagggctctttgccctcatcctctctggcaaatgcagttacagcccggagcccgaccagcggaggacgaaaatacctgaccctagagaatgtggctgatctggtgaggccatccccactgaccctccacacggtgcaaaaatggctcttggcagccggagcccagaagtgccattctgtgatcacacaggactttctgacttgctggctgagcatccgacaagcagagctgctgctccctggggctgagtttcatcactatgtgggaggacctacggaaacccatgttgtaaggtccccacatccctaccagcttccacaggccttggccccccatgtggactttgtggggggactgcaccgttttcccccaacatcatccctgaggcaacgtcctgagccgcaggtgacagggactgtaggcctgcatctgggggtaaccccctctgtgatccgtaagcgatacaacttgacctcacaagacgtgggctctggcaccagcaataacagccaagcct

SEQ ID NO: 195199 - DNA, 578 bp, Homo sapiens
  Payload ID: 18547
  Gene Name: tripeptidyl peptidase I
  ENST ID: ENST00000528657
  CDS Start-End: 23-115
agcagatccgcggaagggcagaatgggactccaagcctgcctcctagggctctttgccctcatcctctctggcaaatgcagttacagcccggagcccgaccagcggaggacgtgagttgacttagcacagactgcccccttccccataccctgttctgcctcccactgtcctggtcctagcttctctcacccccgtgccagctcctagtacgcactccatagcttcatctctatgttcctagcctcagtcccctatcattcacctcatgtgatctgtatctgctcctaggatcctccccaaggtctcagctcctaatctggaaccttccatgaccaatattttccatctccaccctaaccaaagccatgtccctgacccctgaccctacaggctgcccccaggctgggtgtccctgggccgtgcggaccctgaggaagagctgagtctcacctttgccctgagacagcagaatgtggaaagactctcggagctggtgcaggctgtgtcggatcccagctctcctcaatacggtgccttttgggactgaggacaggatgtgggatgcggtggagggaca

SEQ ID NO: 195200 - DNA, 3536 bp, Homo sapiens
  Payload ID: 18547
  Gene Name: tripeptidyl peptidase I
  Uniprot ID: O14773
  ENST ID: ENST00000533371
  CDS Start-End: 800-1762
ggatcacgttggagggagcacacattgggagggtgggaacacaaggacaacgtagctcccactgaaacccacctgctgcccctacagcctcctagggctctttgccctcatcctctctggcaaatgcagttacagcccggagcccgaccagcggaggacgctgcccccaggctgggtgtccctgggccgtgcggaccctgaggaagagctgagtctcacctttgccctgagacagcagaatgtggaaagactctcggagctggtgcaggctgtgtcggatcccagctctcctcaatacggaaaatacctgaccctagagaatgtggctgatctggtgaggccatccccactgaccctccacacggtgcaaaaatggctcttggcagccggagcccagaagtgccattctgtgatcacacaggactttctgacttgctggctgagcatccgacaagcagagctgctgctccctggggctgagtttcatcactatgtgggaggacctacggaaacccatgttgtaaggtccccacatccctaccagcttccacaggccttggccccccatgtggactttgtggggggactgcaccgttttcccccaacatcatccctgaggcaacgtcctgagccgcaggtgacagggactgtaggcctgcatctgggggtaaccccctctgtgatccgtaagcgatacaacttgacctcacaagacgtgggctctggcaccagcaataacagccaagcctgtgcccagttcctggagcagtatttccatgactcagacctggctcagttcatgcgcctcttcggtggcaactttgcacatcaggcatcagtagcccgtgtggttggacaacagggccggggccgggccgggattgaggccagtctagatgtgcagtacctgatgagtgctggtgccaacatctccacctgggtctacagtagccctggccggcatgagggacaggagcccttcctgcagtggctcatgctgctcagtaatgagtcagccctgccacatgtgcatactgtgagctatggagatgatgaggactccctcagcagcgcctacatccagcgggtcaacactgagctcatgaaggctgccgctcggggtctcaccctgctcttcgcctcaggtgacagtggggccgggtgttggtctgtctctggaagacaccagttccgccctaccttccctgcctccagcccctatgtcaccacagtgggaggcacatccttccaggaacctttcctcatcacaaatgaaattgttgactatatcagtggtggtggcttcagcaatgtgttcccacggccttcataccaggaggaagctgtaacgaagttcctgagctctagcccccacctgccaccatccagttacttcaatgccagtggccgtgcctacccagatgtggctgcactttctgatggctactgggtggtcagcaacagagtgcccattccatgggtgtccggaacctcggcctctactccagtgtttggggggatcctatccttgatcaatgagcacaggatccttagtggccgcccccctcttggctttctcaacccaaggctctaccagcagcatggggcaggactctttgatgtaacccgtggctgccatgagtcctgtctggatgaagaggtagagggccagggtttctgctctggtcctggctgggatcctgtaacaggctggggaacacccaacttcccagctttgctgaagactctactcaacccctgaccctttcctatcaggagagatggcttgtcccctgccctgaagctggcagttcagtcccttattctgccctgttggaagccctgctgaaccctcaactattgactgctgcagacagcttatctccctaaccctgaaatgctgtgagcttgacttgactcccaaccctaccatgctccatcatactcaggtctccctactcctgccttagattcctcaataagatgctgtaactagcattttttgaatgcctctccctccgcatctcatctttctcttttcaatcaggcttttccaaagggttgtatacagactctgtgcactatttcacttgatattcattccccaattcactgcaaggagacctctactgtcaccgtttactctttcctaccctgacatccagaaacaatggcctccagtgcatacttctcaatctttgctttatggcctttccatcatagttgcccactccctctccttacttagcttccaggtcttaacttctctgactactcttgtcttcctctctcatcaatttctgcttcttcatggaatgctgaccttcattgctccatttgtagatttttgctcttctcagtttactcattgtcccctggaacaaatcactgacatctacaaccattaccatctcactaaataagactttctatccaataatgattgatacctcaaatgtaagatgcgtgatactcaacatttcatcgtccaccttcccaaccccaaacaattccatctcgtttcttcttggtaaatgatgctatgctttttccaaccaagccagaaacctgtgtcatcttttcaccccaccttcaatcaacaagtcctcaatcaacaagtcctactgactgcacatcttaaatatatctttatcagtccacaagtccttccaattatatttcccaagtatatctagaacttatccacttatatccccactgctactaccttagtttagggctatattctcttgaaaaaaagtgtccttacttcctgccaatccccaagtcatcttccagagtaaaatgcaaatcccatcaggccacttggatgaaaacccttcaaggattactggatagaattcaggctttcccctccagcccccaatcatagctcacaaaccttccttgctatttgttcttaagtaaaaaatcatttttcctcctccctccccaaaccccaaggaactctcactcttgctcaagctgttccgtccccttaccacccctgatacaactgccaggttaatttccagaattcttgcaagactcagttcagaagtcaccttctttcgtgaatgttttgattccctgaggctactttattttggtatggctgaaaaatcctagattttctaaacaaaacctgtttgaatcttggttctgatatggactaggagagagactgggtcaagtaagcttatctccctgaggctgtttcctcgtctgttaagtgtgaatatcaatacctgcctttcataatcaccagggaataaagtggaataatgttgataacagtgcttggcacctggaagtaggtggcagatgttaacgcccttcctcccttgcactgcgccccctgtgcctacctctagcattgtaacgaccacgtagtattgaaatggccagtttacttgtctgccttcctttccaagaccgttggtgcctagaggactagaatcgtgtcctatttaactttgtgttcccaggtcctagctcaggagttggcaaataagaattaaatgtctgctacaccg

SEQ ID NO: 195201 - DNA, 2418 bp, Homo sapiens
  Payload ID: 18547
  Gene Name: tripeptidyl peptidase I
  ENST ID: ENST00000611494
  CDS Start-End: 31-1701
cacatgacagcagatccgcggaagggcagaatgggactccaagcctgcctcctagggctctttgccctcatcctctctggcaaatgcagttacagcccggagcccgaccagcggaggacgctgcccccaggctgggtgtccctgggccgtgcggaccctgaggaagagctgagtctcacctttgccctgagacagcagaatgtggaaagactctcggagctggtgcaggctgtgtcggatcccagctctcctcaatacggaaaatacctgaccctagagaatgtggctgatctggtgaggccatccccactgaccctccacacggtgcaaaaatggctcttggcagccggagcccagaagtgccattctgtgatcacacaggactttctgacttgctggctgagcatccgacaagcagagctgctgctccctggggctgagtttcatcactatgtgggaggacctacggaaacccatgttgtaaggtccccacatccctaccagcttccacaggccttggccccccatgtggactttgtggggggactgcaccgttttcccccaacatcatccctgaggcaacgtcctgagccgcaggtgacagggactgtaggcctgcatctgggggtaaccccctctgtgatccgtaagcgatacaacttgacctcacaagacgtgggctctggcaccagcaataacagccaagcctgtgcccagttcctggagcagtatttccatgactcagacctggctcagttcatgcgcctcttcggtggcaactttgcacatcaggcatcagtagcccgtgtggttggacaacagggccggggccgggccgggattgaggccagtctagatgtgcagtacctgatgagtgctggtgccaacatctccacctgggtctacagtagccctggccggcatgagggacaggagcccttcctgcagtggctcatgctgctcagtaatgagtcagccctgccacatgtgcatactgtgagctatggagatgatgaggactccctcagcagcgcctacatccagcgggtcaacactgagctcatgaaggctgccgctcggggtctcaccctgctcttcgcctcaggtgacagtggggccgggtgttggtctgtctctggaagacaccagttccgccctaccttccctgcctccagcccctatgtcaccacagtgggaggcacatccttccaggaacctttcctcatcacaaatgaaattgttgactatatcagtggtggtggcttcagcaatgtgttcccacggccttcataccaggaggaagctgtaacgaagttcctgagctctagcccccacctgccaccatccagttacttcaatgccagtggccgtgcctacccagatgtggctgcactttctgatggctactgggtggtcagcaacagagtgcccattccatgggtgtccggaacctcggcctctactccagtgtttggggggatcctatccttgatcaatgagcacaggatccttagtggccgcccccctcttggctttctcaacccaaggctctaccagcagcatggggcaggactctttgatgtaacccgtggctgccatgagtcctgtctggatgaagaggtagagggccagggtttctgctctggtcctggctgggatcctgtaacaggctggggaacaccaacttcccagctttgctgaagactctactcaacccctgaccctttcctatcaggagagatggcttgtcccctgccctgaagctggcagttcagtcccttattctgccctgttggaagccctgctgaaccctcaactattgactgctgcagacagcttatctccctaaccctgaaatgctgtgagcttgacttgactcccaaccctaccatgctccatcatactcaggtctccctactcctgccttagattcctcaataagatgctgtaactagcattttttgaatgcctctccctccgcatctcatctttctcttttcaatcaggcttttccaaagggttgtatacagactctgtgcactatttcacttgatattcattccccaattcactgcaaggagacctctactgtcaccgtttactctttcctaccctgacatccagaaacaatggcctccagtgcatacttctcaatctttgctttatggcctttccatcatagttgcccactccctctccttacttagcttccaggtcttaacttctctgactactcttgtcttcctctctcatcaatttctgcttcttcatggaatgctgaccttcattgctccatttgtagatttttgctcttctcagtttactcattgtcccctggaacaaatcactgacatctacaaccattaccatctcactaaataagactttctatccaataatgattgatacctcaaatgt

SEQ ID NO: 195202 - DNA, 5447 bp, Homo sapiens
  Payload ID: 18548
  Gene Name: tripeptidyl peptidase II
  ENST ID: ENST00000376052
  CDS Start-End: 17-3805
cctccatcctgcgtccatggccaccgctgcgactgaggagcccttcccttttcacggtctcctgccgaagaaggagaccggagccgcctccttcctctgccgctacccggagtatgatgggcggggggtgctcatcgcagtcctggacacgggggtcgacccgggggctccgggcatgcaggttacaactgatggaaaaccaaaaatcgttgatatcattgatacaacaggaagtggcgatgtgaatactgctacagaagtagagccaaaggatggtgagattgttggcctttcaggaagagtgcttaagattcctgcaagctggacaaatccctcaggcaaatatcatattggcataaaaaatggctatgacttctatcctaaggcactcaaggaaaggatacagaaagaacggaaggaaaaaatctgggaccctgttcacagagtggcccttgcagaagcctgtagaaaacaggaagaatttgatgttgccaacaacggctcttctcaagcaaataaactaatcaaggaggaacttcaaagtcaagtggaattgctaaattcttttgagaagaaatacagcgatcctggccctgtatatgactgcttggtatggcatgatggcgaagtctggagagcctgcattgattctaatgaagatggggacttgagtaaatctaccgtgttgagaaactacaaagaagcccaagaatatggctcttttggcacagctgagatgttgaattactccgttaatatatacgatgatggaaacctgctctccattgtgaccagtggaggagctcatgggacacatgtagctagtatagctgctggacactttccagaagaacctgaacggaatggggtagctcctggtgctcaaattctttccatcaagattggtgatacaagactaagcacaatggaaacaggcacaggcctcataagagctatgatagaagttataaatcataagtgtgatcttgtcaactacagttacggagaagcaactcactggccaaattctgggagaatttgtgaagtaattaatgaagcagtatggaagcataatataatttatgtttcaagtgctggaaataatggtccatgcctgtctacagttggttgtccaggtggaactacatcaagtgtgataggtgttggtgcttatgtttctcctgatatgatggttgctgagtattcactgagagagaaattacctgcaaatcaatatacttggtcttctagaggacctagtgctgacggggcccttggtgtgagtatcagtgcgccaggaggagccattgcttctgttcctaactggacactgagagggacgcagctgatgaatggaacatctatgtcttcccccaatgcatgtggaggcattgccctgatcctttcaggtctgaaagctaataacattgactacacagttcattcagtcagaagagctctagaaaacactgcagtgaaggctgacaatatagaagtatttgctcaaggacatggtattattcaggttgataaagcctatgactacctcgttcagaatacatcatttgctaataaattaggttttactgttactgttggaaataaccgtggcatctacctccgagatcctgttcaggtggctgcaccttcagatcatggcgttggcattgaacctgtatttccggagaacacagaaaactctgaaaaaatatcccttcagcttcatttagctctgacttcaaattcatcttgggttcagtgtcccagccatttggaactcatgaatcaatgtagacacataaacatacgtgtggatcccaggggcttaagagaaggattgcattatacagaggtatgtggctatgatatagcatcccctaacgcaggtccgctcttcagagttccgatcactgcagttatagcagcaaaagtaaatgaatcatcacattatgatctagcctttacagatgtacactttaaacctggtcaaattcgaaggcattttattgaggttcctgagggtgcaacatgggctgaagtgacagtgtgttcgtgttcttctgaggtgtcagcaaagtttgttctacatgcagtccagcttgtgaagcaaagagcatatcgaagccatgaattctataagttttgttctcttccagagaaaggaacactgactgaagcttttcctgtcctaggtggaaaagcaattgaattttgcattgctcgttggtgggcaagtctcagtgatgtcaacattgattataccatttctttccatgggatagtgtgtactgctcctcagttaaacattcatgcatcggaaggaatcaaccgctttgatgttcagtcctccttgaaatacgaagatctggctccctgcataactttgaagaactgggtccaaacactgcgcccagtgagtgcaaaaacaaaacctttaggatcaagagatgttttgccaaataaccgtcaactttatgagatggtcctgacatataactttcatcaacccaagagtggggaagtaactccaagctgcccactactttgtgaactattatatgaatctgaatttgacagccaactgtggattatttttgaccagaacaaaagacagatgggttcaggcgatgcctatccacatcagtattctttgaaactggagaaaggagattatacaattcgactacagattcgccatgagcaaatcagtgatttggaacgccttaaagaccttccatttattgtttctcatagattgtctaataccttgagcttagatattcatgaaaatcatagttttgcacttctagggaagaagaaatcaagcaatttgacattaccacccaaatataaccagccattctttgttacttccttacctgatgataaaatacctaaaggggcaggacctggatgctatcttgcaggatccttaacattgtcaaagactgaactaggaaagaaagctgggcagtctgcagcaaaacgacaaggaaaatttaaaaaggatgtaatccctgttcattactacttaatacctccaccaacaaagactaagaatggcagcaaagataaggaaaaagattcagaaaaagagaaagatttaaaagaagagtttactgaagcattacgagatcttaaaattcagtggatgacaaagctggattctagtgacatttataacgaattgaaagaaacatatcctaattatcttcctctgtacgttgcacgacttcatcaattggatgctgaaaaggaacgaatgaaaagacttaatgaaattgttgatgcggcaaatgctgttatttctcatatagatcaaacagccctagcagtttatattgcaatgaagactgatcccaggcctgatgcagctactataaaaaatgacatggacaaacaaaaatccaccctcgtagatgccctttgtaggaaaggttgtgccctggcagaccatcttcttcacacccaggctcaagacggagccatttccactgatgcagaaggaaaggaggaggaaggagaaagtcctttggattctctggcagaaacattttgggaaactactaaatggactgatctctttgacaataaggttttgacatttgcatataaacatgcattagtaaataaaatgtatgggagaggccttaaatttgcaactaaacttgtggaagaaaaaccaacaaaagaaaactggaaaaattgtattcaactgatgaagttacttggatggacccattgtgcatcttttactgaaaactggctccccatcatgtatcctcccgattattgcgtattctaaaataggaaacaagactttaaattttaaaaaaggaagttttatagtgaatgggtataaaaacaaatttgtggcatttttagtctaatgcatgttttcatccactatccagtactgattattaaaatgacatgtatttatcagagaattcactgacgtgtggcttaatacatgtaaatctagacctctgacatcatggtgttttcttaatgcctcacattgctggcacggggatgtgccctgcctgccagcacctaggacttcgagttgggttgcagcttatgacatgcatgataggttttggaaggtaacttttaactgcaaacctataaagtactattttttattttataaatgaacagggttttaacgtgctcaactttaatttttttcaattgtatgaaggccttaaaaaagctacattaagcgtagctaaaattatttattggactaaaaactaacagaacttcatttccagaattttttttttttttttttttttttggcaaatgtttacattcaattaaggggaaaaagtagaaccagcacaaatgagtggcagttgctggagcataactgcttcaataaatcttcatcttggggtaattacaggcaagtcattttcacatcctcttgaggttcagagcatcagaatgaactctatgaatacatgtgtaagtgccagacagctgaatctttatcaggtattgtaaagatacacatatgatatgtttattaaaattgaaataatgtaaaacacatgaataaatttgcaaaaccaagatcacagtacaccatatgcactctggtaccttaatttttttttataaataataaaagtgaatattgaagcttcttaaagttggtcttaatttttcataaataaaatttggggttataacagaaataatacattaaatacatagacaaaaaaagttaaacataagataatctattttacagtgtttcttataggcttacaattatttgaatgtatttccagttcttgtatgattaacttttgtgcatatctaactttttattatttttatctttggctactgcacgtgcatctctcgtcattcctccaccaaataaacagacaaaagtagtattgaaaagtttacagtcccttatctaatggcaaattgtgtgtatgtatgatttttttatcttgttctcttaagatttactgctgcttaaaattactaccagtaatccttagtcactcccaactgtttctgctgtatctcatgaagtgttagagcgtttatgagaaacataaatacatgtataagcatattggtcacaccttctgggctagctagggtccaaagtctatccatgaaagctacatgcatgttctctctcacacactcatggactttcacctgcacacacatacaggtccccatttgtataggtttagtccagtaagagaatggagaagctcagtaaaggtaggatgacttcccaaggttatacggctgatcaactgttggaaattaattacagaccttgctttacaacccaggttttgctatttcaggtaagtactacctacagcaggaatcagtaacgtttggccctttaacccaaactggactgctgcctgtttttgtaaataaagttttattggaacaga

SEQ ID NO: 195203 - DNA, 3931 bp, Homo sapiens
  Payload ID: 18548
  Gene Name: tripeptidyl peptidase II
  Uniprot ID: P29144
  ENST ID: ENST00000376065
  CDS Start-End: 37-3786
gcagtttgccgcttcctcgtcctccatcctgcgtccatggccaccgctgcgactgaggagcccttcccttttcacggtctcctgccgaagaaggagaccggagccgcctccttcctctgccgctacccggagtatgatgggcggggggtgctcatcgcagtcctggacacgggggtcgacccgggggctccgggcatgcaggttacaactgatggaaaaccaaaaatcgttgatatcattgatacaacaggaagtggcgatgtgaatactgctacagaagtagagccaaaggatggtgagattgttggcctttcaggaagagtgcttaagattcctgcaagctggacaaatccctcaggcaaatatcatattggcataaaaaatggctatgacttctatcctaaggcactcaaggaaaggatacagaaagaacggaaggaaaaaatctgggaccctgttcacagagtggcccttgcagaagcctgtagaaaacaggaagaatttgatgttgccaacaacggctcttctcaagcaaataaactaatcaaggaggaacttcaaagtcaagtggaattgctaaattcttttgagaagaaatacagcgatcctggccctgtatatgactgcttggtatggcatgatggcgaagtctggagagcctgcattgattctaatgaagatggggacttgagtaaatctaccgtgttgagaaactacaaagaagcccaagaatatggctcttttggcacagctgagatgttgaattactccgttaatatatacgatgatggaaacctgctctccattgtgaccagtggaggagctcatgggacacatgtagctagtatagctgctggacactttccagaagaacctgaacggaatggggtagctcctggtgctcaaattctttccatcaagattggtgatacaagactaagcacaatggaaacaggcacaggcctcataagagctatgatagaagttataaatcataagtgtgatcttgtcaactacagttacggagaagcaactcactggccaaattctgggagaatttgtgaagtaattaatgaagcagtatggaagcataatataatttatgtttcaagtgctggaaataatggtccatgcctgtctacagttggttgtccaggtggaactacatcaagtgtgataggtgttggtgcttatgtttctcctgatatgatggttgctgagtattcactgagagagaaattacctgcaaatcaatatacttggtcttctagaggacctagtgctgacggggcccttggtgtgagtatcagtgcgccaggaggagccattgcttctgttcctaactggacactgagagggacgcagctgatgaatggaacatctatgtcttcccccaatgcatgtggaggcattgccctgatcctttcaggtctgaaagctaataacattgactacacagttcattcagtcagaagagctctagaaaacactgcagtgaaggctgacaatatagaagtatttgctcaaggacatggtattattcaggttgataaagcctatgactacctcgttcagaatacatcatttgctaataaattaggttttactgttactgttggaaataaccgtggcatctacctccgagatcctgttcaggtggctgcaccttcagatcatggcgttggcattgaacctgtatttccggagaacacagaaaactctgaaaaaatatcccttcagcttcatttagctctgacttcaaattcatcttgggttcagtgtcccagccatttggaactcatgaatcaatgtagacacataaacatacgtgtggatcccaggggcttaagagaaggattgcattatacagaggtatgtggctatgatatagcatcccctaacgcaggtccgctcttcagagttccgatcactgcagttatagcagcaaaagtaaatgaatcatcacattatgatctagcctttacagatgtacactttaaacctggtcaaattcgaaggcattttattgaggttcctgagggtgcaacatgggctgaagtgacagtgtgttcgtgttcttctgaggtgtcagcaaagtttgttctacatgcagtccagcttgtgaagcaaagagcatatcgaagccatgaattctataagttttgttctcttccagagaaaggaacactgactgaagcttttcctgtcctaggtggaaaagcaattgaattttgcattgctcgttggtgggcaagtctcagtgatgtcaacattgattataccatttctttccatgggatagtgtgtactgctcctcagttaaacattcatgcatcggaaggaatcaaccgctttgatgttcagtcctccttgaaatacgaagatctggctccctgcataactttgaagaactgggtccaaacactgcgcccagtgagtgcaaaaacaaaacctttaggatcaagagatgttttgccaaataaccgtcaactttatgagatggtcctgacatataactttcatcaacccaagagtggggaagtaactccaagctgcccactactttgtgaactattatatgaatctgaatttgacagccaactgtggattatttttgaccagaacaaaagacagatgggttcaggcgatgcctatccacatcagtattctttgaaactggagaaaggagattatacaattcgactacagattcgccatgagcaaatcagtgatttggaacgccttaaagaccttccatttattgtttctcatagattgtctaataccttgagcttagatattcatgaaaatcatagttttgcacttctagggaagaagaaatcaagcaatttgacattaccacccaaatataaccagccattctttgttacttccttacctgatgataaaatacctaaaggggcaggacctggatgctatcttgcaggatccttaacattgtcaaagactgaactaggaaagaaagctgatgtaatccctgttcattactacttaatacctccaccaacaaagactaagaatggcagcaaagataaggaaaaagattcagaaaaagagaaagatttaaaagaagagtttactgaagcattacgagatcttaaaattcagtggatgacaaagctggattctagtgacatttataacgaattgaaagaaacatatcctaattatcttcctctgtacgttgcacgacttcatcaattggatgctgaaaaggaacgaatgaaaagacttaatgaaattgttgatgcggcaaatgctgttatttctcatatagatcaaacagccctagcagtttatattgcaatgaagactgatcccaggcctgatgcagctactataaaaaatgacatggacaaacaaaaatccaccctcgtagatgccctttgtaggaaaggttgtgccctggcagaccatcttcttcacacccaggctcaagacggagccatttccactgatgcagaaggaaaggaggaggaaggagaaagtcctttggattctctggcagaaacattttgggaaactactaaatggactgatctctttgacaataaggttttgacatttgcatataaacatgcattagtaaataaaatgtatgggagaggccttaaatttgcaactaaacttgtggaagaaaaaccaacaaaagaaaactggaaaaattgtattcaactgatgaagttacttggatggacccattgtgcatcttttactgaaaactggctccccatcatgtatcctcccgattattgcgtattctaaaataggaaacaagactttaaattttaaaaaaggaagttttatagtgaatgggtataaaaacaaatttgtggcatttttagtctaatgcatgttttcatccactatccagtactgattattaaaatgacatgtatttatcagagaa

SEQ ID NO: 195204 - DNA, 1596 bp, Homo sapiens
  Payload ID: 18549
  Gene Name: triple QxxK/R motif containing
  Uniprot ID: Q629K1
  ENST ID: ENST00000378861
  CDS Start-End: 428-688
gtcccgcccctgcccctgagtgacagaaccgtggacagcaacatttcccacaggacacgaagtttgtcggcccttgccttggcagagctgagtaagaaaaatcaccaagaatattatttttggtatttggaattgaatttgccaggaatgcaagcactgctacctaactaaagaccttggctttggaaacatcttaccccttggcagctctccagagtttagacttggcagcatcaaagacacaacgcaagcaatatgaaacagaaaaacaagttggttggatagctgtcctccatgcagtcattcatgatccaggctgtcatcatcttcatcactcatgttcagagttaccctagaggtcatctccatttcatccagataaatgagtatgcaaggaacgtttttataggcattttggagatcaaagatgggtagaaaagatgctgctactataaaacttcctgttgatcagtacagaaaacaaattggtaaacaggattataaaaaaactaaacctattttacgagcaaccaaattaaaagcagaagcaaagaaaacagcaataggcataaaggaagttggccttgtacttgcagctatattggcactactactggctttctatgctttcttttatctcagactcaccacggatgttgaccctgatctggaccaagatgaagattagctaagcaacaatcaatgcatgaaagagaaataactttacgaaagcaccttttgggaccaaaactttcaatactgaaactgtaacatctttaattctttctgctaatattttcagtttgcagacatatgatttttgatagttgcataggatgtcaggaaaagaaccttacctagcaatgcagtatagtatgtgctactggatacttttatatatctttctgctttgacagccaccctatacatggtacatttagatgaaatgggaaccagatcctaaatttttcaaatgtcattgccaatttatgtgtataattccatcacttcctgatgagtaagtctatttttgttctatatacatcataagttagtatatattcttatttacagaaacatgctcaaatcacattcagaaagaacaaaaagtcatgggaaattttttattttacaacaaagccctgctttctttctggacgtattttacatcattagagagactatctgcacatacatctaccataatctttttccttctttgccaactgttcagtgcacatgtgctgcatcagaaatggcacctggatgacagaagctcaaagagtcacatatgtctctaaaatagagttcttttcctcttgggctgtctgaactggtgtaaatagaagctcagttgatcttggttttaattaacttattactctattaatataaccttggaattctattctaattatgttgttctggctgcttgtagtatcagttcgcccctcttgttagggagatatgtaacaatctgtcatttaattgagcagtctttttcacataacagtaatagcaaaaatcctacctactcagaatcatcttcttaggttgtctcctaaatctgaacaatacagttgttttataaaatta

SEQ ID NO: 195205 - DNA, 865 bp, Homo sapiens
  Payload ID: 18549
  Gene Name: triple QxxK/R motif containing
  ENST ID: ENST00000524037
  CDS Start-End: 284-448
gcggctggcttgtcccgcccctgcccctgagtgacagaaccgtggacagcaacatttcccacaggacacgaagtttgtcggcccttgccttggcagagctgagtaagaaaaatcaccaagaatattatttttggtatttggaattgaatttgccaggaatgcaagcactgctacctaactaaagaccttggctttggaaacatcttaccccttggcagctctccagagtttagacttggcagcatcaaagacacaacgcaagcaggcattttggagatcaaagatgggtagaaaagatgctgctactataaaacttcctgttgatcagtacagaaaacaaattggtaaacaggattataaaaaaactaaacctattttacgagcaaccaaattaaaagcagaagcaaagaaaacagcaataggcataaagactcaccacggatgttgaccctgatctggaccaagatgaagattagctaagcaacaatcaatgcatgaaagagaaataactttacgaaagcaccttttgggaccaaaactttcaatactgaaactgtaacatctttaattctttctgctaatattttcagtttgcagacatatgatttttgatagttgcataggatgtcaggaaaagaaccttacctagcaatgcagtatagtatgtgctactggatacttttatatatctttctgctttgacagccaccctatacatggtacatttagatgaaatgggaaccagatcctaaatttttcaaatgtcattgccaatttatgtgtataattccatcacttcctgatgagtaagtctatttttgttctatatacatcataagttagtatatattcttatttacagaaa

SEQ ID NO: 195206 - DNA, 598 bp, Homo sapiens
  Payload ID: 18549
  Gene Name: triple QxxK/R motif containing
  ENST ID: ENST00000519069
  CDS Start-End: 318-482
ctcttttccgcctcaccctttgggagtaggggtgtgcggctggcttgtcccgcccctgcccctgagtgacagaaccgtggacagcaacatttcccacaggacacgaagtttgtcggcccttgccttggcagagctgagcaatatgaaacagaaaaacaagttggttggatagctgtcctccatgcagtcattcatgatccaggctgtcatcatcttcatcactcatgttcagagttaccctagaggtcatctccatttcatccagataaatgagtatgcaaggaacgtttttatagcaggcattttggagatcaaagatgggtagaaaagatgctgctactataaaacttcctgttgatcagtacagaaaacaaattggtaaacaggattataaaaaaactaaacctattttacgagcaaccaaattaaaagcagaagcaaagaaaacagcaataggcataaagactcaccacggatgttgaccctgatctggaccaagatgaagattagctaagcaacaatcaatgcatgaaagagaaataactttacgaaagcaccttttgggaccaaaactttcaatactgaaactgtaacatct

SEQ ID NO: 195207 - DNA, 1882 bp, Homo sapiens
  Payload ID: 18549
  Gene Name: triple QxxK/R motif containing
  ENST ID: ENST00000517858
  CDS Start-End: 417-581
gcccctgagtgacagaaccgtggacagcaacatttcccacaggacacgaagtttgtcggcccttgccttggcagagctgagtaagaaaaatcaccaagaatattatttttggtatttggaattgaatttgccaggaatgcaagcactgctacctaactaaagaccttggctttggaaacatcttaccccttggcagctctccagagtttagacttggcagcatcaaagacacaacgcaagcaatatgaaacagaaaaacaagttggttggatagctgtcctccatgcagtcattcatgatccaggctgtcatcatcttcatcactcatgttcagagttaccctagaggtcatctccatttcatccagataaatgagtatgcaaggaacgtttttataggcattttggagatcaaagatgggtagaaaagatgctgctactataaaacttcctgttgatcagtacagaaaacaaattggtaaacaggattataaaaaaactaaacctattttacgagcaaccaaattaaaagcagaagcaaagaaaacagcaataggcataaagactcaccacggatgttgaccctgatctggaccaagatgaagattagctaagcaacaatcaatgcatgaaagagaaataactttacgaaagcaccttttgggaccaaaactttcaatactgaaactgtaacatctttaattctttctgctaatattttcagtttgcagacatatgatttttgatagttgcataggatgtcaggaaaagaaccttacctagcaatgcagtatagtatgtgctactggatacttttatatatctttctgctttgacagccaccctatacatggtacatttagatgaaatgggaaccagatcctaaatttttcaaatgtcattgccaatttatgtgtataattccatcacttcctgatgagtaagtctatttttgttctatatacatcataagttagtatatattcttatttacagaaacatgctcaaatcacattcagaaagaacaaaaagtcatgggaaattttttattttacaacaaagccctgctttctttctggacgtattttacatcattagagagactatctgcacatacatctaccataatctttttccttctttgccaactgttcagtgcacatgtgctgcatcagaaatggcacctggatgacagaagctcaaagagtcacatatgtctctaaaatagagttcttttcctcttgggctgtctgaactggtgtaaatagaagctcagttgatcttggttttaattaacttattactctattaatataaccttggaattctattctaattatgttgttctggctgcttgtagtatcagttcgcccctcttgttagggagatatgtaacaatctgtcatttaattgagcagtctttttcacataacagtaatagcaaaaatcctacctactcagaatcatcttcttaggttgtctcctaaatctgaacaatacagttgttttataaaattacattttgtctcttgagatttaatcaattagaactctttagggagaaaataaataatagaagaaaatatatgcctcatatttcatatgtaattatctgttgatataatttttcaatgtattttgtatttgtgggagcataatgacctgtacattcaatatttttactggtaattcaatttttaaatatgtttttacaatgcttgaacacataaaccttagaaaactggaaaatacgtgtccacagaaagagttattagctactaccttatgtaaagatgcatagaaaatgaaattgttggaaacatgtgcacaaagtgttttatattatatacattgtatttatgaagaataaataaaatattaag

SEQ ID NO: 195208 - DNA, 1829 bp, Homo sapiens
  Payload ID: 18549
  Gene Name: triple QxxK/R motif containing
  Uniprot ID: Q629K1
  ENST ID: ENST00000520430
  CDS Start-End: 282-542
gtgcggctggcttgtcccgcccctgcccctgagtgacagaaccgtggacagcaacatttcccacaggacacgaagtttgtcggcccttgccttggcagagctgagcaatatgaaacagaaaaacaagttggttggatagctgtcctccatgcagtcattcatgatccaggctgtcatcatcttcatcactcatgttcagagttaccctagaggtcatctccatttcatccagataaatgagtatgcaaggaacgtttttataggcattttggagatcaaagatgggtagaaaagatgctgctactataaaacttcctgttgatcagtacagaaaacaaattggtaaacaggattataaaaaaactaaacctattttacgagcaaccaaattaaaagcagaagcaaagaaaacagcaataggcataaaggaagttggccttgtacttgcagctatattggcactactactggctttctatgctttcttttatctcagactcaccacggatgttgaccctgatctggaccaagatgaagattagctaagcaacaatcaatgcatgaaagagaaataactttacgaaagcaccttttgggaccaaaactttcaatactgaaactgtaacatctttaattctttctgctaatattttcagtttgcagacatatgatttttgatagttgcataggatgtcaggaaaagaaccttacctagcaatgcagtatagtatgtgctactggatacttttatatatctttctgctttgacagccaccctatacatggtacatttagatgaaatgggaaccagatcctaaatttttcaaatgtcattgccaatttatgtgtataattccatcacttcctgatgagtaagtctatttttgttctatatacatcataagttagtatatattcttatttacagaaacatgctcaaatcacattcagaaagaacaaaaagtcatgggaaattttttattttacaacaaagccctgctttctttctggacgtattttacatcattagagagactatctgcacatacatctaccataatctttttccttctttgccaactgttcagtgcacatgtgctgcatcagaaatggcacctggatgacagaagctcaaagagtcacatatgtctctaaaatagagttcttttcctcttgggctgtctgaactggtgtaaatagaagctcagttgatcttggttttaattaacttattactctattaatataaccttggaattctattctaattatgttgttctggctgcttgtagtatcagttcgcccctcttgttagggagatatgtaacaatctgtcatttaattgagcagtctttttcacataacagtaatagcaaaaatcctacctactcagaatcatcttcttaggttgtctcctaaatctgaacaatacagttgttttataaaattacattttgtctcttgagatttaatcaattagaactctttagggagaaaataaataatagaagaaaatatatgcctcatatttcatatgtaattatctgttgatataatttttcaatgtattttgtatttgtgggagcataatgacctgtacattcaatatttttactggtaattcaatttttaaatatgtttttacaatgcttgaacacataaaccttagaaaactggaaaatacgtgtccacagaaagagttattagctactaccttatgtaaagatgcatagaaaatgaaattgttggaaacatgtgcacaaagtgttttatattatatacattgtatttatgaagaataaataaaatattaagattgttttcctgct

SEQ ID NO: 195209 - DNA, 556 bp, Homo sapiens
  Payload ID: 18549
  Gene Name: triple QxxK/R motif containing
  ENST ID: ENST00000522903
  CDS Start-End: 534-556
tcttttccgcctcaccctttgggagtaggggtgtgcggctggcttgtcccgcccctgcccctgagtgacagaaccgtggacagcaacatttcccacaggacacgaagtttgtcggcccttgccttggcagagctgagtttctggaggctgctcacattccttggcttatggcctccttcttccaacgtcaaagccagcaacattgcagcaatctgacttattttgttgtcatgtctcctgaccacatctggaagggttatctacttttgaagacacatccagataattcaggacaatctgtccattttgaggttcttcattgaatcatgtctgcaaagtcccttctgcaatctaagtaagaaaaatcaccaagaatattatttttggtatttggaattgaatttgccaggaatgcaagcactgctacctaactaaagaccttggctttggaaacatcttaccccttggcagctctccagagtttagacttggcagcatcaaagacacaacgcaaggcattttggagatcaaagatgggtagaaaagatgctgctac

SEQ ID NO: 195210 - DNA, 555 bp, Homo sapiens
  Payload ID: 18549
  Gene Name: triple QxxK/R motif containing
  Uniprot ID: Q629K1
  ENST ID: ENST00000519969
  CDS Start-End: 266-526
gtgctgaccgattactcgcggtcgcttacttgtcagtgcagctctctgggttctgccgttcccttttggggccccctttcccatgtaagaaaaatcaccaagaatattatttttggtatttggaattgaatttgccaggaatgcaagcactgctacctaactaaagaccttggctttggaaacatcttaccccttggcagctctccagagtttagacttggcagcatcaaagacacaacgcaagcaggcattttggagatcaaagatgggtagaaaagatgctgctactataaaacttcctgttgatcagtacagaaaacaaattggtaaacaggattataaaaaaactaaacctattttacgagcaaccaaattaaaagcagaagcaaagaaaacagcaataggcataaaggaagttggccttgtacttgcagctatattggcactactactggctttctatgctttcttttatctcagactcaccacggatgttgaccctgatctggaccaagatgaagattagctaagcaacaatcaatgcatgaaagagaa

SEQ ID NO: 195211 - DNA, 3672 bp, Homo sapiens
  Payload ID: 18549
  Gene Name: triple QxxK/R motif containing
  Uniprot ID: Q629K1
  ENST ID: ENST00000521988
  CDS Start-End: 320-580
cctcttttccgcctcaccctttgggagtaggggtgtgcggctggcttgtcccgcccctgcccctgagtgacagaaccgtggacagcaacatttcccacaggacacgaagtttgtcggcccttgccttggcagagctgagtaagaaaaatcaccaagaatattatttttggtatttggaattgaatttgccaggaatgcaagcactgctacctaactaaagaccttggctttggaaacatcttaccccttggcagctctccagagtttagacttggcagcatcaaagacacaacgcaagcaggcattttggagatcaaagatgggtagaaaagatgctgctactataaaacttcctgttgatcagtacagaaaacaaattggtaaacaggattataaaaaaactaaacctattttacgagcaaccaaattaaaagcagaagcaaagaaaacagcaataggcataaaggaagttggccttgtacttgcagctatattggcactactactggctttctatgctttcttttatctcagactcaccacggatgttgaccctgatctggaccaagatgaagattagctaagcaacaatcaatgcatgaaagagaaataactttacgaaagcaccttttgggaccaaaactttcaatactgaaactgtaacatctttaattctttctgctaatattttcagtttgcagacatatgatttttgatagttgcataggatgtcaggaaaagaaccttacctagcaatgcagtatagtatgtgctactggatacttttatatatctttctgctttgacagccaccctatacatggtacatttagatgaaatgggaaccagatcctaaatttttcaaatgtcattgccaatttatgtgtataattccatcacttcctgatgagtaagtctatttttgttctatatacatcataagttagtatatattcttatttacagaaacatgctcaaatcacattcagaaagaacaaaaagtcatgggaaattttttattttacaacaaagccctgctttctttctggacgtattttacatcattagagagactatctgcacatacatctaccataatctttttccttctttgccaactgttcagtgcacatgtgctgcatcagaaatggcacctggatgacagaagctcaaagagtcacatatgtctctaaaatagagttcttttcctcttgggctgtctgaactggtgtaaatagaagctcagttgatcttggttttaattaacttattactctattaatataaccttggaattctattctaattatgttgttctggctgcttgtagtatcagttcgcccctcttgttagggagatatgtaacaatctgtcatttaattgagcagtctttttcacataacagtaatagcaaaaatcctacctactcagaatcatcttcttaggttgtctcctaaatctgaacaatacagttgttttataaaattacattttgtctcttgagatttaatcaattagaactctttagggagaaaataaataatagaagaaaatatatgcctcatatttcatatgtaattatctgttgatataatttttcaatgtattttgtatttgtgggagcataatgacctgtacattcaatatttttactggtaattcaatttttaaatatgtttttacaatgcttgaacacataaaccttagaaaactggaaaatacgtgtccacagaaagagttattagctactaccttatgtaaagatgcatagaaaatgaaattgttggaaacatgtgcacaaagtgttttatattatatacattgtatttatgaagaataaataaaatattaagattgttttcctgctagccaagagaagaaatccttgggaaatatctaaggagtatatggggctttataagcactgtttctaaaagatattctctggtacttttgcaaaaagtcgactgtgactgtgtagcattatgttctgtagaatttttttcaagtagcataatttatttcattggtgtgaaaacagccaaaggttccaatatcctcacaaatcatttatgccaaacatctgagggcaaaatttagccggtgttatttactagattcttccctttgaactcacagactcaagagacagaccaagagttcttatatactcaccacagcggaccaatccaagtggcatttttaggaaaggttgcagcatttaatgccatgtggtatgtctgttcgtcaagtgggtggcaagggaatatccaagctggcattttggatatgatgggccttttactttcctgagtgacatgccacatgtcaagaaatactgctccccacccccccactcccatcacatttacgtgaacaattttcatttagttatttcccgttccatatggtgttaaaacagtcgtattaaataaagattatttctagttttcagtggtaatttaaatgagaggatatgtaataattgcttattagatacttatccaaatgaaatataacagagtttacagtacttaaaatggctggttatggtcttggaaatgtttgaaaattcattatcctgaaaaaaactttaccattctgttttacccttgaggtattttttggggaaaaatgtttttgataactattaatctaaatatagtataattataggcaaatttcactgcctagttttattgatatcctgagtctacagctagtccattcgtatgactgattgatttatgatagctccagagaaccataaatttcaaaggctaaactctctgattttagtaaatagtaggtaaagtgacacaatatatgtttacacaacactgttttcatgaaatgcaaactttgcaaaactcacattaactgggaagcagccaaccctctgtagagaaatcccagattgggagtctggtttgaatctttgaagacagaaaggtgatatccggcctgctgttttaaagggaccacacttttgaatacctactggtgtttggcagaaatctgagactggcaccagacacaaattttagacatgggtatcttccctccagtaattcactgctcagagtaatttagaagacaaaaacagaaaaaattgtaatgattttttaagtgttagaatatgtttgttaacatactctgcaaaataaatttcaactaatgcaatagacttaaaatatagcctatggaatactgtgattgaagtttgaaggcttgctggttcttattttgcatgcaagtttagacagggtaaagaatgtataaatttatttgagatgagatacagtattgtaaaaatataacctcatctagaattgcttttaaaacaagcaaaagcctattttagtacaaatgtagggtgggtagttgttttaaggtagcaaaatacttcaagattttctatctttttaatttttcatgaagacagaagaaatactttcaccccaaccaatgactgtaagatcttgagagtatgttcttactcatttctgtaattgcagtagtgtagtcatctgcatataaatttaataaatgcatgttaaaatttaagttgatgccttttagtcctctcagagtctgtcacagtttctttgtgtaaatgataaaaaagtttgaatttaatcaataaaacttaaaaatcacaatatcaatcaa

SEQ ID NO: 195212 - DNA, 737 bp, Homo sapiens
  Payload ID: 18549
  Gene Name: triple QxxK/R motif containing
  Uniprot ID: Q629K1
  ENST ID: ENST00000524107
  CDS Start-End: 410-670
tttgtcggcccttgccttggcagagctgaggtgtgtgtccggcgagtgcgaggggattggggagaccctgcccgggaagctcggggtccgggaatgaaagcgggcgcacctctttagcgagccctaaagcgtttgggagacgatcgttccgtccctgggagcggcacttggtggggctgggcggagggaggctctgcaagagaaacccggagtccgggaaacccagtagtaagaaaaatcaccaagaatattatttttggtatttggaattgaatttgccaggaatgcaagcactgctacctaactaaagaccttggctttggaaacatcttaccccttggcagctctccagagtttagacttggcagcatcaaagacacaacgcaagcaggcattttggagatcaaagatgggtagaaaagatgctgctactataaaacttcctgttgatcagtacagaaaacaaattggtaaacaggattataaaaaaactaaacctattttacgagcaaccaaattaaaagcagaagcaaagaaaacagcaataggcataaaggaagttggccttgtacttgcagctatattggcactactactggctttctatgctttcttttatctcagactcaccacggatgttgaccctgatctggaccaagatgaagattagctaagcaacaatcaatgcatgaaagagaaataactttacgaaagcaccttttgggaccaaaactttc

SEQ ID NO: 195213 - DNA, 1808 bp, Homo sapiens
  Payload ID: 18549
  Gene Name: triple QxxK/R motif containing
  Uniprot ID: Q629K1
  ENST ID: ENST00000520686
  CDS Start-End: 246-506
actccggcaattctggcctctccagcctcttgcctttcttctgaggggagccttttatcctgctgtaagaaaaatcaccaagaatattatttttggtatttggaattgaatttgccaggaatgcaagcactgctacctaactaaagaccttggctttggaaacatcttaccccttggcagctctccagagtttagacttggcagcatcaaagacacaacgcaagcaggcattttggagatcaaagatgggtagaaaagatgctgctactataaaacttcctgttgatcagtacagaaaacaaattggtaaacaggattataaaaaaactaaacctattttacgagcaaccaaattaaaagcagaagcaaagaaaacagcaataggcataaaggaagttggccttgtacttgcagctatattggcactactactggctttctatgctttcttttatctcagactcaccacggatgttgaccctgatctggaccaagatgaagattagctaagcaacaatcaatgcatgaaagagaaataactttacgaaagcaccttttgggaccaaaactttcaatactgaaactgtaacatctttaattctttctgctaatattttcagtttgcagacatatgatttttgatagttgcataggatgtcaggaaaagaaccttacctagcaatgcagtatagtatgtgctactggatacttttatatatctttctgctttgacagccaccctatacatggtacatttagatgaaatgggaaccagatcctaaatttttcaaatgtcattgccaatttatgtgtataattccatcacttcctgatgagtaagtctatttttgttctatatacatcataagttagtatatattcttatttacagaaacatgctcaaatcacattcagaaagaacaaaaagtcatgggaaattttttattttacaacaaagccctgctttctttctggacgtattttacatcattagagagactatctgcacatacatctaccataatctttttccttctttgccaactgttcagtgcacatgtgctgcatcagaaatggcacctggatgacagaagctcaaagagtcacatatgtctctaaaatagagttcttttcctcttgggctgtctgaactggtgtaaatagaagctcagttgatcttggttttaattaacttattactctattaatataaccttggaattctattctaattatgttgttctggctgcttgtagtatcagttcgcccctcttgttagggagatatgtaacaatctgtcatttaattgagcagtctttttcacataacagtaatagcaaaaatcctacctactcagaatcatcttcttaggttgtctcctaaatctgaacaatacagttgttttataaaattacattttgtctcttgagatttaatcaattagaactctttagggagaaaataaataatagaagaaaatatatgcctcatatttcatatgtaattatctgttgatataatttttcaatgtattttgtatttgtgggagcataatgacctgtacattcaatatttttactggtaattcaatttttaaatatgtttttacaatgcttgaacacataaaccttagaaaactggaaaatacgtgtccacagaaagagttattagctactaccttatgtaaagatgcatagaaaatgaaattgttggaaacatgtgcacaaagtgttttatattatatacattgtatttatgaagaataaataaaatattaagattgttttcctgctagccaagagaagaaa

SEQ ID NO: 195214 - DNA, 559 bp, Homo sapiens
  Payload ID: 18549
  Gene Name: triple QxxK/R motif containing
  ENST ID: ENST00000522925
  CDS Start-End: 318-559
tcttttccgcctcaccctttgggagtaggggtgtgcggctggcttgtcccgcccctgcccctgagtgacagaaccgtggacagcaacatttcccacaggacacgaagtttgtcggcccttgccttggcagagctgagtaagaaaaatcaccaagaatattatttttggtatttggaattgaatttgccaggaatgcaagcactgctacctaactaaagaccttggctttggaaacatcttaccccttggcagctctccagagtttagacttggcagcatcaaagacacaacgcaagcaggcattttggagatcaaagatgggtagaaaagatgctgctactataaaacttcctgttgatcagtacagaaaacaaattggtaaacaggattataaaaaaactaaacctattttacgagcaaccaaattaaaagcagaagcaaagaaaacagcaataggcataaagtctactttttttttcttcccaggaagttggccttgtacttgcagctatattggcactactactggctttctatgctttcttttatctcagactca

SEQ ID NO: 195215 - DNA, 805 bp, Homo sapiens
  Payload ID: 18549
  Gene Name: triple QxxK/R motif containing
  ENST ID: ENST00000517751
  CDS Start-End: 581-805
cgaggggattggggagaccctgcccgggaagctcggggtccgggaatgaaagcgggcgcacctctttagcgagccctaaagcgtttgggagacgatcgttccgtccctgggagcggcacttggtggggctgggcggagggaggctctgcaagagaaacccggagtccgggaaacccagtagtttctggaggctgctcacattccttggcttatggcctccttcttccaacgtcaaagccagcaacattgcagcaatctgacttattttgttgtcatgtctcctgaccacatctggaagggttatctacttttgaagacacatccagataattcaggacaatctgtccattttgaggttcttcattgaatcatgtctgcaaagtcccttctgcaatctaagtaagaaaaatcaccaagaatattatttttggtatttggaattgaatttgccaggaatgcaagcactgctacctaactaaagaccttggctttggaaacatcttaccccttggcagctctccagagtttagacttggcagcatcaaagacacaacgcaagcaggcattttggagatcaaagatgggtagaaaagatgctgctactataaaacttcctgttgatcagtacagaaaacaaattggtaaacaggattataaaaaaactaaacctattttacgagcaaccaaattaaaagcagaagcaaagaaaacagcaataggcataaaggaagttggccttgtacttgcagctatattggcactactactggctttctatgctttcttttatctcagactcaccacg

SEQ ID NO: 195216 - DNA, 3563 bp, Homo sapiens
  Payload ID: 18549
  Gene Name: triple QxxK/R motif containing
  Uniprot ID: Q629K1
  ENST ID: ENST00000518748
  CDS Start-End: 316-576
ctcttttccgcctcaccctttgggagtaggggtgtgcggctggcttgtcccgcccctgcccctgagtgacagaaccgtggacagcaacatttcccacaggacacgaagtttgtcggcccttgccttggcagagctgagtaagaaaaatcaccaagaatattatttttggtatttggaattgaatttgccaggaatgcaagcactgctacctaactaaagaccttggctttggaaacatcttaccccttggcagctctccagagtttagacttggcagcatcaaagacacaacgcaaggcattttggagatcaaagatgggtagaaaagatgctgctactataaaacttcctgttgatcagtacagaaaacaaattggtaaacaggattataaaaaaactaaacctattttacgagcaaccaaattaaaagcagaagcaaagaaaacagcaataggcataaaggaagttggccttgtacttgcagctatattggcactactactggctttctatgctttcttttatctcagactcaccacggatgttgaccctgatctggaccaagatgaagattagctaagcaacaatcaatgcatgaaagagaaataactttacgaaagcaccttttgggaccaaaactttcaatactgaaactgtaacatctttaattctttctgctaatattttcagtttgcagacatatgatttttgatagttgcataggatgtcaggaaaagaaccttacctagcaatgcagtatagtatgtgctactggatacttttatatatctttctgctttgacagccaccctatacatggtacatttagatgaaatgggaaccagatcctaaatttttcaaatgtcattgccaatttatgtgtataattccatcacttcctgatgagtaagtctatttttgttctatatacatcataagttagtatatattcttatttacagaaacatgctcaaatcacattcagaaagaacaaaaagtcatgggaaattttttattttacaacaaagccctgctttctttctggacgtattttacatcattagagagactatctgcacatacatctaccataatctttttccttctttgccaactgttcagtgcacatgtgctgcatcagaaatggcacctggatgacagaagctcaaagagtcacatatgtctctaaaatagagttcttttcctcttgggctgtctgaactggtgtaaatagaagctcagttgatcttggttttaattaacttattactctattaatataaccttggaattctattctaattatgttgttctggctgcttgtagtatcagttcgcccctcttgttagggagatatgtaacaatctgtcatttaattgagcagtctttttcacataacagtaatagcaaaaatcctacctactcagaatcatcttcttaggttgtctcctaaatctgaacaatacagttgttttataaaattacattttgtctcttgagatttaatcaattagaactctttagggagaaaataaataatagaagaaaatatatgcctcatatttcatatgtaattatctgttgatataatttttcaatgtattttgtatttgtgggagcataatgacctgtacattcaatatttttactggtaattcaatttttaaatatgtttttacaatgcttgaacacataaaccttagaaaactggaaaatacgtgtccacagaaagagttattagctactaccttatgtaaagatgcatagaaaatgaaattgttggaaacatgtgcacaaagtgttttatattatatacattgtatttatgaagaataaataaaatattaagattgttttcctgctagccaagagaagaaatccttgggaaatatctaaggagtatatggggctttataagcactgtttctaaaagatattctctggtacttttgcaaaaagtcgactgtgactgtgtagcattatgttctgtagaatttttttcaagtagcataatttatttcattggtgtgaaaacagccaaaggttccaatatcctcacaaatcatttatgccaaacatctgagggcaaaatttagccggtgttatttactagattcttccctttgaactcacagactcaagagacagaccaagagttcttatatactcaccacagcggaccaatccaagtggcatttttaggaaaggttgcagcatttaatgccatgtggtatgtctgttcgtcaagtgggtggcaagggaatatccaagctggcattttggatatgatgggccttttactttcctgagtgacatgccacatgtcaagaaatactgctccccacccccccactcccatcacatttacgtgaacaattttcatttagttatttcccgttccatatggtgttaaaacagtcgtattaaataaagattatttctagttttcagtggtaatttaaatgagaggatatgtaataattgcttattagatacttatccaaatgaaatataacagagtttacagtacttaaaatggctggttatggtcttggaaatgtttgaaaattcattatcctgaaaaaaactttaccattctgttttacccttgaggtattttttggggaaaaatgtttttgataactattaatctaaatatagtataattataggcaaatttcactgcctagttttattgatatcctgagtctacagctagtccattcgtatgactgattgatttatgatagctccagagaaccataaatttcaaaggctaaactctctgattttagtaaatagtaggtaaagtgacacaatatatgtttacacaacactgttttcatgaaatgcaaactttgcaaaactcacattaactgggaagcagccaaccctctgtagagaaatcccagattgggagtctggtttgaatctttgaagacagaaaggtgatatccggcctgctgttttaaagggaccacacttttgaatacctactggtgtttggcagaaatctgagactggcaccagacacaaattttagacatgggtatcttccctccagtaattcactgctcagagtaatttagaagacaaaaacagaaaaaattgtaatgattttttaagtgttagaatatgtttgttaacatactctgcaaaataaatttcaactaatgcaatagacttaaaatatagcctatggaatactgtgattgaagtttgaaggcttgctggttcttattttgcatgcaagtttagacagggtaaagaatgtataaatttatttgagatgagatacagtattgtaaaaatataacctcatctagaattgcttttaaaacaagcaaaagcctattttagtacaaatgtagggtgggtagttgttttaaggtagcaaaatacttcaagattttctatctttttaatttttcatgaagacagaagaaatactttcaccccaaccaatgactgtaagatcttgagagtatgttcttactcatttctgtaattgcagtagtgtagtcatctgcatataaatttaataaatgcatgttaaaatttaa

SEQ ID NO: 195217 - DNA, 1630 bp, Homo sapiens
  Payload ID: 18549
  Gene Name: triple QxxK/R motif containing
  ENST ID: ENST00000523580
  CDS Start-End: 136-300
gggagtaggggtgtgcggctggcttgtcccgcccctgcccctgagtgacagaaccgtggacagcaacatttcccacaggacacgaagtttgtcggcccttgccttggcagagctgaggcattttggagatcaaagatgggtagaaaagatgctgctactataaaacttcctgttgatcagtacagaaaacaaattggtaaacaggattataaaaaaactaaacctattttacgagcaaccaaattaaaagcagaagcaaagaaaacagcaataggcataaagactcaccacggatgttgaccctgatctggaccaagatgaagattagctaagcaacaatcaatgcatgaaagagaaataactttacgaaagcaccttttgggaccaaaactttcaatactgaaactgtaacatctttaattctttctgctaatattttcagtttgcagacatatgatttttgatagttgcataggatgtcaggaaaagaaccttacctagcaatgcagtatagtatgtgctactggatacttttatatatctttctgctttgacagccaccctatacatggtacatttagatgaaatgggaaccagatcctaaatttttcaaatgtcattgccaatttatgtgtataattccatcacttcctgatgagtaagtctatttttgttctatatacatcataagttagtatatattcttatttacagaaacatgctcaaatcacattcagaaagaacaaaaagtcatgggaaattttttattttacaacaaagccctgctttctttctggacgtattttacatcattagagagactatctgcacatacatctaccataatctttttccttctttgccaactgttcagtgcacatgtgctgcatcagaaatggcacctggatgacagaagctcaaagagtcacatatgtctctaaaatagagttcttttcctcttgggctgtctgaactggtgtaaatagaagctcagttgatcttggttttaattaacttattactctattaatataaccttggaattctattctaattatgttgttctggctgcttgtagtatcagttcgcccctcttgttagggagatatgtaacaatctgtcatttaattgagcagtctttttcacataacagtaatagcaaaaatcctacctactcagaatcatcttcttaggttgtctcctaaatctgaacaatacagttgttttataaaattacattttgtctcttgagatttaatcaattagaactctttagggagaaaataaataatagaagaaaatatatgcctcatatttcatatgtaattatctgttgatataatttttcaatgtattttgtatttgtgggagcataatgacctgtacattcaatatttttactggtaattcaatttttaaatatgtttttacaatgcttgaacacataaaccttagaaaactggaaaatacgtgtccacagaaagagttattagctactaccttatgtaaagatgcatagaaaatgaaattgttggaaacatgtgcacaaagtgttttatattatatacattgtatttatgaagaataaataaaatattaagattgttttcctgctagccaagagaagaaa

SEQ ID NO: 195218 - DNA, 774 bp, Homo sapiens
  Payload ID: 18549
  Gene Name: triple QxxK/R motif containing
  Uniprot ID: Q629K1
  ENST ID: ENST00000521617
  CDS Start-End: 127-387
ggtgtgcggctggcttgtcccgcccctgcccctgagtgacagaaccgtggacagcaacatttcccacaggacacgaagtttgtcggcccttgccttggcagagctgaggcattttggagatcaaagatgggtagaaaagatgctgctactataaaacttcctgttgatcagtacagaaaacaaattggtaaacaggattataaaaaaactaaacctattttacgagcaaccaaattaaaagcagaagcaaagaaaacagcaataggcataaaggaagttggccttgtacttgcagctatattggcactactactggctttctatgctttcttttatctcagactcaccacggatgttgaccctgatctggaccaagatgaagattagctaagcaacaatcaatgcatgaaagagaaataactttacgaaagcaccttttgggaccaaaactttcaatactgaaactgtaacatctttaattctttctgctaatattttcagtttgcagacatatgatttttgatagttgcataggatgtcaggaaaagaaccttacctagcaatgcagtatagtatgtgctactggatacttttatatatctttctgctttgacagccaccctatacatggtacatttagatgaaatgggaaccagatcctaaatttttcaaatgtcattgccaatttatgtgtataattccatcacttcctgatgagtaagtctatttttgttctatatacatcataagttagtatatattcttatttacaga

SEQ ID NO: 195219 - DNA, 3510 bp, Homo sapiens
  Payload ID: 18549
  Gene Name: triple QxxK/R motif containing
  Uniprot ID: Q629K1
  ENST ID: ENST00000537541
  CDS Start-End: 160-420
ctcttttccgcctcaccctttgggagtaggggtgtgcggctggcttgtcccgcccctgcccctgagtgacagaaccgtggacagcaacatttcccacaggacacgaagtttgtcggcccttgccttggcagagctgagcaggcattttggagatcaaagatgggtagaaaagatgctgctactataaaacttcctgttgatcagtacagaaaacaaattggtaaacaggattataaaaaaactaaacctattttacgagcaaccaaattaaaagcagaagcaaagaaaacagcaataggcataaaggaagttggccttgtacttgcagctatattggcactactactggctttctatgctttcttttatctcagactcaccacggatgttgaccctgatctggaccaagatgaagattagctaagcaacaatcaatgcatgaaagagaaataactttacgaaagcaccttttgggaccaaaactttcaatactgaaactgtaacatctttaattctttctgctaatattttcagtttgcagacatatgatttttgatagttgcataggatgtcaggaaaagaaccttacctagcaatgcagtatagtatgtgctactggatacttttatatatctttctgctttgacagccaccctatacatggtacatttagatgaaatgggaaccagatcctaaatttttcaaatgtcattgccaatttatgtgtataattccatcacttcctgatgagtaagtctatttttgttctatatacatcataagttagtatatattcttatttacagaaacatgctcaaatcacattcagaaagaacaaaaagtcatgggaaattttttattttacaacaaagccctgctttctttctggacgtattttacatcattagagagactatctgcacatacatctaccataatctttttccttctttgccaactgttcagtgcacatgtgctgcatcagaaatggcacctggatgacagaagctcaaagagtcacatatgtctctaaaatagagttcttttcctcttgggctgtctgaactggtgtaaatagaagctcagttgatcttggttttaattaacttattactctattaatataaccttggaattctattctaattatgttgttctggctgcttgtagtatcagttcgcccctcttgttagggagatatgtaacaatctgtcatttaattgagcagtctttttcacataacagtaatagcaaaaatcctacctactcagaatcatcttcttaggttgtctcctaaatctgaacaatacagttgttttataaaattacattttgtctcttgagatttaatcaattagaactctttagggagaaaataaataatagaagaaaatatatgcctcatatttcatatgtaattatctgttgatataatttttcaatgtattttgtatttgtgggagcataatgacctgtacattcaatatttttactggtaattcaatttttaaatatgtttttacaatgcttgaacacataaaccttagaaaactggaaaatacgtgtccacagaaagagttattagctactaccttatgtaaagatgcatagaaaatgaaattgttggaaacatgtgcacaaagtgttttatattatatacattgtatttatgaagaataaataaaatattaagattgttttcctgctagccaagagaagaaatccttgggaaatatctaaggagtatatggggctttataagcactgtttctaaaagatattctctggtacttttgcaaaaagtcgactgtgactgtgtagcattatgttctgtagaatttttttcaagtagcataatttatttcattggtgtgaaaacagccaaaggttccaatatcctcacaaatcatttatgccaaacatctgagggcaaaatttagccggtgttatttactagattcttccctttgaactcacagactcaagagacagaccaagagttcttatatactcaccacagcggaccaatccaagtggcatttttaggaaaggttgcagcatttaatgccatgtggtatgtctgttcgtcaagtgggtggcaagggaatatccaagctggcattttggatatgatgggccttttactttcctgagtgacatgccacatgtcaagaaatactgctccccacccccccactcccatcacatttacgtgaacaattttcatttagttatttcccgttccatatggtgttaaaacagtcgtattaaataaagattatttctagttttcagtggtaatttaaatgagaggatatgtaataattgcttattagatacttatccaaatgaaatataacagagtttacagtacttaaaatggctggttatggtcttggaaatgtttgaaaattcattatcctgaaaaaaactttaccattctgttttacccttgaggtattttttggggaaaaatgtttttgataactattaatctaaatatagtataattataggcaaatttcactgcctagttttattgatatcctgagtctacagctagtccattcgtatgactgattgatttatgatagctccagagaaccataaatttcaaaggctaaactctctgattttagtaaatagtaggtaaagtgacacaatatatgtttacacaacactgttttcatgaaatgcaaactttgcaaaactcacattaactgggaagcagccaaccctctgtagagaaatcccagattgggagtctggtttgaatctttgaagacagaaaggtgatatccggcctgctgttttaaagggaccacacttttgaatacctactggtgtttggcagaaatctgagactggcaccagacacaaattttagacatgggtatcttccctccagtaattcactgctcagagtaatttagaagacaaaaacagaaaaaattgtaatgattttttaagtgttagaatatgtttgttaacatactctgcaaaataaatttcaactaatgcaatagacttaaaatatagcctatggaatactgtgattgaagtttgaaggcttgctggttcttattttgcatgcaagtttagacagggtaaagaatgtataaatttatttgagatgagatacagtattgtaaaaatataacctcatctagaattgcttttaaaacaagcaaaagcctattttagtacaaatgtagggtgggtagttgttttaaggtagcaaaatacttcaagattttctatctttttaatttttcatgaagacagaagaaatactttcaccccaaccaatgactgtaagatcttgagagtatgttcttactcatttctgtaattgcagtagtgtagtcatctgcatataaatttaataaatgcatgttaaaatttaagttgatgccttttagtcctctcagagtctgtcacagtttctttgtgtaaatgataaaaaagtttgaatttaatcaataaaacttaaaaatcacaatatcaatc

SEQ ID NO: 195220 - DNA, 1978 bp, Homo sapiens
  Payload ID: 18550
  Gene Name: TRK-fused gene
  Uniprot ID: Q92734
  ENST ID: ENST00000240851
  CDS Start-End: 341-1543
gtcctgggtatgtccacgcgcaataaggaggggcgaaaggacatttttttttttcttgctcccgcctctgttcttcccccacctgccacgtacagagcccaagttctcgctaggcttgttgggtcagcgcgattggccggggcccgcgcgagcctgcgagcgaggtgcggcggtcgcgaagggcaaccgagggggccgtgaccaccgcctccccgcgacgccccagtccagtggcctcgcgtccgcccattcagcggagacctgcggagaggcggcggccgcggcctccgcaagccgtctttctctagagttgtatatatagaacatcctggagtccaccatgaacggacagttggatctaagtgggaagctaatcatcaaagctcaacttggggaggatattcggcgaattcctattcataatgaagatattacttatgatgaattagtgctaatgatgcaacgagttttcagaggaaaacttctgagtaatgatgaagtaacaataaagtataaagatgaagatggagatcttataacaatttttgatagttctgacctttcctttgcaattcagtgcagtaggatactgaaactgacattatttgttaatggccagccaagaccccttgaatcaagtcaggtgaaatatctccgtcgagaactgatagaacttcgaaataaagtgaatcgtttattggatagcttggaaccacctggagaaccaggaccttccaccaatattcctgaaaatgatactgtggatggtagggaagaaaagtctgcttctgattcttctggaaaacagtctactcaggttatggcagcaagtatgtctgcttttgatcctttaaaaaaccaagatgaaatcaataaaaatgttatgtcagcgtttggcttaacagatgatcaggtttcagggccacccagtgctcctgcagaagatcgttcaggaacacccgacagcattgcttcctcctcctcagcagctcacccaccaggcgttcagccacagcagccaccatatacaggagctcagactcaagcaggtcagattgaaggtcagatgtaccaacagtaccagcaacaggccggctatggtgcacagcagccgcaggctccacctcagcagcctcaacagtatggtattcagtattcagcaagctatagtcagcagactggacctcaacaacctcagcagttccagggatatggccagcaaccaacttcccaggcaccagctcctgccttttctggtcagcctcaacaactgcctgctcagccgccacagcagtaccaggcgagcaattatcctgcacaaacttacactgcccaaacttctcagcctactaattatactgtggctcctgcctctcaacctggaatggctccaagccaacctggggcctatcaaccaagaccaggttttacttcacttcctggaagtaccatgacccctcctccaagtgggcctaatccttatgcgcgtaaccgtcctccctttggtcagggctatacccaacctggacctggttatcgataaggaggctcctctacaccaattaatgtagctgctagctattggcctcccaaaagactccagtactattttaatttgtattgaagaagttcagaaatttaaaagcagagcattttttatgatatcattgttggtgttaattgaaagtataatttgctggaacacaaagaccaaaatgaaagttttttcctccctgcttaaaaatgtagcagcttcttagttactttggaacactactcttacatgtataaagtgattgacttgactttctagcttcccttgtccggaggatattaaaatgctagggtgaggtttagccatcttacttggctttttactattaacatgatgtactaaagtagagccctttgagaatacaagatattatgtataaaatgtaacactgatgataggttaataaagatgattgaatccatt

SEQ ID NO: 195221 - DNA, 1716 bp, Homo sapiens
  Payload ID: 18550
  Gene Name: TRK-fused gene
  Uniprot ID: Q92734
  ENST ID: ENST00000418917
  CDS Start-End: 115-1305
agggactcttcggcctaggcagccgggacccagccagccctgcgcctcgcgccgtcgcgcatgcgtcctggtctttctctagagttgtatatatagaacatcctggagtccaccatgaacggacagttggatctaagtgggaagctaatcatcaaagctcaacttggggaggatattcggcgaattcctattcataatgaagatattacttatgatgaattagtgctaatgatgcaacgagttttcagaggaaaacttctgagtaatgatgaagtaacaataaagtataaagatgaagatggagatcttataacaatttttgatagttctgacctttcctttgcaattcagtgcagtaggatactgaaactgacattatttgttaatggccagccaagaccccttgaatcaagtcaggtgaaatatctccgtcgagaactgatagaacttcgaaataaagtgaatcgtttattggatagcttggaaccacctggagaaccaggaccttccaccaatattcctgaaaatgatactgtggatggtagggaagaaaagtctgcttctgattcttctggaaaacagtctactcaggttatggcagcaagtatgtctgcttttgatcctttaaaaaaccaagatgaaatcaataaaaatgttatgtcagcgtttggcttaacagatgatcaggtttcagggccacccagtgctcctgcagaagatcgttcaggaacacccgacagcattgcttcctcctcctcagcagctcacccaccaggcgttcagccacagcagccaccatatacaggagctcagactcaagcaggtcagatgtaccaacagtaccagcaacaggccggctatggtgcacagcagccgcaggctccacctcagcagcctcaacagtatggtattcagtattcagcaagctatagtcagcagactggacctcaacaacctcagcagttccagggatatggccagcaaccaacttcccaggcaccagctcctgccttttctggtcagcctcaacaactgcctgctcagccgccacagcagtaccaggcgagcaattatcctgcacaaacttacactgcccaaacttctcagcctactaattatactgtggctcctgcctctcaacctggaatggctccaagccaacctggggcctatcaaccaagaccaggttttacttcacttcctggaagtaccatgacccctcctccaagtgggcctaatccttatgcgcgtaaccgtcctccctttggtcagggctatacccaacctggacctggttatcgataaggaggctcctctacaccaattaatgtagctgctagctattggcctcccaaaagactccagtactattttaatttgtattgaagaagttcagaaatttaaaagcagagcattttttatgatatcattgttggtgttaattgaaagtataatttgctggaacacaaagaccaaaatgaaagttttttcctccctgcttaaaaatgtagcagcttcttagttactttggaacactactcttacatgtataaagtgattgacttgactttctagcttcccttgtccggaggatattaaaatgctagggtgaggtttagccatcttacttggctttttactattaacatgatgtactaaagtagagccctttgagaatacaagatattatgtataaaatgtaacactgatgatagg

SEQ ID NO: 195222 - DNA, 1783 bp, Homo sapiens
  Payload ID: 18550
  Gene Name: TRK-fused gene
  Uniprot ID: Q92734
  ENST ID: ENST00000476228
  CDS Start-End: 160-1350
ggcaaccgagggggccgtgaccaccgcctccccgcgacgccccagtccagtggcctcgcgtccgcccattcagcggagacctgcggagaggcggcggccgcggcctccgcaagccgtctttctctagagttgtatatatagaacatcctggagtccaccatgaacggacagttggatctaagtgggaagctaatcatcaaagctcaacttggggaggatattcggcgaattcctattcataatgaagatattacttatgatgaattagtgctaatgatgcaacgagttttcagaggaaaacttctgagtaatgatgaagtaacaataaagtataaagatgaagatggagatcttataacaatttttgatagttctgacctttcctttgcaattcagtgcagtaggatactgaaactgacattatttgttaatggccagccaagaccccttgaatcaagtcaggtgaaatatctccgtcgagaactgatagaacttcgaaataaagtgaatcgtttattggatagcttggaaccacctggagaaccaggaccttccaccaatattcctgaaaatgatactgtggatggtagggaagaaaagtctgcttctgattcttctggaaaacagtctactcaggttatggcagcaagtatgtctgcttttgatcctttaaaaaaccaagatgaaatcaataaaaatgttatgtcagcgtttggcttaacagatgatcaggtttcagggccacccagtgctcctgcagaagatcgttcaggaacacccgacagcattgcttcctcctcctcagcagctcacccaccaggcgttcagccacagcagccaccatatacaggagctcagactcaagcaggtcagatgtaccaacagtaccagcaacaggccggctatggtgcacagcagccgcaggctccacctcagcagcctcaacagtatggtattcagtattcagcaagctatagtcagcagactggacctcaacaacctcagcagttccagggatatggccagcaaccaacttcccaggcaccagctcctgccttttctggtcagcctcaacaactgcctgctcagccgccacagcagtaccaggcgagcaattatcctgcacaaacttacactgcccaaacttctcagcctactaattatactgtggctcctgcctctcaacctggaatggctccaagccaacctggggcctatcaaccaagaccaggttttacttcacttcctggaagtaccatgacccctcctccaagtgggcctaatccttatgcgcgtaaccgtcctccctttggtcagggctatacccaacctggacctggttatcgataaggaggctcctctacaccaattaatgtagctgctagctattggcctcccaaaagactccagtactattttaatttgtattgaagaagttcagaaatttaaaagcagagcattttttatgatatcattgttggtgttaattgaaagtataatttgctggaacacaaagaccaaaatgaaagttttttcctccctgcttaaaaatgtagcagcttcttagttactttggaacactactcttacatgtataaagtgattgacttgactttctagcttcccttgtccggaggatattaaaatgctagggtgaggtttagccatcttacttggctttttactattaacatgatgtactaaagtagagccctttgagaatacaagatattatgtataaaatgtaacactgatgataggttaataaagatgattgaatcca

SEQ ID NO: 195223 - DNA, 723 bp, Homo sapiens
  Payload ID: 18550
  Gene Name: TRK-fused gene
  ENST ID: ENST00000463568
  CDS Start-End: 253-723
gagggggccgtgaccaccgcctccccgcgacgccccagtccagtggcctcgcgtccgcccattcagcggagacctgcggagaggcggcggccgcggcctccgcaagccggtatggccactggagacgggggttgcgggcgctctgtccgaggaggccgggagactaggaggcgctgggagggcctcgttcgaaccgcgcggcagctgggtctttctctagagttgtatatatagaacatcctggagtccaccatgaacggacagttggatctaagtgggaagctaatcatcaaagctcaacttggggaggatattcggcgaattcctattcataatgaagatattacttatgatgaattagtgctaatgatgcaacgagttttcagaggaaaacttctgagtaatgatgaagtaacaataaagtataaagatgaagatggagatcttataacaatttttgatagttctgacctttcctttgcaattcagtgcagtaggatactgaaactgacattatttgttaatggccagccaagaccccttgaatcaagtcaggtgaaatatctccgtcgagaactgatagaacttcgaaataaagtgaatcgtttattggatagcttggaaccacctggagaaccaggaccttccaccaatattcctgaaaatgatactgtggatggtagggaagaaaagtctgcttctgattcttctggaaaacagtct

SEQ ID NO: 195224 - DNA, 776 bp, Homo sapiens
  Payload ID: 18550
  Gene Name: TRK-fused gene
  ENST ID: ENST00000479672
  CDS Start-End: 392-776
tttttttcttgctcccgcctctgttcttcccccacctgccacgtacagagcccaagttctcgctaggcttgttgggtcagcgcgattggccggggcccgcgcgagcctgcgagcgaggtgcggcggtcgcgaagggcaaccgagggggccgtgaccaccgcctccccgcgacgccccagtccagtggcctcgcgtccgcccattcagcggagacctgcggagaggcggcggccgcggcctccgcaagccgatgactgcaagagcaaacgacagctttaggaaagaagcactggttcctggccacaagatgtttacagtcaataggaaacacaaaaagtgaatttgcagtctttctctagagttgtatatatagaacatcctggagtccaccatgaacggacagttggatctaagtgggaagctaatcatcaaagctcaacttggggaggatattcggcgaattcctattcataatgaagatattacttatgatgaattagtgctaatgatgcaacgagttttcagaggaaaacttctgagtaatgatgaagtaacaataaagtataaagatgaagatggagatcttataacaatttttgatagttctgacctttcctttgcaattcagtgcagtaggatactgaaactgacattatttgttaatggccagccaagaccccttgaatcaagtcaggtgaaatatctccgtcgagaactgatagaacttcgaaataaagtgaatcgtttattggatagcttggaaccacctggagaac

SEQ ID NO: 195225 - DNA, 1696 bp, Homo sapiens
  Payload ID: 18550
  Gene Name: TRK-fused gene
  Uniprot ID: Q92734
  ENST ID: ENST00000490574
  CDS Start-End: 98-1300
ggcagccgggacccagccagccctgcgcctcgcgccgtcgcgcatgcgtcctggtctttctctagagttgtatatatagaacatcctggagtccaccatgaacggacagttggatctaagtgggaagctaatcatcaaagctcaacttggggaggatattcggcgaattcctattcataatgaagatattacttatgatgaattagtgctaatgatgcaacgagttttcagaggaaaacttctgagtaatgatgaagtaacaataaagtataaagatgaagatggagatcttataacaatttttgatagttctgacctttcctttgcaattcagtgcagtaggatactgaaactgacattatttgttaatggccagccaagaccccttgaatcaagtcaggtgaaatatctccgtcgagaactgatagaacttcgaaataaagtgaatcgtttattggatagcttggaaccacctggagaaccaggaccttccaccaatattcctgaaaatgatactgtggatggtagggaagaaaagtctgcttctgattcttctggaaaacagtctactcaggttatggcagcaagtatgtctgcttttgatcctttaaaaaaccaagatgaaatcaataaaaatgttatgtcagcgtttggcttaacagatgatcaggtttcagggccacccagtgctcctgcagaagatcgttcaggaacacccgacagcattgcttcctcctcctcagcagctcacccaccaggcgttcagccacagcagccaccatatacaggagctcagactcaagcaggtcagattgaaggtcagatgtaccaacagtaccagcaacaggccggctatggtgcacagcagccgcaggctccacctcagcagcctcaacagtatggtattcagtattcagcaagctatagtcagcagactggacctcaacaacctcagcagttccagggatatggccagcaaccaacttcccaggcaccagctcctgccttttctggtcagcctcaacaactgcctgctcagccgccacagcagtaccaggcgagcaattatcctgcacaaacttacactgcccaaacttctcagcctactaattatactgtggctcctgcctctcaacctggaatggctccaagccaacctggggcctatcaaccaagaccaggttttacttcacttcctggaagtaccatgacccctcctccaagtgggcctaatccttatgcgcgtaaccgtcctccctttggtcagggctatacccaacctggacctggttatcgataaggaggctcctctacaccaattaatgtagctgctagctattggcctcccaaaagactccagtactattttaatttgtattgaagaagttcagaaatttaaaagcagagcattttttatgatatcattgttggtgttaattgaaagtataatttgctggaacacaaagaccaaaatgaaagttttttcctccctgcttaaaaatgtagcagcttcttagttactttggaacactactcttacatgtataaagtgattgacttgactttctagcttcccttgtccggaggatattaaaatgctagggtgaggtttagccatcttacttggctttttactattaacatgatgtactaaagtagagccctttgagaatacaagatattatgtataaaatgt

SEQ ID NO: 195226 - DNA, 913 bp, Homo sapiens
  Payload ID: 18550
  Gene Name: TRK-fused gene
  ENST ID: ENST00000487505
  CDS Start-End: 370-913
aacccctggctgcggtggccaggaggcgcgcctggggggctccgggaggggagtgcgccagctaatgccttggtgcagcctgcctccaagcgtttggattgagaggagaggggctttgggaggtttggggcggccggcgcccaatacccgaaggagctcggaagggtgtggagtggcgcctacgggaataagttgattggggtcatagaatcggagcctagttccttggctaagtcagcgcttaatcaagcgccggctggaggcccagcctggtttatagtgatgattctagctaactttaagagtttgctttgctggacactacatctttctctagagttgtatatatagaacatcctggagtccaccatgaacggacagttggatctaagtgggaagctaatcatcaaagctcaacttggggaggatattcggcgaattcctattcataatgaagatattacttatgatgaattagtgctaatgatgcaacgagttttcagaggaaaacttctgagtaatgatgaagtaacaataaagtataaagatgaagatggagatcttataacaatttttgatagttctgacctttcctttgcaattcagtgcagtaggatactgaaactgacattatttgttaatggccagccaagaccccttgaatcaagtcaggtgaaatatctccgtcgagaactgatagaacttcgaaataaagtgaatcgtttattggatagcttggaaccacctggagaaccaggaccttccaccaatattcctgaaaatgatactgtggatggtagggaagaaaagtctgcttctgattcttctggaaaacagtctactcaggttatggcagcaagtatgtctgcttttgatcctttaaaaaaccaagatgaaatcaataaaaatgtta

SEQ ID NO: 195227 - DNA, 2059 bp, Homo sapiens
  Payload ID: 18550
  Gene Name: TRK-fused gene
  ENST ID: ENST00000612059
  CDS Start-End: 435-1535
ttcctaaatcccgtcatccagtgagaaagcagggactcttcggcctaggcagccgggacccagccagccctgcgcctcgcgccgtcgcgcatgcgtcctgggtatgtccacgcgcaataaggaggggcgaaaggacatttttttttttcttgctcccgcctctgttcttcccccacctgccacgtacagagcccaagttctcgctaggcttgttgggtcagcgcgattggccggggcccgcgcgagcctgcgagcgaggtgcggcggtcgcgaagggcaaccgagggggccgtgaccaccgcctccccgcgacgccccagtccagtggcctcgcgtccgcccattcagcggagacctgcggagaggcggcggccgcggcctccgcaagccgtctttctctagagttgtatatatagaacatcctggagtccaccatgaacggacagttggatctaagtgggaagctaatcatcaaagctcaacttggggaggatattcggcgaattcctattcataatgaagatattacttatgatgaattagtgctaatgatgcaacgagttttcagaggaaaacttctgagtaatgatgaagtaacaataaagtataaagatgaagatggagatcttataacaatttttgatagttctgacctttcctttgcaattcagtgcagtaggatactgaaactgacattatttgttaatggccagccaagaccccttgaatcaagtcaggtgaaatatctccgtcgagaactgatagaacttcgaaataaagtgaatcgtttattggatagcttggaaccacctggagaaccaggaccttccaccaatattcctgaaaatgatactgtggatggtagggaagaaaagtctgcttctgattcttctggaaaacagtctactcaggttatggcagcaagtatgtctgcttttgatcctttaaaaaaccaagatgaaatcaataaaaatgttatgtcagcgtttggcttaacagatgatcaggtttcagggccacccagtgctcctgcagaagatcgttcaggaacacccgacagcattgcttcctcctcctcagcagctcacccaccaggcgttcagccacagcagccaccatatacaggagctcagactcaagcaggtcagatgtaccaacagtacagcaacaggccggctatggtgcacagcagccgcaggctccacctcagcagcctcaacagtatggtattcagtattcagcaagctatagtcagcagactggacctcaacaacctcagcagttccagggatatggccagcaaccaacttcccaggcaccagctcctgccttttctggtcagcctcaacaactgcctgctcagccgccacagcagtaccaggcgagcaattatcctgcacaaacttacactgcccaaacttctcagcctactaattatactgtggctcctgcctctcaacctggaatggctccaagccaacctggggcctatcaaccaagaccaggttttacttcacttcctggaagtaccatgacccctcctccaagtgggcctaatccttatgcgcgtaaccgtcctccctttggtcagggctatacccaacctggacctggttatcgataaggaggctcctctacaccaattaatgtagctgctagctattggcctcccaaaagactccagtactattttaatttgtattgaagaagttcagaaatttaaaagcagagcattttttatgatatcattgttggtgttaattgaaagtataatttgctggaacacaaagaccaaaatgaaagttttttcctccctgcttaaaaatgtagcagcttcttagttactttggaacactactcttacatgtataaagtgattgacttgactttctagcttcccttgtccggaggatattaaaatgctagggtgaggtttagccatcttacttggctttttactattaacatgatgtactaaagtagagccctttgagaatacaagatattatgtataaaatgtaacactgatgataggttaataaagatgattgaatccatt

SEQ ID NO: 195228 - DNA, 1244 bp, Homo sapiens
  Payload ID: 18550
  Gene Name: TRK-fused gene
  Uniprot ID: Q92734
  ENST ID: ENST00000615993
  CDS Start-End: 1-855
atgaacggacagttggatctaagtgggaagctaatcatcaaagctcaacttggggaggatattcggcgaattcctattcataatgaagatattacttatgatgaattagtgctaatgatgcaacgagttttcagaggaaaacttctgagtaatgatgaagtaacaataaagtataaagatgaagatggagatcttataacaatttttgatagttctgacctttcctttgcaattcagtgcagtaggatactgaaactgacattatttgttaatggccagccaagaccccttgaatcaagtcaggtgaaatatctccgtcgagaactgatagaacttcgaaataaagtgaatcgtttattggatagcttggaaccacctggagaaccaggaccttccaccaatattcctgaaaatgatactgtggatggtagggaagaaaagtctgcttctgattcttctggaaaacagtctactcaggttatggcagcaagtatgtctgcttttgatcctttaaaaaaccaagatgaaatcaataaaaatgttatgtcagcgtttggcttaacagatgatcaggtttcagggccacccagtgctcctgcagaagatcgttcaggaacacccgacagcattgcttcctcctcctcagcagctcacccaccaggcgttcagccacagcagccaccatatacaggagctcagactcaagcaggtcagattgaaggtcagatgtaccaacagtaccagcaacaggccggctatggtgcacagcagccgcaggctccacctcagcagcctcaacagtatggtattcagtattcaggattccagtcaatggagaggtttcattgcaagtagctgcagcaagctatagtcagcagactggacctcaacaacctcagcagttccagggatatggccagcaaccaacttcccaggcaccagctcctgccttttctggtcagcctcaacaactgcctgctcagccgccacagcagtaccaggcgagcaattatcctgcacaaacttacactgcccaaacttctcagcctactaattatactgtggctcctgcctctcaacctggaatggctccaagccaacctggggcctatcaaccaagaccaggttttacttcacttcctggaagtaccatgacccctcctccaagtgggcctaatccttatgcgcgtaaccgtcctccctttggtcagggctatacccaacctggacctggttatcgataa

SEQ ID NO: 195229 - DNA, 1289 bp, Homo sapiens
  Payload ID: 18550
  Gene Name: TRK-fused gene
  Uniprot ID: Q92734
  ENST ID: ENST00000620299
  CDS Start-End: 435-1289
ttcctaaatcccgtcatccagtgagaaagcagggactcttcggcctaggcagccgggacccagccagccctgcgcctcgcgccgtcgcgcatgcgtcctgggtatgtccacgcgcaataaggaggggcgaaaggacatttttttttttcttgctcccgcctctgttcttcccccacctgccacgtacagagcccaagttctcgctaggcttgttgggtcagcgcgattggccggggcccgcgcgagcctgcgagcgaggtgcggcggtcgcgaagggcaaccgagggggccgtgaccaccgcctccccgcgacgccccagtccagtggcctcgcgtccgcccattcagcggagacctgcggagaggcggcggccgcggcctccgcaagccgtctttctctagagttgtatatatagaacatcctggagtccaccatgaacggacagttggatctaagtgggaagctaatcatcaaagctcaacttggggaggatattcggcgaattcctattcataatgaagatattacttatgatgaattagtgctaatgatgcaacgagttttcagaggaaaacttctgagtaatgatgaagtaacaataaagtataaagatgaagatggagatcttataacaatttttgatagttctgacctttcctttgcaattcagtgcagtaggatactgaaactgacattatttgttaatggccagccaagaccccttgaatcaagtcaggtgaaatatctccgtcgagaactgatagaacttcgaaataaagtgaatcgtttattggatagcttggaaccacctggagaaccaggaccttccaccaatattcctgaaaatgatactgtggatggtagggaagaaaagtctgcttctgattcttctggaaaacagtctactcaggttatggcagcaagtatgtctgcttttgatcctttaaaaaaccaagatgaaatcaataaaaatgttatgtcagcgtttggcttaacagatgatcaggtttcagggccacccagtgctcctgcagaagatcgttcaggaacacccgacagcattgcttcctcctcctcagcagctcacccaccaggcgttcagccacagcagccaccatatacaggagctcagactcaagcaggtcagattgaaggtcagatgtaccaacagtaccagcaacaggccggctatggtgcacagcagccgcaggctccacctcagcagcctcaacagtatggtattcagtattcaggattccagtcaatggagaggtttcattgcaagtag

SEQ ID NO: 195230 - DNA, 1940 bp, Homo sapiens
  Payload ID: 18551
  Gene Name: tRNA 5-methylaminomethyl-2-thiouridylate methyltransferase
  Uniprot ID: O75648
  ENST ID: ENST00000290846
  CDS Start-End: 341-1606
ggctggggggcttagaattttatttttggtttacagcgcagaagaagagcagtgaggccggggcgcgggtggggagggcaaggcggcggctcaaaaaaaaagccagcccctcgcggcccgacagagtctcggcgccccgcgggtcggtggagcctcaggggtgagcgcaggccggagacaggggaacccgccgcgggacaggggaaggccggacggaacgcgggtaagctgccgcagcttccggccgggccactagcgcggaccctacggccggggcgggacttccggcaaggcgcggaagcggcggtagctgcagctggcgaagttgggcgactggcggatgcaggccttgcggcacgtcgtgtgcgccctgtccggcggcgtggacagcgccgtggccgcgctgctgctgaggcggagaggttaccaggtgacaggggtgtttatgaagaactgggactcactggatgaacatggggtctgtactgccgacaaagactgtgaagatgcttacagagtttgccagatcttagacatccctttccatcaagtgtcctacgtaaaggagtattggaatgatgtgttcagtgactttttgaatgagtatgaaaaaggaaggactcccaatcctgacatagtttgcaacaagcacatcaaatttagttgcttttttcattatgctgtggataatcttggggcagatgccattgccacaggtcactatgcaagaacttccctggaagatgaagaagtctttgagcagaagcacgttaagaagcccgaagggcttttcagaaatcggtttgaagttagaaatgcggtaaaactcctccaggcagctgacagctttaaagaccagaccttctttctcagccaggtttcccaggatgccctgaggagaaccatcttccctctggggggattaacgaaagagtttgtaaagaaaatcgctgctgagaatagacttcatcatgtgcttcagaagaaagagagcatgggcatgtgtttcatcgggaagaggaattttgaacatttccttcttcagtatctgcagcctcgacctggtcactttatttccatagaagacaataaggttctgggaacacataaaggttggttcctgtataccttgggccagagagcaaacataggtggcctgagagagccctggtacgtggtggagaaggacagcgtcaagggtgacgtgtttgtggccccccggacagaccacccagccctgtacagggacctgctgaggaccagccgcgtgcactggattgcggaggagcctcccgcagcactggtccgggacaagatgatggagtgccacttccgattccgccaccagatggcactagtgccctgtgtgctgaccctcaatcaagatggcaccgtgtgggtgacagctgtgcaggctgtgcgtgcccttgccacaggacagtttgctgtgttctacaagggggacgagtgcctgggcagcgggaagatcctgcggctggggccgtctgcctacacgctccagaagggccagcgcagagctgggatggccactgagagccccagtgacagcccagaagatggtccaggcctgagtcccttgctctgacagagatggatctgctagaaggaacctggagagcaggacccatggctgggcggctggtgagcagtccaggtgcccaagggccagcttgctgctgcccaaagcagaggaagccgggctggctgagggtccgaaaagcctgcaggggcccggcgagccccaggaagagcctcagctccaggctggggctctggctgctggagcatctgctggctggtggggtggcccgagttccccttcaccgcccccagggagggtttcccacctcagagtacaccgaggggacctgcagagggggctgtcgggacagcgtggaataaacattatttcaaggaca

SEQ ID NO: 195231 - DNA, 1381 bp, Homo sapiens
  Payload ID: 18551
  Gene Name: tRNA 5-methylaminomethyl-2-thiouridylate methyltransferase
  Uniprot ID: O75648
  ENST ID: ENST00000381019
  CDS Start-End: 21-1151
cgaagttgggcgactggcggatgcaggccttgcggcacgtcgtgtgcgccctgtccggcggcgtggacagcgccgtggccgcgctgctgctgaggcggagaggttaccaggtgacaggggtgtttatgaagaactgggactcactggatgaacatggggtctgtactgccgacaaagactgtgaagatgcttacagagtttgccagatcttagacatccctttccatcaagtgtcctacgtaaaggagtattggaatgatgtgttcagtgactttttgaatgagtatgaaaaaggaaggactcccaatcctgacatagtttgcaacaagcacatcaaatttagttgcttttttcattatgctgtggataatcttggggcagatgccattgccacaggtcactatgcaagaacttccctggaagatgaagaagtctttgagcagaagcacgttaagaagcccgaagggcttttcagaaatcggtttgaagttagaaatgcggtaaaactcctccaggcagctgacagctttaaagaccagaccttctttctcagccaggtttcccaggatgccctgaggagaaccatcttccctctggggggattaacgaaagagtttgtaaagaaaatcgctgctgagaatagacttcatcatgtgcttcagaagaaagagagcatgggcatgtgtttcatcgggaagaggaattttgaacatttccttcttcagtatctgcagcctcgacctggtcactttatttccatagaagacaataaggttctgggaacacataaaggttggttcctgtataccttgggccagagagcaaacataggtggcctgagagagccctggtacgtggtggagaaggacagcgtcaagggtgacgtgtttgtggccccccggacagaccacccagccctgtacagggacctgctgaggaccagccgcgtgcactggattgcggaggagcctcccgcagcactggtccgggacaagatgatggagtgccacttccgattccgccaccagatggcactagtttgctgtgttctacaagggggacgagtgcctgggcagcgggaagatcctgcggctggggccgtctgcctacacgctccagaagggccagcgcagagctgggatggccactgagagccccagtgacagcccagaagatggtccaggcctgagtcccttgctctgacagagatggatctgctagaaggaacctggagagcaggacccatggctgggcggctggtgagcagtccaggtgcccaagggccagcttgctgctgcccaaagcagaggaagccgggctggctgagggtccgaaaagcctgcaggggcccggcgagccccaggaagagcctcagctccag

SEQ ID NO: 195232 - DNA, 1830 bp, Homo sapiens
  Payload ID: 18551
  Gene Name: tRNA 5-methylaminomethyl-2-thiouridylate methyltransferase
  ENST ID: ENST00000381021
  CDS Start-End: 341-640
ggctggggggcttagaattttatttttggtttacagcgcagaagaagagcagtgaggccggggcgcgggtggggagggcaaggcggcggctcaaaaaaaaagccagcccctcgcggcccgacagagtctcggcgccccgcgggtcggtggagcctcaggggtgagcgcaggccggagacaggggaacccgccgcgggacaggggaaggccggacggaacgcgggtaagctgccgcagcttccggccgggccactagcgcggaccctacggccggggcgggacttccggcaaggcgcggaagcggcggtagctgcagctggcgaagttgggcgactggcggatgcaggccttgcggcacgtcgtgtgcgccctgtccggcggcgtggacagcgccgtggccgcgctgctgctgaggcggagaggttaccaggtgacaggggtgtttatgaagaactgggactcactggatgaacatggggtctgtactgccgacaaagactgtgaagatgcttacagagtttgccagatcttagacatccctttccatcaagtgtcctacgtaaaggagtattggaatgatgtgttcaggggcagatgccattgccacaggtcactatgcaagaacttccctggaagatgaagaagtctttgagcagaagcacgttaagaagcccgaagggcttttcagaaatcggtttgaagttagaaatgcggtaaaactcctccaggcagctgacagctttaaagaccagaccttctttctcagccaggtttcccaggatgccctgaggagaaccatcttccctctggggggattaacgaaagagtttgtaaagaaaatcgctgctgagaatagacttcatcatgtgcttcagaagaaagagagcatgggcatgtgtttcatcgggaagaggaattttgaacatttccttcttcagtatctgcagcctcgacctggtcactttatttccatagaagacaataaggttctgggaacacataaaggttggttcctgtataccttgggccagagagcaaacataggtggcctgagagagccctggtacgtggtggagaaggacagcgtcaagggtgacgtgtttgtggccccccggacagaccacccagccctgtacagggacctgctgaggaccagccgcgtgcactggattgcggaggagcctcccgcagcactggtccgggacaagatgatggagtgccacttccgattccgccaccagatggcactagtgccctgtgtgctgaccctcaatcaagatggcaccgtgtgggtgacagctgtgcaggctgtgcgtgcccttgccacaggacagtttgctgtgttctacaagggggacgagtgcctgggcagcgggaagatcctgcggctggggccgtctgcctacacgctccagaagggccagcgcagagctgggatggccactgagagccccagtgacagcccagaagatggtccaggcctgagtcccttgctctgacagagatggatctgctagaaggaacctggagagcaggacccatggctgggcggctggtgagcagtccaggtgcccaagggccagcttgctgctgcccaaagcagaggaagccgggctggctgagggtccgaaaagcctgcaggggcccggcgagccccaggaagagcctcagctccaggctggggctctggctgctggagcatctgctggctggtggggtggcccgagttccccttcaccgcccccagggagggtttcccacctcagagtacaccgaggggacctgcagagggggctgtcgggacagcgtggaataaacattatttcaagg

SEQ ID NO: 195233 - DNA, 1793 bp, Homo sapiens
  Payload ID: 18551
  Gene Name: tRNA 5-methylaminomethyl-2-thiouridylate methyltransferase
  ENST ID: ENST00000441818
  CDS Start-End: 365-664
gccgagaggaggcctccaatggctggctggggggcttagaattttatttttggtttacagcgcagaagaagagcagtgaggccggggcgcgggtggggagggcaaggcggcggctcaaaaaaaaagccagcccctcgcggcccgacagagtctcggcgccccgcgggtcggtggagcctcaggggtgagcgcaggccggagacaggggaacccgccgcgggacaggggaaggccggacggaacgcgggtaagctgccgcagcttccggccgggccactagcgcggaccctacggccggggcgggacttccggcaaggcgcggaagcggcggtagctgcagctggcgaagttgggcgactggcggatgcaggccttgcggcacgtcgtgtgcgccctgtccggcggcgtggacagcgccgtggccgcgctgctgctgaggcggagaggttaccaggtgacaggggtgtttatgaagaactgggactcactggatgaacatggggtctgtactgccgacaaagactgtgaagatgcttacagagtttgccagatcttagacatccctttccatcaagtgtcctacgtaaaggagtattggaatgatgtgttcaggggcagatgccattgccacaggtcactatgcaagaacttccctggaagatgaagaagtctttgagcagaagcacgttaagaagcccgaagggcttttcagaaatcggtttgaagttagaaatggtttcccaggatgccctgaggagaaccatcttccctctggggggattaacgaaagagtttgtaaagaaaatcgctgctgagaatagacttcatcatgtgcttcagaagaaagagagcatgggcatgtgtttcatcgggaagaggaattttgaacatttccttcttcagtatctgcagcctcgacctggtcactttatttccatagaagacaataaggttctgggaacacataaaggttggttcctgtataccttgggccagagagcaaacataggtggcctgagagagccctggtacgtggtggagaaggacagcgtcaagggtgacgtgtttgtggccccccggacagaccacccagccctgtacagggacctgctgaggaccagccgcgtgcactggattgcggaggagcctcccgcagcactggtccgggacaagatgatggagtgccacttccgattccgccaccagatggcactagtgccctgtgtgctgaccctcaatcaagatggcaccgtgtgggtgacagctgtgcaggctgtgcgtgcccttgccacaggacagtttgctgtgttctacaagggggacgagtgcctgggcagcgggaagatcctgcggctggggccgtctgcctacacgctccagaagggccagcgcagagctgggatggccactgagagccccagtgacagcccagaagatggtccaggcctgagtcccttgctctgacagagatggatctgctagaaggaacctggagagcaggacccatggctgggcggctggtgagcagtccaggtgcccaagggccagcttgctgctgcccaaagcagaggaagccgggctggctgagggtccgaaaagcctgcaggggcccggcgagccccaggaagagcctcagctccaggctggggctctggctgctggagcatctgctggctggtggggtggcccgagttccccttcaccgcccccagggagggtttcccacctcagagtacaccgaggggacctgcagagggggctgtcgggacagcgtggaataaacattatttcaa

SEQ ID NO: 195234 - DNA, 1775 bp, Homo sapiens
  Payload ID: 18551
  Gene Name: tRNA 5-methylaminomethyl-2-thiouridylate methyltransferase
  ENST ID: ENST00000453630
  CDS Start-End: 341-640
ggctggggggcttagaattttatttttggtttacagcgcagaagaagagcagtgaggccggggcgcgggtggggagggcaaggcggcggctcaaaaaaaaagccagcccctcgcggcccgacagagtctcggcgccccgcgggtcggtggagcctcaggggtgagcgcaggccggagacaggggaacccgccgcgggacaggggaaggccggacggaacgcgggtaagctgccgcagcttccggccgggccactagcgcggaccctacggccggggcgggacttccggcaaggcgcggaagcggcggtagctgcagctggcgaagttgggcgactggcggatgcaggccttgcggcacgtcgtgtgcgccctgtccggcggcgtggacagcgccgtggccgcgctgctgctgaggcggagaggttaccaggtgacaggggtgtttatgaagaactgggactcactggatgaacatggggtctgtactgccgacaaagactgtgaagatgcttacagagtttgccagatcttagacatccctttccatcaagtgtcctacgtaaaggagtattggaatgatgtgttcaggggcagatgccattgccacaggtcactatgcaagaacttccctggaagatgaagaagtctttgagcagaagcacgttaagaagcccgaagggcttttcagaaatcggtttgaagttagaaatgccaggtttcccaggatgccctgaggagaaccatcttccctctggggggattaacgaaagagtttgtaaagaaaatcgctgctgagaatagacttcatcatgtgcttcagaagaaagagagcatgggcatgtgtttcatcgggaagaggaattttgaacatttccttcttcagtatctgcagcctcgacctggtcactttatttccatagaagacaataaggttctgggaacacataaaggttggttcctgtataccttgggccagagagcaaacataggtggcctgagagagccctggtacgtggtggagaaggacagcgtcaagggtgacgtgtttgtggccccccggacagaccacccagccctgtacagggacctgctgaggaccagccgcgtgcactggattgcggaggagcctcccgcagcactggtccgggacaagatgatggagtgccacttccgattccgccaccagatggcactagtgccctgtgtgctgaccctcaatcaagatggcaccgtgtgggtgacagctgtgcaggctgtgcgtgcccttgccacaggacagtttgctgtgttctacaagggggacgagtgcctgggcagcgggaagatcctgcggctggggccgtctgcctacacgctccagaagggccagcgcagagctgggatggccactgagagccccagtgacagcccagaagatggtccaggcctgagtcccttgctctgacagagatggatctgctagaaggaacctggagagcaggacccatggctgggcggctggtgagcagtccaggtgcccaagggccagcttgctgctgcccaaagcagaggaagccgggctggctgagggtccgaaaagcctgcaggggcccggcgagccccaggaagagcctcagctccaggctggggctctggctgctggagcatctgctggctggtggggtggcccgagttccccttcaccgcccccagggagggtttcccacctcagagtacaccgaggggacctgcagagggggctgtcgggacagcgtggaataaacattatttcaagg

SEQ ID NO: 195235 - DNA, 1882 bp, Homo sapiens
  Payload ID: 18551
  Gene Name: tRNA 5-methylaminomethyl-2-thiouridylate methyltransferase
  Uniprot ID: O75648
  ENST ID: ENST00000457572
  CDS Start-End: 341-841
ggctggggggcttagaattttatttttggtttacagcgcagaagaagagcagtgaggccggggcgcgggtggggagggcaaggcggcggctcaaaaaaaaagccagcccctcgcggcccgacagagtctcggcgccccgcgggtcggtggagcctcaggggtgagcgcaggccggagacaggggaacccgccgcgggacaggggaaggccggacggaacgcgggtaagctgccgcagcttccggccgggccactagcgcggaccctacggccggggcgggacttccggcaaggcgcggaagcggcggtagctgcagctggcgaagttgggcgactggcggatgcaggccttgcggcacgtcgtgtgcgccctgtccggcggcgtggacagcgccgtggccgcgctgctgctgaggcggagaggttaccaggtgacaggggtgtttatgaagaactgggactcactggatgaacatggggtctgtactgccgacaaagactgtgaagatgcttacagagtttgccagatcttagacatccctttccatcaagtgtcctacgtaaaggagtattggaatgatgtgttcagtgactttttgaatgagtatgaaaaaggaaggactcccaatcctgacatagtttgcaacaagcacatcaaatttagttgcttttttcattatgctgtggataatcttggggcagatgccattgccacaggtcactatgcaagaacttccctggaagatgaagaagtctttgagcagaagcacgttaagaagcccgaagggcttttcagaaatcggtttgaagttagaaatgccaggtttcccaggatgccctgaggagaaccatcttccctctggggggattaacgaaagagtttgtaaagaaaatcgctgctgagaatagacttcatcatgtgcttcagaagaaagagagcatgggcatgtgtttcatcgggaagaggaattttgaacatttccttcttcagtatctgcagcctcgacctggtcactttatttccatagaagacaataaggttctgggaacacataaaggttggttcctgtataccttgggccagagagcaaacataggtggcctgagagagccctggtacgtggtggagaaggacagcgtcaagggtgacgtgtttgtggccccccggacagaccacccagccctgtacagggacctgctgaggaccagccgcgtgcactggattgcggaggagcctcccgcagcactggtccgggacaagatgatggagtgccacttccgattccgccaccagatggcactagtgccctgtgtgctgaccctcaatcaagatggcaccgtgtgggtgacagctgtgcaggctgtgcgtgcccttgccacaggacagtttgctgtgttctacaagggggacgagtgcctgggcagcgggaagatcctgcggctggggccgtctgcctacacgctccagaagggccagcgcagagctgggatggccactgagagccccagtgacagcccagaagatggtccaggcctgagtcccttgctctgacagagatggatctgctagaaggaacctggagagcaggacccatggctgggcggctggtgagcagtccaggtgcccaagggccagcttgctgctgcccaaagcagaggaagccgggctggctgagggtccgaaaagcctgcaggggcccggcgagccccaggaagagcctcagctccaggctggggctctggctgctggagcatctgctggctggtggggtggcccgagttccccttcaccgcccccagggagggtttcccacctcagagtacaccgaggggacctgcagagggggctgtcgggacagcgtggaataaacattatttcaagg

SEQ ID NO: 195236 - DNA, 1688 bp, Homo sapiens
  Payload ID: 18551
  Gene Name: tRNA 5-methylaminomethyl-2-thiouridylate methyltransferase
  ENST ID: ENST00000456595
  CDS Start-End: 341-640
ggctggggggcttagaattttatttttggtttacagcgcagaagaagagcagtgaggccggggcgcgggtggggagggcaaggcggcggctcaaaaaaaaagccagcccctcgcggcccgacagagtctcggcgccccgcgggtcggtggagcctcaggggtgagcgcaggccggagacaggggaacccgccgcgggacaggggaaggccggacggaacgcgggtaagctgccgcagcttccggccgggccactagcgcggaccctacggccggggcgggacttccggcaaggcgcggaagcggcggtagctgcagctggcgaagttgggcgactggcggatgcaggccttgcggcacgtcgtgtgcgccctgtccggcggcgtggacagcgccgtggccgcgctgctgctgaggcggagaggttaccaggtgacaggggtgtttatgaagaactgggactcactggatgaacatggggtctgtactgccgacaaagactgtgaagatgcttacagagtttgccagatcttagacatccctttccatcaagtgtcctacgtaaaggagtattggaatgatgtgttcaggggcagatgccattgccacaggtcactatgcaagaacttccctggaagatgaagaagtctttgagcagaagcacgttaagaagcccgaagggcttttcagaaatcggtttgaagttagaaatggtttcccaggatgccctgaggagaaccatcttccctctggggggattaacgaaagagtttgtaaagaaaatcgctgctgagaatagacttcatcatgtgcttcagaagaaagagagcatgggcatgtgtttcatcgggaagaggaattttgaacatttccttcttcagtatctgcagcctcgacctggtcactttatttccatagaagacaataaggttctgggaacacataaaggttggttcctgtataccttgggccagagagcaaacataggtggcctgagagagccctggtacgtggtggagaaggacagcgtcaagggtgacgtgtttgtggccccccggacagaccacccagccctgtacagggacctgctgaggaccagccgcgtgcactggattgcggaggagcctcccgcagcactggtccgggacaagatgatggagtgccacttccgattccgccaccagatggcactagtttgctgtgttctacaagggggacgagtgcctgggcagcgggaagatcctgcggctggggccgtctgcctacacgctccagaagggccagcgcagagctgggatggccactgagagccccagtgacagcccagaagatggtccaggcctgagtcccttgctctgacagagatggatctgctagaaggaacctggagagcaggacccatggctgggcggctggtgagcagtccaggtgcccaagggccagcttgctgctgcccaaagcagaggaagccgggctggctgagggtccgaaaagcctgcaggggcccggcgagccccaggaagagcctcagctccaggctggggctctggctgctggagcatctgctggctggtggggtggcccgagttccccttcaccgcccccagggagggtttcccacctcagagtacaccgaggggacctgcagagggggctgtcgggacagcgtggaataaacattatttcaagg

SEQ ID NO: 195237 - DNA, 682 bp, Homo sapiens
  Payload ID: 18552
  Gene Name: tRNA aspartic acid methyltransferase 1
  ENST ID: ENST00000313936
  CDS Start-End: 1-682
aaagctgtatacctgcacaagtggtggctgccattgatgtcaacactgtcgctaatgaagtatacaagtataattttcctcacacacagttacttgccaagacgattgaaggcattacactcgaagagtttgacagattatcttttgatatgattttaatgagccctccctgccagccattcacaagagacctcttgatacaaacaatagaaaattgtggctttcagtaccaagagtttctattatctccaacctctcttggcattccaaattcaaggctacgatattttcttattgcaaagcttcagtcagagccattaccctttcaagcccctggtcaggtactgatggagttccccaaaattgaatctgtacatccacaaaaatatgcaatggatgtagaaaataaaattcaagaaaagaacgttgaaccaaatattagctttgatggcagcatacagtgttctggaaaagatgccattctttttaagcttgaaactgcagaagaaattcacaggaaaaatcaacaagatagtgatctctctgtgaaaatgctaaaagattttcttgaagatgacactgacgtgaaccagtatcttttaccaccaaagtcattgctgcgatatgctcttctgttagacattgttcagcccacttgtagaaggtccgtgtgctttaccaa

SEQ ID NO: 195238 - DNA, 8230 bp, Homo sapiens
  Payload ID: 18552
  Gene Name: tRNA aspartic acid methyltransferase 1
  ENST ID: ENST00000354631
  CDS Start-End: 39-248
aggcctagctccggggctgcggcggctgaggcgcggggatggagcccctgcgggtgctggagctatacagcggcgtgggcggcatgcaccacgcgctgagagaaagctgtatacctgcacaagtggtggctgccattgatgtcaacactgtcgctaatgaagtatacaagtataattttcctcacacacagttacttgccaagacgattgaaaaaaggagcaacacagcacagttttcagctacttagcccattaggaattcttttgatgcatcttgtcaacagtcatttgaagttcattgcacacaactgcaaaacaaaataattgtggatatctgagaatgaggcccttttccatttgataatatattaacagatgtatatgaaagggatggtgactggtctgcatatcacatttgctaaataaagaacattattgacagggcattacactcgaagagtttgacagattatcttttgatatgattttaatgagccctccctgccagccattcacaaggattggccggcagggtgatatgactgattcaaggacgaatagcttcttacatattctagatattctcccaagattacaaaaattaccaaagtatattcttttggaaaatgttaaaggttttgaagtatcttctacaagagacctcttgatacaaacaatagaaaattgtggctttcagtaccaagagtttctattatctccaacctctcttggcattccaaattcaaggctacgatattttcttattgcaaagcttcagtcagagccattaccctttcaagcccctggtcaggtactgatggagttccccaaaattgaatctgtacatccacaaaaatatgcaatggatgtagaaaataaaattcaagaaaagaacgttgaaccaaatattagctttgatggcagcatacagtgttctggaaaagatgccattctttttaagcttgaaactgcagaagaaattcacaggaaaaatcaacaagatagtgatctctctgtgaaaatgctaaaagattttcttgaagatgacactgacgtgaaccagtatcttttaccaccaaagtcattgctgcgatatgctcttctgttagacattgttcagcccacttgtagaaggtccgtgtgctttaccaaaggatatggaagctacatagaagggacagggtctgtgttacagactgcagaggatgtgcaggttgagaatatctacaaatcccttaccaatttgtcacaagaagaacagataacaaagctgttaatacttaaactgcgatatttcactcctaaagaaatagcaaatctccttggatttcctccagagttcggatttcctgagaagataacagtgaaacagcgttatcgcctacttggaaatagtctcaacgtgcatgtagtagctaaactaatcaaaatcttatatgaataattttgaaataactctgaaagatggtcatatgatattccttcattttcagagagtaattctgaaattctgttttgaactaattctggtgaaatttaactaaattattttaatctgtccttattaagaaatttggattttattaaaaaaatccatgtgtttcatcaaatttatattactgtattttataaaatacgaactattgttatgctttatggagagtatattttcatatgaaactgataaatatatatgtggaatattctttttaaaaacaattttataaacaaatcaaggagcactagagctttagtgtctacatgagtatcttgtgaagtgtcataacaggcataacatatttttatgttaattaaagaagttttttatttctaattttaaaataatgattctaattctagcccattgaatgttttacttaatttccaatcctgtaaatatttctttatttcatctaaacaaatgcatatgatatgtaaaccaaattatcatcattcagtttatacagcagactgaagaatatgtcaggaaaaataatcctaaatgtttgattacctctccatgaagcggccacagaaactgttggtgcacattatctacattttcctcagcctctatctgaaggacaaaactcatttttccttcttcattttgtatgtactttcctttagttgactattatcaaagcttgtttttgtcttctcagcttctgagttgaatttgcctttgcacgctgaggaatgtagcatgacgttaagatttcagggaggaagctgccctctgatcccatgtcatatgacagtactcccctccccccagttgttctttattgtagcaacatacactctcaatgaacttttatgacttttaactttctctgtctctcttcctcagcagacctcttggaattagggtttctaatcaaactaagtcttgcatcataaattctatggtttgtgataaaagcaagtgacaaagagaagagagatgaaaagaaacaagtccagaaatcatattacaagattttaattcaaatttttcttcttaaaaatcagctatttagaggtggataaattggaagtttgtgcattgcttgtgggaacgtaaaatggttcagctgctgttggaaaacgctatggaggttcgtcacaaaattcaacatagaattaccctatgattcagcgattccacctctggctatagatccaaaagaattgaaagcagggacttgaacagatatttgtacaccagcgtttataacaccattatttacagtagccaaaaggtagaagcagcccaagtgtcatcccattcacccatgaatggatgcaggaattgtgttccgtgcatgcagtggaatagtaccagccttccgcaggaaggaaattctgacatatgcggtgacatggatgaaccttgagtacattatgcgaagtgaaataagccaccctgtggggatggagaatgggtagttagtgcataatggatacaaagtttctgattggggtgatgagaaagttctggaggtggatggggaggatggttgcacaacagtgtgagtgtacttaatgccactgcaactgtatatttaaaaatagttaaaatgataaattttacattatgtatattttactgcaattgaaaaaatcatactctattaccaatttttcagaactcatagataaatatgaatgtagggaagctgtaagccagcccatatacagaaactatcactatctacatttttcatatgtgttcagacagagcctattacaagtctcataaatttcagtaaacaatcacaaattattttggcacactttcatgtaggttctgttcactgctgaaatattctaaataaaatggtttagagttttactgtaactatgaataattatgctataattatagtatcccacattcggttgagcaacattatacaaaataagtgtcgagttactgtgcaccaactataaatacttgaaaggtctgtagagacatttgcttacaaactggtagacagaatgtagcttagtggaattcttaaattatgggaatgtattcacaggaagacggtgattcttgcccttaattcataattgaaaatatgcagtaacaagcataaaactcacatcttaatgaagatgtatctaccagtgtcattcaattagcagatgtatatgtatgcataattaatttggaaaatgttattttatggaatgtctgctatatgcttttggtaataatgctgtatataaaatttgcactggaaattctgtttcctgatatttggacttgtacatttattcagatgttggaaaacatagcttctcattttcaggagaactatgtgtaattcagtcttcaccataccttacagtaaaccgatttttcgttctccttttcccatcatccctgctcttttaaacggcttgccagataattgtaaggtatttattaccctgcttcatatttttagtatgtcttcaggatccaaaactaattctaagagatgaccaaatcaattaatgtaaacaaaatgagtcatagttggaaaatgatttcgaagaggtgggtagtcattgtaggaggggtcagagcctgacaatcctcagtggcaggcaagaaagaggaatgatggcatcaccttcacagaggaccctggccatggtgttctgtctgtgaaatcagaccttcaccatgggcactgccctatgtctggaaagatgagaaaatacctccaaccttcagccaacttattcttcctcaaaaaggagagccttctaaagaggcaaaaacagtagttgaaattgtgaacagtgagggtccacccagcacttttttagaaatttgagggtaaactgttgcttgaaattatccaacttttcaaagaggtaaagttatttagtagagaggcttttaagttgccctgaaaggctgtattgctaccatgtgggatgtaaaattggatggggttagagatgagtgcaggcaattcaacgcattggtaggggtggaagttctcagcagaaatcaccatctgggtttttgctcccatctcaacctagttgaggtctagagtgattaagctggagacttctgaggagagagaaatgaactaaagataaatacaactgatttaattttagccatagcagaacagaacaaagaagcaaccacatttcatctaatatcaagcacctactaaaggatgcattctgcaggccagctgcatctgcatccaaaccaaagtcactctggttgctcttttgctttgataacttaagagtttagaaacaagcggtttctaaaaaagccaagataacacaataaggaccaaattttaatcccacatagacaaagagattaaagtgggttttcctgaattgcttatgttatgaacaggttaccttgtcataatttggccttcggcttgggattctaactgttttaggccaccagttatgacactgacttactaatagctttggactttgaaactgtgtgagggtcatatagcctcagcagttttcttgtagcctgtgattgcattgagattatataatttttaaagacatggcctttggacctctgtctactagttaatctcttccatctaccattcaaatgtgctatatacaactatcatatcagcttcttagcaagcacttttctggacctctgtcacacccaccaagatgtctagttatgcctttcatttgagagtttccctttgctgttttttttgttttgttttgttttgttttgttttgtttttgagactgagtctcgctctgttgcctaggctggagtgcagtggcgtgatctcggctcactgcaatctccccctcctgggttaaagtgattttcctgcctcagcctccctagtagctgggattacaggcgcatgccaccacacctagctaatttttgtattagtagagatcgggtttcaccatgttggccaggctggtctcgaacacctgacctcaagttaatccacccaccttggcttccctaagtgctgggttttacaggcatgagccaccacgcccagcctccctttgcatgttttttaaaaaggcattaagcatcttgcacatgttctttagtttcagtttgcatgagtcaacctgtgtgcatcattttccctttcactatttcttgtctttgctggtgaaattttaaagcttcagtttaaaaaaaaaaagaaaaagtattttttgttgttgttgtttctagcttccgtttctctctttaggctgtctaggaacattttaaggtactcatgctcttcaaaatcttacacaatcaagatccaaactccatcaccattcatgtcttagcttgtgaatttatttctttttaaatatatttgttcaagaaatatgagcatgtacaatgagctgttttggctttgtattccccaagttctcatatacattggctttatatttaccatagattctgagtcttactttcagccacatccagcacttactgaagtctccctcaagtacaccacacttgactcctaaagcttccaaaatctcatttttcctataaatatgagaccggaaattttcacaaaaattacaagataggaactgagttctcccatagaactcttttctgaataagcctagggttttttcatttctttgcttgtacctagcatggcttcagtgtttacttcaaatatttgctctgtattttgtttgcattttgatttctatttttatcaggacagattgaaattataagagtgtacatagagaacatgtttgtttagctaaattagctctataatcagatgagatcacctagagggtcagaggatgagagtgaaagagagaaagagaaaaagaagagcagaggcttggagctgacttatctgaaggttccgtcctcaggtctctttctacccttcacttttcatgccatttttcttagagattctcaccctttcctacaacttcagccattttgccgatgacacccagatgactctaaatctgctgttttcctaagtcctattctagaatcttcatgctgggacatttttaacttggatatcttgctattcaagttgtatcggatttgcatcaaatttagcatgcttgcaacctaagcacactccattctatagtcagttccactcttgactttaatatttatggtacggttagtctccacatcttccaagttcaagcttcataaccaaagatcatcttcaccttccttctcactctgcattccattggtcagcttctgttaaaatggccttcctaaggcaggcctctgaacgatcatttatttttaggaaaacttataaaaagtcactgagatttaaaaacacccacacatatatttgcaatcatatttgtgtgcttggttaaacatgtcaacatttaacagatttgagccttctaaatttaatccagcatgaatgtcgtttttactaaaatatttgctattttactcacttagctggttccttacacaagtccagttaaatttcacatgtgaaaaaaatgactgaaaacactgaatggaatgtgatactccttgtgtagtagaaatgagttgactttcatatttaagagctgatcctatgaatgagtagacaataagctgaatagctgttacgatctgagttttaaaaatggaaaatgtttcatgttttagagaatgtaaacttccacaagggcagagattgttaatacgttgtccccccagtgacttaaaacagtactggcacatagtaagcactcaataaatagttgttgaatgagtgaatgtaggaaccatactggaatcaatattgaagctacatagaaagcaccacactgtggagttcaaacaatgtctttaagttgttctcttgaaaactatttaatttgtctgttactgccacttcttccatgcccagaggaacagccaaagttactcaagtctggaacacatgatttaaaaaataattctgggataggcttttggcttttggaaagtagcgcaaataaaactttttaaaatactgtattctgacttctggtcttgacaagagagtgtagatttatttctccctgctcctccctgaaaagtgtaattataaactctgggtaagtataattataaaataatgcaagaggaatcagaaggagaattctgaaaggtgggaccaggaagacacactgcggagggaccccaagactagaggaacaacatggttccaagacatctgacccctcacccaacagaggaaggttacccaggcttgatgtttcccgacctacaaccacacaatagaagacagcccagagaggctcgttcctacagaagagggaactgaagtctggtcggtaataccagatgagtctggctctaccagcacgggggtatatcaggaatcccactgacaaacatccagacctgagacttgtcttttgtgctgagagatgagcatccaggggcctctggcaaaaagcatctaacccaggaagattttttattaccctgagcctgagactcccttctcccagagataccatgggacctggcttgggagaaaatccttctttccctaaagtagcatcatgaaggaccattcgggaaccccagcagcaccagataaaccaagcagaccaaaataacactgcaaaggctttaaaaactaaattaccactggactcatagcccacaaaaactaagccagggcttgcatgctaaacacaaatggagtgactgcctactaaaaataaaagattaaaa

SEQ ID NO: 195239 - DNA, 3527 bp, Homo sapiens
  Payload ID: 18552
  Gene Name: tRNA aspartic acid methyltransferase 1
  Uniprot ID: O14717
  ENST ID: ENST00000377799
  CDS Start-End: 49-1224
acggaccggcaggcctagctccggggctgcggcggctgaggcgcggggatggagcccctgcgggtgctggagctatacagcggcgtgggcggcatgcaccacgcgctgagagaaagctgtatacctgcacaagtggtggctgccattgatgtcaacactgtcgctaatgaagtatacaagtataattttcctcacacacagttacttgccaagacgattgaaggcattacactcgaagagtttgacagattatcttttgatatgattttaatgagccctccctgccagccattcacaaggattggccggcagggtgatatgactgattcaaggacgaatagcttcttacatattctagatattctcccaagattacaaaaattaccaaagtatattcttttggaaaatgttaaaggttttgaagtatcttctacaagagacctcttgatacaaacaatagaaaattgtggctttcagtaccaagagtttctattatctccaacctctcttggcattccaaattcaaggctacgatattttcttattgcaaagcttcagtcagagccattaccctttcaagcccctggtcaggtactgatggagttccccaaaattgaatctgtacatccacaaaaatatgcaatggatgtagaaaataaaattcaagaaaagaacgttgaaccaaatattagctttgatggcagcatacagtgttctggaaaagatgccattctttttaagcttgaaactgcagaagaaattcacaggaaaaatcaacaagatagtgatctctctgtgaaaatgctaaaagattttcttgaagatgacactgacgtgaaccagtatcttttaccaccaaagtcattgctgcgatatgctcttctgttagacattgttcagcccacttgtagaaggtccgtgtgctttaccaaaggatatggaagctacatagaagggacagggtctgtgttacagactgcagaggatgtgcaggttgagaatatctacaaatcccttaccaatttgtcacaagaagaacagataacaaagctgttaatacttaaactgcgatatttcactcctaaagaaatagcaaatctccttggatttcctccagagttcggatttcctgagaagataacagtgaaacagcgttatcgcctacttggaaatagtctcaacgtgcatgtagtagctaaactaatcaaaatcttatatgaataattttgaaataactctgaaagatggtcatatgatattccttcattttcagagagtaattctgaaattctgttttgaactaattctggtgaaatttaactaaattattttaatctgtccttattaagaaatttggattttattaaaaaaatccatgtgtttcatcaaatttatattactgtattttataaaatacgaactattgttatgctttatggagagtatattttcatatgaaactgataaatatatatgtggaatattctttttaaaaacaattttataaacaaatcaaggagcactagagctttagtgtctacatgagtatcttgtgaagtgtcataacaggcataacatatttttatgttaattaaagaagttttttatttctaattttaaaataatgattctaattctagcccattgaatgttttacttaatttccaatcctgtaaatatttctttatttcatctaaacaaatgcatatgatatgtaaaccaaattatcatcattcagtttatacagcagactgaagaatatgtcaggaaaaataatcctaaatgtttgattacctctccatgaagcggccacagaaactgttggtgcacattatctacattttcctcagcctctatctgaaggacaaaactcatttttccttcttcattttgtatgtactttcctttagttgactattatcaaagcttgtttttgtcttctcagcttctgagttgaatttgcctttgcacgctgaggaatgtagcatgacgttaagatttcagggaggaagctgccctctgatcccatgtcatatgacagtactcccctccccccagttgttctttattgtagcaacatacactctcaatgaacttttatgacttttaactttctctgtctctcttcctcagcagacctcttggaattagggtttctaatcaaactaagtcttgcatcataaattctatggtttgtgataaaagcaagtgacaaagagaagagagatgaaaagaaacaagtccagaaatcatattacaagattttaattcaaatttttcttcttaaaaatcagctatttagaggtggataaattggaagtttgtgcattgcttgtgggaacgtaaaatggttcagctgctgttggaaaacgctatggaggttcgtcacaaaattcaacatagaattaccctatgattcagcgattccacctctggctatagatccaaaagaattgaaagcagggacttgaacagatatttgtacaccagcgtttataacaccattatttacagtagccaaaaggtagaagcagcccaagtgtcatcccattcacccatgaatggatgcaggaattgtgttccgtgcatgcagtggaatagtaccagccttccgcaggaaggaaattctgacatatgcggtgacatggatgaaccttgagtacattatgcgaagtgaaataagccaccctgtggggatggagaatgggtagttagtgcataatggatacaaagtttctgattggggtgatgagaaagttctggaggtggatggggaggatggttgcacaacagtgtgagtgtacttaatgccactgcaactgtatatttaaaaatagttaaaatgataaattttacattatgtatattttactgcaattgaaaaaatcatactctattaccaatttttcagaactcatagataaatatgaatgtagggaagctgtaagccagcccatatacagaaactatcactatctacatttttcatatgtgttcagacagagcctattacaagtctcataaatttcagtaaacaatcacaaattattttggcacactttcatgtaggttctgttcactgctgaaatattctaaataaaatggtttagagttttactgtaactatgaataattatgctataattatagtatcccacattcggttgagcaacattatacaaaataagtgtcgagttactgtgcaccaactataaatacttgaaaggtctgtagagacatttgcttacaaactggtagacagaatgtagcttagtggaattcttaaattatgggaatgtattcacaggaagacggtgattcttgcccttaattcataattgaaaatatgcagtaacaagcataaaactcacatcttaatgaagatgtatctaccagtgtcattcaattagcagatgtatatgtatgcataattaatttggaaaatgttattttatggaatgtctgctatatgcttttggtaataatgctgtatataaaatttgcactggaaattctgtttcctgata

SEQ ID NO: 195240 - DNA, 333 bp, Homo sapiens
  Payload ID: 18552
  Gene Name: tRNA aspartic acid methyltransferase 1
  ENST ID: ENST00000424636
  CDS Start-End: 1-162
gcgctgagagaaagctgtatacctgcacaagtggtggctgccattgatgtcaacactgtcgctaatgaagtatacaagtataattttcctcacacacagttacttgccaagacgattgaaattacaaaaattaccaaagtatattcttttggaaaatgttaaaggttttgaagtatcttctacaagagacctcttgatacaaacaatagaaaattgtggctttcagtaccaagagtttctattatctccaacctctcttggcattccaaattcaaggctacgatattttcttattgcaaagcttcagtcagagccattaccctttcaagcccc

SEQ ID NO: 195241 - DNA, 257 bp, Homo sapiens
  Payload ID: 18552
  Gene Name: tRNA aspartic acid methyltransferase 1
  ENST ID: ENST00000436968
  CDS Start-End: 1-257
aaagctgtatacctgcacaagtggtggctgccattgatgtcaacactgtcgctaatgaagtatacaagtataattttcctcacacacagttacttgccaagacgattgaaagacctcttgatacaaacaatagaaaattgtggctttcagtaccaagagtttctattatctccaacctctcttggcattccaaattcaaggctacgatattttcttattgcaaagcttcagtcagagccattaccctttcaagcccc

SEQ ID NO: 195242 - DNA, 1374 bp, Homo sapiens
  Payload ID: 18552
  Gene Name: tRNA aspartic acid methyltransferase 1
  Uniprot ID: O14717
  ENST ID: ENST00000495022
  CDS Start-End: 218-409
attcgggaagccttattgttttccgtcctttgttcccctctagacccttgccaatccccaggccgcgaggccctctgaagccctgagcctggagcggtaggagacgggggaactgaaacgccgcggaaccagaggctgagggagcggcgcgatggagggaggaggagcgacggaccggcaggcctagctccggggctgcggcggctgaggcgcggggatggagcccctgcgggtgctggagctatacagcggcgtgggcggcatgcaccacgcgctgagagaaagctgtatacctgcacaagtggtggctgccattgatgtcaacactgtcgctaatgaagtatacaagtataattttcctcacacacagttacttgccaagacgattgaagattggccggcagggtgatatgactgattcaaggacgaatagcttcttacatattctagatattctcccaagagacctcttgatacaaacaatagaaaattgtggctttcagtaccaagagtttctattatctccaacctctcttggcattccaaattcaaggctacgatattttcttattgcaaagcttcagtcagagccattaccctttcaagcccctggtcaggtactgatggagttccccaaaattgaatctgtacatccacaaaaatatgcaatggatgtagaaaataaaattcaagaaaagaacgttgaaccaaatattagctttgatggcagcatacagtgttctggaaaagatgccattctttttaagcttgaaactgcagaagaaattcacaggaaaaatcaacaagatagtgatctctctgtgaaaatgctaaaagattttcttgaagatgacactgacgtgaaccagtatcttttaccaccaaagtcattgctgcgatatgctcttctgttagacattgttcagcccacttgtagaaggtccgtgtgctttaccaaaggatatggaagctacatagaagggacagggtctgtgttacagactgcagaggatgtgcaggttgagaatatctacaaatcccttaccaatttgtcacaagaagaacagataacaaagctgttaatacttaaactgcgatatttcactcctaaagaaatagcaaatctccttggatttcctccagagttcggatttcctgagaagataacagtgaaacagcgttatcgcctacttggaaatagtctcaacgtgcatgtagtagctaaactaatcaaaatcttatatgaataattttgaaataactctgaaagatggtcatatgatattccttcattttcagagagtaattctgaaattctgttttgaactaattctggtgaaatttaactaaattattttaatctgtccttattaa

SEQ ID NO: 195243 - DNA, 1301 bp, Homo sapiens
  Payload ID: 18552
  Gene Name: tRNA aspartic acid methyltransferase 1
  ENST ID: ENST00000488990
  CDS Start-End: 24-788
gctgcggcggctgaggcgcggggatggagcccctgcgggtgctggagctatacagcggcgtgggcggcatgcaccacgcgctgagagaaagctgtatacctgcacaagtggtggctgccattgatgtcaacactgtcgctaatgaagtatacaagtataattttcctcacacacagttacttgccaagacgattgaagtactgatggagttccccaaaattgaatctgtacatccacaaaaatatgcaatggatgtagaaaataaaattcaagaaaagaacgttgaaccaaatattagctttgatggcagcatacagtgttctggaaaagatgccattctttttaagcttgaaactgcagaagaaattcacaggaaaaatcaacaagatagtgatctctctgtgaaaatgctaaaagattttcttgaagatgacactgacgtgaaccagtatcttttaccaccaaagtcattgctgcgatatgctcttctgttagacattgttcagcccacttgtagaaggtccgtgtgctttaccaaaggatatggaagctacatagaagggacagggtctgtgttacagactgcagaggatgtgcaggttgagaatatctacaaatcccttaccaatttgtcacaagaagaacagataacaaagctgttaatacttaaactgcgatatttcactcctaaagaaatagcaaatctccttggatttcctccagagttcggtatgtgggatacgtgcagaattcagctttcatgtattaaaactctcaaaaatctttagggacttgtgtgtctaggacttgcctaaacaaatgggctcaagaaacctctttcctttcctgatcatgccatttatggcatctttctgccctctttcccctcataactgcctcattcggttctctactgactcattctccccctctctaactccagtagtgggtcacagaggttggcatggctagaagggtcacattggcaactccttgcctctttccacagatggctgtgcatagcatcccctttccagcttattttcttttccagaggtcctctcctaatcaccccacactagagcttgtgaaagaatgctttcgattggctttttataaattaaaaggcagttgagggattattttcgaagggtgggggtgtattggtatttattctcctcagagatacacctgtgtcagctgtgtgcccctatccttccctacaaggggtaggtggagaaagaggaggtggagaggctgtctaggaaggagctttcataatggaatgaaagggggactca

SEQ ID NO: 195244 - DNA, 410 bp, Homo sapiens
  Payload ID: 18552
  Gene Name: tRNA aspartic acid methyltransferase 1
  ENST ID: ENST00000525762
  CDS Start-End: 1-410
gcgctgagagaaagctgtatacctgcacaagtggtggctgccattgatgtcaacactgtcgctaatgaagtatacaagtataattttcctcacacacagttacttgccaagacgattgaaggcattacactcgaagagtttgacagattatcttttgatatgattttaatgagccctccctgccagccattcacaagattacaaaaattaccaaagtatattcttttggaaaatgttaaaggttttgaagtatcttctacaagagacctcttgatacaaacaatagaaaattgtggctttcagtaccaagagtttctattatctccaacctctcttggcattccaaattcaaggctacgatattttcttattgcaaagcttcagtcagagccattaccctttcaagcccc

SEQ ID NO: 195245 - DNA, 2112 bp, Homo sapiens
  Payload ID: 18553
  Gene Name: tRNA isopentenyltransferase 1
  Uniprot ID: Q9H3H1
  ENST ID: ENST00000316891
  CDS Start-End: 16-1419
gcagactgccataagatggcgtccgtggcggctgcacgagcagttcccgtgggcagtgggctcaggggcctgcaacggaccctacctcttgtagtgattctcggggccacgggcaccggcaaatccacgctggcgttgcagctaggccagcggctcggcggtgagatcgtcagcgctgactccatgcaggtctatgaaggcctagacatcatcaccaacaaggtttctgcccaagagcagagaatctgccggcaccacatgatcagctttgtggatcctcttgtgaccaattacacagtggtggacttcagaaatagagcaactgctctgattgaagatatatttgcccgagacaaaattcctattgttgtgggaggaaccaattattacattgaatctctgctctggaaagttcttgtcaataccaagccccaggagatgggcactgagaaagtgattgaccgaaaagtggagcttgaaaaggaggatggtcttgtacttcacaaacgcctaagccaggtggacccagaaatggctgccaagctgcatccacatgacaaacgcaaagtggccaggagcttgcaagtttttgaagaaacaggaatctctcatagtgaatttctccatcgtcaacatacggaagaaggtggtggtccccttggaggtcctctgaagttctctaacccttgcatcctttggcttcatgctgaccaggcagttctagatgagcgcttggataagagggtggatgacatgcttgctgctgggctcttggaggaactaagagattttcacagacgctataatcagaagaatgtttcggaaaatagccaggactatcaacatggtatcttccaatcaattggcttcaaggaatttcacgagtacctgatcactgagggaaaatgcacactggagactagtaaccagcttctaaagaaaggtattgaggctctgaaacaagtaactaagagatatgcccggaaacaaaaccgatgggttaaaaaccgttttttgagcagacctggtcccattgtcccccctgtctatggcttagaggtatctgatgtctcgaagtgggaagagtctgttcttgaacctgctcttgaaatcgtgcaaagtttcatccagggccacaagcctacagccactccaataaagatgccatacaatgaagctgagaacaagagaagttatcacctgtgtgacctctgtgatcgaatcatcattggggatcgcgaatgggcagcgcacataaaatccaaatcccacttgaaccaactgaagaaaagaagaagattggactcagatgctgtcaacaccatagaaagtcagagtgtttccccagaccataacaaagaacctaaagagaagggatccccagggcagaatgatcaagagctgaaatgcagcgtttaagagacatgtccagtggcctttggaaaggtggtggggatccagttcaggagggaggggtatgtttgtctcccagtctgggcaaaggagtgctatgcggaattctctgcatagcagaaaagctcccaccattttcttttgatgtggttttaaagtctcacgttctctataatagaaacagcaggtcttgtcagctccttgtgtggctgatgtgtctggaaatgatgtagttcaggaaagcattttttttttctttgaaccttaaaggttctattattaaaagcagcacagattccacatttttatacatgaggatcttctttgtggtgaataccaggattgactgcatccctttaaagaagttttatgtccctgactctggctaaaattatctaatttccagatgcttttgtagatgactgaagtatttgtgagccacatattgggagttctagatttgagtgaatggcaggaaagggccatctccattgagatgattaagtgaaccaaactagttctcagaattctacagagaaggagggaatcagactgaggaagctgtgacataggacttgaagaccaaagactttgaaatttgcgagctgctcatgtgtgagttattatcactgctgtctttctattgagttacaaatctatatttttattgaagtttaaataaagaaaaaatttacaaga

SEQ ID NO: 195246 - DNA, 2034 bp, Homo sapiens
  Payload ID: 18553
  Gene Name: tRNA isopentenyltransferase 1
  Uniprot ID: Q9H3H1
  ENST ID: ENST00000372818
  CDS Start-End: 16-1341
gcagactgccataagatggcgtccgtggcggctgcacgagcagttcccgtgggcagtgggctcaggggcctgcaacggaccctacctcttgtagtgattctcggggccacgggcaccggcaaatccacgctggcgttgcagctaggccagcggctcggcggtgagatcgtcagcgctgactccatgcaggtctatgaaggcctagacatcatcaccaacaaggtttctgcccaagagcagagaatctgccggcaccacatgatcagctttgtggatcctcttgtgaccaattacacagtggtggacttcagaaatagagcaactgctctgattgaagatatatttgcccgagacaaaattcctattgttgtgggaggaaccaattattacattgaatctctgctctggaaagttcttgtcaataccaagccccaggagatgggcactgagaaagtgattgaccgaaaagtggagcttgaaaaggaggatggtcttgtacttcacaaacgcctaagccaggtggacccagaaatggctgccaagctgcatccacatgacaaacgcaaagtggccaggagcttgcaagtttttgaagaaacaggaatctctcatagtgaatttctccatcgtcaacatacggaagaaggtggtggtccccttggaggtcctctgaagttctctaacccttgcatcctttggcttcatgctgaccaggcagttctagatgagcgcttggataagagggtggatgacatgcttgctgctgggctcttggaggaactaagagattttcacagacgctataatcagaagaatgtttcggaaaatagccaggactatcaacatggtatcttccaatcaattggcttcaaggaatttcacgagtacctgatcactgagggaaaatgcacactggagactagtaaccagcttctaaagaaaggacctggtcccattgtcccccctgtctatggcttagaggtatctgatgtctcgaagtgggaagagtctgttcttgaacctgctcttgaaatcgtgcaaagtttcatccagggccacaagcctacagccactccaataaagatgccatacaatgaagctgagaacaagagaagttatcacctgtgtgacctctgtgatcgaatcatcattggggatcgcgaatgggcagcgcacataaaatccaaatcccacttgaaccaactgaagaaaagaagaagattggactcagatgctgtcaacaccatagaaagtcagagtgtttccccagaccataacaaagaacctaaagagaagggatccccagggcagaatgatcaagagctgaaatgcagcgtttaagagacatgtccagtggcctttggaaaggtggtggggatccagttcaggagggaggggtatgtttgtctcccagtctgggcaaaggagtgctatgcggaattctctgcatagcagaaaagctcccaccattttcttttgatgtggttttaaagtctcacgttctctataatagaaacagcaggtcttgtcagctccttgtgtggctgatgtgtctggaaatgatgtagttcaggaaagcattttttttttctttgaaccttaaaggttctattattaaaagcagcacagattccacatttttatacatgaggatcttctttgtggtgaataccaggattgactgcatccctttaaagaagttttatgtccctgactctggctaaaattatctaatttccagatgcttttgtagatgactgaagtatttgtgagccacatattgggagttctagatttgagtgaatggcaggaaagggccatctccattgagatgattaagtgaaccaaactagttctcagaattctacagagaaggagggaatcagactgaggaagctgtgacataggacttgaagaccaaagactttgaaatttgcgagctgctcatgtgtgagttattatcactgctgtctttctattgagttacaaatctatatttttattgaagtttaaataaagaaaaaatttacaaga

SEQ ID NO: 195247 - DNA, 1851 bp, Homo sapiens
  Payload ID: 18553
  Gene Name: tRNA isopentenyltransferase 1
  Uniprot ID: Q9H3H1
  ENST ID: ENST00000441669
  CDS Start-End: 1-1158
atggcgtccgtggcggctgcacgagcagttcccgtgggcagtgggctcaggggcctgcaacggaccctacctcttgtagtgattctcggggccacgggcaccggcaaatccacgctggcgttgcagctaggccagcggctcggcggtgagatcgtcagcgctgactccatgcagccccaggagatgggcactgagaaagtgattgaccgaaaagtggagcttgaaaaggaggatggtcttgtacttcacaaacgcctaagccaggtggacccagaaatggctgccaagctgcatccacatgacaaacgcaaagtggccaggagcttgcaagtttttgaagaaacaggaatctctcatagtgaatttctccatcgtcaacatacggaagaaggtggtggtccccttggaggtcctctgaagttctctaacccttgcatcctttggcttcatgctgaccaggcagatgagcgcttggataagagggtggatgacatgcttgctgctgggctcttggaggaactaagagattttcacagacgctataatcagaagaatgtttcggaaaatagccaggactatcaacatggtatcttccaatcaattggcttcaaggaatttcacgagtacctgatcactgagggaaaatgcacactggagactagtaaccagcttctaaagaaaggtattgaggctctgaaacaagtaactaagagatatgcccggaaacaaaaccgatgggttaaaaaccgttttttgagcagacctggtcccattgtcccccctgtctatggcttagaggtatctgatgtctcgaagtgggaagagtctgttcttgaacctgctcttgaaatcgtgcaaagtttcatccagggccacaagcctacagccactccaataaagatgccatacaatgaagctgagaacaagagaagttatcacctgtgtgacctctgtgatcgaatcatcattggggatcgcgaatgggcagcgcacataaaatccaaatcccacttgaaccaactgaagaaaagaagaagattggactcagatgctgtcaacaccatagaaagtcagagtgtttccccagaccataacaaagaacctaaagagaagggatccccagggcagaatgatcaagagctgaaatgcagcgtttaagagacatgtccagtggcctttggaaaggtggtggggatccagttcaggagggaggggtatgtttgtctcccagtctgggcaaaggagtgctatgcggaattctctgcatagcagaaaagctcccaccattttcttttgatgtggttttaaagtctcacgttctctataatagaaacagcaggtcttgtcagctccttgtgtggctgatgtgtctggaaatgatgtagttcaggaaagcattttttttttctttgaaccttaaaggttctattattaaaagcagcacagattccacatttttatacatgaggatcttctttgtggtgaataccaggattgactgcatccctttaaagaagttttatgtccctgactctggctaaaattatctaatttccagatgcttttgtagatgactgaagtatttgtgagccacatattgggagttctagatttgagtgaatggcaggaaagggccatctccattgagatgattaagtgaaccaaactagttctcagaattctacagagaaggagggaatcagactgaggaagctgtgacataggacttgaagaccaaagactttgaaatttgcgagctgctcatgtgtgagttattatcactgctgtctttctattgagttacaaatctatatttttattgaagtttaaataaagaaaaaatttacaaga

SEQ ID NO: 195248 - DNA, 2026 bp, Homo sapiens
  Payload ID: 18553
  Gene Name: tRNA isopentenyltransferase 1
  Uniprot ID: Q9H3H1
  ENST ID: ENST00000537440
  CDS Start-End: 813-1304
agactgccataagatggcgtccgtggcggctgcacgagcagttcccgtgggcagtgggctcaggggcctgcaacggaccctacctcttgtagtgattctcggggccacgggcaccggcaaatccacgctggcgttgcagctaggccagcggctcggcggtgagatcgtcagcgctgactccatgcaggtctatgaaggcctagacatcatcaccaacaaggtttctgcccaagagcagagaatctgccggcaccacatgatcagctttgtggatcctcttgtgaccaattacacagtggtggacttcagaaatagagcaactgctctgattgaagatatatttgcccgagacaaaattcctattgttgtgggaggaaccaattattacattgaatctctgctctggaaagttcttgtcaataccaagccccaggagatgggcactgagaaagtgattgaccgaaaagtggagcttgaaaaggaggatggtcttgtacttcacaaacgcctaagccaggtggacccagaaatggctgccaagctgcatccacatgacaaacgcaaagtggccaggagcttgcaagtttttgaagaaacaggaatctctcatagtgaatttctccatcgtcaacatacggaagaaggtggtggtccccttggaggtcctctgaagttctctaacccttgcatcctttggcttcatgctgaccaggcagttctagatgagcgcttggataagagggtggatgacatgcttgctgctgggctcttggaggaactaagagattttcacagacgctataatcagaagaatgtttcggaaaataggtattgaggctctgaaacaagtaactaagagatatgcccggaaacaaaaccgatgggttaaaaaccgttttttgagcagacctggtcccattgtcccccctgtctatggcttagaggtatctgatgtctcgaagtgggaagagtctgttcttgaacctgctcttgaaatcgtgcaaagtttcatccagggccacaagcctacagccactccaataaagatgccatacaatgaagctgagaacaagagaagttatcacctgtgtgacctctgtgatcgaatcatcattggggatcgcgaatgggcagcgcacataaaatccaaatcccacttgaaccaactgaagaaaagaagaagattggactcagatgctgtcaacaccatagaaagtcagagtgtttccccagaccataacaaagaacctaaagagaagggatccccagggcagaatgatcaagagctgaaatgcagcgtttaagagacatgtccagtggcctttggaaaggtggtggggatccagttcaggagggaggggtatgtttgtctcccagtctgggcaaaggagtgctatgcggaattctctgcatagcagaaaagctcccaccattttcttttgatgtggttttaaagtctcacgttctctataatagaaacagcaggtcttgtcagctccttgtgtggctgatgtgtctggaaatgatgtagttcaggaaagcattttttttttctttgaaccttaaaggttctattattaaaagcagcacagattccacatttttatacatgaggatcttctttgtggtgaataccaggattgactgcatccctttaaagaagttttatgtccctgactctggctaaaattatctaatttccagatgcttttgtagatgactgaagtatttgtgagccacatattgggagttctagatttgagtgaatggcaggaaagggccatctccattgagatgattaagtgaaccaaactagttctcagaattctacagagaaggagggaatcagactgaggaagctgtgacataggacttgaagaccaaagactttgaaatttgcgagctgctcatgtgtgagttattatcactgctgtctttctattgagttacaaatctatatttttattgaagtttaaataaagaaaaaatttacaagagcctctttgatccttaaaaagatatacaa

SEQ ID NO: 195249 - DNA, 545 bp, Homo sapiens
  Payload ID: 18553
  Gene Name: tRNA isopentenyltransferase 1
  ENST ID: ENST00000541099
  CDS Start-End: 258-515
caacggaccctacctcttgtagtgattctcggggccacgggcaccggcaaatccacgctggcgttgcagctaggccagcggctcggcggtgagatcgtcagcgctgactccatgcaggacctggtcccattgtcccccctgtctatggcttagaggtatctgatgtctcgaagtgggaagagtctgttcttgaacctgctcttgaaatcgtgcaaagtttcatccagggccacaagcctacagccactccaataaagatgccatacaatgaagctgagaacaagagaagttatcacctgtgtgacctctgtgatcgaatcatcattggggatcgcgaatgggcagcgcacataaaatccaaatcccacttgaaccaactgaagaaaagaagaagattggactcagatgctgtcaacaccatagaaagtcagagtgtttccccagaccataacaaagaacctaaagagaagggatccccagggcagaatgatcaagagctgaaatgcagcgtttaagagacatgtccagtggcctttggaaaggtg

SEQ ID NO: 195250 - DNA, 983 bp, Homo sapiens
  Payload ID: 18553
  Gene Name: tRNA isopentenyltransferase 1
  ENST ID: ENST00000492612
  CDS Start-End: 1-422
tggcggctgcacgagcagttcccgtgggcagtgggctcaggggcctgcaacggaccctacctcttgtagtgattctcggggccacgggcaccggcaaatccacgctggcgttgcagctaggccagcggctcggcggtgagatcgtcagcgctgactccatgcaggtctatgaaggcctagacatcatcaccaacaaggtttctgcccaagagcagagaatctgccggcaccacatgatcagctttgtggatcctcttgtgaccaattacacagtggtggacttcagaaatagagcaactgctctgattgaagatatatttgcccgagacaaaattcctattgttgtgggaggaaccaattattacattgaatctctgctctggaaagttcttgtcaataccaaggagcttgcaagtttttgaagaaacaggaatctctcatagtgaatttctccatcgtcaacatacggaagaaggtggtggtccccttggaggtcctctgaagttctctaacccttgcatcctttggcttcatgctgaccaggcagttctagatgagcgcttggataagagggtggatgacatgcttgctgctgggctcttggaggaactaagagattttcacagacgctataatcagaagaatgtttcggaaaatagccaggactatcaacatggtatcttccaatcaattggcttcaaggaatttcacgagtacctgatcactgagggaaaatgcacactggagactagtaaccagcttctaaagaaaggtattgaggctctgaaacaagtaactaagagatatgcccggaaacaaaaccgatgggttaaaaaccgttttttgagcagacctggtcccattgtcccccctgtctatggcttagaggtatctgatgtctcgaagtgggaagagtctgttcttgaacctgctcttgaaatcgtgcaaagtttcatccagggccacaagcctacagccactcc

SEQ ID NO: 195251 - DNA, 861 bp, Homo sapiens
  Payload ID: 18553
  Gene Name: tRNA isopentenyltransferase 1
  ENST ID: ENST00000489945
  CDS Start-End: 6-437
ataagatggcgtccgtggcggctgcacgagcagttcccgtgggcagtgggctcaggggcctgcaacggaccctacctcttgtagtgattctcggggccacgggcaccggcaaatccacgctggcgttgcagctaggccagcggctcggcggtgagatcgtcagcgctgactccatgcaggtctatgaaggcctagacatcatcaccaacaaggtttctgcccaagagcagagaatctgccggcaccacatgatcagctttgtggatcctcttgtgaccaattacacagtggtggacttcagaaatagagcaactgctctgattgaagatatatttgcccgagacaaaattcctattgttgtgggaggaaccaattattacattgaatctctgctctggaaagttcttgtcaataccaaggagcttgcaagtttttgaagaaacaggaatctctcatagtgaatttctccatcgtcaacatacggaagaaggtggtggtccccttggaggtcctctgaagttctctaacccttgcatcctttggcttcatgctgaccagttctagatgagcgcttggataagagggtggatgacatgcttgctgctgggctcttggaggaactaagagattttcacagacgctataatcagaagaatgtttcggaaaatagccaggactatcaacatggtatcttccaatcaattggcttcaaggaatttcacgagtacctgatcactgagggaaaatgcacactggagactagtaaccagcttctaaagaaaggtattgaggctctgaaacaagtaactaagagatatgcccggaaacaaaaccgatgggttaaaaaccgttttttgagca

SEQ ID NO: 195252 - DNA, 2000 bp, Homo sapiens
  Payload ID: 18553
  Gene Name: tRNA isopentenyltransferase 1
  ENST ID: ENST00000462797
  CDS Start-End: 14-1063
agactgccataagatggcgtccgtggcggctgcacgagcagttcccgtgggcagtgggctcaggggcctgcaacggaccctacctcttgtagtgattctcggggccacgggcaccggcaaatccacgctggcgttgcagctaggccagcggctcggcggtgagatcgtcagcgctgactccatgcaggtctatgaaggcctagacatcatcaccaacaaggtttctgcccaagagcagagaatctgccggcaccacatgatcagctttgtggatcctcttgtgaccaattacacagtggtggacttcagaaatagagcaactgctctgattgaagatatatttgcccgagacaaaattcctattgttgtgggaggaaccaattattacattgaatctctgctctggaaagttcttgtcaataccaagccccaggagatgggcactgagaaagtgattgaccgaaaagtggagcttgaaaaggaggatggtcttgtacttcacaaacgcctaagccaggtggacccagaaatggctgccaagctgcatccacatgacaaacgcaaagtggccaggagcttgcaagtttttgaagaaacaggaatctctcatagtgaatttctccatcgtcaacatacggaagaaggtggtggtccccttggaggtcctctgaagttctctaacccttgcatcctttggcttcatgctgaccaggcagttctagatgagcgcttggataagagggtggatgacatgcttgctgctgggctcttggaggaactaagagattttcacagacgctataatcagaagaatgtttcggaaaatagccaggactatcaacatggtatcttccaatcaattggcttcaaggaatttcacgagtacctgatcactgagggaaaatgcacactggagactagtaaccagcttctaaagaaaggtattgaggctctgaaacaagtaactaagagatatgcccggaaacaaaaccgatgggttaaaaaccgttttttgagcaggccacaagcctacagccactccaataaagatgccatacaatgaagctgagaacaagagaagttatcacctgtgtgacctctgtgatcgaatcatcattggggatcgcgaatgggcagcgcacataaaatccaaatcccacttgaaccaactgaagaaaagaagaagattggactcagatgctgtcaacaccatagaaagtcagagtgtttccccagaccataacaaagaacctaaagagaagggatccccagggcagaatgatcaagagctgaaatgcagcgtttaagagacatgtccagtggcctttggaaaggtggtggggatccagttcaggagggaggggtatgtttgtctcccagtctgggcaaaggagtgctatgcggaattctctgcatagcagaaaagctcccaccattttcttttgatgtggttttaaagtctcacgttctctataatagaaacagcaggtcttgtcagctccttgtgtggctgatgtgtctggaaatgatgtagttcaggaaagcattttttttttctttgaaccttaaaggttctattattaaaagcagcacagattccacatttttatacatgaggatcttctttgtggtgaataccaggattgactgcatccctttaaagaagttttatgtccctgactctggctaaaattatctaatttccagatgcttttgtagatgactgaagtatttgtgagccacatattgggagttctagatttgagtgaatggcaggaaagggccatctccattgagatgattaagtgaaccaaactagttctcagaattctacagagaaggagggaatcagactgaggaagctgtgacataggacttgaagaccaaagactttgaaatttgcgagctgctcatgtgtgagttattatcactgctgtctttctattgagttacaaatctatatttttattgaagtttaaataaagaaaaaatttacaaga

SEQ ID NO: 195253 - DNA, 850 bp, Homo sapiens
  Payload ID: 18553
  Gene Name: tRNA isopentenyltransferase 1
  ENST ID: ENST00000486825
  CDS Start-End: 1-245
ctgcacgagcagttcccgtgggcagtgggctcaggggcctgcaacggaccctacctcttgtagtgattctcggggccacgggcaccggcaaatccacgctggcgttgcagctaggccagcggctcggcggtgagatcgtcagcgctgactccatgcagttttggattcctcagaaacttgaatcagaccaggaccctgttggcctcttgatccctttggggctctgcttgtctatgaaggcctagacatcatcaccaacaaggtttctgcccaagagcagagaatctgccggcaccacatgatcagctttgtggatcctcttgtgaccaattacacagtggtggacttcagaaatagagcaactgctctgattgaagatatatttgcccgagacaaaattcctattgttgtgggaggaaccaattattacattgaatctctgctctggaaagttcttgtcaataccaaggagcttgcaagtttttgaagaaacaggaatctctcatagtgaatttctccatcgtcaacatacggaagaaggtggtggtccccttggaggtcctctgaagttctctaacccttgcatcctttggcttcatgctgaccagttctagatgagcgcttggataagagggtggatgacatgcttgctgctgggctcttggaggaactaagagattttcacagacgctataatcagaagaatgtttcggaaaatagccaggactatcaacatggtatcttccaatcaattggcttcaaggaatttcacgagtacctgatcactgagggaaaatgcacactggagactagtaaccagcttctaaagaaaggtattgaggctctgaaa

SEQ ID NO: 195254 - DNA, 1156 bp, Homo sapiens
  Payload ID: 18553
  Gene Name: tRNA isopentenyltransferase 1
  ENST ID: ENST00000495175
  CDS Start-End: 21-212
caagcgcagactgccataagatggcgtccgtggcggctgcacgagcagttcccgtgggcagtgggctcaggggcctgcaacggaccctacctcttgtagtgattctcggggccacgggcaccggcaaatccacgctggcgttgcagctaggccagcggctcggcggtgagatcgtcagcgctgactccatgcaggagcttgcaagtttttgaagaaacaggaatctctcatagtgaatttctccatcgtcaacatacggaagaaggtggtggtccccttggaggtcctctgaagttctctaacccttgcatcctttggcttcatgctgaccaggcagttctagatgagcgcttggataagagggtggatgacatgcttgctgctgggctcttggaggaactaagagattttcacagacgctataatcagaagaatgtttcggaaaatagccaggactatcaacatggtatcttccaatcaattggcttcaaggaatttcacgagtacctgatcactgagggaaaatgcacactggagactagtaaccagcttctaaagaaaggtattgaggctctgaaacaagtaactaagagatatgcccggaaacaaaaccgatgggttaaaaaccgttttttgagcagacctggtcccattgtcccccctgtctatggcttagaggtatctgatgtctcgaagtgggaagagtctgttcttgaacctgctcttgaaatcgtgcaaagtttcatccagggccacaagcctacagccactccaataaagatgccatacaatgaagctgagaacaagagaagttatcacctgtgtgacctctgtgatcgaatcatcattggggatcgcgaatgggcagcgcacataaaatccaaatcccacttgaaccaactgaagaaaagaagaagattggactcagatgctgtcaacaccatagaaagtcagagtgtttccccagaccataacaaagaacctaaagagaagggatccccagggcagaatgatcaagagctgaaatgcagcgtttaagagacatgtccagtggcctttggaaaggtggtggggatccagttcaggagggaggggtatgtttgtctcccagtctgggcaaaggagtgctatgcggaattctctgcatagcagaaaa

SEQ ID NO: 195255 - DNA, 773 bp, Homo sapiens
  Payload ID: 18553
  Gene Name: tRNA isopentenyltransferase 1
  ENST ID: ENST00000469476
  CDS Start-End: 1-513
atcatcaccaacaaggtttctgcccaagagcagagaatctgccggcaccacatgatcagctttgtggatcctcttgtgaccaattacacagtggtggacttcagaaatagagcaactgctctgattgaagatatatttgcccgagacaaaattcctattgttgtgggaggaaccaattattacattgaatctctgctctggaaagttcttgtcaataccaagccccaggagatgggcactgagaaagtgattgaccgaaaagtggagcttgaaaaggaggatggtcttgtacttcacaaacgcctaagccaggtggacccagaaatggctgccaagctgcatccacatgacaaacgcaaagtggccaggagcttgcaagtttttgaagaaacaggaatctctcatagtgaatttctccatcgtcaacatacggaagaaggtggtggtccccttggaggtcctctgaagttctctaacccttgcatcctttggcttcatgctgaccagttctagatgagcgcttggataagagggtggatgacatgcttgctgctgggctcttggaggaactaagagattttcacagacgctataatcagaagaatgtttcggaaaatagatgaaatggctcaactaggtccatctccaaagcccctgctagcttttaggagcaatggcttatctgctgataccctcctgttcccagccaggactatcaacatggtatcttccaatcaattggcttcaaggaatttcacgagtacctgatcact

SEQ ID NO: 195256 - DNA, 2179 bp, Homo sapiens
  Payload ID: 18554
  Gene Name: tRNA methyltransferase 1
  Uniprot ID: Q9NXH9
  ENST ID: ENST00000221504
  CDS Start-End: 259-2151
agcaggtgaggacgggctaggcagcgcggggagggattcggactcggggcgggcctgcacgagggcatcggctccacagggaccagtcatccccaaaacgaggggatatcagcttaccgaggccgcaggttttcctagtccctacctcatagatatgtaggacatccccgggcccggaatgcggctctctgaccctctctgtgccctcccccgccccccgaaccaggcttggcgggcggaggcgccagcggatgtctcatgcaaggatcgtctctgtggctaagcctcactttccgctccgcccgggtgctctctagagcccggtttttcgagtggcagtctccagggctgccgaatacagcagcgatggagaacggcaccgggccctacggagaagaacgtccacgtgaagtccaggagacgacagtcaccgagggggctgccaaaatcgcctttcccagtgccaacgaggtcttttataacccggtgcaggaattcaatcgggacctgacatgtgctgtgatcaccgagtttgctcgcattcagcttggggccaaaggaatccagatcaaggttccaggagagaaggacacgcaaaaagtggtcgtggacttgtcagagcaagaggaggaaaaggttgaactgaaagagagtgaaaacctggcctcaggagaccaacctcgcacagcggccgtgggggagatctgtgaggaaggcctgcatgtgctggaaggcctggcagcttcaggcctacgttccattcgatttgccctagaggtgcctgggctcagatctgtggttgcaaacgatgcctccacccgggctgtggatctcatacgccggaatgtccagctcaatgacgtggcccacctggtacagccgagccaagcagatgcccggatgctgatgtaccagcaccagagggtgtcggagaggtttgacgtcatcgatctggacccctatggcagcccagccaccttcctggatgcagctgtgcaggctgtgagtgaaggagggttgctgtgtgtgacctgcacagacatggcggtgttggcggggaacagcggggagacgtgctacagcaagtacggggccatggccctcaagagccgggcctgccacgagatggccctgagaatcgtcctgcacagcctggacctccgcgccaactgctaccagcgcttcgtggtgccgctgctcagcatcagcgctgacttctacgtgcgtgtttttgtccgtgtcttcaccggccaggccaaggtcaaggcctcagccagggccaagttctctgcagcctgtggtccccctgtgacccccgagtgtgaacactgtgggcaacgacaccagcttggtggccccatgtgggcagagcccatccatgacctggattttgtgggccgtgtcctggaggctgtgagcgctaaccccggccgcttccacacctcggagcggatccgaggggtcctgagcgtcatcactgaggagctcccggacgtgcctctgtactacaccctggaccagctgagcagcaccatccactgcaacacaccaagcctcctgcagttgcggtcggccctcctccacgctgacttccgggtctcactctcccacgcctgtaagaacgctgtgaagacggatgcccctgcctctgccctctgggacatcatgcgttgctgggagaaggaatgtccggtgaaacgggagcgactatcagagactagcccagcgttccgcattctcagtgtggagcccaggctgcaggccaacttcaccatccgggaagatgccaaccccagctcccgacagcgaggactcaagcgcttccaggctaacccggaggccaactggggtccccggcctcgtgcccggccagggggcaaggcggccgacgaagctatggaggagagacgcaggctgcttcagaacaagcggaaggagccgccggaagatgtggcccagcgggctgcccggctcaagacatttccttgcaagaggtttaaggagggcacctgtcaacgcggggaccagtgctgctactcccacagccccccgacacccagggtttctgctgatgctgcccctgactgtccagagacctccaaccagaccccccctggacctggggctgccgctgggccaggcatagactgaaccaataaagagatgtcacgtcaccttc

SEQ ID NO: 195257 - DNA, 2142 bp, Homo sapiens
  Payload ID: 18554
  Gene Name: tRNA methyltransferase 1
  Uniprot ID: Q9NXH9
  ENST ID: ENST00000357720
  CDS Start-End: 130-2109
gattcgcccacccactgtgccaacatggcggcgcccaggtcctaattcgggaaacgtgcaccttgactaattcggttttctgtggctacgagagcaggcttggcgggcggaggcgccagcggatgtctcatgcaaggatcgtctctgtggctaagcctcactttccgctccgcccgggtgctctctagagcccggtttttcgagtggcagtctccagggctgccgaatacagcagcgatggagaacggcaccgggccctacggagaagaacgtccacgtgaagtccaggagacgacagtcaccgagggggctgccaaaatcgcctttcccagtgccaacgaggtcttttataacccggtgcaggaattcaatcgggacctgacatgtgctgtgatcaccgagtttgctcgcattcagcttggggccaaaggaatccagatcaaggttccaggagagaaggacacgcaaaaagtggtcgtggacttgtcagagcaagaggaggaaaaggttgaactgaaagagagtgaaaacctggcctcaggagaccaacctcgcacagcggccgtgggggagatctgtgaggaaggcctgcatgtgctggaaggcctggcagcttcaggcctacgttccattcgatttgccctagaggtgcctgggctcagatctgtggttgcaaacgatgcctccacccgggctgtggatctcatacgccggaatgtccagctcaatgacgtggcccacctggtacagccgagccaagcagatgcccggatgctgatgtaccagcaccagagggtgtcggagaggtttgacgtcatcgatctggacccctatggcagcccagccaccttcctggatgcagctgtgcaggctgtgagtgaaggagggttgctgtgtgtgacctgcacagacatggcggtgttggcggggaacagcggggagacgtgctacagcaagtacggggccatggccctcaagagccgggcctgccacgagatggccctgagaatcgtcctgcacagcctggacctccgcgccaactgctaccagcgcttcgtggtgccgctgctcagcatcagcgctgacttctacgtgcgtgtttttgtccgtgtcttcaccggccaggccaaggtcaaggcctcagccagcaagcaggcgctggtgttccagtgtgtgggctgcggggccttccaccttcagcgtctcggcaaagcgtcaggagtccccagcggccgggccaagttctctgcagcctgtggtccccctgtgacccccgagtgtgaacactgtgggcaacgacaccagcttggtggccccatgtgggcagagcccatccatgacctggattttgtgggccgtgtcctggaggctgtgagcgctaaccccggccgcttccacacctcggagcggatccgaggggtcctgagcgtcatcactgaggagctcccggacgtgcctctgtactacaccctggaccagctgagcagcaccatccactgcaacacaccaagcctcctgcagttgcggtcggccctcctccacgctgacttccgggtctcactctcccacgcctgtaagaacgctgtgaagacggatgcccctgcctctgccctctgggacatcatgcgttgctgggagaaggaatgtccggtgaaacgggagcgactatcagagactagcccagcgttccgcattctcagtgtggagcccaggctgcaggccaacttcaccatccgggaagatgccaaccccagctcccgacagcgaggactcaagcgcttccaggctaacccggaggccaactggggtccccggcctcgtgcccggccagggggcaaggcggccgacgaagctatggaggagagacgcaggctgcttcagaacaagcggaaggagccgccggaagatgtggcccagcgggctgcccggctcaagacatttccttgcaagaggtttaaggagggcacctgtcaacgcggggaccagtgctgctactcccacagccccccgacacccagggtttctgctgatgctgcccctgactgtccagagacctccaaccagaccccccctggacctggggctgccgctgggccaggcatagactgaaccaataaagagatgtcacgtcaccttctcccg

SEQ ID NO: 195258 - DNA, 2263 bp, Homo sapiens
  Payload ID: 18554
  Gene Name: tRNA methyltransferase 1
  Uniprot ID: Q9NXH9
  ENST ID: ENST00000437766
  CDS Start-End: 251-2230
aggacgggctaggcagcgcggggagggattcggactcggggcgggcctgcacgagggcatcggctccacagggaccagtcatccccaaaacgaggggatatcagcttaccgaggccgcaggttttcctagtccctacctcatagatatgtaggacatccccgggcccggaatgcggctctctgaccctctctgtgccctcccccgccccccgaaccaggcttggcgggcggaggcgccagcggatgtctcatgcaaggatcgtctctgtggctaagcctcactttccgctccgcccgggtgctctctagagcccggtttttcgagtggcagtctccagggctgccgaatacagcagcgatggagaacggcaccgggccctacggagaagaacgtccacgtgaagtccaggagacgacagtcaccgagggggctgccaaaatcgcctttcccagtgccaacgaggtcttttataacccggtgcaggaattcaatcgggacctgacatgtgctgtgatcaccgagtttgctcgcattcagcttggggccaaaggaatccagatcaaggttccaggagagaaggacacgcaaaaagtggtcgtggacttgtcagagcaagaggaggaaaaggttgaactgaaagagagtgaaaacctggcctcaggagaccaacctcgcacagcggccgtgggggagatctgtgaggaaggcctgcatgtgctggaaggcctggcagcttcaggcctacgttccattcgatttgccctagaggtgcctgggctcagatctgtggttgcaaacgatgcctccacccgggctgtggatctcatacgccggaatgtccagctcaatgacgtggcccacctggtacagccgagccaagcagatgcccggatgctgatgtaccagcaccagagggtgtcggagaggtttgacgtcatcgatctggacccctatggcagcccagccaccttcctggatgcagctgtgcaggctgtgagtgaaggagggttgctgtgtgtgacctgcacagacatggcggtgttggcggggaacagcggggagacgtgctacagcaagtacggggccatggccctcaagagccgggcctgccacgagatggccctgagaatcgtcctgcacagcctggacctccgcgccaactgctaccagcgcttcgtggtgccgctgctcagcatcagcgctgacttctacgtgcgtgtttttgtccgtgtcttcaccggccaggccaaggtcaaggcctcagccagcaagcaggcgctggtgttccagtgtgtgggctgcggggccttccaccttcagcgtctcggcaaagcgtcaggagtccccagcggccgggccaagttctctgcagcctgtggtccccctgtgacccccgagtgtgaacactgtgggcaacgacaccagcttggtggccccatgtgggcagagcccatccatgacctggattttgtgggccgtgtcctggaggctgtgagcgctaaccccggccgcttccacacctcggagcggatccgaggggtcctgagcgtcatcactgaggagctcccggacgtgcctctgtactacaccctggaccagctgagcagcaccatccactgcaacacaccaagcctcctgcagttgcggtcggccctcctccacgctgacttccgggtctcactctcccacgcctgtaagaacgctgtgaagacggatgcccctgcctctgccctctgggacatcatgcgttgctgggagaaggaatgtccggtgaaacgggagcgactatcagagactagcccagcgttccgcattctcagtgtggagcccaggctgcaggccaacttcaccatccgggaagatgccaaccccagctcccgacagcgaggactcaagcgcttccaggctaacccggaggccaactggggtccccggcctcgtgcccggccagggggcaaggcggccgacgaagctatggaggagagacgcaggctgcttcagaacaagcggaaggagccgccggaagatgtggcccagcgggctgcccggctcaagacatttccttgcaagaggtttaaggagggcacctgtcaacgcggggaccagtgctgctactcccacagccccccgacacccagggtttctgctgatgctgcccctgactgtccagagacctccaaccagaccccccctggacctggggctgccgctgggccaggcatagactgaaccaataaagagatgtcacgtcaccttctcccg

SEQ ID NO: 195259 - DNA, 813 bp, Homo sapiens
  Payload ID: 18554
  Gene Name: tRNA methyltransferase 1
  ENST ID: ENST00000587487
  CDS Start-End: 240-813
cgggaaacgtgcaccttgactaattcggttttctgtggctacgagagcaggaaggcctgcatgtgctggaaggcctggcagcttcaggcctacgttccattcgatttgccctagaggtgcctgggctcagatctgtggttgcaaacgatgcctccacccgggctgtggatctcatacgccggaatgtccagctcaatgacgtggcccacctggtacagccgagccaagcagatgcccggatgctgatgtaccagcaccagagggtgtcggagaggtttgacgtcatcgatctggacccctatggcagcccagccaccttcctggatgcagctgtgcaggctgtgagtgaaggagggttgctgtgtgtgacctgcacagacatggcggtgttggcggggaacagcggggagacgtgctacagcaagtacggggccatggccctcaagagccgggcctgccacgagatggccctgagaatcgtcctgcacagcctggacctccgcgccaactgctaccagcgcttcgtggtgccgctgctcagcatcagcgctgacttctacgtgcgtgtttttgtccgtgtcttcaccggccaggccaaggtcaaggcctcagccagcaagcaggcgctggtgttccagtgtgtgggctgcggggccttccaccttcagcgtctcggcaaagcgtcaggagtccccagcggccgggccaagttctctgcagcctgtggtccccctgtgacccccgagtgtgaacactgtgggcaacgacaccagcttggtggccccatgtgggcagagcccatccatgacctgg

SEQ ID NO: 195260 - DNA, 648 bp, Homo sapiens
  Payload ID: 18554
  Gene Name: tRNA methyltransferase 1
  ENST ID: ENST00000587633
  CDS Start-End: 1-306
cgcattcagcttggggccaaaggaatccagatcaaggttccaggagagaaggacacgcaaaaagtggtcgtggacttgtcagagcaagaggaggaaaaggttgaactgaaagagagtgaaaacctggcctcaggagaccaacctcgcacagcggccgtgggggagatctgtgagaggtgcctgggctcagatctgtggttgcaaacgatgcctccacccgggctgtggatctcatacgccggaatgtccagctcaatgacgtggcccacctggtacagccgagccaagcagatgcccggatgctgatgtaccagcaccagagggtgtcggagaggtttgacgtcatcgatctggacccctatggcagcccagccaccttcctggatgcagctgtgcaggctgtgagtgaaggagggttgctgtgtgtgacctgcacagacatggcggtgttggcggggaacagcggggagacgtgctacagcaagtacggggccatggccctcaagagccgggcctgccacgagatggccctgagaatcgtcctgcacagcctggacctccgcgccaactgctaccagcgcttcgtggtgccgctgctcagcatcagcgctgacttctacgtgcgtgtttttgtccgtgtcttcaccg

SEQ ID NO: 195261 - DNA, 582 bp, Homo sapiens
  Payload ID: 18554
  Gene Name: tRNA methyltransferase 1
  ENST ID: ENST00000591717
  CDS Start-End: 130-447
gattcgcccacccactgtgccaacatggcggcgcccaggtcctaattcgggaaacgtgcaccttgactaattcggttttctgtggctacgagagcaggcttggcgggcggaggcgccagcggatgtctcatgcaaggatcgtctctgtggctaagcctcactttccgctccgcccgggtgctctctagagcccggtttttcgagtggcagtctccagggctgccgaatacagcagcgatggagaacggcaccgggccctacggagaagaacgtccacgtgaagtccaggagacgacagtcaccgagggggctgccaaaatcgcctttcccagtgccaacgaggtcttttataacccggtgcaggaattcaatcgggacctgacgaaggcctgcatgtgctggaaggcctggcagcttcaggcctacgttccattcgatttgccctagaggtgcctgggctcagatctgtggttgcaaacgatgcctccacccgggctgtggatctcatacgccggaatgtccagctcaatgacgtggcccacctggtacagccgagccaagcagatgcccggatgctgatgt

SEQ ID NO: 195262 - DNA, 2579 bp, Homo sapiens
  Payload ID: 18554
  Gene Name: tRNA methyltransferase 1
  Uniprot ID: Q9NXH9
  ENST ID: ENST00000592062
  CDS Start-End: 572-2551
aaaagaaagaaagaaagaaaaggaggcacagagaaatgaagaaagctggtcaagatcatcacacagcaaggaagtgatggtaagaaaagtgaagccgcgggagtaacctgcccagagcatgtgatgggactgagattcaaacccggtaaatccaactccagagcctgagtcattcctgcagggtgctctgaaataatgtgtatatagcacccagaacacagaagaggaccaataagtgttgggtttctccgcttaccgccccttttctgagccacaacttcctcatctgtgaaatgggactagggacgtgtcctctcccaggggatccactgtgattaacacccccggaacagcacgatcagcgcgcttcctttatggctttcattttgatcccggccgcccaccgtacgtttcctcattgactggccaaccactatcatgtgattcgcccacccactgtgccaacatggcggcgcccaggtcctaattcgggaaacgtgcaccttgactaattcggttttctgtggctacgagagcaggcttggcgggcggaggcgccagcggatgtctcatgcaaggatcgtctctgtggctaagcctcactttccgctccgcccgggtgctctctagagcccggtttttcgagtggcagtctccagggctgccgaatacagcagcgatggagaacggcaccgggccctacggagaagaacgtccacgtgaagtccaggagacgacagtcaccgagggggctgccaaaatcgcctttcccagtgccaacgaggtcttttataacccggtgcaggaattcaatcgggacctgacatgtgctgtgatcaccgagtttgctcgcattcagcttggggccaaaggaatccagatcaaggttccaggagagaaggacacgcaaaaagtggtcgtggacttgtcagagcaagaggaggaaaaggttgaactgaaagagagtgaaaacctggcctcaggagaccaacctcgcacagcggccgtgggggagatctgtgaggaaggcctgcatgtgctggaaggcctggcagcttcaggcctacgttccattcgatttgccctagaggtgcctgggctcagatctgtggttgcaaacgatgcctccacccgggctgtggatctcatacgccggaatgtccagctcaatgacgtggcccacctggtacagccgagccaagcagatgcccggatgctgatgtaccagcaccagagggtgtcggagaggtttgacgtcatcgatctggacccctatggcagcccagccaccttcctggatgcagctgtgcaggctgtgagtgaaggagggttgctgtgtgtgacctgcacagacatggcggtgttggcggggaacagcggggagacgtgctacagcaagtacggggccatggccctcaagagccgggcctgccacgagatggccctgagaatcgtcctgcacagcctggacctccgcgccaactgctaccagcgcttcgtggtgccgctgctcagcatcagcgctgacttctacgtgcgtgtttttgtccgtgtcttcaccggccaggccaaggtcaaggcctcagccagcaagcaggcgctggtgttccagtgtgtgggctgcggggccttccaccttcagcgtctcggcaaagcgtcaggagtccccagcggccgggccaagttctctgcagcctgtggtccccctgtgacccccgagtgtgaacactgtgggcaacgacaccagcttggtggccccatgtgggcagagcccatccatgacctggattttgtgggccgtgtcctggaggctgtgagcgctaaccccggccgcttccacacctcggagcggatccgaggggtcctgagcgtcatcactgaggagctcccggacgtgcctctgtactacaccctggaccagctgagcagcaccatccactgcaacacaccaagcctcctgcagttgcggtcggccctcctccacgctgacttccgggtctcactctcccacgcctgtaagaacgctgtgaagacggatgcccctgcctctgccctctgggacatcatgcgttgctgggagaaggaatgtccggtgaaacgggagcgactatcagagactagcccagcgttccgcattctcagtgtggagcccaggctgcaggccaacttcaccatccgggaagatgccaaccccagctcccgacagcgaggactcaagcgcttccaggctaacccggaggccaactggggtccccggcctcgtgcccggccagggggcaaggcggccgacgaagctatggaggagagacgcaggctgcttcagaacaagcggaaggagccgccggaagatgtggcccagcgggctgcccggctcaagacatttccttgcaagaggtttaaggagggcacctgtcaacgcggggaccagtgctgctactcccacagccccccgacacccagggtttctgctgatgctgcccctgactgtccagagacctccaaccagaccccccctggacctggggctgccgctgggccaggcatagactgaaccaataaagagatgtcacgtcaccttc

SEQ ID NO: 195263 - DNA, 985 bp, Homo sapiens
  Payload ID: 18554
  Gene Name: tRNA methyltransferase 1
  ENST ID: ENST00000592814
  CDS Start-End: 93-985
ggtcctaattcgggaaacgtgcaccttgactaattcggttttctgtggctacgagagcaggcttggcgggcggaggcgccagcggatgtctcatgcaaggatcgtctctgtggctaagcctcactttccgctccgcccgggtgctctctagagcccggtttttcgagtggcagtctccagggctgccgaatacagcagcgatggagaacggcaccgggccctacggagaagaacgtccacgtgaagtccaggagacgacagtcaccgagggggctgccaaaatcgcctttcccagtgccaacgaggtcttttataacccggtgcaggaattcaatcgggacctgacatgtgctgtgatcaccgagtttgctcgcattcagcttggggccaaaggaatccagatcaaggttccaggagagaaggacacgcaaaaagtggtcgtggacttgtcagagcaagaggaggaaaaggttgaactgaaagagagtgaaaacctggcctcaggagaccaacctcgcacagcggccgtgggggagatctgtgaggaaggcctgcatgtgctggaaggcctggcagcttcaggcctacgttccattcgatttgccctagaggtgcctgggctcagatctgtggttgcaaacgatgcctccacccgggctgtggatctcatacgccggaatgtccagctcaatgacgtggcccacctggtacagccgagccaagcagatgcccggatgctgatgtaccagcaccagagggtgtcggagaggtttgacgtcatcgatctggacccctatggcagcccagccaccttcctggatgcagctgtgcaggctgccctgagaatcgtcctgcacagcctggacctccgcgccaactgctaccagcgcttcgtggtgccgctgctcagcatcagcgctgacttctacgtgcgtgtttttgtccgtgtcttcaccggccaggccaaggtcaaggcctcagccag

SEQ ID NO: 195264 - DNA, 552 bp, Homo sapiens
  Payload ID: 18554
  Gene Name: tRNA methyltransferase 1
  ENST ID: ENST00000588229
  CDS Start-End: 117-552
actgtgccaacatggcggcgcccaggtcctaattcgggaaacgtgcaccttgactaattcggttttctgtggctacgagagcaggcttggcgggcggaggcgccagcggatgtctcatgcaaggatcgtctctgtggctaagcctcactttccgctccgcccgggtgctctctagagcccggtttttcgagtggcagtctccagggctgccgaatacagcagcgatggagaacggcaccgggccctacggagaagaacgtccacgtgaagtccaggagacgacagtcaccgagggggctgccaaaatcgcctttcccagtgccaacgaggtcttttataacccggtgcaggaattcaatcgggacctgacatgtgctgtgatcaccgagtttgctcgcattcagcttggggccaaaggaatccagagtgagtggaggtccaggcttctggtgggcgggggtcacacaagtttatctccctgcctgggctcttctgccgcccaaatccagaggggcttcagccacatagcaggccctgggttctgctccttca

SEQ ID NO: 195265 - DNA, 562 bp, Homo sapiens
  Payload ID: 18554
  Gene Name: tRNA methyltransferase 1
  ENST ID: ENST00000588746
  CDS Start-End: 117-374
actgtgccaacatggcggcgcccaggtcctaattcgggaaacgtgcaccttgactaattcggttttctgtggctacgagagcaggcttggcgggcggaggcgccagcggatgtctcatgcaaggatcgtctctgtggctaagcctcactttccgctccgcccgggtgctctctagagcccggtttttcgagtggcagtctccagggctgccgaatacagcagcgatggagaacggcaccgggccctacggagaagaacgtccacgtgaagtccaggagacgacagtcaccgagggggctgccaaaatcgcctttcccagtgccaacgaggtcttttataacccggtgcaggaattcaatcgggacctgacgtgagcaggggtcagacgttagcctggcatcggctagtggtcaaggttccaggagagaaggacacgcaaaaagtggtcgtggacttgtcagagcaagaggaggaaaaggttgaactgaaagagagtgaaaacctggcctcaggagaccaacctcgcacagcggccgtgggggagatctgtgaggaaggcctg

SEQ ID NO: 195266 - DNA, 543 bp, Homo sapiens
  Payload ID: 18554
  Gene Name: tRNA methyltransferase 1
  ENST ID: ENST00000586224
  CDS Start-End: 129-470
attcgcccacccactgtgccaacatggcggcgcccaggtcctaattcgggaaacgtgcaccttgactaattcggttttctgtggctacgagagcaggcttggcgggcggaggcgccagcggatgtctcatgcaaggatcgtctctgtggctaagcctcactttccgctccgcccgggtgctctctagagcccggtttttcgagtggcagtctccagggctgccgaatacagcagcgatggagaacggcaccgggccctacggagaagaacgtccacgtgaagtccaggagacgacagtcaccgagggggctgccaaaatcgcctttcccagtgccaacgagatgtgctgtgatcaccgagtttgctcgcattcagcttggggccaaaggaatccagatcaaggttccaggagagaaggacacgcaaaaagtggtcgtggacttgtcagagcaagaggaggaaaaggttgaactgaaagagagtgaaaacctggcctcaggagaccaacctcgcacagcggccgtgggggagatctgtgaggaa

SEQ ID NO: 195267 - DNA, 3694 bp, Homo sapiens
  Payload ID: 18555
  Gene Name: tRNA methyltransferase 10A
  Uniprot ID: Q8TBZ6
  ENST ID: ENST00000273962
  CDS Start-End: 314-1333
gtttgctggctgggagcctagaagggatagtgggcgaggctccgccccgtggtggggcgctttccgtcggcgtgtgttttggggttgccatcggcccgtagtatgtgaaaagtgagtttgcaaagaatcagtgggaaatctgtactctaaagggccggaaagcgtgttatggccctgccacttcgtggctagagaccgtgggctttacctctttaaagctgccttacctcatttttcctgcaaagggctgacgtcgctgaactctctgaaatgtagagagcccgaggggaagttgctgcagaggcaccaaataatgtcatctgaaatgttgccagcatttattgaaacttctaatgttgacaaaaagcaaggcataaatgaagatcaagaggagagccagaagccaagattaggtgaagggtgtgaaccaatatctaaacgacaaatgaaaaaactaataaaacagaaacaatgggaagagcaacgggaactccgcaaacaaaagcgaaaagaaaaacgcaagaggaaaaaattagagcgacaatgtcaaatggaaccaaactcagatggacatgacagaaaacgtgttcgaagagatgttgttcatagcacccttcgccttattattgactgtagttttgatcacttgatggtattaaaggacattaagaaacttcataagcagattcaacgatgttacgcagaaaaccgacgggcactgcatcctgtgcagttttacttgacaagccacggaggccagctgaaaaagaacatggatgaaaatgacaaaggatgggtcaactggaaggatatccatatcaaaccagagcactatagtgaactcataaagaaagaagacctgatttaccttacgtcagattcacctaatatactgaaggaattagatgaatcaaaggcctatgtgattggaggattagtagatcacaaccatcacaagggactcacatataaacaagcgtcagattatggaatcaatcatgcacagctcccacttggaaattttgtgaagatgaatagtcgaaaagttttggcagttaatcatgtgtttgaaattattctggaatacctggaaacaagagactggcaagaagcattttttactatcttgccccaacggaaaggagctgttcccacagacaaagcctgtgaaagtgcttctcatgacaatcagtctgtcaggatggaggaaggtggatcggacagtgattccagtgaggaggaatatagcagaaatgaactagattcaccacatgaagaaaagcaggataaggaaaatcacactgaatctacagtgaactctctgccacactaatgttacctggtttccttttagtttaaggaaaaattaggagaaagtgaggtgctatatagaatattgaaattggaagaacattttattttctcttatttctgttgtgatttttaaaaacttttttttggacctaaataataataaaaaaaaaagccctttaaactttgtaaggaaatattttttgattttgcgtaagaagatttaaatgtgtatgtgattttttttgtttttgtttttaaagcctcagtagtttctagataattttactgtattagtatattttcattttctttcattttatattctttagaatgtgccttctgacctttcagttttttaattttatagtcacatcaacatctttatgatctattgcctatatatctgtgagggcacatattcataaatatactgtcaatctatcagcatttgtgtatggtaggttaccctctatttgcagcttttatgtttaaattagttacttgaaagaatgtagtaattttaggaagaagtatcagtttgatagacttaataattcatttcttttggactatggagcgcatatctgttccttctttatgatgcctttttatggttctgaagtaattactgaagagttgagaatctctttaatgcattttcttaattcttacaatggtgataagttacttcaattataaaattgaattttgcagactaaattattttataaggctgttgctattgaaagatcaattttgtctttacctgcatttaaaatggaacagctcttagcagctgtggtttttttttccatattttttttaaatttgttggctcttaagatgaataaagtttataggtgcatctgcctcctcttctctaagaatatgcatactaatgtttgtttctataaatcaaatacacatgtgataatatgcatgtaaatacataactatcctcatcatgtatggctctcagttcttaattgatgataacatgattgaattgccatatatctgtattacttgtgtgaatggttgtgttgaacacgctaagaacaatttgaattttattaagtacaaaaatccttaacgtttgtatgggaacattggcaagaaagaatagtgtgaaagggaactgttttagtttcctatcagtaattgtacatgcagttaaatgtttaaggtaaaatgattggtctctgtcacagctaaaagatttcagtagccttcattgagtttgggtaaaataagttgctgttcttttgtcttctttttaatatataaaagttatatttaaaaagtatataacatactatatatgttacatactaacatatatatacacaacagaaagtttattggatttagtactgatatttactgtctatttttgttactttgttcttagtaatctattatagttacctattttaaggtaaggtctgtaggcaagatatgtaagtaaagacaagccctacaattttaaaataacaaagcttatgtcttaagttgtattttttcaaaggttcatgtttttctgagtaaatgtggtttattagcatgaaatattatgccttttacttaaattattttatgtaaaatagggcactgtttaattatgaaagggggaaaatcattccaaataagagtttaatttttattaattataaaaaactctgtattagtttcctagatgtgctagaacaaattaccacaaactgggtggctttaaacaacagaaatttattctcttaacagttccagagactaaatgtccagactcacaatgtcccagtgccatgcttcctccttaggccctaggaaagaatacttcctagcctcttcctggcttttggtggttgccagcaatccctgctgttccttagcctatagtggcttgactccaatctcagttttgttgtcaagtggtcttctaccctgtcttctatgtttgtatccgtgtccaaactctttttctagggagaccagcactggattagagttcaccatgatccaatatgacctcatcttgactacatccgcaaagaccctgtctccaaataaggtcacatttacagggtaccatgtgttaggatttgacatatcttttgggggacacaattctacccactacaggcccatatcttatctaggatgttggtggcaagaaggtgaagattactacctcttttgatataactagtttctgaggtatttaaaaatttggttttaaaaatattaagctttttgctcatttgcatgtatacttttctctcaacattgttttggtttatttaggttatttgttaaaacttcagtaaatactaaagttacttgtattagaacataataaaagtagagaattaaactacctaaa

SEQ ID NO: 195268 - DNA, 1638 bp, Homo sapiens
  Payload ID: 18555
  Gene Name: tRNA methyltransferase 10A
  Uniprot ID: Q8TBZ6
  ENST ID: ENST00000394876
  CDS Start-End: 144-1163
aactaccgcccctgcctctgggaattgaagtttctgtggaaggaagcgtgagccgtaaccaggccaacccagaaaggctttctttctgagatttcacttccctgtcaactcttcagctcgttgtttttcagaggcaccaaataatgtcatctgaaatgttgccagcatttattgaaacttctaatgttgacaaaaagcaaggcataaatgaagatcaagaggagagccagaagccaagattaggtgaagggtgtgaaccaatatctaaacgacaaatgaaaaaactaataaaacagaaacaatgggaagagcaacgggaactccgcaaacaaaagcgaaaagaaaaacgcaagaggaaaaaattagagcgacaatgtcaaatggaaccaaactcagatggacatgacagaaaacgtgttcgaagagatgttgttcatagcacccttcgccttattattgactgtagttttgatcacttgatggtattaaaggacattaagaaacttcataagcagattcaacgatgttacgcagaaaaccgacgggcactgcatcctgtgcagttttacttgacaagccacggaggccagctgaaaaagaacatggatgaaaatgacaaaggatgggtcaactggaaggatatccatatcaaaccagagcactatagtgaactcataaagaaagaagacctgatttaccttacgtcagattcacctaatatactgaaggaattagatgaatcaaaggcctatgtgattggaggattagtagatcacaaccatcacaagggactcacatataaacaagcgtcagattatggaatcaatcatgcacagctcccacttggaaattttgtgaagatgaatagtcgaaaagttttggcagttaatcatgtgtttgaaattattctggaatacctggaaacaagagactggcaagaagcattttttactatcttgccccaacggaaaggagctgttcccacagacaaagcctgtgaaagtgcttctcatgacaatcagtctgtcaggatggaggaaggtggatcggacagtgattccagtgaggaggaatatagcagaaatgaactagattcaccacatgaagaaaagcaggataaggaaaatcacactgaatctacagtgaactctctgccacactaatgttacctggtttccttttagtttaaggaaaaattaggagaaagtgaggtgctatatagaatattgaaattggaagaacattttattttctcttatttctgttgtgatttttaaaaacttttttttggacctaaataataataaaaaaaaaagccctttaaactttgtaaggaaatattttttgattttgcgtaagaagatttaaatgtgtatgtgattttttttgtttttgtttttaaagcctcagtagtttctagataattttactgtattagtatattttcattttctttcattttatattctttagaatgtgccttctgacctttcagttttttaattttatagtcacatcaacatctttatgatctattgcctatatatctgtgagggcacatattcataaatatactgtcaatctatcagcatttgtgtatggtaggttaccctctatttgcagcttttatgtttaaat

SEQ ID NO: 195269 - DNA, 3516 bp, Homo sapiens
  Payload ID: 18555
  Gene Name: tRNA methyltransferase 10A
  Uniprot ID: Q8TBZ6
  ENST ID: ENST00000394877
  CDS Start-End: 118-1137
ctctgggaattgaagtttctgtggaaggaagcgtgagccgtaaccaggccaacccagaaaggctttctttctgagatttcacttccctgtcaactcttcagctcgaggcaccaaataatgtcatctgaaatgttgccagcatttattgaaacttctaatgttgacaaaaagcaaggcataaatgaagatcaagaggagagccagaagccaagattaggtgaagggtgtgaaccaatatctaaacgacaaatgaaaaaactaataaaacagaaacaatgggaagagcaacgggaactccgcaaacaaaagcgaaaagaaaaacgcaagaggaaaaaattagagcgacaatgtcaaatggaaccaaactcagatggacatgacagaaaacgtgttcgaagagatgttgttcatagcacccttcgccttattattgactgtagttttgatcacttgatggtattaaaggacattaagaaacttcataagcagattcaacgatgttacgcagaaaaccgacgggcactgcatcctgtgcagttttacttgacaagccacggaggccagctgaaaaagaacatggatgaaaatgacaaaggatgggtcaactggaaggatatccatatcaaaccagagcactatagtgaactcataaagaaagaagacctgatttaccttacgtcagattcacctaatatactgaaggaattagatgaatcaaaggcctatgtgattggaggattagtagatcacaaccatcacaagggactcacatataaacaagcgtcagattatggaatcaatcatgcacagctcccacttggaaattttgtgaagatgaatagtcgaaaagttttggcagttaatcatgtgtttgaaattattctggaatacctggaaacaagagactggcaagaagcattttttactatcttgccccaacggaaaggagctgttcccacagacaaagcctgtgaaagtgcttctcatgacaatcagtctgtcaggatggaggaaggtggatcggacagtgattccagtgaggaggaatatagcagaaatgaactagattcaccacatgaagaaaagcaggataaggaaaatcacactgaatctacagtgaactctctgccacactaatgttacctggtttccttttagtttaaggaaaaattaggagaaagtgaggtgctatatagaatattgaaattggaagaacattttattttctcttatttctgttgtgatttttaaaaacttttttttggacctaaataataataaaaaaaaaagccctttaaactttgtaaggaaatattttttgattttgcgtaagaagatttaaatgtgtatgtgattttttttgtttttgtttttaaagcctcagtagtttctagataattttactgtattagtatattttcattttctttcattttatattctttagaatgtgccttctgacctttcagttttttaattttatagtcacatcaacatctttatgatctattgcctatatatctgtgagggcacatattcataaatatactgtcaatctatcagcatttgtgtatggtaggttaccctctatttgcagcttttatgtttaaattagttacttgaaagaatgtagtaattttaggaagaagtatcagtttgatagacttaataattcatttcttttggactatggagcgcatatctgttccttctttatgatgcctttttatggttctgaagtaattactgaagagttgagaatctctttaatgcattttcttaattcttacaatggtgataagttacttcaattataaaattgaattttgcagactaaattattttataaggctgttgctattgaaagatcaattttgtctttacctgcatttaaaatggaacagctcttagcagctgtggtttttttttccatattttttttaaatttgttggctcttaagatgaataaagtttataggtgcatctgcctcctcttctctaagaatatgcatactaatgtttgtttctataaatcaaatacacatgtgataatatgcatgtaaatacataactatcctcatcatgtatggctctcagttcttaattgatgataacatgattgaattgccatatatctgtattacttgtgtgaatggttgtgttgaacacgctaagaacaatttgaattttattaagtacaaaaatccttaacgtttgtatgggaacattggcaagaaagaatagtgtgaaagggaactgttttagtttcctatcagtaattgtacatgcagttaaatgtttaaggtaaaatgattggtctctgtcacagctaaaagatttcagtagccttcattgagtttgggtaaaataagttgctgttcttttgtcttctttttaatatataaaagttatatttaaaaagtatataacatactatatatgttacatactaacatatatatacacaacagaaagtttattggatttagtactgatatttactgtctatttttgttactttgttcttagtaatctattatagttacctattttaaggtaaggtctgtaggcaagatatgtaagtaaagacaagccctacaattttaaaataacaaagcttatgtcttaagttgtattttttcaaaggttcatgtttttctgagtaaatgtggtttattagcatgaaatattatgccttttacttaaattattttatgtaaaatagggcactgtttaattatgaaagggggaaaatcattccaaataagagtttaatttttattaattataaaaaactctgtattagtttcctagatgtgctagaacaaattaccacaaactgggtggctttaaacaacagaaatttattctcttaacagttccagagactaaatgtccagactcacaatgtcccagtgccatgcttcctccttaggccctaggaaagaatacttcctagcctcttcctggcttttggtggttgccagcaatccctgctgttccttagcctatagtggcttgactccaatctcagttttgttgtcaagtggtcttctaccctgtcttctatgtttgtatccgtgtccaaactctttttctagggagaccagcactggattagagttcaccatgatccaatatgacctcatcttgactacatccgcaaagaccctgtctccaaataaggtcacatttacagggtaccatgtgttaggatttgacatatcttttgggggacacaattctacccactacaggcccatatcttatctaggatgttggtggcaagaaggtgaagattactacctcttttgatataactagtttctgaggtatttaaaaatttggttttaaaaatattaagctttttgctcatttgcatgtatacttttctctcaacattgttttggtttatttaggttatttgttaaaacttcagtaaatactaaagttacttgtattagaacataataaaagtagagaattaaactacctaaataaatgcatcaaaaaata

SEQ ID NO: 195270 - DNA, 802 bp, Homo sapiens
  Payload ID: 18555
  Gene Name: tRNA methyltransferase 10A
  ENST ID: ENST00000455368
  CDS Start-End: 186-802
ccgcggcctacccagctgctccctggttcgccagagacagcttaatcccgtctctgaaatgcgtttgctggctgggagcctagaagggatagtgggcgaggctccgccccgtggtggggcgctttccgtcggcgtgtgttttggggttgccatcggcccgtagtatgtgaaaaaggcaccaaataatgtcatctgaaatgttgccagcatttattgaaacttctaatgttgacaaaaagcaaggcataaatgaagatcaagaggagagccagaagccaagattaggtgaagggtgtgaaccaatatctaaacgacaaatgaaaaaactaataaaacagaaacaatgggaagagcaacgggaactccgcaaacaaaagcgaaaagaaaaacgcaagaggaaaaaattagagcgacaatgtcaaatggaaccaaactcagatggacatgacagaaaacgtgttcgaagagatgttgttcatagcacccttcgccttattattgactgtagttttgatcacttgatggtattaaaggacattaagaaacttcataagcagattcaacgatgttacgcagaaaaccgacgggcactgcatcctgtgcagttttacttgacaagccacggaggccagctgaaaaagaacatggatgaaaatgacaaaggatgggtcaactggaaggatatccatatcaaaccagagcactatagtgaactcataaagaaagaagacctgatttaccttacgtcagattcacctaatatactgaaggaattagatgaatcaaaggcctatgtgattgg

SEQ ID NO: 195271 - DNA, 788 bp, Homo sapiens
  Payload ID: 18555
  Gene Name: tRNA methyltransferase 10A
  ENST ID: ENST00000514547
  CDS Start-End: 190-788
ctacccagctgctccctggttcgccagagacagcttaatcccgtctctgaaatgcgtttgctggctgggagcctagaagggatagtgggcgaggctccgccccgtggtggggcgctttccgtcggcgtgtgttttggggttgccatcggcccgtagtatgtgaaaattgtttttcagaggcaccaaataatgtcatctgaaatgttgccagcatttattgaaacttctaatgttgacaaaaagcaaggcataaatgaagatcaagaggagagccagaagccaagattaggtgaagggtgtgaaccaatatctaaacgacaaatgaaaaaactaataaaacagaaacaatgggaagagcaacgggaactccgcaaacaaaagcgaaaagaaaaacgcaagaggaaaaaattagagcgacaatgtcaaatggaaccaaactcagatggacatgacagaaaacgtgttcgaagagatgttgttcatagcacccttcgccttattattgactgtagttttgatcacttgatggtattaaaggacattaagaaacttcataagcagattcaacgatgttacgcagaaaaccgacgggcactgcatcctgtgcagttttacttgacaagccacggaggccagctgaaaaagaacatggatgaaaatgacaaaggatgggtcaactggaaggatatccatatcaaaccagagcactatagtgaactcataaagaaagaagacctgatttaccttacgtcagattcacctaatatactgaaggaattagatgaatc

SEQ ID NO: 195272 - DNA, 2281 bp, Homo sapiens
  Payload ID: 18556
  Gene Name: tRNA methyltransferase 10B
  Uniprot ID: Q6PF06
  ENST ID: ENST00000297994
  CDS Start-End: 66-1016
cgcgccgctgccgctgcgtgggggtgaggggatcagtctggtggaaaggacagaggactaagtccatggactggaaattggaagggagtactcagaaagtagagtcacctgtgctgcaggggcaagaaggcatcctagaggagacaggtgaagatggacttcctgaaggcttccagcttctgcagatcgatgcggaaggcgagtgccaggagggagagatcctggccacaggcagtacggcatggtgctcgaaaaatgtccagagaaaacagagacactgggaaaagatagttgcagcaaagaagagcaaaagaaagcaagaaaaagaacgaagaaaagccaatcgtgcagaaaatccaggcatttgcccccagcacagcaaacgtttcctgagagctctaaccaaagacaaacttttggaagccaaacactcaggaccaagactatgtatcgatttgagtatgacccactacatgtcaaagaaggaattaagtagactggctggacagattcgaaggttgtatggttcaaacaaaaaagctgacaggccattttggatctgcctcactggattcacaacagacagtcccctttatgaagagtgtgtgaggatgaatgatggattttctagttacctgttagacataacagaagaagactgctttagtttatttcccttggaaacccttgtgtacctgactcctgactcagaacacgctcttgaagatgttgatctaaacaaagtttacatcctcggtgggcttgtggatgaaagcattcagaagaaggtgacatttcaaaaggcccgggaatactctgtcaagaccgcacgcttgccaatccaggaatacatggtcagaaaccagaatgggaaaaactatcattcagagatactggccatcaatcaagtgtttgatatcctgtccacttacttagagactcacaactggcctgaagcattgaagaaaggagtttcttcaggaaaaggctatattcttcggaactcagtggaatgatgggcctaagattgcagctgcgtggccaggtgctcacgccgtaatgccaacactttggtagaccgaagtgggcagatcacctgaggtcaggagttcacgaccagcctggccaacatggtgaaacccttctctactgaaaatacaaaaattagccaggtgtggtggcgcatacctgtagtcccagctacttgggaggctgaggcaggagaatcacttgaactcgggaggcgaaggttgcagtgagccgagatttcaccagtgcactccagcctgggtgacagagcaagactccatctcaaaaaaaaaataaataaaaaaaaatgcagctgcaggagtgaggcgcttggaggtaccttgacccaaagagcagggcagagggtggcagtggcacataggcaagtgtctttgcatgacatcttctcagagcttcacaataatgtcagggaccacatttaatgctttttaatctcccatagtgcctggctcacaggaagtgctcagatatgttaagtaataaaaagttaatgtggtgggtgcagtggctcacgcctgtaatcccagcactttgggaggctgaggtgagtggattacaaggtcaggagttccagaccagcctggctaatatggtgaaacctcgtctctactaaaaatacaaaaattagctgggcatggtggtgcgtgcctgtagtctcagctactcaggaggctgaggcaggagaatcgcctgaacccgggcggcggaggttgtagtgagccaagatccagcctgggcgacagagccagactcttgtctcgaggggaaaaaaaaaaaaaattatgtaacaaggaattagcctcaaaaccacatggctttggacgtgctaattcaacttttgtacatctatttgtgagagacctcttgaaattgtttaaatggttacatcaagagtttaatattcactaaactggcatcataaaattgtatgactttctccagccttgtctgatcatgctcgttgttgcccagctcagtaataagctttgcaggatccagcctgttctgacctatccctactgagtccccatagcattttgttccctcctgtggctcttaccttgttctcccttgcagagtatgggcatggagggcttctcttcctaatccttcctaatggtaggatcctaacaggacaaatctgtgtacctatctttctatcctccctgagcctgtaccaactagattcttcatatgtatttgtaacagattaaattggaaagcaaacaca

SEQ ID NO: 195273 - DNA, 2027 bp, Homo sapiens
  Payload ID: 18556
  Gene Name: tRNA methyltransferase 10B
  Uniprot ID: Q6PF06
  ENST ID: ENST00000377753
  CDS Start-End: 80-769
ggggggatccgatgcgcgccgctgccgctgcgtgggggtgaggggatcagtctggtggaaaggacagaggactaagtccatggactggaaattggaagggagtactcagaaagtagagtcacctgtgctgcaggggcaagaaggcatcctagaggagacaggtgaagatggacttcctgaaggcttccagcttctgcagatcgatgcggaaggcgagtgccaggagggagagatcctggccacaggcagtacggcatggtgctcggaattaagtagactggctggacagattcgaaggttgtatggttcaaacaaaaaagctgacaggccattttggatctgcctcactggattcacaacagacagtcccctttatgaagagtgtgtgaggatgaatgatggattttctagttacctgttagacataacagaagaagactgctttagtttatttcccttggaaacccttgtgtacctgactcctgactcagaacacgctcttgaagatgttgatctaaacaaagtttacatcctcggtgggcttgtggatgaaagcattcagaagaaggtgacatttcaaaaggcccgggaatactctgtcaagaccgcacgcttgccaatccaggaatacatggtcagaaaccagaatgggaaaaactatcattcagagatactggccatcaatcaagagactcacaactggcctgaagcattgaagaaaggagtttcttcaggaaaaggctatattcttcggaactcagtggaatgatgggcctaagattgcagctgcgtggccaggtgctcacgccgtaatgccaacactttggtagaccgaagtgggcagatcacctgaggtcaggagttcacgaccagcctggccaacatggtgaaacccttctctactgaaaatacaaaaattagccaggtgtggtggcgcatacctgtagtcccagctacttgggaggctgaggcaggagaatcacttgaactcgggaggcgaaggttgcagtgagccgagatttcaccagtgcactccagcctgggtgacagagcaagactccatctcaaaaaaaaaataaataaaaaaaaatgcagctgcaggagtgaggcgcttggaggtaccttgacccaaagagcagggcagagggtggcagtggcacataggcaagtgtctttgcatgacatcttctcagagcttcacaataatgtcagggaccacatttaatgctttttaatctcccatagtgcctggctcacaggaagtgctcagatatgttaagtaataaaaagttaatgtggtgggtgcagtggctcacgcctgtaatcccagcactttgggaggctgaggtgagtggattacaaggtcaggagttccagaccagcctggctaatatggtgaaacctcgtctctactaaaaatacaaaaattagctgggcatggtggtgcgtgcctgtagtctcagctactcaggaggctgaggcaggagaatcgcctgaacccgggcggcggaggttgtagtgagccaagatccagcctgggcgacagagccagactcttgtctcgaggggaaaaaaaaaaaaaattatgtaacaaggaattagcctcaaaaccacatggctttggacgtgctaattcaacttttgtacatctatttgtgagagacctcttgaaattgtttaaatggttacatcaagagtttaatattcactaaactggcatcataaaattgtatgactttctccagccttgtctgatcatgctcgttgttgcccagctcagtaataagctttgcaggatccagcctgttctgacctatccctactgagtccccatagcattttgttccctcctgtggctcttaccttgttctcccttgcagagtatgggcatggagggcttctcttcctaatccttcctaatggtaggatcctaacaggacaaatctgtgtacctatctttctatcctccctgagcctgtaccaactagattcttcatatgtatttgtaacagattaaattggaaagc

SEQ ID NO: 195274 - DNA, 1881 bp, Homo sapiens
  Payload ID: 18556
  Gene Name: tRNA methyltransferase 10B
  Uniprot ID: Q6PF06
  ENST ID: ENST00000377754
  CDS Start-End: 242-907
cgcgccgctgccgctgcgtgggggtgaggggatcagtctggtggaaaggacagaggactaagtccatggactggaaattggaagggagtactcagaaagtagagtcacctgtgctgcaggggcaagaaggcatcctagaggagacaggtgaagatggacttcctgaaggcttccagcttctgcagatcgatgcggaaggcgagtgccaggagggagagatcctggccacaggcagtacggcatggtgctcggcatttgcccccagcacagcaaacgtttcctgagagctctaaccaaagacaaacttttggaagccaaacactcaggaccaagactatgtatcgatttgagtatgacccactacatgtcaaagaaggaattaagtagactggctggacagattcgaaggttgtatggttcaaacaaaaaagctgacaggccattttggatctgcctcactggattcacaacagacagtcccctttatgaagagtgtgtgaggatgaatgatggattttctagttacctgttagacataacagaagaagactgctttagtttatttcccttggaaacccttgtgtacctgactcctgactcagaacacgctcttgaagatgttgatctaaacaaagtttacatcctcggtgggcttgtggatgaaagcattcagaagaaggtgacatttcaaaaggcccgggaatactctgtcaagaccgcacgcttgccaatccaggaatacatggtcagaaaccagaatgggaaaaactatcattcagagatactggccatcaatcaagtgtttgatatcctgtccacttacttagagactcacaactggcctgaagcattgaagaaaggagtttcttcaggaaaaggctatattcttcggaactcagtggaatgatgggcctaagattgcagctgcgtggccaggtgctcacgccgtaatgccaacactttggtagaccgaagtgggcagatcacctgaggtcaggagttcacgaccagcctggccaacatggtgaaacccttctctactgaaaatacaaaaattagccaggtgtggtggcgcatacctgtagtcccagctacttgggaggctgaggcaggagaatcacttgaactcgggaggcgaaggttgcagtgagccgagatttcaccagtgcactccagcctgggtgacagagcaagactccatctcaaaaaaaaaataaataaaaaaaaatgcagctgcaggagtgaggcgcttggaggtaccttgacccaaagagcagggcagagggtggcagtggcacataggcaagtgtctttgcatgacatcttctcagagcttcacaataatgtcagggaccacatttaatgctttttaatctcccatagtgcctggctcacaggaagtgctcagatatgttaagtaataaaaagttaatgtggtgggtgcagtggctcacgcctgtaatcccagcactttgggaggctgaggtgagtggattacaaggtcaggagttccagaccagcctggctaatatggtgaaacctcgtctctactaaaaatacaaaaattagctgggcatggtggtgcgtgcctgtagtctcagctactcaggaggctgaggcaggagaatcgcctgaacccgggcggcggaggttgtagtgagccaagatccagcctgggcgacagagccagactcttgtctcgaggggaaaaaaaaaaaaaattatgtaacaaggaattagcctcaaaaccacatggctttggacgtgctaattcaacttttgtacatctatttgtgagagacctcttgaaattgtttaaatggttacatcaagagtttaatattcactaaactggcatcataaaattgtatgactttctcc

SEQ ID NO: 195275 - DNA, 1443 bp, Homo sapiens
  Payload ID: 18556
  Gene Name: tRNA methyltransferase 10B
  Uniprot ID: Q6PF06
  ENST ID: ENST00000488673
  CDS Start-End: 66-590
cgcgccgctgccgctgcgtgggggtgaggggatcagtctggtggaaaggacagaggactaagtccatggactggaaattggaagggagtactcagaaagtagagtcacctgtgctgcaggggcaagaaggcatcctagaggagacaggtgaagatggacttcctgaaggcttccagcttctgcagatcgatgcggaaggcgagtgccaggagggagagatcctggccacaggcagtacggcatggtgctcgaaaaatgtccagagaaaacagagacactgggaaaagatagttgcagcaaagaagagcaaaagaaagcaagaaaaagaacgaagaaaagccaatcgtgcagaaaatccaggcatttgcccccagcacagcaaacgtttcctgagagctctaaccaaagacaaacttttggaagccaaacactcaggaccaagactatgtatcgatttgagtatgacccactacatgtcaaagaaggtagaacatccactaagcctggaattcctgctcgccatgagggaggcccagaagggtacagctttccgaagaatatggtcaactccagcttctgggattccttagtaaactagaattaagtagactggctggacagattcgaaggttgtatggttcaaacaaaaaagctgacaggccattttggatctgcctcactggattcacaacagacagtcccctttatgaagagtgtgtgaggatgaatgatggattttctagttacctgttagacataacagaagaagactgctttagtttatttcccttggaaacccttgtgtacctgactcctgactcagaacacgctcttgaagatgttgatctaaacaaagtttacatcctcggtgggcttgtggatgaaagcattcagaagaaggtgacatttcaaaaggcccgggaatactctgtcaagaccgcacgcttgccaatccaggaatacatggtcagaaaccagaatgggaaaaactatcattcagagatactggccatcaatcaagtgtttgatatcctgtccacttacttagagactcacaactggcctgaagcattgaagaaaggagtttcttcaggaaaaggctatattcttcggaactcagtggaatgatgggcctaagattgcagctgcgtggccaggtgctcacgccgtaatgccaacactttggtagaccgaagtgggcagatcacctgaggtcaggagttcacgaccagcctggccaacatggtgaaacccttctctactgaaaatacaaaaattagccaggtgtggtggcgcatacctgtagtcccagctacttgggaggctgaggcaggagaatcacttgaactcgggaggcgaaggttgcagtgagccgagatttcaccagtgcactccagcctgggtgacagagcaagactccatctcaaaaaaaaaataaataaa

SEQ ID NO: 195276 - DNA, 777 bp, Homo sapiens
  Payload ID: 18556
  Gene Name: tRNA methyltransferase 10B
  ENST ID: ENST00000537016
  CDS Start-End: 66-491
cgcgccgctgccgctgcgtgggggtgaggggatcagtctggtggaaaggacagaggactaagtccatggactggaaattggaagggagtactcagaaagtagagtcacctgtgctgcaggggcaagaaggcatcctagaggagacaggtgaagatggacttcctgaaggcttccagcttctgcagatcgatgcggaaggcgagtgccaggagggagagatcctggccacaggcagtacggcatggtgctcgaaaaatgtccagagaaaacagagacactgggaaaagatagttgcagcaaagaagagcaaaagaaagcaagaaaaagaacgaagaaaagccaatcgtgcagaaaatccaggcatttgcccccagcacagcaaacgtttcctgagagctctaaccaaagacaaacttttggaagccaaacactcaggaccaagactatgtatcgatttgagtatgacccactacatgtcaaagaagacataacagaagaagactgctttagtttatttcccttggaaacccttgtgtacctgactcctgactcagaacacgctcttgaagatgttgatctaaacaaagtttacatcctcggtgggcttgtggatgaaagcattcagaagaaggtgacatttcaaaaggcccgggaatactctgtcaagaccgcacgcttgccaatccaggaatacatggtcagaaaccagaatgggaaaaactatcattcagagatactggccatcaatcaaggtacttcttacacggcccccatcca

SEQ ID NO: 195277 - DNA, 2108 bp, Homo sapiens
  Payload ID: 18556
  Gene Name: tRNA methyltransferase 10B
  Uniprot ID: Q6PF06
  ENST ID: ENST00000537911
  CDS Start-End: 80-850
ggggggatccgatgcgcgccgctgccgctgcgtgggggtgaggggatcagtctggtggaaaggacagaggactaagtccatggactggaaattggaagggagtactcagaaagtagagtcacctgtgctgcaggggcaagaaggcatcctagaggagacaggtgaagatggacttcctgaaggcttccagcttctgcagatcgatgcggaaggcgagtgccaggagggagagatcctggccacaggcagtacggcatggtgctcgaaaaatgtccagagaaaacagagacactgggaaaagatagttgcagcaaagaagagcaaaagaaagcaagaaaaagaacgaagaaaagccaatcgtgcagaaaatccaggcatttgcccccagcacagcaaacgtttcctgagagctctaaccaaagacaaacttttggaagccaaacactcaggaccaagactatgtatcgatttgagtatgacccactacatgtcaaagaagttagacataacagaagaagactgctttagtttatttcccttggaaacccttgtgtacctgactcctgactcagaacacgctcttgaagatgttgatctaaacaaagtttacatcctcggtgggcttgtggatgaaagcattcagaagaaggtgacatttcaaaaggcccgggaatactctgtcaagaccgcacgcttgccaatccaggaatacatggtcagaaaccagaatgggaaaaactatcattcagagatactggccatcaatcaagagactcacaactggcctgaagcattgaagaaaggagtttcttcaggaaaaggctatattcttcggaactcagtggaatgatgggcctaagattgcagctgcgtggccaggtgctcacgccgtaatgccaacactttggtagaccgaagtgggcagatcacctgaggtcaggagttcacgaccagcctggccaacatggtgaaacccttctctactgaaaatacaaaaattagccaggtgtggtggcgcatacctgtagtcccagctacttgggaggctgaggcaggagaatcacttgaactcgggaggcgaaggttgcagtgagccgagatttcaccagtgcactccagcctgggtgacagagcaagactccatctcaaaaaaaaaataaataaaaaaaaatgcagctgcaggagtgaggcgcttggaggtaccttgacccaaagagcagggcagagggtggcagtggcacataggcaagtgtctttgcatgacatcttctcagagcttcacaataatgtcagggaccacatttaatgctttttaatctcccatagtgcctggctcacaggaagtgctcagatatgttaagtaataaaaagttaatgtggtgggtgcagtggctcacgcctgtaatcccagcactttgggaggctgaggtgagtggattacaaggtcaggagttccagaccagcctggctaatatggtgaaacctcgtctctactaaaaatacaaaaattagctgggcatggtggtgcgtgcctgtagtctcagctactcaggaggctgaggcaggagaatcgcctgaacccgggcggcggaggttgtagtgagccaagatccagcctgggcgacagagccagactcttgtctcgaggggaaaaaaaaaaaaaattatgtaacaaggaattagcctcaaaaccacatggctttggacgtgctaattcaacttttgtacatctatttgtgagagacctcttgaaattgtttaaatggttacatcaagagtttaatattcactaaactggcatcataaaattgtatgactttctccagccttgtctgatcatgctcgttgttgcccagctcagtaataagctttgcaggatccagcctgttctgacctatccctactgagtccccatagcattttgttccctcctgtggctcttaccttgttctcccttgcagagtatgggcatggagggcttctcttcctaatccttcctaatggtaggatcctaacaggacaaatctgtgtacctatctttctatcctccctgagcctgtaccaactagattcttcatatgtatttgtaacagattaaattggaaagc

SEQ ID NO: 195278 - DNA, 576 bp, Homo sapiens
  Payload ID: 18556
  Gene Name: tRNA methyltransferase 10B
  ENST ID: ENST00000538370
  CDS Start-End: 66-284
cgcgccgctgccgctgcgtgggggtgaggggatcagtctggtggaaaggacagaggactaagtccatggactggaaattggaagggagtactcagaaagtagagtcacctgtgctgcaggggcaagaaggcatcctagaggagacaggtgaagatggacttcctgaaggcttccagcttctgcagatcgatgcggaaggcgagtgccaggagggagagatcctggccacaggcagtacggcatggtgctcggcatttgcccccagcacagcaaacgtttcctgagagctctaaccaaagacaaacttttggaagccaaacactcaggaccaagactatgtatcgatttgagtatgacccactacatgtcaaagaaggtagaacatccactaagcctggaattcctgctcgccatgagggaggcccagaagggtacagctttccgaagaatatggtcaactccagcttctgggattccttagtaaactagaattaagtagactggctggacagattcgaaggttgtatggttcaaacaaaaaagctgacaggccattttggatctgcctcactggat

SEQ ID NO: 195279 - DNA, 523 bp, Homo sapiens
  Payload ID: 18556
  Gene Name: tRNA methyltransferase 10B
  ENST ID: ENST00000540616
  CDS Start-End: 66-284
cgcgccgctgccgctgcgtgggggtgaggggatcagtctggtggaaaggacagaggactaagtccatggactggaaattggaagggagtactcagaaagtagagtcacctgtgctgcaggggcaagaaggcatcctagaggagacaggtgaagatggacttcctgaaggcttccagcttctgcagatcgatgcggaaggcgagtgccaggagggagagatcctggccacaggcagtacggcatggtgctcgttctcaaacaattttgttttctggataatataagaaaaatgtccagagaaaacagagacactgggaaaagatagttgcagcaaagaagagcaaaagaaagcaagaaaaagaacgaagaaaagccaatcgtgcagaaaatccaggcatttgcccccagcacagcaaacgtttcctgagagctctaaccaaagacaaacttttggaagccaaacactcaggaccaagactatgtatcgatttgagtatgacccactacatgtcaaagaaggtag

SEQ ID NO: 195280 - DNA, 1819 bp, Homo sapiens
  Payload ID: 18557
  Gene Name: tRNA methyltransferase 10C, mitochondrial RNase P subunit
  Uniprot ID: Q7L0Y3
  ENST ID: ENST00000309922
  CDS Start-End: 155-1366
cgctctggtcggctgtgtagactgttgggtaggctgcgtgctagcttcggcgcggatccctgggcgtccgtacgtcggagtccttcgtcctccagggtccctgttctttgcgccagcgggaaccactatctctgcactcctggggttttgttacatggctgctttcctcaaaatgagtgttagtgtcaatttcttcagacctttcaccaggtttttggtgccatttacccttcataggaagagaaataacttaacaattttgcagagatacatgtcttccaaaataccagctgttacttatcctaaaaatgagagtacacccccttctgaagagctagagttggataagtggaaaactaccatgaaatctagtgtgcaagaagaatgtgtttcaacaatctcaagcagtaaggatgaagatcctctagctgccaccagagagttcattgagatgtggagattgcttggcagagaagtaccagaacacatcactgaagaagagctcaaaacccttatggaatgtgtttctaacacagcaaaaaaaaaatatttaaaatatttatatacgaaggaaaaagtgaaaaaagctaggcaaataaaaaaggaaatgaaagcagcagcaagggaagaagcaaaaaatatcaagctgctagaaaccactgaggaagataaacagaaaaactttctatttttacgactttgggataggaatatggacatagcaatgggctggaagggtgcccaggccatgcagtttggacaacctttggtttttgacatggcttacgaaaattatatgaaacgaaaagaattgcagaatactgtttcccagcttttagaaagtgaaggatggaacagaagaaatgttgatcctttccatatttatttctgcaatctaaaaatagatggtgctttgcacagagagttagttaaacggtatcaagaaaaatgggacaaattgcttttaacatcaacagaaaagtctcatgtagatttatttccaaaggacagtattatctatttaactgcagattctcccaatgttatgactactttcaggcatgacaaagtttatgtaattgggtcttttgttgataagagtatgcagccaggcacatccctagccaaggcaaaacggctgaacctggcaactgaatgccttccattagataaatatttacaatgggaaattggtaacaaaaatctcaccttagatcaaatgatacgtattttgttatgtctgaaaaacaatggtaattggcaagaggctctgcaattcgttcccaagagaaaacatactggttttctggagatttctcagcattctcaagagtttatcaacagactaaagaaggcaaagacttaattcattttcaaaaggttctctgaatgtgcacagaacacgtggctcaaatgagaacatttgatggcttaaaaagtaaatgcgttagaaatacagttctgttaatgtatttcttcccaaacaattcatttttctcttctaaaggtagtctttcccaactgactgtagggttgtgtcttttcccaattaaatatctgcagaactttgggattatactttgtttactgtagaaagataataaaaagagttgtccaagattgttgaacagaataatctttatcccagttaaatagttgtaccattggtagacttttttatggaggttcctagagggtggtgccctggggtgggcttggaagctctgcaccccttcccccatagctttccccgtgcatctctttgtctgtatgttttgtaatatcttttacagtaaactggtaaatgtgtttccttcaa

SEQ ID NO: 195281 - DNA, 1017 bp, Homo sapiens
  Payload ID: 18557
  Gene Name: tRNA methyltransferase 10C, mitochondrial RNase P subunit
  ENST ID: ENST00000495642
  CDS Start-End: 82-1017
ggggtgggaggacgccggagacgttccaagatgcacttagtggagcatgtgcgttcggaaggcccacgggggttttgttacatggctgctttcctcaaaatgagtgttagtgtcaatttcttcagacctttcaccaggtttttggtgccatttacccttcataggaagagaaataacttaacaattttgcagagatacatgtcttccaaaataccagctgttacttatcctaaaaatgagagtacacccccttctgaagagctagagttggataagtggaaaactaccatgaaatctagtgtgcaagaagaatgtgtttcaacaatctcaagcagtaaggatgaagatcctctagctgccaccagagagttcattgagatgtggagattgcttggcagagaagtaccagaacacatcactgaagaagagctcaaaacccttatggaatgtgtttctaacacagcaaaaaaaaaatatttaaaatatttatatacgaaggaaaaagtgaaaaaagctaggcaaataaaaaaggaaatgaaagcagcagcaagggaagaagcaaaaaatatcaagctgctagaaaccactgaggaagataaacagaaaaactttctatttttacgactttgggataggaatatggacatagcaatgggctggaagggtgcccaggccatgcagtttggacaacctttggtttttgacatggcttacgaaaattatatgaaacgaaaagaattgcagaatactgtttcccagcttttagaaagtgaaggatggaacagaagaaatgttgatcctttccatatttatttctgcaatctaaaaatagatggtgctttgcacagagagttagttaaacggtatcaagaaaaatgggacaaattgcttttaacatcaacagaaaagtctcatgtagatttatttccaaaggacagtattatctatttaactgcagattctcccaatgttatgactactttcaggcatgacaaagtttatgtaattgggtctttt

SEQ ID NO: 195282 - DNA, 1949 bp, Homo sapiens
  Payload ID: 18558
  Gene Name: tRNA methyltransferase 11 homolog
  Uniprot ID: Q7Z4G4
  ENST ID: ENST00000334379
  CDS Start-End: 122-1513
cgcctgcctcgcagagcttccgcttccggcccttcaggctctgtctctgtggagactgggctttgggagggagaaagagggacctagcgcgggccgcgcaggcgcacggtgggcagctgcaatggcgctgtcgtgtacccttaacaggtatctgctcctcatggcgcaggagcatctggagttccgcctgccggaaataaagtctttgcttttgctttttggaggtcagtttgccagcagtcaagaaacttatggaaagtcaccattttggattcttagcattccctctgaagatattgcaagaaatttgatgaaacggacagtgtgtgccaagtctatatttgaactatggggtcatggacaatctcctgaggagctgtacagttctcttaaaaactaccctgtggagaagatggttccatttctacattcggactctacatataaaataaagattcacacttttaataagacattgacacaagaagagaaaatcaagcgaatagatgcacttgaatttctgccatttgaaggaaaagtgaatttaaagaaaccgcaacatgtattttctgttttggaggattatggtttagacccaaactgcatccctgagaatccacataatatttattttggtagatggattgcagatggacagagagagcttattgagtcatacagtgtcaaaaagagacactttattggaaatacaagtatggatgctggtttgtcattcattatggctaaccatggaaaagtgaaagaaaatgatattgtctttgatccatttgttggaacaggtggcctgctgatagcatgtgctcattttggtgcatatgtgtatgggacagacatagactacaacacagttcatggcttgggaaaggctactaggaaaaaccagaagtggagaggaccagatgaaaacattagggccaatcttcgtcaatatggtttagagaagtattaccttgatgtcctggtttcagatgcatctaaaccttcctggaggaagggcacatattttgatgcaatcattactgatcctccatatggtatcagagaatctacaagaagaacaggttcacagaaggagataccaaaggggatagaaaaatgggaaaaatgtccagaaagccatgttcctgtttccttgagttatcatctgagtgatatgtttcttgacctgttaaacttcgcagctgagaccctcgttttaggtggaagactagtctattggttaccggtgtatacgccagaatacactgaagagatggtgccttggcacccttgcctggaactcgttagcaactgcgagcagaagctttccagtcacacatcaaggcgcttgatcacaatggaaaaggtgaagaaatttgagaatcgggaccagtattcacatctgctaagtgatcattttctgccataccaaggtcataattccttccgtgagaaatattttagtggggtaacaaaaagaattgccaaggaagaaaaatccacccaggaatgaaaattaagattttgacaatgaagaaagaataagaatttgatttaaaaagacatctggatgtgaactttcatgtatgatccagaaaataggtacggttttaaaatattttatatagaaaagctacaaagtaaattgagcaatgcttttaaagttatctttgttttatagacttttttgttgtatgtattacagtctttataatcttatttaatgtatatttgtactttcaagtactgatggagatagactcaaaacagttatttttttacaattaatctacaaagggaattaatattgttgacttttaaaacatctgctggatatattatatgcaattaatagtagttaagaatttattcatttggtagatatgtttatttggtttttggttgtcatcgatttacattgccactaataaaccatattgagaatttct

SEQ ID NO: 195283 - DNA, 1889 bp, Homo sapiens
  Payload ID: 18558
  Gene Name: tRNA methyltransferase 11 homolog
  Uniprot ID: Q7Z4G4
  ENST ID: ENST00000368332
  CDS Start-End: 73-1449
tggagactgggctttgggagggagaaagagggacctagcgcgggccgcgcaggcgcacggtgggcagctgcaatggcgctgtcgtgtacccttaacaggtatctgctcctcatggcgcaggagcatctggagttccgcctgccggaaataaagtctttgcttttgctttttggaggtcagtttgccagcagtcaagaaacttatggaaagtcaccattttggattcttagcattccctctgaagatattgcaagaaatttgatgaaacggacagtgtgtgccaagtctatatttgaactatggggtcatggacaatctcctgaggagctgtacagttctcttaaaaactaccctgtggagaagatggttccatttctacattcggactctacatataaaataaagattcacacttttaataagacattgacacaagaagagaaaatcaagcgaatagatgcacttgaatttctgccatttgaaggaaaagtgaatttaaagaaaccgcaacatgtattttctgttttggaggattatggtttagacccaaactgcatccctgagaatccacataatatttattttggtagatggattgcagatggacagagagagcttattgagtcatacagtgtcaaaaagagacactttattggaaatacaagtatggatgctggtttgtcattcattatggctaaccatggaaaagtgaaagaaaatgatattgtctttgatccatttgttggaacaggtggcctgctgatagcatgtgctcattttggtgcatatgtgtatgggacagacatagactacaacacagttcatggcttgggaaaggctactaggaaaaaccagaagtggagaggaccagatgaaaacattagggccaatcttcgtcaatatggtttagagaagtattaccttgatgtcctggtttcagatgcatctaaaccttcctggaggaagggcacatattttgatgcaatcattactgatcctccatatggtatcagagaatctacaagaagaacaggttcacagaaggagataccaaaggggatagaaaaatgggaaaaatgtccagaaagccatgttcctgtttccttgagttatcatctgagtgatatgtttcttgacctgttaaacttcgcagctgagaccctcgttttaggtggaagactagtctattggttaccggtgtatacgccagaatacactgaagagatggtgccttggcacccttgcctggaactcgttagcaactgcgagcagaagctttccagtcacacatcaaggcgcttgatcacaatggaaaagaatcgggaccagtattcacatctgctaagtgatcattttctgccataccaaggtcataattccttccgtgagaaatattttagtggggtaacaaaaagaattgccaaggaagaaaaatccacccaggaatgaaaattaagattttgacaatgaagaaagaataagaatttgatttaaaaagacatctggatgtgaactttcatgtatgatccagaaaataggtacggttttaaaatattttatatagaaaagctacaaagtaaattgagcaatgcttttaaagttatctttgttttatagacttttttgttgtatgtattacagtctttataatcttatttaatgtatatttgtactttcaagtactgatggagatagactcaaaacagttatttttttacaattaatctacaaagggaattaatattgttgacttttaaaacatctgctggatatattatatgcaattaatagtagttaagaatttattcatttggtagatatgtttatttggtttttggttgtcatcgatttacattgccactaataaaccatattgagaatttctaaaa

SEQ ID NO: 195284 - DNA, 617 bp, Homo sapiens
  Payload ID: 18558
  Gene Name: tRNA methyltransferase 11 homolog
  ENST ID: ENST00000444121
  CDS Start-End: 339-617
ggcgctgtcgtgtacccttaacaggtatctgctcctcatggcgcaggagcatctggagttccgcctgccggtgagtccgtagcgccctccggaacttccgacggaagaggacgctggagtggagtggagtgggtggaggtgatctgcatagcccgaggaagctgggattcgggggtcttcgctggtctgcgcgggtcacgcgtccccagtcctcgggcggggaaataaagtctttgcttttgctttttggaggtcagtttgccagcagtcaagaaacttatggaaagtcaccattttggattcttagcattccctctgaagatattgcaagaaatttgatgaaacggacagtgtgtgccaagtctatatttgaactatggggtcatggacaatctcctgaggagctgtacagttctcttaaaaactaccctgtggagaagatggttccatttctacattcggactctacatataaaataaagattcacacttttaataagacattgacacaagaagagaaaatcaagcgaatagatgcacttgaatttctgccatttgaaggaaaagtgaatttaaagaaaccgcaacatgtattttctgttttggaggattatggt

SEQ ID NO: 195285 - DNA, 393 bp, Homo sapiens
  Payload ID: 18558
  Gene Name: tRNA methyltransferase 11 homolog
  ENST ID: ENST00000453993
  CDS Start-End: 1-393
tttgtcattcattatggctaaccatggaaaagtgaaagaaaatgatattgtctttgatccatttgttggaacaggtggcctgctgatagcatgtgctcattttggtgcatatgtgtatgggacagacatagactacaacacagttcatggcttgggaaaggctactaggaaaaaccagaagtggagaggaccagatgaaaacattagggccaatcttcgtcaatatggtttagagaagtattaccttgatgtcctggtttcagatgcatctaaaccttcctggaggaagggcacatattttgatgcaatcattactgatcctccatatggtatcagagaatctacaagaagaacaggttcacagaaggagataccaaaggggatagaaaaatg

SEQ ID NO: 195286 - DNA, 657 bp, Homo sapiens
  Payload ID: 18558
  Gene Name: tRNA methyltransferase 11 homolog
  ENST ID: ENST00000446681
  CDS Start-End: 256-657
ggcgctgtcgtgtacccttaacaggtatctgctcctcatggcgcaggagcatctggagttccgcctgccggtgagtccgtagcgccctccggaacttccgacggaagaggacgctggagtggagtggagtgggtggaggaaataaagtctttgcttttgctttttggaggtcagtttgccagcagtcaagaaacttatggaaagtcaccattttggattcttagcattccctctgaagatattgcaagaaatttgatgaaacggacagtgtgtgccaagtctatatttgaactatggggtcatggacaatctcctgaggagctgtacagttctcttaaaaactaccctgtggagaagatggttccatttctacattcggactctacatataaaataaagattcacacttttaataagacattgacacaagaagagaaaatcaagcgaatagatgcacttgaatttctgccatttgaaggaaaagtgaatttaaagaaaccgcaacatgtattttctgttttggaggattatggtttagacccaaactgcatccctgagaatccacataatatttattttggtagatggattgcagatggacagagagagcttattgagtcatacagtgtcaaaaagagacactttattggaaataca

SEQ ID NO: 195287 - DNA, 2093 bp, Homo sapiens
  Payload ID: 18558
  Gene Name: tRNA methyltransferase 11 homolog
  Uniprot ID: Q7Z4G4
  ENST ID: ENST00000479748
  CDS Start-End: 73-846
tggagactgggctttgggagggagaaagagggacctagcgcgggccgcgcaggcgcacggtgggcagctgcaatggcgctgtcgtgtacccttaacaggtatctgctcctcatggcgcaggagcatctggagttccgcctgccggaaataaagtctttgcttttgctttttggaggtcagtttgccagcagtcaagaaacttatggaaagtcaccattttggattcttagcattccctctgaagatattgcaagaaatttgatgaaacggacagtgtgtgccaagtctatatttgaactatggggtcatggacaatctcctgaggagctgtacagttctcttaaaaactaccctgtggagaagatggttccatttctacattcggactctacatataaaataaagattcacacttttaataagacattgacacaagaagagaaaatcaagcgaatagatgcacttgaatttctgccatttgaaggaaaagtgaatttaaagaaaccgcaacatgtattttctgttttggaggattatggtttagacccaaactgcatccctgagaatccacataatatttattttggtagatggattgcagatggacagagagagcttattgagtcatacagtgtcaaaaagagacactttattggaaatacaagtatggatgctggtttgtcattcattatggctaaccatggaaaagtgaaagaaaatgatattgtctttgatccatttgttggaacaggtggcctgctgatagcatgtgctcattttggtgcatatgtgtatgggacagacatagactacaacacagttcatggcttggcctgctcaacatgaaggtgatgaggatgaagacctttatgatgatccacttccacttcatgaatagtaaatctatttttactgaataaagtaattatggaaaatattttaaactctagaagcttcaataatgatgtgtgattggatggaattgaatcaaactgaaaaagtatttccttatagcttaatggaaaggctactaggaaaaaccagaagtggagaggaccagatgaaaacattagggccaatcttcgtcaatatggtttagagaagtattaccttgatgtcctggtttcagatgcatctaaaccttcctggaggaagggcacatattttgatgcaatcattactgatcctccatatggtatcagagaatctacaagaagaacaggttcacagaaggagataccaaaggggatagaaaaatgggaaaaatgtccagaaagccatgttcctgtttccttgagttatcatctgagtgatatgtttcttgacctgttaaacttcgcagctgagaccctcgttttaggtggaagactagtctattggttaccggtgtatacgccagaatacactgaagagatggtgccttggcacccttgcctggaactcgttagcaactgcgagcagaagctttccagtcacacatcaaggcgcttgatcacaatggaaaaggtgaagaaatttgagaatcgggaccagtattcacatctgctaagtgatcattttctgccataccaaggtcataattccttccgtgagaaatattttagtggggtaacaaaaagaattgccaaggaagaaaaatccacccaggaatgaaaattaagattttgacaatgaagaaagaataagaatttgatttaaaaagacatctggatgtgaactttcatgtatgatccagaaaataggtacggttttaaaatattttatatagaaaagctacaaagtaaattgagcaatgcttttaaagttatctttgttttatagacttttttgttgtatgtattacagtctttataatcttatttaatgtatatttgtactttcaagtactgatggagatagactcaaaacagttatttttttacaattaatctacaaagggaattaatattgttgacttttaaaacatctgctggatatattatatgcaattaatagtagttaagaatttattcatttggtagatatgtttatttggtttttggttgtcatcgatttacattgccactaataaaccatattgagaatttctaaaa

SEQ ID NO: 195288 - DNA, 258 bp, Homo sapiens
  Payload ID: 18558
  Gene Name: tRNA methyltransferase 11 homolog
  ENST ID: ENST00000473273
  CDS Start-End: 1-258
atggcgctgtcgtgtacccttaacaggtatctgctcctcatggcgcaggagcatctggagttccgcctgccgtttgccagcagtcaagaaacttatggaaagtcaccattttggattcttagcattccctctgaagatattgcaagaaatttgatgaaacggacagtgtgtgccaagtctatatttgaactatggggtcatggacaatctcctgaggagctgtacagttctcttaaaaactaccctgtggagaagatg

SEQ ID NO: 195289 - DNA, 729 bp, Homo sapiens
  Payload ID: 18558
  Gene Name: tRNA methyltransferase 11 homolog
  ENST ID: ENST00000466316
  CDS Start-End: 1-14
cagtgtacttgtaaattgggtcttctcaaaactcactctaaccaaatggataaggttctgttaaggaagcacaggaaagcttttctgttccccttgacaactagttcttctaggtggcctgctgatagcatgtgctcattttggtgcatatgtgtatgggacagacatagactacaacacagttcatggcttgggaaaggctactaggaaaaaccagaagtggagaggaccagatgaaaacattagggccaatcttcgtcaatatggtttagagaagtattaccttgatgtcctggtttcagatgcatctaaaccttcctggaggaagggcacatattttgatgcaatcattactgatcctccatatggtatcagagaatctacaagaagaacaggttcacagaaggagataccaaaggggatagaaaaatgaaagccatgttcctgtttccttgagttatcatctgagtgatatgtttcttgacctgttaaacttcgcagctgagaccctcgttttaggtggaagactagtctattggttaccggtgtatacgccagaatacactgaagagatggtgccttggcacccttgcctggaactcgttagcaactgcgagcagaagctttccagtcacacatcaaggcgcttgatcacaatggaaaaggtgaagaaatttgagaatcgggaccagtattcacatctgctaagtgatcattttctgccatacc

SEQ ID NO: 195290 - DNA, 1009 bp, Homo sapiens
  Payload ID: 18558
  Gene Name: tRNA methyltransferase 11 homolog
  ENST ID: ENST00000468097
  CDS Start-End: 26-718
cgcaggcgcacggtgggcagctgcaatggcgctgtcgtgtacccttaacaggtatctgctcctcatggcgcaggagcatctggagttccgcctgccggaaataaagtctttgcttttgctttttggaggtcagtttgccagcagtcaagaaacttatggaaagtcaccattttggattcttagcattccctctgaagatattgcaagaaatttgatgaaacggacagtgtgtgccaagtctatatttgaactatggggtcatggacaatctcctgaggagctgtacagttctcttaaaaactaccctgtggagaagatggttccatttctacattcggactctacatataaaataaagattcacacttttaataagacattgacacaagaagagaaaatcaagcgaatagatgcacttgaatttctgccatttgaaggaaaagtgaatttaaagaaaccgcaacatgtattttctgttttggaggattatggtttagacccaaactgcatccctgagaatccacataatatttattttggtagatggattgcagatggacagagagagcttattgagtcatacagtgtcaaaaagagacactttattggaaatacaagtatggatgctggtttgtcattcattatggctaaccatggaaaagtgaaagaaaatgatattgtctttgatccatttgttggaacagcagtgtacttgtaaattgggtcttctcaaaactcactctaaccaaatggataaggttctgttaaggaagcacaggaaagcttttctgttccccttgacaactagttcttctaggtggcctgctgatagcatgtgctcattttggtgcatatgtgtatgggacagacatagactacaacacagttcatggcttggcctgctcaacatgaaggtgatgaggatgaagacctttatgatgatccacttccacttcatgaatagtaaatctatttttactgaataaagaaaggctactaggaaaaacca

SEQ ID NO: 195291 - DNA, 758 bp, Homo sapiens
  Payload ID: 18558
  Gene Name: tRNA methyltransferase 11 homolog
  ENST ID: ENST00000461129
  CDS Start-End: 73-321
tggagactgggctttgggagggagaaagagggacctagcgcgggccgcgcaggcgcacggtgggcagctgcaatggcgctgtcgtgtacccttaacaggtatctgctcctcatggcgcaggagcatctggagttccgcctgccggaaataaagtctttgcttttgctttttggaggtcagtttgccagcagtcaagaaacttatggaaagtcaccattttggattcttagcattccctctgaagatattgcaagaaatttgatgaaacggacagtgtgtgccaagttccatttctacattcggactctacatataaaataaagattcacacttttaataagacattgacacaagaagagaaaatcaagcgaatagatgcacttgaatttctgccatttgaaggaaaagtgaatttaaagaaaccgcaacatgtattttctgttttggaggattatggtttagacccaaactgcatccctgagaatccacataatatttattttggtagatggattgcagatggacagagagagcttattgagtcatacagtgtcaaaaagagacactttattggaaatacaagtatggatgctggtttgtcattcattatggctaaccatggaaaagtgaaagaaaatgatattgtctttgatccatttgttggaacaggtggcctgctgatagcatgtgctcattttggtgcatatgtgtatgggacagacatagactacaacacagttcatggcttgggtgagtag

SEQ ID NO: 195292 - DNA, 561 bp, Homo sapiens
  Payload ID: 18559
  Gene Name: tRNA methyltransferase 11-2 homolog (S. cerevisiae)
  Uniprot ID: Q9UI30
  ENST ID: ENST00000308774
  CDS Start-End: 33-395
ggttccggcctggcgagagtttgtgcggcgacatgaaactgcttacccacaatctgctgagctcgcatgtgcggggggtggggtcccgtggcttccccctgcgcctccaggccaccgaggtccgtatctgccctgtggaattcaaccccaacttcgtggcgcgtatgatacctaaagtggagtggtcggcgttcctggaggcggccgataacgtgccgaaagggccggttgagggatatgaggagaatgaggagtttctgaggaccatgcaccacctgctgctggaggtggaagtgatagagggcaccctgcagtgcccggaatctggacgtatgttccccatcagccgcgggatccccaacatgctgctgagtgaagaggaaactgagagttgattgtgccaggcgccagtttttcttgttatgactgtgtatttttgttgatctataccctgtttccgaattctgccgtgtgtatccccaacccttgacccaatgacaccaaacacagtgtttttgagctcggtattatatatttttttctcattaaaggtttaaaacc

SEQ ID NO: 195293 - DNA, 1106 bp, Homo sapiens
  Payload ID: 18559
  Gene Name: tRNA methyltransferase 11-2 homolog (S. cerevisiae)
  Uniprot ID: Q9UI30
  ENST ID: ENST00000544844
  CDS Start-End: 559-936
ggccacccgcagaacagagcttccgggacccacgcctcgtttgcactgggtgctggacagccgacgcaactacaaatggggcggagctttcggcactggagcagctaatttgcatataggaatgaggtgcggctcggcttccatgggcctaatttacagatagggcggtatttctgccccttaaccgaaagtgggatacagaggacgacggtgttaggcgcctgtgtaggagtaaaatgtgtttattttgcattcaacgagagctcctgcattgcagctattttgcatatgatttgcatcttacgaagaatttgtggcaaaaaaaagctgggcgtgcgccgtaggaacctcctgctgagacgcttccggtagcggcgcgtgacccgacaggtctttcacctacctacctcagctcccacaaacacgagaagttccagcaagttcgccacttccggttctcctggctatccaatagcatcgagaggagcatccccggaagtgaggcagcggaggacgacctttttccggttccggcctggcgagagtttgtgcggcgacatgaaactgcttacccacaatctgctgagctcgcatgtgcggggggtggggtcccgtggcttccccctgcgcctccaggccaccgaggtccgtatctgccctgtggaattcaaccccaacttcgtggcgcgtatgatacctaaagtggagtggtcggcgttcctggaggcggccgataacttgcgtctgatccaggtgccgaaagggccggttgagggatatgaggagaatgaggagtttctgaggaccatgcaccacctgctgctggaggtggaagtgatagagggcaccctgcagtgcccggaatctggacgtatgttccccatcagccgcgggatccccaacatgctgctgagtgaagaggaaactgagagttgattgtgccaggcgccagtttttcttgttatgactgtgtatttttgttgatctataccctgtttccgaattctgccgtgtgtatccccaacccttgacccaatgacaccaaacacagtgtttttgagctcggtattatatatttttttctcattaaaggtttaaaaccaaaa

SEQ ID NO: 195294 - DNA, 659 bp, Homo sapiens
  Payload ID: 18559
  Gene Name: tRNA methyltransferase 11-2 homolog (S. cerevisiae)
  ENST ID: ENST00000539854
  CDS Start-End: 28-348
cggcctggcgagagtttgtgcggcgacatgaaactgcttacccacaatctgctgagctcgcatgtgcggggggtggggtcccgtggcttccccctgcgcctccaggccaccgaggtccgtatctgccctgtggaattcaaccccaacttcgtggcgcgtatgatacctaaagtggagtggtcggcgttcctggaggcggccgataacttgcgtctgatccaggtgccgaaagggccggttgagggatatgaggagaatgaggagtttctgaggaccatgcaccacctgctgctggaggtgagaagcggcccatcacttgcttcccgggccacctgcctcccgcactgaggctgccagtgctcagctctgtccctccctgcccgcaggtggaagtgatagagggcaccctgcagtgcccggaatctggacgtatgttccccatcagccgcgggatccccaacatgctgctgagtgaagaggaaactgagagttgattgtgccaggcgccagtttttcttgttatgactgtgtatttttgttgatctataccctgtttccgaattctgccgtgtgtatccccaacccttgacccaatgacaccaaacacagtgtttttgagctcggtattatatatttttttctcattaaaggtttaaaac

SEQ ID NO: 195295 - DNA, 823 bp, Homo sapiens
  Payload ID: 18559
  Gene Name: tRNA methyltransferase 11-2 homolog (S. cerevisiae)
  ENST ID: ENST00000535750
  CDS Start-End: 177-422
cggggggtggggtcccgtggcttccccctgcgcctccaggtacccgccggcggcagtcttcccttttcgggcgggatggtgggccggggtccagtgcttgcctaaactcctccgccctgcaggccaccgaggtccgtatctgccctgtggaattcaaccccaacttcgtggcgcgtatgatacctaaagtggagtggtcggcgttcctggaggcggccgataacttgcgtctgatccaggtgccgaaagggccggttgagggatatgaggagaatgaggagtttctgaggaccatgcaccacctgctgctggaggtggaagtgatagagggcaccctgcagtgcccggaatctggacgtatgttccccatcagccgcgggatccccaacatgctgctgagtgaagaggaaactgagagttgattgtgccaggcgccagtttttcttgttatgactgtgtatttttgttgatctataccctgtttccgaattctgccgtgtgtatccccaacccttgacccaatgacaccaaacacagtgtttttgagctcggtattatatatttttttctcattaaaggtttaaaaccaaaagcggtttctctttgcagcaaatatacattaaaatagagtctctgtacagccaagggctctgggccctggcttgccccatgtccctgcgcctccctggccaaacccaaaaataaatatagtgttattgctctgcagggcatagaggcagtgctctcctaccccctgaggaggctcgttgggagctgatggggaagccctggccaccccaggggtccaggggctggagtctgc

SEQ ID NO: 195296 - DNA, 704 bp, Homo sapiens
  Payload ID: 18559
  Gene Name: tRNA methyltransferase 11-2 homolog (S. cerevisiae)
  ENST ID: ENST00000535126
  CDS Start-End: 19-210
acaatctgctgagctcgcatgtgcggggggtggggtcccgtggcttccccctgcgcctccaggtacccgccggcggcagtcttcccttttcgggcgggatggtgggccggggtccagtgcttgcctaaactcctccgccctgcaggccaccgaggtccgtatctgccctgtggaattcaaccccaacttcgtggcgcgtatgatacctaaagtggagtggtcggcgttcctggaggcggccgataacttgcgtctgatccaggtgccgaaagggccggttgagggatatgaggagaatgaggagtttctgaggaccatgcaccacctgctgctggaggtgagaagcggcccatcacttgcttcccgggccacctgcctcccgcactgaggctgccagtgctcagctctgtccctccctgcccgcaggtggaagtgatagagggcaccctgcagtgcccggaatctggacgtatgttccccatcagccgcgggatccccaacatgctgctgagtgaagaggaaactgagagttgattgtgccaggcgccagtttttcttgttatgactgtgtatttttgttgatctataccctgtttccgaattctgccgtgtgtatccccaacccttgacccaatgacaccaaacacagtgtttttgagctcggtattatatatttttttctcattaaaggtttaaaaccaaaa

SEQ ID NO: 195297 - DNA, 2207 bp, Homo sapiens
  Payload ID: 18560
  Gene Name: tRNA methyltransferase 12 homolog (S. cerevisiae)
  Uniprot ID: Q53H54
  ENST ID: ENST00000328599
  CDS Start-End: 109-1455
atttccggcaccggcatggccgggtgagctgcaggctaccttatttaagaccgggaatttagtcagcctggtgagccgactctgaggagatggagtatcgctgaggtgatgagagagaatgtggttgttagcaacatggagagagaaagtgggaagcccgtggctgttgtcgcagttgtgactgagccttggtttacccagcgatacagagaatatctccagaggcagaaactctttgatacacagcaccgtgtggaaaagatgccggatggctcggtggcgctaccggtgctgggagagacgcttccagagcagcacctgcaggagctgaggaatcgtgttgccccaggcagtccctgtatgctcacgcagctcccggatcctgttccttcgaagagggcccagggttgttcacctgcccaaaaattgtgtcttgaggtgagtcgctgggtggagggtcggggagtcaagtggtcagccgagttggaggctgatttgccccgatcatggcaacggcatggtaatctcttgttgctgagtgaagactgtttccaagccaagcagtggaaaaatctgggaccggaactctgggagaccgttgccttggcacttggcgtccagcgtttggcaaaacgagggcgggtatcaccggatggtactcgaactccagcagtgacactgctgctgggtgaccatggctgggtagagcatgtggataatggtatccgttataagtttgacgtgacccagtgtatgttctcctttggaaacatcactgagaagcttcgagtggcatcgttgtcctgtgctggagaagtgctggtggatctctatgcagggattggttattttacattgcctttcctagttcatgctggtgctgccttcgtccatgcttgtgagtggaatccccatgctgtagttgctctgagaaataaccttgagatcaatggagtagcagatcggtgccaaatacactttggagataacagaaaactgaagctctcaaatattgcagatagggtgatcctggggctgattcccagctctgaagaaggctggcccattgcctgccaagtgttaaggcaggatgctggaggcattttgcatatccaccaaaatgtggaatctttcccagggaagaatcttcaggctcttggagtcagcaaagtagagaaagagcattggctgtatcctcagcaaattaccaccaaccaatggaaaaatggagctaccagggattctaggggaaaaatgctgtcaccagccaccaagccagagtggcaaaggtgggcagaatctgcagaaactcgaatcgccactcttcttcagcaggtgcatgggaaaccatggaagacacaaattctgcacatccaaccagtgaaatcctatgctccccatgtggatcacatagtcctggatctggaatgctgcccctgtccttcagttggctagaggaggtagatcctgggacacatgggatccacgtgcgagtggcccttaaatgtatcagttcagtccaggttgtcatcccttttgtcccctggtgatcagtttttttcatattttatagccctgaaagcaggctctagatcaattcaaattatttcatttgtctttcattgataacagaaaatgaaatacctgtttgggagaagcagcatggcccattgaaatgaggctcatctgtgcaattatgaattccaaattctgacctcagttctggaattgaagtttcagtatgttttggcctcgggtttcgttatttgcaaaatgagagtttctttgaactgtctcacgtgactattaagcaactatacacaggacatcggttattttagagtgaaagacacagtgctttttccaaattgctctggctaccatatagaaaattgactgaaggagggccaagatggaaacagagagaccagtgaggaggcttctgtggttgtccaggtctgaggtgatggtaacttggactcggatggtggtaatgggaggtagattgatatgataaataaaattgacagaccaagcaatggaatcagaattaagtccttaacatgaagctgctttgttattatgactgactaaattagagagagaagggaacaaaaattattttagtgtatttccattcccttactgtggcattcctaaatgattgtgaggggttgtcttataaatttggtttgttgtggtagaaa

SEQ ID NO: 195298 - DNA, 822 bp, Homo sapiens
  Payload ID: 18560
  Gene Name: tRNA methyltransferase 12 homolog (S. cerevisiae)
  ENST ID: ENST00000522518
  CDS Start-End: 12-464
tcgctgaggtgatgagagagaatgtggttgttagcaacatggagagagaaagtgggaagcccgtggctgttgtcgcagttgtgactgagccttggtttacccagcgatacagagaatatctccagaggcagaaactctttgatacacagcaccgtgtggaaaagatgccggatggctcggtggcgctaccggtgctgggagagacgcttccagagcagcacctgcaggagctgaggaatcgtgttgccccaggcagtccctgtatgctcacgcagctcccggatcctgttccttcgaagagggcccagggttgttcacctgcccaaaaattgtgtcttgagcaggtgcatgggaaaccatggaagacacaaattctgcacatccaaccagtgaaatcctatgctccccatgtggatcacatagtcctggatctggaatgctgcccctgtccttcagttggctagaggaggtagatcctgggacacatgggatccacgtgcgagtggcccttaaatgtatcagttcagtccagaaaatgaaatacctgtttgggagaagcagcatggcccattgaaatgaggctcatctgtgcaattatgaattccaaattctgacctcagttctggaattgaagtttcagtatgttttggcctcgggtttcgttatttgcaaaatgagagtttctttgaactgtctcacgtgactattaagcaactatacacaggacatcggttattttagagtgaaagacacagtgctttttccaaattgctctggctaccatatagaaaattgactgaaggagggccaagatggaaacag

SEQ ID NO: 195299 - DNA, 711 bp, Homo sapiens
  Payload ID: 18561
  Gene Name: tRNA methyltransferase 13 homolog (S. cerevisiae)
  ENST ID: ENST00000370139
  CDS Start-End: 48-440
agggtagatgcggttactatgtggaaaagaagaaacggttctgcaggatggtggtggccgcagggaaaagattttgtggtgaacacgctggagccgcggaggaagaagatgctcggaaaagaatcctgtgtcctttagatccaaaacacacagtatatgaagatcaactagcaaagcatttgaaaaaatgtaactcaagagagaaaccaaaacctgatttctatattcaagatattaatgcaggcttaagagatgaaacagaaatacctgaacaattagttccaatttcttctctatctgaagagcagttggaaaagttaattaagaaattgagaaaagcaagtgaagcattacacgatgcacttaatgaccctaaaaatggcgattctgcaaccaagcacctgaaacagcaggtatgtttaggctatagtaactactaaacatggcctttgttcatttgttaaaactgttttaaatgtaattattaataagattttattttgtttacctttgagggtaccaaatatttccatttcaaaaatatatagaaacatatacaaaaaattgagggcatggatgtgattctgagtaccgtatattaaatatttaaaggcaagagagaaaaattttaagtcaaatacaaattatcaatgtaagcatactgccttatgcagaaattaccttgctgttttcccatttgaaccaaatgtg

SEQ ID NO: 195300 - DNA, 3129 bp, Homo sapiens
  Payload ID: 18561
  Gene Name: tRNA methyltransferase 13 homolog (S. cerevisiae)
  Uniprot ID: Q9NUP7
  ENST ID: ENST00000370141
  CDS Start-End: 7-1452
agaattatggcgacctccgcgacgtcgccgcacgcgcctggttttccagctgagggtagatgcggttactatgtggaaaagaagaaacggttctgcaggatggtggtggccgcagggaaaagattttgtggtgaacacgctggagccgcggaggaagaagatgctcggaaaagaatcctgtgtcctttagatccaaaacacacagtatatgaagatcaactagcaaagcatttgaaaaaatgtaactcaagagagaaaccaaaacctgatttctatattcaagatattaatgcaggcttaagagatgaaacagaaatacctgaacaattagttccaatttcttctctatctgaagagcagttggaaaagttaattaagaaattgagaaaagcaagtgaaggcttgaattctacacttaaagatcatattatgtcccatccagcattacacgatgcacttaatgaccctaaaaatggcgattctgcaaccaagcacctgaaacagcaggcttctattttaggtaacattgaaaatttaaagttacttggtccaagaagatgctttgttgagtttggagcgggaaagggaaaattatctcattgggttgatattgccttaaaagatgctgaaaaagttcacttcatcctagtggaaaaggtgaccacaagattcaaggtggatggaaaacacagaaagaaaaattcagtgtttgaaagacttcaaattgatattcaacacttgtgtttgaacaagattcctgtgctaagagaagaaaaactacctgtggtaggaattggaaagcatctgtgtggtatggcaacagatcttgcattacgatgtttggttgaaacctatgctgccagttttgaggaaaggaatgaagaacctttagccaaacgcataaagaatgataaaacagaaaaagaaatttacactttggccaaggaaggaaatgaaaaaaatgtcccagagaagtggaaccctgtggctggcattgttattgcactctgttgtcaccacaggtgtgattggagacattatgtgggcaaagaatatttcagggctctaggccttggagcagtggaattccattatttccagcgaatgagtagttgggcaacttgtgggatgcggaaaacatctttggaaacctcaaatagtaccacaaagaggcaagataatcagaatgatgatagtgaagagcatgatgatggaggatacagaatcacagatgatggcgctgattgtttgcctgggcttcttagtgttgaagaaaagaagaaaatagggcatctttgtaaattgctgattgaccaaggtcgaatccagtatttgcagcagaagggattcagtcctgctttgcagtactatacagaccctctggtgtctttggaaaatgttttgttaactgctttaccaaatcattcttcatcaccagaaacaactgcttaatggaaaagaaatttgagcatcatctgtcttccaccaaaaaaaattttttaattatatttttatatcaaaaaaatatatactttaaatagcaaataatatgaactttaaaaaatgctgtggcctcattaaactttggtaatagcttttctttttacttcagaaatccaaacattagagaattcaccaaagtaatcctctttagaagggcatcttgaattatattatccatccgtatttatggagattggtaaagtagttgaaccgttgacttggtgatctgaaacatacataacatgtcaacacataattagcgtatttctgtttgtattaattttggaaatttatcttcctttgattttatttaatattttttatttcttaagttcaagaggtagtgattgattgtaacaagggccaatctgagaatttgacttatatgtggacatttttccctacagatctggaaagcacaattgtgattttctcaaatgcagacaattcagagatattcacaattaataaacacaattaattaatgaagtcaccttcaaatttccagagccatacatgtatatattgtcagaatctgtccatgacaaacacaaaactgaagagctgttttcaaagaaaaaagattatttcacttaattattttgttggataattgtctagttagaacttccaaaaagatacttacaaacataattcacaaatttgaaataatttctgaagttgattagctatctcatatcttttatcaggtcattttttatatatgtaggcacaaacaataagtatgttctcttctgtttgggaaaataatttggaataaaatagaaattagataatgaaaccaaaaaccttctcaaatttaggccttatttaactcatgactggtttctatgcacaagaaaatactaaaccaaatatatggtaggactgttattctcttctgcatcttatccctattttgtttctgcctttatttgtaaaaattgtcttaattgatggtacatttgccaagacaaaggttcagaattactaattttagatattatgatattctgaaataactatttttatcctgtagttctatgattatatgatttgtaaataagaagcctaaccaatttaaaattcctgactttagtctcatatatcttgtcagactgtctcggttcaaattccaaacctaccatcttcagttgtgcgaccttgggcatgctacctaatctctttgtgcctcaatttcctccttttaaaatggggatgatgatgataacaataatacctacctcacaaggttgttgtgagcatcaaatgagataacacaagtaaaatgcatagaacagttccaagcacagagtaattcaataaatattaactagtaatagtagtggtagtaactcgtgaatctttttaataacataataggctttgattttattatctctttaagttgttaacttttttcccttgttataagttttatgtcaagtaaggtagtttgtttaagttagttacccatgtccccaatcaagggaacctaaatgaagatatatcattaaataattaacctttttttattgtgtcaagcaatactaatttgtgtcataaaatttgttttgcatcattcaacaatttatgcccagaaataaacaatattctacaacaggc

SEQ ID NO: 195301 - DNA, 476 bp, Homo sapiens
  Payload ID: 18561
  Gene Name: tRNA methyltransferase 13 homolog (S. cerevisiae)
  ENST ID: ENST00000370143
  CDS Start-End: 20-349
ggaagcgagccctagaattatggcgacctccgcgacgtcgccgcacgcgcctggttttccagctgagggtagatgcggttactatgtggaaaagaagaaacggttctgcaggatggtggtggccgcagggaaaagattttgtggtgaacacgctggagccgcggaggaagaagatgctcggaaaagaatcctgtgtcctttagatccaaaacacacagtatatgaagatcaactagcaaagcatttgaaaaaatgtaactcaagagagaaaccaaaacctgatttctatattcaagatattaatgcaggcttaagagatgaaacagaaatacctgaacaattagcttgaattctacacttaaagatcatattatgtcccatccagcattacacgatgcacttaatgaccctaaaaatggcgattctgcaaccaagcacctgaaacagcaggtatgtttaggctatagtaactacta

SEQ ID NO: 195302 - DNA, 1582 bp, Homo sapiens
  Payload ID: 18561
  Gene Name: tRNA methyltransferase 13 homolog (S. cerevisiae)
  Uniprot ID: Q9NUP7
  ENST ID: ENST00000482437
  CDS Start-End: 5-532
aattatggcgacctccgcgacgtcgccgcacgcgcctggttttccagctgagggtagatgcggttactatgtggaaaagaagaaacggttctgcaggatggtggtggccgcagggaaaagattttgtggtgaacacgctggagccgcggaggaagaagatgctcggaaaagaatcctgtgtcctttagatccaaaacacacagtatatgaagatcaactagcaaagcatttgaaaaaatgtaactcaagagagaaaccaaaacctgatttctatattcaagatattaatgcaggcttaagagatgaaacagaaatacctgaacaattagttccaatttcttctctatctgaagagcagttggaaaagttaattaagaaattgagaaaagcaagtgaaggcttgaattctacacttaaagatcatattatgtcccatccagcattacacgatgcacttaatgaccctaaaaatggcgattctgcaaccaagcacctgaaacagcaggtatgtttaggctatagtaactactaaacatggcctttgttcatttgttaaaactgttttaaatgtaattattaataagattttattttgtttacctttgagggtaccaaatatttccatttcaaaaatatatagaaacatatacaaaaaattgagggcatggatgtgattctgagtaccgtatattaaatatttaaaggcaagagagaaaaattttaagtcaaatacaaattatcaatgtaagcatactgccttatgcagaaattaccttgctgttttcccatttgaaccaaatgtgtttactctagtttataaaataatcttgtgaagtttgcaggcttctattttaggtaacattgaaaatttaaagttacttggtccaagaagatgctttgttgagtttggagcgggaaagggaaaattatctcattgggttgatattgccttaaaagatgctgaaaaagttcacttcatcctagtggaaaaggtgaccacaagattcaaggtggatggaaaacacagaaagaaaaattcagtgtttgaaagacttcaaattgatattcaacacttgtgtttgaacaagattcctgtgctaagagaagaaaaactacctgtggtaggaattggaaagcatctgtgtggtatggcaacaggtacgtaaacatactgataatgtttacattaatgcattaagttttggcctaacctggccccaaccatttcagtggtctcttttgaatagatatcttatgtttacaactcaataatctttatagagcactggccctgtgctttattagatgcatagctttcctatttatctgctcatattggccattttgcaggatgaattaagagttttgtatgtaaatactgcatcacattagaccttaaagttctttgggttaaatttcaaccagaaaaggaaaataagaccatttatggaaactgtatgattccacctagaagctactgattttttagagtagttgcttagaaagaactcagaaacctcttctactaaaagactattgtgtttcaggattctggggaaaaagaaaaaaataaatgttagac

SEQ ID NO: 195303 - DNA, 4392 bp, Homo sapiens
  Payload ID: 18562
  Gene Name: tRNA methyltransferase 1-like
  Uniprot ID: Q7Z2T5
  ENST ID: ENST00000367506
  CDS Start-End: 270-2471
acgcttctgcgcagtttgtggtggcgtcgtaacgcctcggggaaagggaagcggacgggcatctggaatcgctgcctctggctttctgttttctactaacaggatttggtcactggttcttcatcttttgtctgttgcacgcatcccgccctccccacttgcttccccactccttggatccagccctgtgggcattcacgtcagttctctgaccccgccgtgagccccgctccgggtccccgggcgggcttggcacggaggcggtaactatggagaatatggcggaggaggagctgctgcccctggagaaggaggaggtggaggtggcccaggtccaggtcccgaccccggcccgggactcggctggggtcccagctccggccccggattcggctctggactcggctccgactccggcctcggctccagccccagcccctgccctggcccaggctccggccctgtccccgtccctagcctctgcccctgaggaggctaaaagcaagagacacatctcaattcaaaggcagcttgctgatctagagaatttagcttttgtaactgatggaaattttgactctgccagctcattgaactcagataatcttgatgcaggcaacagacaggcttgtccattgtgccctaaggaaaaattcagagcttgtaatagccataagcttcgtcgtcacctccagaatttacactggaaagtctcagttgaatttgaaggttacaggatgtgcatctgtcacttaccttgtcgaccagtgaaaccaaacattattggagaacagataaccagtaaaatgggagcccattatcattgtatcatttgttcagcaacaatcaccagaagaactgatatgctaggacatgttaggcgccacatgaataaaggagagactaaatctagttatattgcagcttccactgctaaaccacctaaggaaattttgaaagaggcagacacggatgtacaagtttgtcccaactattctatacctcagaaaacagattcctattttaaccccaaaatgaaactaaatcggcagctaatattctgtacattggctgctttggctgaggaacgaaaacctttggaatgtctagatgcttttggagccactgggataatgggattacagtgggcaaaacatcttggaaatgcagtcaaagttacaatcaatgacttgaatgaaaattctgtgacactgattcaggaaaactgccatttaaacaaattgaaagtggtggtggacagtaaggaaaaggaaaagagtgatgatattcttgaagaaggagagaaaaatcttggtaatattaaggtgaccaaaatggatgccaatgtactgatgcatttgagatcttttgatttcatacatctagacccttttggaacatcagtgaattatctagattctgcattcagaaatataagaaaccttggcatagtgtcagtgacttctacagatatcagttctttatatgccaaggcacagcatgttgcccggcgtcactacggatgtaacattgtccgaactgaatattacaaggaactagcagccagaattgttgtagctgcagtggcaagagctgcagcccgatgcaacaaaggcatagaagtactgtttgcagtggctctggaacattttgtgttggtagttgtgagagttttgaggggacctacttcagcagatgaaacagccaagaagattcaatacctgatccattgtcagtggtgtgaagagagaatttttcagaaggatggtaatatggtagaagaaaacccatatagacagctgccttgtaactgtcatggaagcatgcctggaaagacagcaatagaacttggacctctgtggtcaagttcccttttcaatactggattcctcaaaagaatgctatttgaatctcttcaccatggtttggatgacattcagaccctaataaagacattaatctttgaatcagagtgtacgcctcaaagtcagttttcaattcatgcatcttcaaatgtcaacaagcaagaagaaaatggtgtatttattaaaactacagatgacaccacaacagataattacattgcacaaggaaagagaaaaagtaatgaaatgatcacaaatttaggcaagaagcaaaagactgatgtcagtactgaacatcctcccttttattacaacattcacagacacagcattaaaggaatgaatatgccaaagttaaaaaagtttttgtgctatttatctcaagcaggctttcgagtaagccgaactcattttgacccaatgggtgtacgcacagatgcacctctgatgcagtttaaatctatccttttaaagtacagcacccccacctacactggaggacagtcagaaagccatgtccagtcagcatctgaagatacagtaactgaaagagttgaaatgtcagtgaatgacaaagcagaagcaagtggctgcagaagatggtaaacgtagagaagaattggttctcaggtgtctgtatagatggcctaatagttctctataccaactgtagttctttttctgttctttcaattcagtagagtaaaaataaaaaacagtgtcattttcattcagaaactgagcagtttctaacttagctggtttgggagctttgctttccaagtttttttttgttttaaggcaaacttaaaattttaatggaaacatttcatatgaagccaagtctcactgagatcaccctactgcttaataattcagaaaattttcacatgcaaagtgtttggaattttatgtatgttatgaaagccatcttttacaattcttaatcacatctctgcctaaactgattcatgatgtttatgttttcctgtttgtagtgtacaaaatgaagctgaaggctcacatgttaaaatgaccctgaatagaataggaagaacaatgttcttacaggtcataatgtatttcacaattaaaaaactaaaatatgtacccatttttaagaaatcatacttctctccacattgatcttttcatttcttactagcttttaagaaattaaatacttgcctgagatagaaatactttatttttgtaactttaaggtctaaatgactaaacttcaaagtaagattttgtcagaataaattgagaccattaatctaatataatacttgttcatgagcactgaaatcctgaagaggagagatttggttataaattaaaaaggttgggtgatcttaagtgcctcagttaatgcacgtacagtattcatttggttggttgtactacctctcagaagtaaaatttgtcaccttatggaatgagagtttttgggtttgggggttgtttttttgttgttgcttggtttggtatttttggttttgtgtgtatttgtataaattttctgtataattagcccaggctgatgtaactataaaaattagttgaaaaaaaaaatattgtttccttaatggaattctcacttcatttgaatataagattttggatgaaaggatttggtataaagtttgggtttttgtctcaaggatttgatccatatttatccctaaatatttcttaagggatgtaactttttataaccattaagtggggggaagggggtggagggggtggtaataattataactgaaaggtttaaatatactacctaagaaaaaagtacttctgtgacatatacaaaaaaatctagtggataggcattagatgaatagagaatattaattttgcagaaatgaaggaaaatctcttcgtgctagtacagcgtattcccaagagagtttattttcctttctccaattaatgtggtcataaatttcggtaaaatcaagaaataggtgaagtgcaagctagtttctataatgaccattaaaaaaattctgctgtgtaattcttgccagttaaaattataacttgcaaatgagcagaataaatgaggtttttttcaattaaaaattactataaatccaggaggcaaactattttagcactcagattatctgatttaatacatattattgaatatcagtctcaaattttgctaaatgcttatcagcatgaaatatgttgatcagtgatgagttgggcttaatgcaaagatcctaatttaataaagaaacctgtaaattactgttacctaaaatatatgtgtatattaatttcacatataaaggtagatttttcaaagaaaaatttggtaggcggtagtttagaactctgatcaggtactacatcaaccaaaagaggaaatactttaaaaattccttttagcaacctgagcaatcttattctcgtaacaatagtagtaatttgggacattgcaaatgtttatcatgttgtaaagtagcatcagttgtatcctttcattaaaacttgataaacaaaagaa

SEQ ID NO: 195304 - DNA, 735 bp, Homo sapiens
  Payload ID: 18562
  Gene Name: tRNA methyltransferase 1-like
  ENST ID: ENST00000458395
  CDS Start-End: 1-639
acatcagtgaattatctagattctgcattcagaaatataagaaaccttggcatagtgtcagtgacttctacagatatcagttctttatatgccaaggcacagcatgttgcccggcgtcactacggatgtaacattgtccgaactgaatattacaaggaactagcagccagaattgttgtagctgcagtggcaagagctgcagcccgatgcaacaaaggcatagaagtactgtttgcagtggctctggaacattttgtgttggtagttgtgagagttttgaggggacctacttcagcagatgaaacagccaagaagattcaatacctgatccattgtcagtggtgtgaagagagaatttttcagaaggatggtaatatggtagaagaaaacccatatagacagctgccttgtaactgtcatggaagcatgcctggaaagacagcaatagaacttggacctctgtggtcaagttcccttttcaatactggattcctcaaaagaatgctatttgaatctcttcaccatggtttggatgacattcagaccctaataaagacattaatctttgaatcagagtgtacgcctcaaagtcagttttcaattcatgcatcttcaaatgtcaacaagcaaggtgactaactgaacgctagcttactagctttaaactgcttaccaaaaatactgtatctttttcaattgtatttgatgttataataaaaccaatataattataaa

SEQ ID NO: 195305 - DNA, 2964 bp, Homo sapiens
  Payload ID: 18563
  Gene Name: tRNA methyltransferase 2 homolog A
  Uniprot ID: Q8IZ69
  ENST ID: ENST00000252136
  CDS Start-End: 390-2267
ctagagctggctaaagtggttgggggttggatccggcgcgtgacgatgacgttgccagaagccaggatcatagagacgctcggcctccgccgcacgcgctggcggactaagagtggctggcgaagcgagcggccggcgcgggcccctggcgggcgggcggtacagccccaagcctgagacccggacctgagcatcgcaggttcgagtcccgccccgcctggggcgaagccgggggtggcggcgacctcgcggcgttgcaccggctctgtgagcacctcccctctgagcacttcccttgtgacaggccacttcccttgtgacaggcccaggacgaggtggccaggcggcccccatggcgtccctggtctaggcggagaaccgcctgggcgatgagtgagaacctcgacaacgagggcccgaagcccatggagagctgtggccaggagagcagcagtgccctgagctgccctaccgtctcggtgccccctgcagccccggcagccctggaggaggtggagaaagagggcgctggggcggctacagggccggggcctcagcccgggctctacagctacatcagggatgacttgtttacctctgagatctttaaactggagctgcagaacgtgcctcgccacgccagcttcagcgacgtccggcgcttcctgggccgctttggtctgcagccccacaaaaccaaactctttgggcaaccaccctgcgcctttgtgacattccgcagcgctgcagagagggacaaggccctgcgcgttttgcatggtgccctctggaaaggccgcccactcagtgtgcgcctggcccggcccaaggccgaccccatggccaggaggaggcgacaggagggtgagagtgagccaccagtaacacgagtggccgacgtggtgacccctctatggacagtgccctatgctgagcagcttgagcggaagcagctggagtgcgagcaggtgctgcagaaacttgccaaggaaatcgggagcaccaaccgtgccttgctgccctggctgctcgagcagaggcacaagcacaacaaggcctgctgcccgctggagggggtcaggccatcaccccagcagactgagtatcgtaataagtgtgagtttctggttggcgtcggggtggatggggaggataacaccgtgggctgtcggctcggcaagtacaagggcgggacgtgtgctgtggcagccccgtttgacaccgtgcacatccccgaagccaccaagcaggtggtgaaggccttccaggagttcatccggtccactccatactcggcatacgacccagagacgtacacaggccactggaagcagctgactgtgcgcaccagccgccgccaccaggccatggccattgcctacttccacccccagaagctgagccctgaggagctggcagagctgaagacctccctagcgcagcacttcacagcagggccaggcagggccagtggagtgacctgcctctacttcgtggaggagggacagcgaaagactcctagccaggagggcctgcccctggagcatgtggctggggaccggtgcatccacgaggacctgctagggctgaccttccggatctctccacacgccttcttccaggtgaacacacccgcagccgaggtgctctacacagtcatccaggactgggcccaattggatgcggggagcatggtgctggacgtgtgctgtggcaccggcaccattggcctggccctggcccggaaggtaaagagggtcattggggtcgagctatgcccagaggctgtggaggacgcccgggtgaacgcccaggacaatgagttgagtaatgtggagttccactgcgggagggccgaggacctggtgcccaccctggtgagcagactggcctcccagcacctcgtggccatcctggacccaccccgtgctggcttgcattccaaggtgatcctggccatccggagagctaagaacctcaggcggctgctgtacgtctcatgcaacccccgggcagccatgggcaactttgtggacctctgcagagccccatctaaccgggtgaagggcattcccttccggccggtcaaggctgtggcagtggacctgttcccgcagaccccgcactgtgagatgctcatcctgtttgagagggtggagcaccccaatggcacaggggtcttggggccccacagccctccagctcaacccacaccaggacccccagataacaccctacaagaaactgggaccttcccctcatcctaggcccaggacccattatggggacaggagctgaagggctcccagggccccaggggcggggaaggcatggcttgctggccaggatattcagaggtaggcagccaaagggcacagaaccctgtgccccaccaggattggcctgctgctaggggccaggggccctgaccaggaagacaggtgggttcctgtagcctgttgcccatccccagggcctttgtggactagccaaggctgtgagggccagaataaacaactgctcaacaaagggtgtttctgtgatgagagccaggggtctgaacacagggcctgggtgccagggaaagggccaaactaggcctaggcagctctgcaagcctctctgcatggctgggggagtcagggcagagcttactttaaaaaagaatgttcgatttgatacttaaacttgaggagaggcagagagaggtctgggaactgcaccagctgggggcatggggtggagaacactgggcagagttggcccctctgtggccagcctggccctcagcccagcagagagggcatcaaccaaggaaggggccatgctggggtgctgctcagctgttacaaaggcagggtccagcctgcagggaggccccaggaggggatctggccagtcaagggtccacagggtgccagcctctcaccctcagaataaagacatcagccattcccttctgga

SEQ ID NO: 195306 - DNA, 2498 bp, Homo sapiens
  Payload ID: 18563
  Gene Name: tRNA methyltransferase 2 homolog A
  Uniprot ID: Q8IZ69
  ENST ID: ENST00000404751
  CDS Start-End: 340-2028
gttgccagaagccaggatcatagagacgctcggcctccgccgcacgcgctggcggactaagagtggctggcgaagcgagcggccggcgcgggcccctggcgggcgggcggtacagccccaagcctgagacccggacctgagcatcgcaggttcgagtcccgccccgcctggggcgaagccgggggtggcggcgacctcgcggcgttgcaccggctctgtgagcacctcccctctgagcacttcccttgtgacaggccacttcccttgtgacaggcccaggacgaggtggccaggcggcccccatggcgtccctggtctaggcggagaaccgcctgggcgatgagtgagaacctcgacaacgagggcccgaagcccatggagagctgtggccaggagagcagcagtgccctgagctgccctaccgtctcggtgccccctgcagccccggcagccctggaggaggtggagaaagagggcgctggggcggctacagggccggggcctcagcccgggctctacagctacatcagggatgacttgtttacctctgagatctttaaactggagctgcagaacgtgcctcgccacgccagcttcagcgacgtccggcgcttcctgggccgctttggtctgcagccccacaaaaccaaactctttgggcaaccaccctgcgcctttgtgacattccgcagcgctgcagagagggacaaggccctgcgcgttttgcatggtgccctctggaaaggccgcccactcagtgtgcgcctggcccggcccaaggccgaccccatggccaggaggaggcgacaggagggtgagagtgagccaccagtaacacgagtggccgacgtggtgacccctctatggacagtgccctatgctgagcagcttgagcggaagcagctggagtgcgagcaggtgctgcagaaacttgccaaggaaatcgggagcaccaaccgtgccttgctgccctggctgctcgagcagaggcacaagcacaacaaggcctgctgcccgctggagggggtcaggccatcaccccagcagactgagtatcgtaataagtgtgagtttctggttggcgtcggggtggatggggaggataacaccgtgggctgtcggctcggcaagtacaagggcgggacgtgtgctgtggcagccccgtttgacaccgtgcacatccccgaagccaccaagcaggtggtgaaggccttccaggagttcatccggtccactccatactcggcatacgacccagagacgtacacaggccactggaagcagctgactgtgcgcaccagccgccgccaccaggccatggccattgcctacttccacccccagaagctgagccctgaggagctggcagagctgaagacctccctagcgcagcacttcacagcagggccaggcagggccagtggagtgacctgcctctacttcgtggaggagggacagcgaaagactcctagccaggagggcctgcccctggagcatgtggctggggaccggtgcatccacgaggacctgctagggctgaccttccggatctctccacacgccttcttccaggtgaacacacccgcagccgaggtgctctacacagtcatccaggactgggcccaattggatgcggggagcatggtgctggacgtgtgctgtggcaccggcaccattggcctggccctggcccggaaggtaaagagggtcattggggtcgagctatgcccagaggctgtggaggacgcccgggtgaacgcccaggacaatgagttgagtaatgtggagttccactgcgggagggccgaggacctggtgcccaccctggtgagcagactggcctcccagcacctcgtggccatcctggacccaccccgtgctggcttgcattccaaggtgatcctggccatccggagagctaagaacctcaggcggctgctgtacgtctcatgcaacccccgggcagccatgggcaactttgtggacgccccccttttccccccacagcctctgcagagccccatctaaccgggtgaagggcattcccttccggccggtcaaggctgtggcagtggacctgttcccgcagaccccgcactgtgagatgctcatcctgtttgagagggtggagcaccccaatggcacaggggtcttggggccccacagccctccagctcaacccacaccaggacccccagataacaccctacaagaaactgggaccttcccctcatcctaggcccaggacccattatggggacaggagctgaagggctcccagggccccaggggcggggaaggcatggcttgctggccaggatattcagaggtaggcagccaaagggcacagaaccctgtgccccaccaggattggcctgctgctaggggccaggggccctgaccaggaagacaggtgggttcctgtagcctgttgcccatccccagggcctttgtggactagccaaggctgtgagggccagaataaacaactgctcaac

SEQ ID NO: 195307 - DNA, 2928 bp, Homo sapiens
  Payload ID: 18563
  Gene Name: tRNA methyltransferase 2 homolog A
  Uniprot ID: Q8IZ69
  ENST ID: ENST00000403707
  CDS Start-End: 363-2240
aaaacgcccgcggcgcatgcccggcccgcccgtcagccagaggagcgcgcactcccggcgacacccgcgcgcacttccgtcccggccacgcgcgcctctagagctggctaaagtggttgggggttggatccggcgcgtgacgatgacgttgccagaagccaggatcatagagacgctcggcctccgccgcacgcgctggcggactaagagtggctggcgaagcgagcggccggcgcgggcccctggcgggcgggcggtacagccccaagcctgagacccggacctgagcatcgcaggcccaggacgaggtggccaggcggcccccatggcgtccctggtctaggcggagaaccgcctgggcgatgagtgagaacctcgacaacgagggcccgaagcccatggagagctgtggccaggagagcagcagtgccctgagctgccctaccgtctcggtgccccctgcagccccggcagccctggaggaggtggagaaagagggcgctggggcggctacagggccggggcctcagcccgggctctacagctacatcagggatgacttgtttacctctgagatctttaaactggagctgcagaacgtgcctcgccacgccagcttcagcgacgtccggcgcttcctgggccgctttggtctgcagccccacaaaaccaaactctttgggcaaccaccctgcgcctttgtgacattccgcagcgctgcagagagggacaaggccctgcgcgttttgcatggtgccctctggaaaggccgcccactcagtgtgcgcctggcccggcccaaggccgaccccatggccaggaggaggcgacaggagggtgagagtgagccaccagtaacacgagtggccgacgtggtgacccctctatggacagtgccctatgctgagcagcttgagcggaagcagctggagtgcgagcaggtgctgcagaaacttgccaaggaaatcgggagcaccaaccgtgccttgctgccctggctgctcgagcagaggcacaagcacaacaaggcctgctgcccgctggagggggtcaggccatcaccccagcagactgagtatcgtaataagtgtgagtttctggttggcgtcggggtggatggggaggataacaccgtgggctgtcggctcggcaagtacaagggcgggacgtgtgctgtggcagccccgtttgacaccgtgcacatccccgaagccaccaagcaggtggtgaaggccttccaggagttcatccggtccactccatactcggcatacgacccagagacgtacacaggccactggaagcagctgactgtgcgcaccagccgccgccaccaggccatggccattgcctacttccacccccagaagctgagccctgaggagctggcagagctgaagacctccctagcgcagcacttcacagcagggccaggcagggccagtggagtgacctgcctctacttcgtggaggagggacagcgaaagactcctagccaggagggcctgcccctggagcatgtggctggggaccggtgcatccacgaggacctgctagggctgaccttccggatctctccacacgccttcttccaggtgaacacacccgcagccgaggtgctctacacagtcatccaggactgggcccaattggatgcggggagcatggtgctggacgtgtgctgtggcaccggcaccattggcctggccctggcccggaaggtaaagagggtcattggggtcgagctatgcccagaggctgtggaggacgcccgggtgaacgcccaggacaatgagttgagtaatgtggagttccactgcgggagggccgaggacctggtgcccaccctggtgagcagactggcctcccagcacctcgtggccatcctggacccaccccgtgctggcttgcattccaaggtgatcctggccatccggagagctaagaacctcaggcggctgctgtacgtctcatgcaacccccgggcagccatgggcaactttgtggacctctgcagagccccatctaaccgggtgaagggcattcccttccggccggtcaaggctgtggcagtggacctgttcccgcagaccccgcactgtgagatgctcatcctgtttgagagggtggagcaccccaatggcacaggggtcttggggccccacagccctccagctcaacccacaccaggacccccagataacaccctacaagaaactgggaccttcccctcatcctaggcccaggacccattatggggacaggagctgaagggctcccagggccccaggggcggggaaggcatggcttgctggccaggatattcagaggtaggcagccaaagggcacagaaccctgtgccccaccaggattggcctgctgctaggggccaggggccctgaccaggaagacaggtgggttcctgtagcctgttgcccatccccagggcctttgtggactagccaaggctgtgagggccagaataaacaactgctcaacaaagggtgtttctgtgatgagagccaggggtctgaacacagggcctgggtgccagggaaagggccaaactaggcctaggcagctctgcaagcctctctgcatggctgggggagtcagggcagagcttactttaaaaaagaatgttcgatttgatacttaaacttgaggagaggcagagagaggtctgggaactgcaccagctgggggcatggggtggagaacactgggcagagttggcccctctgtggccagcctggccctcagcccagcagagagggcatcaaccaaggaaggggccatgctggggtgctgctcagctgttacaaaggcagggtccagcctgcagggaggccccaggaggggatctggccagtcaagggtccacagggtgccagcctctcaccctcagaataaagacatcagccattc

SEQ ID NO: 195308 - DNA, 426 bp, Homo sapiens
  Payload ID: 18563
  Gene Name: tRNA methyltransferase 2 homolog A
  ENST ID: ENST00000444256
  CDS Start-End: 1-426
gtgaacacacccgcagccgaggtgctctacacagtcatccaggactgggcccaattggatgcggggagcatggtgctggacgtgtgctgtggcaccggcaccattggcctggccctggcccggaaggtaaagagggtcattggggtcgagctatgcccagaggctgtggaggacgcccgggtgaacgcccaggacaatgcctctgcagagccccatctaaccgggtgaagggcattcccttccggccggtcaaggctgtggcagtggacctgttcccgcagaccccgcactgtgagatgctcatcctgtttgagagggtggagcaccccaatggcacaggggtcttggggccccacagccctccagctcaacccacaccaggacccccagataacaccctacaagaaactgggaccttcccctcat

SEQ ID NO: 195309 - DNA, 582 bp, Homo sapiens
  Payload ID: 18563
  Gene Name: tRNA methyltransferase 2 homolog A
  ENST ID: ENST00000445045
  CDS Start-End: 224-582
agaagccaggatcatagagacgctcggcctccgccgcacgcgctggcggactaagagtggctggcgaagcgagcggccggcgcgggcccctggcgggcgggcggtacagccccaagcctgagacccggacctgagcatcgcaggttcgagtcccgccccgcctggggcgaagccgggggtggcggcgacctcgcggcgttgcaccggctctggcccgaagcccatggagagctgtggccaggagagcagcagtgccctgagctgccctaccgtctcggtgccccctgcagccccggcagccctggaggaggtggagaaagagggcgctggggcggctacagggccggggcctcagcccgggctctacagctacatcagggatgacttgtttacctctgagatctttaaactggagctgcagaacgtgcctcgccacgccagcttcagcgacgtccggcgcttcctgggccgctttggtctgcagccccacaaaaccaaactctttgggcaaccaccctgcgcctttgtgacattccgcagcgctgcagagagggacaaggccctgcgcgttttgcatggtgc

SEQ ID NO: 195310 - DNA, 2473 bp, Homo sapiens
  Payload ID: 18563
  Gene Name: tRNA methyltransferase 2 homolog A
  ENST ID: ENST00000439169
  CDS Start-End: 317-2248
agacgctcggcctccgccgcacgcgctggcggactaagagtggctggcgaagcgagcggccggcgcgggcccctggcgggcgggcggtacagccccaagcctgagacccggacctgagcatcgcaggttcgagtcccgccccgcctggggcgaagccgggggtggcggcgacctcgcggcgttgcaccggctctgtgagcacctcccctctgagcacttcccttgtgacaggccacttcccttgtgacaggcccaggacgaggtggccaggcggcccccatggcgtccctggtctaggcggagaaccgcctgggcgatgagtgagaacctcgacaacgagggcccgaagcccatggagagctgtggccaggagagcagcagtgccctgagctgccctaccgtctcggtgccccctgcagccccggcagccctggaggaggtggagaaagagggcgctggggcggctacagggccggggcctcagcccgggctctacagctacatcagggatgacttgtttacctctgagatctttaaactggagctgcagaacgtgcctcgccacgccagcttcagcgacgtccggcgcttcctgggccgctttggtctgcagccccacaaaaccaaactctttgggcaaccaccctgcgcctttgtgacattccgcagcgctgcagagagggacaaggccctgcgcgttttgcatggtgccctctggaaaggccgcccactcagtgtgcgcctggcccggcccaaggccgaccccatggccaggaggaggcgacaggagggtgagagtgagccaccagtaacacgagtggccgacgtggtgacccctctatggacagtgccctatgctgagcagcttgagcggaagcagctggagtgcgagcaggtgctgcagaaacttgccaaggaaatcgggagcaccaaccgtgccttgctgccctggctgctcgagcagaggcacaagcacaacaaggcctgctgcccgctggagggggtcaggccatcaccccagcagactgagtatcgtaataagtgtgagtttctggttggcgtcggggtggatggggaggataacaccgtgggctgtcggctcggcaagtacaagggcgggacgtgtgctgtggcagccccgtttgacaccgtgcacatccccgaagccaccaagcaggtggtgaaggccttccaggagttcatccggtccactccatactcggcatacgacccagagacgtacacaggccactggaagcagctgactgtgcgcaccagccgccgccaccaggccatggccattgcctacttccacccccagaagctgagccctgaggagctggcagagctgaagacctccctagcgcagcacttcacagcagggccaggcagggccagtggagtgacctgcctctacttcgtggaggagggacagcgaaagactcctagccaggagggcctgcccctggagcatgtggctggggaccggtgcatccacgaggacctgctagggctgaccttccggatctctccacacgccttcttccaggtgaacacacccgcagccgaggtgctctacacagtcatccaggactgggcccaattggatgcggggagcatggtgctggacgtgtgctgtggcaccggcaccattggcctggccctggcccggggccccatgtactcccctccctgggtggggcgacaccacgctttcctgtttcagaaggtaaagagggtcattggggtcgagctatgcccagaggctgtggaggacgcccgggtgaacgcccaggacaatgagttgagtaatgtggagttccactgcgggagggccgaggacctggtgcccaccctggtgagcagactggcctcccagcacctcgtggccatcctggacccaccccgtgctggcttgcattccaaggtgatcctggccatccggagagctaagaacctcaggcggctgctgtacgtctcatgcaacccccgggcagccatgggcaactttgtggacctctgcagagccccatctaaccgggtgaagggcattcccttccggccggtcaaggctgtggcagtggacctgttcccgcagaccccgcactgtgagatgctcatcctgtttgagagggtggagcaccccaatggcacaggggtcttggggccccacagccctccagctcaacccacaccaggacccccagataacaccctacaagaaactgggaccttcccctcatcctaggcccaggacccattatggggacaggagctgaagggctcccagggccccaggggcggggaaggcatggcttgctggccaggatattcagaggtaggcagccaaagggcacagaaccctgtgccccaccaggattggcctgctgctaggggccaggggccctgaccaggaagacaggtgggttcctgtagcctgttgcccatccccagggcctttgtggactagcca

SEQ ID NO: 195311 - DNA, 739 bp, Homo sapiens
  Payload ID: 18563
  Gene Name: tRNA methyltransferase 2 homolog A
  ENST ID: ENST00000444845
  CDS Start-End: 1-477
aaggtaaagagggtcattggggtcgagctatgcccagaggctgtggaggacgcccgggtgaacgcccaggacaatgagttgagtaatgtggagttccactgcgggagggccgaggacctggtgcccaccctggtgagcagactggcctcccagcacctcgtggccatcctggacccaccccgtgctggcttgcattccaaggtgatcctggccatccggagagctaagaacctcaggcggctgctcctctgcagagccccatctaaccgggtgaagggcattcccttccggccggtcaaggctgtggcagtggacctgttcccgcagaccccgcactgtgagatgctcatcctgtttgagagggtggagcaccccaatggcacaggggtcttggggccccacagccctccagctcaacccacaccaggacccccagataacaccctacaagaaactgggaccttcccctcatcctaggcccaggacccattatggggacaggagctgaagggctcccagggccccaggggcggggaaggcatggcttgctggccaggatattcagaggtaggcagccaaagggcacagaaccctgtgccccaccaggattggcctgctgctaggggccaggggccctgaccaggaagacaggtgggttcctgtagcctgttgcccatccccagggcctttgtggactagccaaggctgtgagggccagaataaacaactgctcaacaaa

SEQ ID NO: 195312 - DNA, 2921 bp, Homo sapiens
  Payload ID: 18564
  Gene Name: tRNA methyltransferase 2 homolog B
  Uniprot ID: Q96GJ1
  ENST ID: ENST00000372935
  CDS Start-End: 368-1882
gctatgagtgcttttaaggaaggtctccatagaaggttcccccagcaaagtagggaggggtactccccgagaggagtcgaggtgccggagcctgctgcctcgccgacgctgggaggagccccgtgtcccgccgcgcttgccaagggttggctgcgcgtgcggcgggagtagaggcgccttgcgcaccaggaagtgactgtttccccgccgcagcaaaccaggccatccgctggccttttagtttgccgcctcagaaaactccctactatgccaaactgtccgcggggcggggaatggaggaggcaggcggggctggagacgggacccgacggtgactgcgcaaggtggatttcagtgtgttctttggatggcaggccttaagagaagagtcccactgcacagcctcagatacttcatctccatggtgggtctcttctccaaaccaggactgcttccctggtatgccagaaatccaccaggatggtcacagctctttctgggcacagtatgtaagggagatttcacccgtgtgatagccacgaaatgtcagaaaggacaaaaaagtcagaagaaaccaagccatcttggaccactagatggttcctggcaggaaaggctggctgatgttgtgacaccactctggaggttgagctatgaagaacagctcaaggtgaaatttgcagctcagaagaaaattttacaaagactagagtcttacatccaaatgctcaatggagtcagtgtgacaacggctgtacccaaatctgagaggctctcttgtcttctccatcctattataccctctcctgtcatcaatggttaccgaaataagtccaccttctctgtgaaccgaggtccagatggcaatccaaagactgtggggttctacctgggaacttggagagatgggaacgttgtctgtgtgcagtctaatcatctgaaaaacatccctgagaaacacagtcaagtggcgcagtactatgaagtattccttcgacagtctccattggagccctgccttgtatttcatgaaggtggatactggcgtgagctcacagtccgcaccaatagccaagggcacacaatggctatcatcactttccatccccagaaattaagtcaggaggagctccatgttcagaaggagattgtaaaggaatttttcatcagaggtcctggagcagcctgtggcttgacctcactttacttccaggaaagtaccatgacccgttgcagccatcagcagtctccctatcagcttctgtttggggaaccctacatctttgaagaacttctgagcttgaagatccgcatctctccagatgcctttttccagattaacacagctggtgcagagatgctgtatcggactgtgggggagctgactggagtgaactctgacaccatccttcttgacatctgctgtggaactggtgtgattggcctctctctggctcagcatacatctcgggtccttgggattgaattgttggagcaggcagtggaggatgcaagatggactgcagccttcaatggcatcaccaactctgaatttcatactggtcaagcagagaagattttgccagggctgctaaagtcaaaggaagatggacagtcaattgttgctgtggtgaacccagcccgtgccggactgcattacaaggtgattcaagccattcgaaacttcagggccatccacacgctagtttttgtttcctgcaagctccatggtgaatccactaggaatgtcattgagctgtgctgtcctccagaccctgctaagaagctcttaggcgagccctttgtcctgcagcaagctgtacctgtggatttgttccctcacaccccacattgtgagctggtgctcctctttactcgataagcagcctcctagaagacagcaggctatttgttaaggctgaagtttcagaaactttcaggtttggcatattgctacattgcagaccctgggagcattacagtggaaaccaatctttggtttgtgaataggaagaatctattaggcctctggtctgaggcagattttttttttgagatagagtctcactcttgcccaggctggagtgtcgtggcgtgatctcagctcactgcaacctccgcctcccgggttcaagtgattctcgtgcctcagcttccccagtagctaggattaaaggtgcgtgccaccatgcccggctaatttttgtatttttggtagagacagggtttcaccatgttggccaggctggtctcaaactcctgacctcaagtgatccacccgcctcggcctctcaaagtgctgggattataggcgtgagccaccacaccccgccgcggctgacttaaccttagatttcagattccctttcaatcatgcccgtttgcttgggtttgaccactccccactcctggatctggactgtttcttcctgttgctgtcagccttggttctagtttatagtcttgtctcctccgtttctgcttatggtgtggacaaatgaccttttttaagcagctggtaataattttacattgactggagcctgtgcatttgctcagagatgctacaatttttagatatttctaagacttctggattcttgaggtagttaaggattaaaaccagaaacagtcgaggttttttaaaagcagggtaagccatgaagtgaatacagggtgactgagtgatcatcagatgagattaattcttttgggttttcttggttttaaggcatctcgaatgccccttgaaaatgtagttttccctggtggtgggcacctgtaatcccagctactcgggaggctgaggcaggataattgcttgaacctgggaggtggaggttgcagtgagctgaaattgtgccactgcactccagcctgggtgacagagtgagacaccatctcaaaaaaaaaaaaaaaaa

SEQ ID NO: 195313 - DNA, 3327 bp, Homo sapiens
  Payload ID: 18564
  Gene Name: tRNA methyltransferase 2 homolog B
  Uniprot ID: Q96GJ1
  ENST ID: ENST00000372936
  CDS Start-End: 774-2288
ggcgggtgtcagggctatgagtgcttttaaggaaggtctccatagaaggttcccccagcaaagtagggaggggtactccccgagaggagtcgaggtgccggagcctgctgcctcgccgacgctgggaggagccccgtgtcccgccgcgcttgccaagggttggctgcgcgtgcggcgggagtagaggcgccttgcgcaccaggaagtgactgtttccccgccgcagcaaaccaggccatccgctggccttttagtttgccgcctcagaaaactccctactatgccaaactgtccgcggggcggggaatggaggaggcaggcggggctggagacgggacccgacggtgactgcgcaaggtcgtgtacggcccagcgtgggcctgtgccctaactcctcccactcccttactttctgtccttcccgggccctgcagaccggccaagtttagtggtagcctttcctagtgtctcctctttgttaacccttcctacagacacagtgggcagaacttgcctaaagaagaagggaatggaagggctagtggagtcttgttggggagacaaggacctgactgcctgtgggctgcattcgggacacgacacagcagtcaacccatttgcttgtttggtttagcaaggaatagtgtctggagccggtccagctgaaggaagggtgagcagagagtgcaagcaggacccttgtcggtgggtgaacattttgctccaaaagggatccttggccctgcgcaggtggatttcagtgtgttctttggatggcaggccttaagagaagagtcccactgcacagcctcagatacttcatctccatggtgggtctcttctccaaaccaggactgcttccctggtatgccagaaatccaccaggatggtcacagctctttctgggcacagtatgtaagggagatttcacccgtgtgatagccacgaaatgtcagaaaggacaaaaaagtcagaagaaaccaagccatcttggaccactagatggttcctggcaggaaaggctggctgatgttgtgacaccactctggaggttgagctatgaagaacagctcaaggtgaaatttgcagctcagaagaaaattttacaaagactagagtcttacatccaaatgctcaatggagtcagtgtgacaacggctgtacccaaatctgagaggctctcttgtcttctccatcctattataccctctcctgtcatcaatggttaccgaaataagtccaccttctctgtgaaccgaggtccagatggcaatccaaagactgtggggttctacctgggaacttggagagatgggaacgttgtctgtgtgcagtctaatcatctgaaaaacatccctgagaaacacagtcaagtggcgcagtactatgaagtattccttcgacagtctccattggagccctgccttgtatttcatgaaggtggatactggcgtgagctcacagtccgcaccaatagccaagggcacacaatggctatcatcactttccatccccagaaattaagtcaggaggagctccatgttcagaaggagattgtaaaggaatttttcatcagaggtcctggagcagcctgtggcttgacctcactttacttccaggaaagtaccatgacccgttgcagccatcagcagtctccctatcagcttctgtttggggaaccctacatctttgaagaacttctgagcttgaagatccgcatctctccagatgcctttttccagattaacacagctggtgcagagatgctgtatcggactgtgggggagctgactggagtgaactctgacaccatccttcttgacatctgctgtggaactggtgtgattggcctctctctggctcagcatacatctcgggtccttgggattgaattgttggagcaggcagtggaggatgcaagatggactgcagccttcaatggcatcaccaactctgaatttcatactggtcaagcagagaagattttgccagggctgctaaagtcaaaggaagatggacagtcaattgttgctgtggtgaacccagcccgtgccggactgcattacaaggtgattcaagccattcgaaacttcagggccatccacacgctagtttttgtttcctgcaagctccatggtgaatccactaggaatgtcattgagctgtgctgtcctccagaccctgctaagaagctcttaggcgagccctttgtcctgcagcaagctgtacctgtggatttgttccctcacaccccacattgtgagctggtgctcctctttactcgataagcagcctcctagaagacagcaggctatttgttaaggctgaagtttcagaaactttcaggtttggcatattgctacattgcagaccctgggagcattacagtggaaaccaatctttggtttgtgaataggaagaatctattaggcctctggtctgaggcagattttttttttgagatagagtctcactcttgcccaggctggagtgtcgtggcgtgatctcagctcactgcaacctccgcctcccgggttcaagtgattctcgtgcctcagcttccccagtagctaggattaaaggtgcgtgccaccatgcccggctaatttttgtatttttggtagagacagggtttcaccatgttggccaggctggtctcaaactcctgacctcaagtgatccacccgcctcggcctctcaaagtgctgggattataggcgtgagccaccacaccccgccgcggctgacttaaccttagatttcagattccctttcaatcatgcccgtttgcttgggtttgaccactccccactcctggatctggactgtttcttcctgttgctgtcagccttggttctagtttatagtcttgtctcctccgtttctgcttatggtgtggacaaatgaccttttttaagcagctggtaataattttacattgactggagcctgtgcatttgctcagagatgctacaatttttagatatttctaagacttctggattcttgaggtagttaaggattaaaaccagaaacagtcgaggttttttaaaagcagggtaagccatgaagtgaatacagggtgactgagtgatcatcagatgagattaattcttttgggttttcttggttttaaggcatctcgaatgccccttgaaaatgtagttttccctggtggtgggcacctgtaatcccagctactcgggaggctgaggcaggataattgcttgaacctgggaggtggaggttgcagtgagctgaaattgtgccactgcactccagcctgggtgacagagtgagacaccatctcaaaaaaaaaaaaaaaaa

SEQ ID NO: 195314 - DNA, 3078 bp, Homo sapiens
  Payload ID: 18564
  Gene Name: tRNA methyltransferase 2 homolog B
  Uniprot ID: Q96GJ1
  ENST ID: ENST00000372939
  CDS Start-End: 468-1847
aggaaggtctccatagaaggttcccccagcaaagtagggaggggtactccccgagaggagtcgaggtgccggagcctgctgcctcgccgacgctgggaggagccccgtgtcccgccgcgcttgccaagggttggctgcgcgtgcggcgggagtagaggcgccttgcgcaccaggaagtgactgtttccccgccgcagcaaaccaggccatccgctggccttttagtttgccgcctcagaaaactccctactatgccaaactgtccgcggggcggggaatggaggaggcaggcggggctggagacgggacccgacggtgactgcgcaagcaaggaatagtgtctggagccggtccagctgaaggaagggtgagcagagagtgcaagcaggacccttgtcggtgggtgaacattttgctccaaaagggatccttggccctgcgcaggtggatttcagtgtgttctttggatggcaggccttaagagaagagtcccactgcacagcctcagatacttcatctccatggtgggtctcttctccaaaccaggactgcttccctggtatgccagaaatccaccaggatggtcacagctctttctgggcacagtatgtaagggagatttcacccgtgtgatagccacgaaatgtcagaaaggacaaaaaagtcagaagaaaccaagccatcttggaccactagatggttcctggcaggaaaggctggctgatgttgtgacaccactctggaggttgagctatgaagaacagctcaagcctgtcatcaatggttaccgaaataagtccaccttctctgtgaaccgaggtccagatggcaatccaaagactgtggggttctacctgggaacttggagagatgggaacgttgtctgtgtgcagtctaatcatctgaaaaacatccctgagaaacacagtcaagtggcgcagtactatgaagtattccttcgacagtctccattggagccctgccttgtatttcatgaaggtggatactggcgtgagctcacagtccgcaccaatagccaagggcacacaatggctatcatcactttccatccccagaaattaagtcaggaggagctccatgttcagaaggagattgtaaaggaatttttcatcagaggtcctggagcagcctgtggcttgacctcactttacttccaggaaagtaccatgacccgttgcagccatcagcagtctccctatcagcttctgtttggggaaccctacatctttgaagaacttctgagcttgaagatccgcatctctccagatgcctttttccagattaacacagctggtgcagagatgctgtatcggactgtgggggagctgactggagtgaactctgacaccatccttcttgacatctgctgtggaactggtgtgattggcctctctctggctcagcatacatctcgggtccttgggattgaattgttggagcaggcagtggaggatgcaagatggactgcagccttcaatggcatcaccaactctgaatttcatactggtcaagcagagaagattttgccagggctgctaaagtcaaaggaagatggacagtcaattgttgctgtggtgaacccagcccgtgccggactgcattacaaggtgattcaagccattcgaaacttcagggccatccacacgctagtttttgtttcctgcaagctccatggtgaatccactaggaatgtcattgagctgtgctgtcctccagaccctgctaagaagctcttaggcgagccctttgtcctgcagcaagctgtacctgtggatttgttccctcacaccccacattgtgagctggtgctcctctttactcgataagcagcctcctagaagacagcaggctatttgttaaggctgaagtttcagaaactttcaggtttggcatattgctacattgcagaccctgggagcattacagtggaaaccaatctttggtttgtgaataggaagaatctattaggcctctggtctgaggcagattttttttttgagatagagtctcactcttgcccaggctggagtgtcgtggcgtgatctcagctcactgcaacctccgcctcccgggttcaagtgattctcgtgcctcagcttccccagtagctaggattaaaggtgcgtgccaccatgcccggctaatttttgtatttttggtagagacagggtttcaccatgttggccaggctggtctcaaactcctgacctcaagtgatccacccgcctcggcctctcaaagtgctgggattataggcgtgagccaccacaccccgccgcggctgacttaaccttagatttcagattccctttcaatcatgcccgtttgcttgggtttgaccactccccactcctggatctggactgtttcttcctgttgctgtcagccttggttctagtttatagtcttgtctcctccgtttctgcttatggtgtggacaaatgaccttttttaagcagctggtaataattttacattgactggagcctgtgcatttgctcagagatgctacaatttttagatatttctaagacttctggattcttgaggtagttaaggattaaaaccagaaacagtcgaggttttttaaaagcagggtaagccatgaagtgaatacagggtgactgagtgatcatcagatgagattaattcttttgggttttcttggttttaaggcatctcgaatgccccttgaaaatgtagttttccctggtggtgggcacctgtaatcccagctactcgggaggctgaggcaggataattgcttgaacctgggaggtggaggttgcagtgagctgaaattgtgccactgcactccagcctgggtgacagagtgagacaccatctcaaaaaaaaaaaaaaaaagaaaatgtagttatccctaggagcaatagcaccaattaactctcacccgtggaggaagaattggttattggagagaccctaagggaaaggagattttcagagagactgaatacctataattgtgctgtgtagtgtggaggcaaaaagctccaaaatctagtataacataataaactggatattgaaaactga

SEQ ID NO: 195315 - DNA, 3106 bp, Homo sapiens
  Payload ID: 18564
  Gene Name: tRNA methyltransferase 2 homolog B
  Uniprot ID: Q96GJ1
  ENST ID: ENST00000545398
  CDS Start-End: 357-1871
aggggaggagaggagaacttagagaaggaaggcggcgggtgtcagggctatgagtgcttttaaggaaggtctccatagaaggttcccccagcaaagtagggaggggtactccccgagaggagtcgaggtgccggagcctgctgcctcgccgacgctgggaggagccccgtgtcccgccgcgcttgccaagggttggctgcgcgtgcggcgggagtagaggcgccttgcgcaccaggaagtgactgtttccccgccgcagcaaaccaggccatccgctggccttttagtttgccgcctcaggtttgtaagaggatttattggttacgaaggaaggtggatttcagtgtgttctttggatggcaggccttaagagaagagtcccactgcacagcctcagatacttcatctccatggtgggtctcttctccaaaccaggactgcttccctggtatgccagaaatccaccaggatggtcacagctctttctgggcacagtatgtaagggagatttcacccgtgtgatagccacgaaatgtcagaaaggacaaaaaagtcagaagaaaccaagccatcttggaccactagatggttcctggcaggaaaggctggctgatgttgtgacaccactctggaggttgagctatgaagaacagctcaaggtgaaatttgcagctcagaagaaaattttacaaagactagagtcttacatccaaatgctcaatggagtcagtgtgacaacggctgtacccaaatctgagaggctctcttgtcttctccatcctattataccctctcctgtcatcaatggttaccgaaataagtccaccttctctgtgaaccgaggtccagatggcaatccaaagactgtggggttctacctgggaacttggagagatgggaacgttgtctgtgtgcagtctaatcatctgaaaaacatccctgagaaacacagtcaagtggcgcagtactatgaagtattccttcgacagtctccattggagccctgccttgtatttcatgaaggtggatactggcgtgagctcacagtccgcaccaatagccaagggcacacaatggctatcatcactttccatccccagaaattaagtcaggaggagctccatgttcagaaggagattgtaaaggaatttttcatcagaggtcctggagcagcctgtggcttgacctcactttacttccaggaaagtaccatgacccgttgcagccatcagcagtctccctatcagcttctgtttggggaaccctacatctttgaagaacttctgagcttgaagatccgcatctctccagatgcctttttccagattaacacagctggtgcagagatgctgtatcggactgtgggggagctgactggagtgaactctgacaccatccttcttgacatctgctgtggaactggtgtgattggcctctctctggctcagcatacatctcgggtccttgggattgaattgttggagcaggcagtggaggatgcaagatggactgcagccttcaatggcatcaccaactctgaatttcatactggtcaagcagagaagattttgccagggctgctaaagtcaaaggaagatggacagtcaattgttgctgtggtgaacccagcccgtgccggactgcattacaaggtgattcaagccattcgaaacttcagggccatccacacgctagtttttgtttcctgcaagctccatggtgaatccactaggaatgtcattgagctgtgctgtcctccagaccctgctaagaagctcttaggcgagccctttgtcctgcagcaagctgtacctgtggatttgttccctcacaccccacattgtgagctggtgctcctctttactcgataagcagcctcctagaagacagcaggctatttgttaaggctgaagtttcagaaactttcaggtttggcatattgctacattgcagaccctgggagcattacagtggaaaccaatctttggtttgtgaataggaagaatctattaggcctctggtctgaggcagattttttttttgagatagagtctcactcttgcccaggctggagtgtcgtggcgtgatctcagctcactgcaacctccgcctcccgggttcaagtgattctcgtgcctcagcttccccagtagctaggattaaaggtgcgtgccaccatgcccggctaatttttgtatttttggtagagacagggtttcaccatgttggccaggctggtctcaaactcctgacctcaagtgatccacccgcctcggcctctcaaagtgctgggattataggcgtgagccaccacaccccgccgcggctgacttaaccttagatttcagattccctttcaatcatgcccgtttgcttgggtttgaccactccccactcctggatctggactgtttcttcctgttgctgtcagccttggttctagtttatagtcttgtctcctccgtttctgcttatggtgtggacaaatgaccttttttaagcagctggtaataattttacattgactggagcctgtgcatttgctcagagatgctacaatttttagatatttctaagacttctggattcttgaggtagttaaggattaaaaccagaaacagtcgaggttttttaaaagcagggtaagccatgaagtgaatacagggtgactgagtgatcatcagatgagattaattcttttgggttttcttggttttaaggcatctcgaatgccccttgaaaatgtagttttccctggtggtgggcacctgtaatcccagctactcgggaggctgaggcaggataattgcttgaacctgggaggtggaggttgcagtgagctgaaattgtgccactgcactccagcctgggtgacagagtgagacaccatctcaaaaaaaaaaaaaaaaagaaaatgtagttatccctaggagcaatagcaccaattaactctcacccgtggaggaagaattggttattggagagaccctaagggaaaggagattttcagagagactgaatacctataattgtgctgtgtagtgtggaggcaaaaagctccaaaatctagtataacataataaactggatattgaaaactgactgt

SEQ ID NO: 195316 - DNA, 2799 bp, Homo sapiens
  Payload ID: 18565
  Gene Name: tRNA methyltransferase 44 homolog (S. cerevisiae)
  Uniprot ID: Q8IYL2
  ENST ID: ENST00000389737
  CDS Start-End: 1-2274
atggctgaggtgggccgtaccgggatcagctacccaggcgcgcttctcccacagggcttctgggctgcggtcgaagtgtggctggagaggccgcaggtggcaaacaaacggctttgcggcgcccgcctggaggcccgctggagcgccgccctgccctgcgcggaggcccgcggccccgggactagcgcaggctcggagcagaaggagcggggtccgggacccggccagggttcccccggagggggcccgggtcccaggtcgctatcaggacccgagcagggcacggcatgttgcgaacttgaggaggcccagggccagtgccagcaagaggaggcacagagggaagccgcctcagtgcccctgagggactccgggcaccccggccatgctgaaggaagggagggcgacttccccgccgcagatctggattcgctttgggaggatttctcccaaagtctcgcccgtggcaattcggagttgctggccttcctcaccagctccggggcgggatcgcagccagaggcgcagcgtgagctcgacgtggttctcagaaccgtcatcccgaaaactagcccacattgcccccttacaactcccaggagggaaatagtcgtgcaagatgtcctcaatggaaccataacgtttttgcctttggaagaagatgatgaggggaacctaaaggttaagatgagcaatgtgtatcaaattcagctcagtcatagcaaagaagaatggttcatatctgttttaattttctgtccagaaagatggcattcagatggaatcgtgtatcccaaacccacgtggcttggagaagagttgctggccaagttggccaagtggtctgtagagaacaagaagagtgactttaaaagcaccctttccctcatctccattatgaagtatagcaaggcttaccaggaacttaaagagaagtataaggaaatggttaaggtgtggcctgaagtcactgatcctgagaagttcgtgtatgaagatgtggctatcgcagcatacctgctgattctatgggaagaagaaagggctgagaggagactaactgccaggcagtcctttgtggacctgggatgtggaaatggcctcctggtccacatcctgagcagtgaggggcatccaggcagagggattgatgtccgaagaagaaaaatctgggacatgtatggaccacaaactcagttagaggaagatgcaatcacacccaatgataagacccttttccctgatgttgattggttaatcggtaaccattctgatgaactcacaccatggatacctgtcattgcagccaggtcttcctacaattgccgcttctttgtcctcccctgctgcttctttgacttcattggaagatactcccggaggcagagtaagaagactcagtaccgggaataccttgacttcattaaagaagtgggcttcacctgtgggtttcacgtggacgaagactgcctcaggattccttcaaccaaaagagtctgtctcgttggaaaatccagaacatacccttcctccagagaagcttccgtggatgaaaagaggactcagtacattaagagcaggcggggctgccctgtaagcccacctggctgggagctttccccttctccacgctgggttgctgctggcagtgctggtcactgtgacggtcagcaagctctggacgccagggtcgggtgtgtaaccagggcctgggccgctgagcatggagcagggccccaggctgaaggaccctggctacctggatttcatcccagagaaaaggctgagcgtgtgaggaactgtgccgccctgccacgagattttattgaccaagtggttttgcaagtagcgaatttactgttaggtggaaagcaattaaacacaagaagttctcgaaatgggagtttgaagacctggaatgggggagagagcctatctctggcagaagtagccaacgagctggacacggagaccctgcggaggctgaagcgggagtgtgggggcctgcagacgctgctccggaacagccaccaggtgttccaagttgtgaatgggagagttcacatccgcgactggcgagaggagacactgtggaagacaaagcaaccggaagcgaaacagagactgctctctgaagcctgcaaaacccgcctctgctggttcttcatgcatcaccctgatggctgcgctctgtccacggactgctgcccgtttgcccatgggcctgcggagctgcggccaccccggaccaccccgaggaagaagatttcatgagctgcatccttgccagccgaggcctggttggggaggccaaaccaaggagagcttccccagcagtcgtcagtgctgtggtctctgctctggctgtgtttcagcccacctcctcccagctttctccacatcctcacagtgatgaaccgtatttcataaacatcacacgccagagaagccacagttactcggaagcccccagctgactgcctggcttgtttcagatgcagccgcttgaaacgtgcgcagcatcttcatatcataaagattgtgcacggatccttacaatgtctcctgggggagagcggctgaggctgccttgcacaggcccttcccagggcgctgtccgacgcctgccccaccatgtccacatctgtgaagaggatggggctcctcgagaagtaagaccgtatctgccagcgtttctcaccacactggagagcagctgctctggagcagggatccaccagattggtatttttaaaaaaggtgtcaggcttgctatgttgaggttgtttttagagttac

SEQ ID NO: 195317 - DNA, 1666 bp, Homo sapiens
  Payload ID: 18565
  Gene Name: tRNA methyltransferase 44 homolog (S. cerevisiae)
  Uniprot ID: Q8IYL2
  ENST ID: ENST00000513449
  CDS Start-End: 250-1485
gattcggagacgagaccaagctgttgctgaggacgacagccctgctctggtcactccggaggctgaccagtctacacacggctgaagcttgaagaaacaacaagcccggctctagtcacgcactggcagctgaatagtctacgcatggccgaagcttgaggacttgtcaagcaaatgtcctcaatggaaccataacgtttttgcctttggaagaagatgatgaggggaacctaaaggttaagatgagcaatgtgtatcaaattcagctcagtcatagcaaagaagaatgaaagatggcattcagatggaatcgtgtatcccaaacccacgtggcttggagaagagttgctggccaagttggccaagtggtctgtagagaacaagaagagtgactttaaaagcaccctttccctcatctccattatgaagtatagcaaggcttaccaggaacttaaagagaagtataaggaaatggttaaggtgtggcctgaagtcactgatcctgagaagttcgtgtatgaagatgtggctatcgcagcatacctgctgattctatgggaagaagaaagggctgagaggagactaactgccaggcagtcctttgtggacctgggatgtggaaatggcctcctggtccacatcctgagcagtgaggggcatccaggcagagggattgatgtccgaagaagaaaaatctgggacatgtatggaccacaaactcagttagaggaagatgcaatcacacccaatgataagacccttttccctgatgttgattggttaatcggtaaccattctgatgaactcacaccatggatacctgtcattgcagccaggtcttcctacaattgccgcttctttgtcctcccctgctgcttctttgacttcattggaagatactcccggaggcagagtaagaagactcagtaccgggaataccttgacttcattaaagaagtgggcttcacctgtgggtttcacgtggacgaagactgcctcaggattccttcaaccaaaagagtctgtctcgttggaaaatccagaacatacccttcctccagagaagcttccgtggatgaaaagaggactcagtacattaagagcaggcggggctgccctgtaagcccacctggctgggagctttccccttctccacgctgggttgctgctggcagtgctggtcactgtgacggtcagcaagctctggacgccagggtcgggtgtgtaaccagggcctgggccgctgagcatggagcagggccccaggctgaaggaccctggctacctggatttcatcccagagaaaaggctgagcgtgtgaggaactgtgccgccctgccacgagattttattgaccaagtggttttgcaagtagcgaatttactgttaggtggaaagcaattaaacacaagaagttctcgaaatgggagtttgaagacctggaatgggggaggtaagctgtccaccatcttagggaggggctagcacgctcccaggcttgagggcaggaattcacgtcttcagaaccgacatgaaatggtgtggccctgtgactacacactttgaaaaagccattgatggtgggtgcataggctctcttcaagcaaattctttaaaattttccaaatagctcttataaacataaaggactttgttatttccaggg

SEQ ID NO: 195318 - DNA, 660 bp, Homo sapiens
  Payload ID: 18565
  Gene Name: tRNA methyltransferase 44 homolog (S. cerevisiae)
  ENST ID: ENST00000504134
  CDS Start-End: 1-660
ggagcgccgccctgccctgcgcggaggcccgcggccccgggactagcgcaggctcggagcagaaggagcggggtccgggacccggccagggttcccccggagggggcccgggtcccaggtcgctatcaggacccgagcagggcacggcatgttgcgaacttgaggaggcccagggccagtgccagcaagaggaggcacagagggaagccgcctcagtgcccctgagggactccgggcaccccggccatgctgaaggaagggagggcgacttccccgccgcagatctggattcgctttgggaggatttctcccaaagtctcgcccgtggcaattcggagttgctggccttcctcaccagctccggggcgggatcgcagccagaggcgcagcgtgagctcgacgtggttctcagaaccgtcatcccgaaaactagcccacattgcccccttacaactcccaggagggaaatagtcgtgcaagaaagatggcattcagatggaatcgtgtatcccaaacccacgtggcttggagaagagttgctggccaagttggccaagtggtctgtagagaacaagaagagtgactttaaaagcaccctttccctcatctccattatgaagtatagcaaggcttaccaggaacttaaagagaagtataagg

SEQ ID NO: 195319 - DNA, 5573 bp, Homo sapiens
  Payload ID: 18566
  Gene Name: tRNA methyltransferase 5
  Uniprot ID: Q32P41
  ENST ID: ENST00000261249
  CDS Start-End: 386-1915
ttcggcctccgcttcttcaggctgctggacagagacataccagccccgctcagcgttgaagctcccccaggacgcctccatgctgctctccagctgactaccagttccatctacgagcctctacccctgccctgcgctccagtcgtcggtcgcgccagaggcggagctttgagcccggcccttccggcattccgtacttcaccagggcctggaaggagaggagcgagtcgacttgatctgatgacgcgcgccctcttcgcggcgaacagtgatgatgtcatagaagacccgcccatccacccgcgacccacatccgatcggtaccggagcgggaggtgaggggtcggctcgcggatccagctgcagagcgacgtggggaattggaatggtgctttggatcttatggaggccatttggattctcaggaagatttctgaaactggaaagccatagcataactgaatcaaaatcgttgattccagtagcttggacatccctgacacagatgcttttggaagcacctggtattttcttattgggtcaaagaaaaagattctcaaccatgccagaaacagaaacacatgagagagagactgaattgttttcaccaccttctgatgtccgaggcatgacaaaacttgatagaacagcttttaaaaagacagtcaacattccagtgcttaaagtgaggaaagaaatagtcagtaaattgatgcgatccctaaaaagggcagcattgcagcgcccaggcataagacgtgtgattgaagatccggaagataaagaaagtagactaatcatgttggatccctataaaatatttactcatgattcctttgagaaagcagaactcagtgttttagagcagcttaatgtcagtccacagatctctaaatacaatttggaactaacatatgaacactttaagtcagaagaaatcttgagagctgtgcttcctgaaggtcaagatgtaacttcagggtttagcaggattggacatattgcacacctaaaccttcgagatcatcagctgcctttcaaacatttaattggccaggttatgattgacaaaaatccaggaatcacctcagcagtaaataaaataaataatattgacaatatgtaccgaaatttccaaatggaagtgctatctggagagcagaacatgatgacaaaggttcgagaaaacaactacacctatgaatttgatttttcaaaagtctattggaatcctcgtctgtctacagaacacagccgtatcacagaacttctcaaacctggggatgtcctatttgatgtttttgctggggttgggccctttgccattccagtagcaaagaaaaactgcactgtatttgccaatgatctcaatcctgaatctcataaatggctgttgtacaactgtaaattaaataaagtggaccaaaaggtgaaagtcttcaacttggatgggaaagacttcctccaaggaccagtcaaagaagagttaatgcagctgctgggtctgtcaaaagaaagaaaaccctctgtgcacgttgtcatgaacttgccagcaaaagctatagagtttcttagtgctttcaagtggcttttagatgggcagccatgcagcagtgagttccttcccatagtgcattgttatagcttttccaaagatgctaaccctgctgaggatgttcggcaaagggctggagctgtgttaggcatttctctggaggcatgcagttcagttcacctggtaagaaatgtggccccaaacaaggaaatgctgtgcatcacgtttcagattcctgcctctgtcctctacaagaaccagaccagaaatccagagaatcatgaagatccacctcttaaaaggcagaggacggctgaagccttttcagacgaaaaaacacaaattgtttcaaacacttaattggaaatgttttctccatctccctaccagacttacatgtagtgaaatagaatttgtattatttaataaaattttagggtttggtttttactattgaacccttgtactttgccttattttacaaattgaggattaccaattaaactttaactgaactaaggctaccaaatacattccctgttatctaaattataacatacaattattttataacaaaatatatctaatttttattggataaatatgaataaatattttctctcagggaaaataatttttgaaagtagggtgattgagtactaactaggaaggtattaacaccactttgtagttgtcctttacgtaactactcctttactgccaattaactatcaccataaaagtaataaaaaatgaaattatttagaacggggcaggcaaactacatcctgcaggccaaatctgtcccaccacctgttttcatatggcctgtggcctaataatgttcttacgttttccattggttgaaaaataatcaaaagaacattttgtgacgtgaaaattttatgacatctattatgtatcagttttaaaaattagaattgtatgaaattaagagtttcagagttcataaagtttgattggaacataccatgctcatttgtttacatatcatctgcagctgttttttgtttttaatatggaacgcttcacgaatttgcatgtcatccttgcgcagggaccattctgatcttctctgtaccattccagttttttagtatatgtgctgctgaagtgaggactgcagctgctttcttgaacaatagcagagttgagtggttgcaacacacactgaatgtgactgtcatcacttcacactgctgtttgacacatcacaaatcactgatgtggttgtaacgacagcattttgagtgccatgtatatcacatgaacccacattttattttttattaccagagcatatctattatagcaaaacaagaaaagtggactttgttgttatttttaaagtacagtagggtgtgaattattttgatgttgaattagacgacaaagcatctatatagctaagctaaaagaataaccattgacattaccagacaaaccactcatcacagtattcccaactcacaggcaagcaactgttagaaaaattagaaaatttaaaatggaaataacaaagcagaatttcttcacaaaatgaaaatgaggctgcaacaacagtaagtctctaagtcaatcatttgttagccaagcaaagccatttattgatggtgtgaattaattatgtttggatgcagcagctgaatatatccagagaaaataaacttaagattactggcctttggcaagaacagttgcttaaagagttaaggacattgaaagcgacataaatagtcactttaaaaaggaaatgattctggatggttctttgactctatttttatttttacttagagacagggtcttgctctgttgcccaggctggagtgtagagacacagttacacctcaatgtaaccttgaactcctaggcttgagatcttcccatctcggcttcccaatgtgtgaaggttacaggtgtgagcccttatatgtggccctcgtgaatggtttagcactatccccttggtggtgtccttaagataatgagttatgagatcttgttgtttcaaagtatgtggcactcgccccccacactctcttgctcctgccttcgccatgtgaagtgccttctcctattttgccttctaccatgagtaaaagcttcctgaggcttccccagaagcagatgccagtgctatgcttcctatagcctggagaactgtgagccaattatacctcttttcttataaattacccagtatcaagtatttctttatagcaatgcaagaatggcctaaaacacaaggcaaaacaactttgatatggtacagtcattttgacaatcgatatttgaatcacaatatttgatgacaatatccttacacatttgtcatactatcaaagagaaagaaacaagatttccattcccacaaattttagtgagtatattttctgagttcagcatttttagggacctaggtgcaagtgcaaaggaaatttccctgtttcaaaatctatttaactgcaattgaggtgattcaacctaattttcagtaagaagtgattaaaataatgacatgctaaaaggcaaatttcaagggaagaaatgtaaaagaattttacaaatgctttccaagtgatgaatatgctcagttaatttcatatgctcctggattgatagcagtatttggcaatacctatctgtatgagaagacatttttaaagatgaaatgtgtaaaatcttattaccattagtattaatggttaatgatggttaatgataaccattaataggcaatcatttacaactgattttgatcacagggaacacttacttagaaccctgattagaggcaatgttattctcaccaaaaaaggcattacaaaaaattgggctatattttgaattttgtcaattaaaaaagcgtgggagcagtgtgaaggagaagaggcaagaacgacccctggaccgaccaaagcccgcgcgctgctgcgtcccacacccggtgcccacatcccgccgccgccgccgccgccatgcccaagagaaagactgaaggggatgctaaaggagataaagccaaggtgaaggatgaatcacagagaagatctgcgaggttgtctgctaaacctgctcctccaaagccagagcccaagcctaaaaaggcccctgcaaagaagggagagaaggtacccaaagggaaaaagagaaaagctgatgctggcaaggagcgggaaggtgctggagatcccaagtgaagtgtgtgcattttttataactgtacttctggtgactgtacagtttgaaatattctttatcaagttttataaaaatgcagaattttgttttactttttttaagctatgttgttagcacacagaacacttcattgttgtttttgggggaaggggtatgtgtcactaatagaatatctctgaagctggattgatacggggaaaacatctttcccttctagttttgagagacttcctcttggctcccaggaggagggatttcctgactttgacacacatggccaccttggcacaaaagccttgtggtatggaaaaacaaattcgtttttatgtcttcttttccctttccatctttcagcatagacttaatccccttaagcccagacatctgttgggacctgacccccggtcattggttaccagtgtgtctggcaatctggactttccagtgatgccactgagatggcacctgtcaaaagagcagtggttccatttctagattatggatcttcggataaattctgccattttcatttcacttcctgaaagtcagggttggcttgtgaaaagttgttaaacaacatgctaaatgtgaaatgttaaccctctaaactttccctgttcagagcatcagatgaggacttcattgggttttatagcggctgatttttggtagtccattgaagaagagagtttgaaagttgtatactgttaatgactgtctgcccatgtcctgcctgaaataccatgattgtttatggaaagtatctttaataaagctggatacagtttgaaag

SEQ ID NO: 195320 - DNA, 572 bp, Homo sapiens
  Payload ID: 18566
  Gene Name: tRNA methyltransferase 5
  ENST ID: ENST00000555420
  CDS Start-End: 117-572
ccacatccgatcggtaccggagcgggaggtgaggggtcggctcgcggatccagctgcagagcgacgtggggaattggaatggtgctttggtgaggtggcggccgcgttaggggctaatggtccaggggaggtaccagcccgcccagggctgctctctgccatgtgctgcctgggcacagaaacatcgcgaggtcacccacccgcctaggatcttatggaggccatttggattctcaggaagatttctgaaactggaaagccatagcataactgaatcaaaatcgttgattccagtagcttggacatccctgacacagatgcttttggaagcacctggtattttcttattgggtcaaagaaaaagattctcaaccatgccagaaacagaaacacatgagagagagactgaattgttttcaccaccttctgatgtccgaggcatgacaaaacttgatagaacagcttttaaaaagacagtcaacattccagtgcttaaagtgaggaaagaaatagtcagtaaattgatgcgatccctaaaaagggcagcattgcagcgcccaggcataagacgt

SEQ ID NO: 195321 - DNA, 560 bp, Homo sapiens
  Payload ID: 18566
  Gene Name: tRNA methyltransferase 5
  ENST ID: ENST00000553903
  CDS Start-End: 53-560
attccgtacttcaccagggcctggaaggagaggagcgagtcgacttgatctgatgacgcgcgccctcttcgcggcgaacagtgatgatgtcatagaagacccgcccatccacccgcgacccacatccgatcggtaccggagcgggaggatcttatggaggccatttggattctcaggaagatttctgaaactggaaagccatagcataactgaatcaaaatcgttgattccagtagcttggacatccctgacacagatgcttttggaagcacctggtattttcttattgggtcaaagaaaaagattctcaaccatgccagaaacagaaacacatgagagagagactgaattgttttcaccaccttctgatgtccgaggcatgacaaaacttgatagaacagcttttaaaaagacagtcaacattccagtgcttaaagtgaggaaagaaatagtcagtaaattgatgcgatccctaaaaagggcagcattgcagcgcccaggcataagacgtgtgattgaagatccggaagataaagaaagtagactaatcatgttggatc

SEQ ID NO: 195322 - DNA, 2327 bp, Homo sapiens
  Payload ID: 18567
  Gene Name: tRNA methyltransferase 6
  Uniprot ID: Q9UJA5
  ENST ID: ENST00000203001
  CDS Start-End: 132-1625
cgtgcaacacgtgggggcggtgccggtcggagggctcctagtgcgccaggttgtgggaagtgaggctggcggtggcgacaaccgaggaggaggggcgggacgccgtggagcacggcgaccggctgagcgtcatggagggctcaggggagcagccgggcccacaaccacagcatcccggagaccaccgcatccgcgacggcgacttcgtggtgctgaaacgtgaagatgtgtttaaagcagtacaagtccagcggagaaaaaaagtaactttcgaaaaacagtggttctacctggataacgtcattggccatagttatggaactgcatttgaagtgaccagtggaggaagtctacagcccaagaagaagagggaagagcctactgcagagactaaagaagcgggcactgataatcgaaatatagttgatgatgggaaatctcagaaacttactcaagatgacataaaagctttgaaggacaagggcattaaaggagaggaaatagttcagcagttaattgaaaatagtacaacattccgagacaagacagaatttgcccaagataaatatattaaaaagaagaaaaaaaaatatgaagccatcattactgttgtgaagccatccacccgtattctttcaattatgtattatgcaagagaacctggaaaaattaaccacatgagatacgatacactagcccagatgttgacgttgggaaatatccgtgctggcaacaaaatgattgtgatggaaacgtgtgcaggcttggtgctgggtgcaatgatggaacgaatgggaggttttggctccattattcagctataccctggaggaggacctgttcgggcagcaacagcatgttttggatttcccaaatcttttctcagtggtctttatgaattccctctcaacaaagtggacagtcttctacatggaacattttctgccaagatgttatcttcagagccaaaagacagtgctttggttgaagaaagtaatggcacactggaggaaaaacaggcttctgaacaagagaatgaagacagcatggcagaggccccagagagcaaccacccagaagaccaggaaacaatggaaacaatttctcaagatccagaacataaggggcctaaagagagaggaagcaaaaaagattatattcaggaaaaacagaggagacaagaagagcagaggaaaagacatttagaggctgccgctctgctgagtgaaagaaacgcagatggtttaattgtagctagtcgtttccaccccactcccctgctgctgtctttgctggactttgtggccccttcaaggccgtttgtggtctactgtcagtacaaagagcctctgttggaatgctacacaaaactgcgggagaggggaggggtcatcaacctcaggctgtctgaaacctggctcagaaattatcaggttttgccagatcgaagtcatcctaaactgctgatgagtggaggtgggggttatcttctctccggcttcaccgttgccatggacaaccttaaagcagacaccagcctcaaatctaatgcaagcactttagaatcacacgagactgaggagcctgcagctaaaaaacgaaaatgcccagagtctgactcttaacccttttgagaattgctctgaattttgttctcaggcattatacagttagtaattaaactttaaatgccattactacttgttttttcatatcccaagaataagaacatgtctatgtacccgtttctaggaaggaggagtatatgccttttgtctatttctgacacagatgcatttggtctgtcaaaactgcaaccatggggtatgtagtatgaccaactgcatttaacaaaactcctctaagtacttctaaatattctgtgcaaatatcttgagaacttcaacatcctaaaaatgtgtttctacaagactttatattttaagctaagtggaataatacaacgtaactaaaacatggcgggtaccgaaaggagggcaattcatggaagaaatttcctctgttcattccgttctcttcaacctaagcaatatggatgtgtgagtgtgtgatttattatggtaccaaaaatgtccaccttctttcctgcagcggaataagcttttttgaaatgctgaggttttattttaatagttgacaacctgggaaagttctgagtatttattttactgctcttttttgtgcatagaaaggtttagtagggtacttttttgcattaatttgccaatactcttattctttgttctaaataaagtgactagaatttttgtgtactattcaattaaaggaaacaaatgtcttttccc

SEQ ID NO: 195323 - DNA, 2239 bp, Homo sapiens
  Payload ID: 18567
  Gene Name: tRNA methyltransferase 6
  Uniprot ID: Q9UJA5
  ENST ID: ENST00000453074
  CDS Start-End: 554-1537
ctgggccggaaagcggaagcggcgtgcaacacgtgggggcggtgccggtcggagggctcctagtgcgccaggttgtgggaagtgaggctggcggtggcgacaaccgaggaggaggggcgggacgccgtggagcacggcgaccggctgagcgtcatggagggctcaggggagcagccgggcccacaaccacagcatcccggagaccaccgcatccgcgacggcgacttcgtggtgctgaaacgtgaagatgtgtttaaagcagtacaagtccagcggagaaaaaaagtaactttcgaaaaacagtggttctacctggataacgtcattggccatagttatggaactgcatttgaagtgaccagtggaggaagtctacagcccaagaagaagagggaagagcctactgcaggaaatagttcagcagttaattgaaaatagtacaacattccgagacaagacagaatttgcccaagataaatatattaaaaagaagaaaaaaaaatatgaagccatcattactgttgtgaagccatccacccgtattctttcaattatgtattatgcaagagaacctggaaaaattaaccacatgagatacgatacactagcccagatgttgacgttgggaaatatccgtgctggcaacaaaatgattgtgatggaaacgtgtgcaggcttggtgctgggtgcaatgatggaacgaatgggaggttttggctccattattcagctataccctggaggaggacctgttcgggcagcaacagcatgttttggatttcccaaatcttttctcagtggtctttatgaattccctctcaacaaagtggacagtcttctacatggaacattttctgccaagatgttatcttcagagccaaaagacagtgctttggttgaagaaagtaatggcacactggaggaaaaacaggcttctgaacaagagaatgaagacagcatggcagaggccccagagagcaaccacccagaagaccaggaaacaatggaaacaatttctcaagatccagaacataaggggcctaaagagagaggaagcaaaaaagattatattcaggaaaaacagaggagacaagaagagcagaggaaaagacatttagaggctgccgctctgctgagtgaaagaaacgcagatggtttaattgtagctagtcgtttccaccccactcccctgctgctgtctttgctggactttgtggccccttcaaggccgtttgtggtctactgtcagtacaaagagcctctgttggaatgctacacaaaactgcgggagaggggaggggtcatcaacctcaggctgtctgaaacctggctcagaaattatcaggttttgccagatcgaagtcatcctaaactgctgatgagtggaggtgggggttatcttctctccggcttcaccgttgccatggacaaccttaaagcagacaccagcctcaaatctaatgcaagcactttagaatcacacgagactgaggagcctgcagctaaaaaacgaaaatgcccagagtctgactcttaacccttttgagaattgctctgaattttgttctcaggcattatacagttagtaattaaactttaaatgccattactacttgttttttcatatcccaagaataagaacatgtctatgtacccgtttctaggaaggaggagtatatgccttttgtctatttctgacacagatgcatttggtctgtcaaaactgcaaccatggggtatgtagtatgaccaactgcatttaacaaaactcctctaagtacttctaaatattctgtgcaaatatcttgagaacttcaacatcctaaaaatgtgtttctacaagactttatattttaagctaagtggaataatacaacgtaactaaaacatggcgggtaccgaaaggagggcaattcatggaagaaatttcctctgttcattccgttctcttcaacctaagcaatatggatgtgtgagtgtgtgatttattatggtaccaaaaatgtccaccttctttcctgcagcggaataagcttttttgaaatgctgaggttttattttaatagttgacaacctgggaaagttctgagtatttattttactgctcttttttgtgcatagaaaggtttagtagggtacttttttgcattaatttgccaatactcttattctttgttctaaataaagtgactagaatttttgtgtactattcaattaaaggaaacaaatgtcttttccc

SEQ ID NO: 195324 - DNA, 2827 bp, Homo sapiens
  Payload ID: 18568
  Gene Name: tRNA methyltransferase 61A
  ENST ID: ENST00000299202
  CDS Start-End: 1-575
ggcacgtgtggagccccggcagcaggagcgtcgcaggcaccggcagtggctctgtgtcccacgccatcatccgcaccattgcacccacgggtcacctgcacacggtggagttccaccagcagcgggcagagaaggcccgggaggagttccaggagcaccgtgtgggccgctgggtgactgtgcgcacccaggacgtgtgccgcagtggctttggcgtgagccacgtggccgacgccgtcttcctggacatcccatcaccctgggaggccgtgggccacgcctgggacgccctcaaggtcgaaggcgggcgcttctgctccttctcaccgtgcatcgagcaggtgcaacgcacatgccaggcgctggcagcgcgcggcttctcagagctgagcaccctggaggtgctgccacaggtctacaacgtgcgcactgtcagcctgccaccgcccgacctgggcacaggcacagatggccctgccggctccgacaccagccccttccgcagcggcacgcccatgaaggaggccgtgggccacaccggctacctgaccttcgccaccaagaccccaggctagggggccgcctcccagggcaccagggagctgggagcactgaagggctgggcagggaggccagaggcaccttatatggtcagcgatgcctgccagacacagacggtggggtggggcttgggggcctcctgggtggccagagtgggacagcaggaagggcggctgtgatggaggagcagtgctggggctgggcctcagccattcctgtccagccctgtggcccatcccagctgctgtttgttgccaatatgaagtatccactgccacaggctcccctgggtgttgaagccaaagggtgcaggtgggggagtctgaccccctcccaggtgggcctaagcaggaagggggtggaggagggaggggggcattgaccctgagaccacgctgcgtctgacccctgggcccccacggccctggctgccccacggggcctgagaccatctcgtgcttctccagtccccgggccgaggctccagccttggccagaagctggggtgagctgacccagaatccctgccctgctctccccagcgctaggagaccaggccagcccaggaaccagggaggtgaccctgctctctggcctcctggctgatgtcacagcactgagctcagcccaggccttcgtccactcatgtccaagaggcggggcatcccccacccagccagagcccctgacatgggctgcactcgctgaggccaggcagcgctgcggagaggagcggcagagtgggttgtctgccgcaggcaaccaggcaagtgtgtcggggctggggtgtgaatgccagcctgtgagtcccggaactatgtgggtacccctacccctcacagaagccaagggcatggaggaggtccctccacagtgacaacggtgtggggtaggggaggtgcattcaggacaccacccagggacagtgcctatgtgatcacctcttaaaggctaagcttaggggcatttcccaaagtggggacagagggcaggacgcccaggctgggggctctcctcgcccgccctggtgtctgacagcctcaaggaaggagcagtgcctgtgtcagccatggggcccttggagctgccgctggtgcctagggggcctgggtttctgcccaggcagccagtggctgttgggagcctctgtttcccctgtgctgggggccttgagtgctatgctagcaggggcctggccccaagtgtgagtgatgagcaataaacgtaccgtccccctctgttctgagtgatccctagcagccaaggccacccccagctgctgtctaggccagccctacctgcgctctgcccctggtccctgctcctccctgtcctggtttggcatgataggcgctccagtctccaggacaaaggggcaaatgtgtggccacccccatctggctgcagaaaaggccactccttcctggggttggggtggtccaggagtgctgggccttcttccacagtcctgggctggaattcagtgtggctgcctgggttacttgtatgcgcccctgaaggaagggtccactccaggccgcctggtccctgcgaagtgtcacactgtgggtcaccgggggctgtggctaatgtggtccgggaggcctgtgtccctgagagttgctcagccctgctccgagggcttgtcctctccttccaggacccagcttcccttctaaccttgttactcacctggggcacagaggaggggcccccagtcaggttcaacatggaagtgggtgaccctaatgccaggagctttggggtcaggctgtccctggggtgtcatgaactgggtgacgcacacccctgagatctcagttcccccaagcctgccctgcccctcctggccacagcaaaggcctgcatggtgtctgatgggtggacaccgggaggtgtttctttgaggcgcagctccatggtttataggacacataggcctcaggcaccgtagggtccaggttgtgcccattttccagccggggctggttgccctggtggcagccctgggtgagtcaccagggtccgcacatggagagcgggaggtcccagcccacccttagttgtcacatgggacagagttgctgtgtcaatcccctcggccctgctgctctgccctgcacacaggcccccatgatgaccttgagcctccaggcatccacccccaccgtatggccctctagacccagctgggcctcaccccactccctcagcttggatcctcacgtggcctggagccagcattaaactcctgtatgtccttcaa

SEQ ID NO: 195325 - DNA, 3229 bp, Homo sapiens
  Payload ID: 18568
  Gene Name: tRNA methyltransferase 61A
  Uniprot ID: Q96FX7
  ENST ID: ENST00000389749
  CDS Start-End: 108-977
ggagccggaagtgttgtggccgccgccgccgcgcgtcgcggaggcacgtgtggagccccggcagcaggagcgtcgcaggtccttggcccttgccagacattagcaccatgagcttcgtggcatacgaggagctgatcaaggagggtgacacggccatcctgtcactgggccatggtgcaatggtggcggtgcgtgtgcagcgtggggcacagacccagacccggcatggtgtcctgcggcactcagttgaccttatcggccgccccttcggctccaaggtgacgtgcggccgaggtggctgggtgtatgtgctgcaccccacgcccgagctctggacgctgaacctgccgcaccgcacgcagatcctctactccacagacatcgccctcatcaccatgatgttggagcttcggcccggctctgtggtctgtgagtctggcaccggcagtggctctgtgtcccacgccatcatccgcaccattgcacccacgggtcacctgcacacggtggagttccaccagcagcgggcagagaaggcccgggaggagttccaggagcaccgtgtgggccgctgggtgactgtgcgcacccaggacgtgtgccgcagtggctttggcgtgagccacgtggccgacgccgtcttcctggacatcccatcaccctgggaggccgtgggccacgcctgggacgccctcaaggtcgaaggcgggcgcttctgctccttctcaccgtgcatcgagcaggtgcaacgcacatgccaggcgctggcagcgcgcggcttctcagagctgagcaccctggaggtgctgccacaggtctacaacgtgcgcactgtcagcctgccaccgcccgacctgggcacaggcacagatggccctgccggctccgacaccagccccttccgcagcggcacgcccatgaaggaggccgtgggccacaccggctacctgaccttcgccaccaagaccccaggctagggggccgcctcccagggcaccagggagctgggagcactgaagggctgggcagggaggccagaggcaccttatatggtcagcgatgcctgccagacacagacggtggggtggggcttgggggcctcctgggtggccagagtgggacagcaggaagggcggctgtgatggaggagcagtgctggggctgggcctcagccattcctgtccagccctgtggcccatcccagctgctgtttgttgccaatatgaagtatccactgccacaggctcccctgggtgttgaagccaaagggtgcaggtgggggagtctgaccccctcccaggtgggcctaagcaggaagggggtggaggagggaggggggcattgaccctgagaccacgctgcgtctgacccctgggcccccacggccctggctgccccacggggcctgagaccatctcgtgcttctccagtccccgggccgaggctccagccttggccagaagctggggtgagctgacccagaatccctgccctgctctccccagcgctaggagaccaggccagcccaggaaccagggaggtgaccctgctctctggcctcctggctgatgtcacagcactgagctcagcccaggccttcgtccactcatgtccaagaggcggggcatcccccacccagccagagcccctgacatgggctgcactcgctgaggccaggcagcgctgcggagaggagcggcagagtgggttgtctgccgcaggcaaccaggcaagtgtgtcggggctggggtgtgaatgccagcctgtgagtcccggaactatgtgggtacccctacccctcacagaagccaagggcatggaggaggtccctccacagtgacaacggtgtggggtaggggaggtgcattcaggacaccacccagggacagtgcctatgtgatcacctcttaaaggctaagcttaggggcatttcccaaagtggggacagagggcaggacgcccaggctgggggctctcctcgcccgccctggtgtctgacagcctcaaggaaggagcagtgcctgtgtcagccatggggcccttggagctgccgctggtgcctagggggcctgggtttctgcccaggcagccagtggctgttgggagcctctgtttcccctgtgctgggggccttgagtgctatgctagcaggggcctggccccaagtgtgagtgatgagcaataaacgtaccgtccccctctgttctgagtgatccctagcagccaaggccacccccagctgctgtctaggccagccctacctgcgctctgcccctggtccctgctcctccctgtcctggtttggcatgataggcgctccagtctccaggacaaaggggcaaatgtgtggccacccccatctggctgcagaaaaggccactccttcctggggttggggtggtccaggagtgctgggccttcttccacagtcctgggctggaattcagtgtggctgcctgggttacttgtatgcgcccctgaaggaagggtccactccaggccgcctggtccctgcgaagtgtcacactgtgggtcaccgggggctgtggctaatgtggtccgggaggcctgtgtccctgagagttgctcagccctgctccgagggcttgtcctctccttccaggacccagcttcccttctaaccttgttactcacctggggcacagaggaggggcccccagtcaggttcaacatggaagtgggtgaccctaatgccaggagctttggggtcaggctgtccctggggtgtcatgaactgggtgacgcacacccctgagatctcagttcccccaagcctgccctgcccctcctggccacagcaaaggcctgcatggtgtctgatgggtggacaccgggaggtgtttctttgaggcgcagctccatggtttataggacacataggcctcaggcaccgtagggtccaggttgtgcccattttccagccggggctggttgccctggtggcagccctgggtgagtcaccagggtccgcacatggagagcgggaggtcccagcccacccttagttgtcacatgggacagagttgctgtgtcaatcccctcggccctgctgctctgccctgcacacaggcccccatgatgaccttgagcctccaggcatccacccccaccgtatggccctctagacccagctgggcctcaccccactccctcagcttggatcctcacgtggcctggagccagcattaaactcctgtatgtccttcaa

SEQ ID NO: 195326 - DNA, 1836 bp, Homo sapiens
  Payload ID: 18569
  Gene Name: tRNA methyltransferase 61B
  Uniprot ID: Q9BVS5
  ENST ID: ENST00000306108
  CDS Start-End: 25-1458
gcgacggcgccttcgcgaaacactatgctaatggcatggtgccgcggtcctgtcttgctgtgcctgcggcaggggctcggaaccaattcattcctgcacggcctggggcaggagcccttcgagggagctcggtcactgtgttgcaggtcctcgcctagagacctgcgagatggagaaagagagcacgaggcggcacaaaggaaagccccaggagcagagtcttgcccatctctccctctgagcatctcggacattgggactggatgtctttcgtcactggaaaacctcagactgccgacgctgcgggaagagtcatcccctcgagagctcgaggactcgagcggagaccagggccggtgcggtcccacacaccagggatccgaggatccttcgatgctctcgcaggcccagtccgctaccgaggtcgaagagcgtcacgtctccccttcttgttcaacttccagagagagaccctttcaggctggggaactgattttagctgagactggggagggagaaacaaaatttaagaaattatttaggttgaacaacttcggactcttaaatagtaactggggggcagtcccgttcggcaagatcgtggggaagttccccggccagatactgaggagttccttcggtaagcagtacatgctgaggaggccagccttggaagactatgtagtattgatgaaaagagggactgccataacattcccaaaggatattaatatgattctctcaatgatggatatcaacccaggtgatactgttttggaagctggctcaggctctggtggaatgagcttatttttatccaaagcagttggatcacaaggacgagtcataagttttgaggtacgaaaagaccaccatgatctggctaagaagaattacaaacactggcgtgattcatggaaattaagtcatgtagaagagtggccagacaatgtggattttattcataaggacatttcaggagcaaccgaagacataaaatctttaacatttgacgcagtagctttggatatgttaaatcctcatgttactttgcctgttttttacccacatcttaagcatggtggtgtatgtgctgtatatgtagtaaacatcacacaggttattgaacttttagatggaattcgcacctgtgaacttgctctttcatgtgaaaagataagcgaggtcattgtcagagattggttggtttgccttgcaaaacagaaaaatggaattttagctcaaaaagtagaatctaaaatcaacacagatgtacaactagattctcaagagaaaattggagttaaaggtgagctgtttcaagaggatgaccatgaagaatcgcattctgattttccatatggatcatttccctatgttgctagaccagtacactggcaacctggtcatacagcttttcttgtcaagttgaggaaggtcaaaccacaacttaactgagtactccagatgacagtaactgacttgaagatggaaaaatatcaaaatagaactttatattgaaaatcactgcttccatagattggcatttttagctattactatgacttatataacttatacatataattttgaaaataacaactaaaagatgtataacatagcaaaactgcttaaacatcccattttgacacttgtcttgcagttagtttgacattttgtagttaatgattccaaattggtttagttgggccatctcattcttcacttcctgtaaaccactccatagatttgtctttcttcaagaaattagttttctttcctttatttgattgatggtcattgactactgaaataaaatatgcattttaagataaa

SEQ ID NO: 195327 - DNA, 1584 bp, Homo sapiens
  Payload ID: 18569
  Gene Name: tRNA methyltransferase 61B
  ENST ID: ENST00000439947
  CDS Start-End: 19-1119
gcgccttcgcgaaacactatgctaatggcatggtgccgcggtcctgtcttgctgtgcctgcggcaggggctcggaaccaattcattcctgcacggcctggggcaggagcccttcgagggagctcggtcactgtgttgcaggtcctcgcctagagacctgcgagatggagaaagagagcacgaggcggcacaaaggaaagccccaggagcagagtcttgcccatctctccctctgagcatctcggacattgggactggatgtctttcgtcactggaaaacctcagactgccgacgctgcgggaagagtcatcccctcgagagctcgaggactcgagcggagaccagggccggtgcggtcccacacaccagggatccgaggatccttcgatgctctcgcaggcccagtccgctaccgaggtcgaagagcgtcacgtctccccttcttgttcaacttccagagagagaccctttcaggctggggaactgattttagctgagactggggagggagaaacaaaatttaagaaattatttaggttgaacaacttcggactcttaaatagtaactggggggcagtcccgttcggcaagatcgtggggaagttccccggccagatactgaggagttccttcggtaagcagtacatgctgaggaggccagccttggaagactatgtagtattgatgaaaagagggactgccataacattcccaaaggatattaatatgattctctcaatgatggatatcaacccaggtgatactgttttggaagctggctcaggctctggtggaatgagcttatttttatccaaagcagttggatcacaaggacgagtcataagttttgaggtacgaaaagaccaccatgatctggctaagaagaattacaaacactggcgtgattcatggaaattaagtcatgtagaagagtggccagacaatgtggattttattcataaggacatttcaggagcaaccgaagacataaaatctttaacatttgacgcagtagctttggatatgttaaatcctcatgttactttgcctgttttttacccacatcttaagcatggtggtgtatgtgctgtatatgtagtaaaaagaatcgcattctgattttccatatggatcatttccctatgttgctagaccagtacactggcaacctggtcatacagcttttcttgtcaagttgaggaaggtcaaaccacaacttaactgagtactccagatgacagtaactgacttgaagatggaaaaatatcaaaatagaactttatattgaaaatcactgcttccatagattggcatttttagctattactatgacttatataacttatacatataattttgaaaataacaactaaaagatgtataacatagcaaaactgcttaaacatcccattttgacacttgtcttgcagttagtttgacattttgtagttaatgattccaaattggtttagttgggccatctcattcttcacttcctgtaaaccactccatagatttgtctttcttcaagaaattagttttctttcctttatttgattgatggtcattgactactgaaataaa

SEQ ID NO: 195328 - DNA, 685 bp, Homo sapiens
  Payload ID: 18569
  Gene Name: tRNA methyltransferase 61B
  ENST ID: ENST00000419999
  CDS Start-End: 1-307
tgaacttttagatggaattcgcacctgtgaacttgctctttcatgtgaaaagataagcgaggtcattgtcagagattggttggtttgccttgcaaaacagaaaaatggaattttagctcaaaaagtagaatctaaaatcaacacagatgtacaactagattctcaagagaaaattggagttaaagaagaatcgcattctgattttccatatggatcatttccctatgttgctagaccagtacactggcaacctggtcatacagcttttcttgtcaagttgaggaaggtcaaaccacaacttaactgagtactccagatgacagtaactgacttgaagatggaaaaatatcaaaatagaactttatattgaaaatcactgcttccatagattggcatttttagctattactatgacttatataacttatacatataattttgaaaataacaactaaaagatgtataacatagcaaaactgcttaaacatcccattttgacacttgtcttgcagttagtttgacattttgtagttaatgattccaaattggtttagttgggccatctcattcttcacttcctgtaaaccactccatagatttgtctttcttcaagaaattagttttctttcctttatttgattgatggtcattgactactgaaataaaatatgcattttaagataaa

SEQ ID NO: 195329 - DNA, 843 bp, Homo sapiens
  Payload ID: 18570
  Gene Name: tRNA methyltransferase O
  ENST ID: ENST00000375117
  CDS Start-End: 1-480
cgcggcttggaggagtcggggcctcggcctacagcgaccccgtgcggctgcgttaagccggctctggagacagggaatcttttaactgagccagtcggctacttggaatcttgtttctcggccaagaatggtactccaagacagccatccatttgtagctattctcgagcctgtttgaggattagaaagaggatctttaataatcctgaacattccttgatgggcctagaacagttttctcatgtttggattttgtttgtttttcacaaaaatggtcatttgagctgtaaggcaaaagtgcagcctcctaggctgaatggtgcaaagactggagttttttccacaaggagccctcatcgtcccaatgcaataggactgaccctggccaagctggaaaaggtagaagccttggggaaatggacagatatcatggctgcagtgctgatgtcaactgtgctgtgtggcaggagtctgggatgaatcacactacaaggacaaacattggtcaggtggagctatatacctttctggaattgacatgatacatggcacacccgtactagacatcaagccctacatagctgagtatgactcaccgcaaaatgtgatggagcctttagcagactttaatttacagaataaccaacatacaccaaacactgtgtcccagtctgacagcaagactgacagctgtgaccagcgacagctctcagggtgtgatgagccacaaccccaccatagcactaagaggaaacctaaatgtcctgaagacagaacttcagaagaaaactacctgacacacagtgacacagccagaattcagcaagcatttcctatgcacag

SEQ ID NO: 195330 - DNA, 2971 bp, Homo sapiens
  Payload ID: 18570
  Gene Name: tRNA methyltransferase O
  ENST ID: ENST00000375118
  CDS Start-End: 1885-2772
attttatcaatttgtaatggctaacaaacttggatagcaagtactagaagattttatgattattcagggacatattttctagcactgaatatgtgccagacattgtcctaggtgctagagctatagtgataaacaaatcagatgaaagtagaaatccatgccctaaagaacttaatgtttcaattgggaaggtcaagtcagataggttaaaaggcaaacacagtagcactgtagacattactatataagctttatggcaactagtgtttgtgcagtgctttacagttagtaaacagtgttcacgtaccttatctcacagtggctttgtgggtttgacaaagtagcaatcctcatctcataggtgaggaaactagggctctttaagattagataatctgtctaatagcatccagccaggtggtcatctgactctaaatcctttgaagtcttacttatgctacagtgcctttctttttcctacagatattgttaggcataattcatcatctagcaagtccagaatcatctttccagagttccagctcattcataataacatgtttcagaaatcagggtcctgtattagttacgtttttcttaaatggagacggaatcaaatgtgactgcatgtagtttttctgttctcatttggcctattttccaagagtaaggttagtagatggctatttgtagcagtaactggacagcatctgtccagtgggacagctggagacttgtctttagtatttggtaatgctgacttatgtgctgcttaatcttttgagtcttgatggatgtattagatttctattgttgtgtaacaaattaccacagaatcatcagtttaaacaacacacatgtattatgtgtttgaaacattattatgtatctgtgggtcagaaggatgggcacagcttaactaggtcatctgcttaggtctcactagactgcaattaaattgtcagctgatatgagttcttatctggaggcttgaccatggaagaatctgcttaagctcactcagactgttggccacattgatttccttgccatcgtagtaggactgggggccccagattcttgctggttgttggctggaggctgccctcagtgtctaaaggctgtttgcagttccttgctatgtgggcttcctagcacgcctgcctacttcagcaagccttcaaggagagtctctcgagtgagtcttccagccagcagcagtgctaatgaaaagcatagtcactggagggacatcatacctcttttgccatattctgttggttagaagccagtcacactcaaggggaaggattatataagggcatgaacttcaggaggtgcgggtcacagggccacttttggatctgtttgccacagtaagaaccttcattggtcccacagagatatactgaggactactatatccctggaacagaagcaccagtgatacaaagatgagttggtcccagcctgtgttaaggggcctgcctgcgtctagggatgaagactctaagcaggtcactaccctaccgtggggaaagcgctctagcagaggtttgtgcacaggcttctctatggggactgtaggaaagaatgcttttgtctggaggagccagaaaggctttgtaaaaggtgtgcttttgagggcctcaaagagcaagtaggagtttgataggtagagaagaggatgggctaccaggtagcaagaagggtgtgtgttggtactaggtctgtgtgagagaattatgagtaagtgcagtgaggcgtaagcagacagtgttagaggattctggggcgtgactgtattctccaagtgtttgcactgttcttcatttttcacgtttttatgtcataggtggagctatatacctttctggaattgacatgatacatggcacacccgtactagacatcaagccctacatagctgagtatgactcaccgcaaaatgtgatggagcctttagcagactttaatttacagaataaccaacatacaccaaacactgtgtcccagtctgacagcaagactgacagctgtgaccagcgacagctctcagggtgtgatgagccacaaccccaccatagcactaagaggaaacctaaatgtcctgaagacagaacttcagaagaaaactacctgacacacagtgacacagccagaattcagcaagcatttcctatgcacagggagatagcagtggattttggtttggaatcaagacgtgatcagagttccagcgtggcagaagaacaaattggcccatattgcccagagaagagcttttcagagaaaggtacagacaagaagctagaaagagtggaaggagcagcagtcttgcaaggaagcagggcagagacacagcccatggcccctcactgccctgctggaagggctgatggagctccccgcagcgtggttcctgcctgggtgacagaggctcctgtggccactttagaagtgcggtttactcctcatgccgagatggaccttgggcagctcagttcacaagatgttggtcaggcgtcatttaaatattttcagtcagcagaggaagcaaagcgtgccattgaggctgtgctgtcagcggatcctcggtctgtgtaccgccggaagctttgccaggaccgccttttctactttactgtagacatagcgcatgtcacttgctggtttggtgatggctttgcagaggtgctgaggatcaagccggcttctgagcctgttcatatgactggccctgtggggtccttggtgtctctagggtcttaaggagcctccctcatgtctttaaggtagcatcattgatctttggatgtggcttttggattttctgaacaagctaatgttgtgtcgagaagcaacactttgtgatctcatggctttgattgatttgggctgttcaaaatgtttatttgaaaaacgtatacattaataaacttaacaaagagatataaaatacagagaaatc

SEQ ID NO: 195331 - DNA, 1647 bp, Homo sapiens
  Payload ID: 18570
  Gene Name: tRNA methyltransferase O
  Uniprot ID: Q9BU70
  ENST ID: ENST00000375119
  CDS Start-End: 78-1403
actgcgcatgcgtcaggcatggagagcggaagcggaaggttgaatgcgtcgggtgggcacctcagcaaccagtagccatgcgcggcttggaggagtcggggcctcggcctacagcgaccccgtgcggctgcgttaagccggctctggagacagggaatcttttaactgagccagtcggctacttggaatcttgtttctcggccaagaatggtactccaagacagccatccatttgtagctattctcgagcctgtttgaggattagaaagaggatctttaataatcctgaacattccttgatgggcctagaacagttttctcatgtttggattttgtttgtttttcacaaaaatggtcatttgagctgtaaggcaaaagtgcagcctcctaggctgaatggtgcaaagactggagttttttccacaaggagccctcatcgtcccaatgcaataggactgaccctggccaagctggaaaaggtagaaggtggagctatatacctttctggaattgacatgatacatggcacacccgtactagacatcaagccctacatagctgagtatgactcaccgcaaaatgtgatggagcctttagcagactttaatttacagaataaccaacatacaccaaacactgtgtcccagtctgacagcaagactgacagctgtgaccagcgacagctctcagggtgtgatgagccacaaccccaccatagcactaagaggaaacctaaatgtcctgaagacagaacttcagaagaaaactacctgacacacagtgacacagccagaattcagcaagcatttcctatgcacagggagatagcagtggattttggtttggaatcaagacgtgatcagagttccagcgtggcagaagaacaaattggcccatattgcccagagaagagcttttcagagaaaggtacagacaagaagctagaaagagtggaaggagcagcagtcttgcaaggaagcagggcagagacacagcccatggcccctcactgccctgctggaagggctgatggagctccccgcagcgtggttcctgcctgggtgacagaggctcctgtggccactttagaagtgcggtttactcctcatgccgagatggaccttgggcagctcagttcacaagatgttggtcaggcgtcatttaaatattttcagtcagcagaggaagcaaagcgtgccattgaggctgtgctgtcagcggatcctcggtctgtgtaccgccggaagctttgccaggaccgccttttctactttactgtagacatagcgcatgtcacttgctggtttggtgatggctttgcagaggtgctgaggatcaagccggcttctgagcctgttcatatgactggccctgtggggtccttggtgtctctagggtcttaaggagcctccctcatgtctttaaggtagcatcattgatctttggatgtggcttttggattttctgaacaagctaatgttgtgtcgagaagcaacactttgtgatctcatggctttgattgatttgggctgttcaaaatgtttatttgaaaaacgtatacattaataaacttaacaaagagatataaaatacagagaaatcaccaaatgctttttgatctgttgatattaaagaatcaaaaggtga

SEQ ID NO: 195332 - DNA, 552 bp, Homo sapiens
  Payload ID: 18570
  Gene Name: tRNA methyltransferase O
  ENST ID: ENST00000455506
  CDS Start-End: 1-519
ggcttggaggagtcggggcctcggcctacagcgaccccgtgcggctgcgttaagccggctctggagacagggaatcttttaactgagccagtcggctacttggaatcttgtttctcggccaagaatggtactccaagacagccatccatttgtagctattctcgagcctgtttgaggattagaaagaggatctttaataatcctgaacattccttgatgggcctagaacagttttctcatgtttggattttgtttgtttttcacaaaaatggtcatttgagctgtaaggcaaaagtgcagcctcctaggctgaatggtgcaaagactggagttttttccacaaggagccctcatcgtcccaatgcaataggactgaccctggccaagctggaaaaggtagaaggtaacccatttcatttctacttttacctttttcctcacccaaaaaagccttataaaataaacagcattcaccactggctgtttattcagacgagtaccaatgatgttaactcctgagaaccaccagacattgaagaaaatacaatgatt

SEQ ID NO: 195333 - DNA, 3635 bp, Homo sapiens
  Payload ID: 18570
  Gene Name: tRNA methyltransferase O
  ENST ID: ENST00000611338
  CDS Start-End: 2439-2996
gggcacctcagcaaccagtagccatgcgcggcttggaggagtcggggcctcggcctacagcgaccccgtgcggctgcgttaagccggctctggagacagggaatcttttaactgagccagtcggctacttggaatcttgtttctcggccaagaatggtactccaagacagccatccatttgtagctattctcgagcctgtttgaggattagaaagaggatctttaataatcctgaacattccttgatgggcctagaacagttttctcatgtttggaaggtctagtcatgccaaatggaaaaagaaaggaaggtctggtaaaggattttgtttgtttttcacaaaaatggtcatttgagctgtaaggcaaaagtgcagcctcctaggctgaatggtgcaaagactggagttttttccacaaggagccctcatcgtcccaatgcaataggactgaccctggccaagctggaaaaggtagaagccttggggaaatggacagatatcatggctgcagtgctgatgtcaactgtgctgtgtggcaggagtctgggatgaatcacactacaaggacaaacattggtcaggttgtagaagttttaaactagttttaactgtgtgttcgtatataacctagttacgcatttatggaaagcattccattctgacctaacagatgcatttgttatagaggcagcagatgaaatggcaggtaaactaggagtcaagagaccattccaggcttcagcctgctggttgtgaagtgggcaaaggagaaggacctgcttcctctgtgattccacagaatattttgagaatcttgtaagagagaagttctaaaactactttttcaggctattggacactaaatagatgagagcagttattttgcttgttctttcccagaacttgaactctcccactggattgtactcaactgggccttaggtagttttctcagaaaaattcagtagctgatccaccttgaattttatcaatttgtaatggctaacaaacttggatagcaagtactagaagattttatgattattcagggacatattttctagcactgaatatgtgccagacattgtcctaggtgctagagctatagtgataaacaaatcagatgaaagtagaaatccatgccctaaagaacttaatgtttcaattgggaaggtcaagtcagataggttaaaaggcaaacacagtagcactgtagacattactatataagctttatggcaactagtgtttgtgcagtgctttacagttagtaaacagtgttcacgtaccttatctcacagtggctttgtgggtttgacaaagtagcaatcctcatctcataggtgaggaaactagggctctttaagattagataatctgtctaatagcatccagccaggtggtcatctgactctaaatcctttgaagtcttacttatgctacagtgcctttctttttcctacagatattgttaggcataattcatcatctagcaagtccagaatcatctttccagagttccagctcattcataataacatgtttcagaaatcagggtcctgtattagttacgtttttcttaaatggagacggaatcaaatgtgactgcatgtagtttttctgttctcatttggcctattttccaagagtaaggttagtagatggctatttgtagcagtaactggacagcatctgtccagtgggacagctggagacttgtctttagtatttggtaatgctgacttatgtgctgcttaatcttttgagtcttgatggatgtattagatttctattgttgtgtaacaaattaccacagaatcatcagtttaaacaacacacatgtattatgtgtttgaaacattattatgtatctgtgggtcagaaggatgggcacagcttaactaggtcatctgcttaggtctcactagactgcaattaaattgtcagctgatatgagttcttatctggaggcttgaccatggaagaatctgcttaagctcactcagactgttggccacattgatttccttgccatcgtagtaggactgggggccccagattcttgctggttgttggctggaggctgccctcagtgtctaaaggctgtttgcagttccttgctatgtgggcttcctagcacgcctgcctacttcagcaagccttcaaggagagtctctcgagtgagtcttccagccagcagcagtgctaatgaaaagcatagtcactggagggacatcatacctcttttgccatattctgttggttagaagccagtcacactcaaggggaaggattatataagggcatgaacttcaggaggtgcgggtcacagggccacttttggatctgtttgccacagtaagaaccttcattggtcccacagagatatactgaggactactatatccctggaacagaagcaccagtgatacaaagatgagttggtcccagcctgtgttaaggggcctgcctgcgtctagggatgaagactctaagcaggtcactaccctaccgtggggaaagcgctctagcagaggtggagctatatacctttctggaattgacatgatacatggcacacccgtactagacatcaagccctacatagctgagtatgactcaccgcaaaatgtgatggagcctttagcagactttaatttacagaataaccaacatacaccaaacactgtgtcccagtctgacagcaagactgacagctgtgaccagcgacagctctcagggtgtgatgagccacaaccccaccatagcactaagaggaaacctaaatgtcctgaagacagaacttcagaagaaaactacctgacacacagtgacacagccagaattcagcaagcatttcctatgcacagggagatagcagtggattttggtttggaatcaagacgtgatcagagttccagcgtggcagaagaacaaattggcccatattgcccagagaagagcttttcagagaaaggtacagacagaagctagaaagagtggaaggagcagcagtcttgcaaggaagcagggcagagacacagcccatggcccctcactgccctgctggaagggctgatggagctccccgcagcgtggttcctgcctgggtgacagaggctcctgtggccactttagaagtgcggtttactcctcatgccgagatggaccttgggcagctcagttcacaagatgttggtcaggcgtcatttaaatattttcagtcagcagaggaagcaaagcgtgccattgaggctgtgctgtcagcggatcctcggtctgtgtaccgccggaagctttgccaggaccgccttttctactttactgtagacatagcgcatgtcacttgctggtttggtgatggctttgcagaggtgctgaggatcaagccggcttctgagcctgttcatatgactggccctgtggggtccttggtgtctctagggtcttaaggagcctccctcatgtctttaaggtagcatcattgatctttggatgtggcttttggattttctgaacaagctaatgttgtgtcgagaagcaacactttgtgatctcatggctttgattgatttgggctgttcaaaatgtttatttgaaaaacgtatacattaataaacttaacaaagagat

SEQ ID NO: 195334 - DNA, 2276 bp, Homo sapiens
  Payload ID: 18571
  Gene Name: tRNA nucleotidyl transferase, CCA-adding, 1
  Uniprot ID: Q96Q11
  ENST ID: ENST00000251607
  CDS Start-End: 103-1407
gttggtgacgtcaccgcgttcaccagcccggaagtgcgcgtggcggcggtggcggctgcggcaacagcggggccgatgtgtagttggtgactgcctctccagatgctgaggtgcctgtatcattggcacaggccagtgctgaaccgtaggtggagtaggctgtgccttccgaagcagtatctattcacaatgaagttgcagtctcccgaattccagtcacttttcacagaaggactgaagagtctgacagaattatttgtcaaagagaatcacgaattaagaatagcaggaggagcagtgagggatttattaaatggagtaaagcctcaggatatagattttgccaccactgctacccctactcaaatgaaggagatgtttcagtcggctgggattcggatgataaacaacagaggagaaaagcacggaacaattactgccaggcttcatgaagaaaattttgagattactacactacggattgatgtcaccactgatggaagacatgctgaggtagaatttacaactgactggcagaaagatgcggaacgcagagatctcactataaattctatgtttttaggttttgatggcactttatttgactactttaatggttatgaagatttaaaaaataagaaagttagatttgttggacatgctaaacagagaatacaagaggattatcttagaattttaagatacttcaggttttatgggagaattgtagacaaacctggtgaccatgatcctgagactttggaagcaattgcagaaaatgcaaaaggcttggctggaatatcaggagaaaggatttgggtggaactgaaaaaaattcttgttggtaaccatgtaaatcatttgattcaccttatctatgatcttgatgtggctccttatataggtttacctgctaatgcaagtttagaagaatttgacaaagtcagtaaaaatgttgatggtttttcaccaaagccagtgactcttttggcctcattattcaaagtacaagatgatgtcacaaaattggatttgaggttgaagatcgcaaaagaggagaaaaaccttggcttatttatagttaaaaataggaaagatttaattaaagcaacagatagttcagacccattgaaaccctatcaagacttcattatagattctagggaacctgatgcaactactcgtgtatgtgaactactgaagtaccaaggagagcactgtctcctaaaggaaatgcagcagtggtccattcctccatttcctgtaagtggccatgacatcagaaaagtgggcatttcttcaggaaaagaaattggggctctattacaacagttgcgagaacagtggaaaaaaagtggttaccaaatggaaaaagatgaacttctgagttacataaagaagacctaaaactgatggctactaaaaagcagagcatttctggtaagactaaattttctcccctccctcttaatgaggttttagagactacaccagaataaaagacagtttaggggacctctgtagaacaacaagggtcttattttgtgaattatatatttcaagaactaaacagagatccacctttctggatctgatttatatcactgaaatgtacagttcttttggaatagtttcacctgagaaaacatagttggctattatctatcttaacctgttcaggcttttaaaaaaaactgtttttgcatagggtagtactaagatcttaaaaagtggtaactgtcttgaagaaaaaacgtttattgtttgtttgcaattgaaataacagggttaccttaacaatgactgtctatgatgtgtcagttcttatctgaattccaaaataaacctgtgcttaaaaaagaaataattgaccaagtaagtttgcataaaatgtgaatactaaatgtgtccccagttgctggcattcatatgtacaggatttgttctagcaagctatgcttcagtatgtggttgatatttttctgtcacaatgatttctttatgcatgcagagcctggggaagtcatgggattaacttgagggtcactattgagcctattaattaattattgttttaataaaacaaacattggtattggaagataaatatgtttatgtggtatctgacaatgtgtattaggtgtcatatacaatggtaatatgcctgtctttaaagtgttattttattaattaaaaggatatggctattattatatattctctaaagatttgagtcctaaatgctttcatcaggtaaataaaatgtataatacaaa

SEQ ID NO: 195335 - DNA, 2180 bp, Homo sapiens
  Payload ID: 18571
  Gene Name: tRNA nucleotidyl transferase, CCA-adding, 1
  Uniprot ID: Q96Q11
  ENST ID: ENST00000280591
  CDS Start-End: 67-1311
cgcgtggcggcggtggcggctgcggcaacagcggggccgatgtgtagttggtgactgcctctccagatgctgaggtgcctgtatcattggcacaggccagtgctgaaccgtaggtggagtaggctgtgccttccgaagcagtatctattcacaatgaagttgcagtctcccgaattccagtcacttttcacagaaggactgaagagtctgacagaattatttgtcaaagagaatcacgaattaagaatagcaggaggagcagtgagggatttattaaatggagtaaagcctcaggatatagattttgccaccactgctacccctactcaaatgaaggagatgtttcagtcggctgggattcggatgataaacaacagaggagaaaagcacggaacaattactgccaggcttcatgaagaaaattttgagattactacactacggattgatgtcaccactgatggaagacatgctgaggtagaatttacaactgactggcagaaagatgcggaacgcagagatctcactataaattctatgtttttaggttttgatggcactttatttgactactttaatggttatgaagatttaaaaaataagaaagttagatttgttggacatgctaaacagagaatacaagaggattatcttagaattttaagatacttcaggttttatgggagaattgtagacaaacctggtgaccatgatcctgagactttggaagcaattgcagaaaatgcaaaaggcttggctggaatatcaggagaaaggatttgggtggaactgaaaaaaattcttgttggtttacctgctaatgcaagtttagaagaatttgacaaagtcagtaaaaatgttgatggtttttcaccaaagccagtgactcttttggcctcattattcaaagtacaagatgatgtcacaaaattggatttgaggttgaagatcgcaaaagaggagaaaaaccttggcttatttatagttaaaaataggaaagatttaattaaagcaacagatagttcagacccattgaaaccctatcaagacttcattatagattctagggaacctgatgcaactactcgtgtatgtgaactactgaagtaccaaggagagcactgtctcctaaaggaaatgcagcagtggtccattcctccatttcctgtaagtggccatgacatcagaaaagtgggcatttcttcaggaaaagaaattggggctctattacaacagttgcgagaacagtggaaaaaaagtggttaccaaatggaaaaagatgaacttctgagttacataaagaagacctaaaactgatggctactaaaaagcagagcatttctggtaagactaaattttctcccctccctcttaatgaggttttagagactacaccagaataaaagacagtttaggggacctctgtagaacaacaagggtcttattttgtgaattatatatttcaagaactaaacagagatccacctttctggatctgatttatatcactgaaatgtacagttcttttggaatagtttcacctgagaaaacatagttggctattatctatcttaacctgttcaggcttttaaaaaaaactgtttttgcatagggtagtactaagatcttaaaaagtggtaactgtcttgaagaaaaaacgtttattgtttgtttgcaattgaaataacagggttaccttaacaatgactgtctatgatgtgtcagttcttatctgaattccaaaataaacctgtgcttaaaaaagaaataattgaccaagtaagtttgcataaaatgtgaatactaaatgtgtccccagttgctggcattcatatgtacaggatttgttctagcaagctatgcttcagtatgtggttgatatttttctgtcacaatgatttctttatgcatgcagagcctggggaagtcatgggattaacttgagggtcactattgagcctattaattaattattgttttaataaaacaaacattggtattggaagataaatatgtttatgtggtatctgacaatgtgtattaggtgtcatatacaatggtaatatgcctgtctttaaagtgttattttattaattaaaaggatatggctattattatatattctctaaagatttgagtcctaaatgctttcatcaggtaaataaaatgtataatacaaa

SEQ ID NO: 195336 - DNA, 976 bp, Homo sapiens
  Payload ID: 18571
  Gene Name: tRNA nucleotidyl transferase, CCA-adding, 1
  Uniprot ID: Q96Q11
  ENST ID: ENST00000339437
  CDS Start-End: 68-241
gcgcgtggcggcggtggcggctgcggcaacagcggggccgatgtgtagttggtgactgcctctccagatgctgaggtgcctgtatcattggcacaggccagtgctgaaccgtaggtggagtaggctgtgccttccgaagcagtatctattcacaatgaagttgcagtctcccgaattccagtcacttttcacagaaggactgaagagtctgacaggtataaatgctttccatgagaactgaaggaagaaggaaataggagttgcctccattgtgcacgttgcaaaacctgtctggaaggagcataggaaatggctttagctaagtgccagtagcttcttgctgttgccacagtttcattagtgttgattctcaatgttgtctgctgatgttgctaaagcagccacacagtagcattacaaagcctgtgggaattttaatagcaccttcataaatatatttagtagtatatgtagaaatatgacctatacagcactggctatctattagattcacctggggagcttttaaagcacacatgctcgggttctacctgcagcctactgaattagaatctctgggtgggatgaccatctatatttttaataaaagctccacaagttaattctgatgcacagaagatagacgaaccattactttaacatgactcaccttgtattagcttattctcaaagctactttcccattcttgaaattggatgatggctttttaggtacgtgccagagataaatggcccagaatatgttgattcttttagattgttttaggcagactttaagtagagggcttaaatgcatgtttggttttgccgatgcttcactatcttttttaattggagagagtgaaaattgctaaaaattgctgtccaatagaaatttatgagcccatatgtaatataaacttttttactaaccacattaaaaagatagaaatggtgaaataaattttaataatta

SEQ ID NO: 195337 - DNA, 374 bp, Homo sapiens
  Payload ID: 18571
  Gene Name: tRNA nucleotidyl transferase, CCA-adding, 1
  ENST ID: ENST00000397779
  CDS Start-End: 2-199
gatgctgaggtgcctgtatcattggcacaggccagtgctgaaccgtaggtggagtaggctgtgccttccgaagcagtatctattcacaatgaagttgcagtctcccgaattccagtcacttttcacagaaggactgaagagtctgacagataaggtcttgctctgtcacccaggctggagtgcagtggcacgatcatagctcaccgcagccttgaactcctgggctcaagccatcctcccacctcagcctcccaagtagctgggactacagaattatttgtcaaagagaatcacgaattaagaatagcaggaggagcagtgagggatttattaaatggagtaaagcctcaggatatagattttgccaccactgc

SEQ ID NO: 195338 - DNA, 1935 bp, Homo sapiens
  Payload ID: 18571
  Gene Name: tRNA nucleotidyl transferase, CCA-adding, 1
  Uniprot ID: Q96Q11
  ENST ID: ENST00000402675
  CDS Start-End: 1027-1200
agagttggtggcgtgagttgctgccccttccttcctgctgtgggccagaggcgccaccgcgcccggtcctcgaggaagacgggagcgggacgtggcgagaggcctcctcagcagtgggcaaaatagccccgacgcggaggtcgtgtccccgccacgtttccggcgaccgcaggcgcggattccttggcttccctcagcactttcccctccgcgcggacggccccgagacgctttttcactgggccttgtcgccagcacccggcgtggggggtgagacgcgccttttcagggctggggttccccagagcgttttcctaagtcgaggcggaggtgcgaggaaactgagtgggtctttccgccccacgtggcctgccgggaagcgcggctcctccacccgcttccgtggaatggaatggtttttctctgcaggtttacaccggggtcactcgagagctgctgcggcctccttatgggcaggacccccgtatggggagaacgaggatgtgatatgtagaagggaaggccgcggtgtgccagaaatcagaggagattgcaagatggcaggaaaagaatcaggaaaatgggggcagcaaaactaaattcatgggaaaatacaatgtctaggagctatcccagggtcgtgaatcctcgagtgcaggtggggaagtagggtgatacccacctgtgaccatgacaagttttggagaccagaaactcggttagagtttctagaaccccgcatccctctcatactgcctgaagccctgctctggggagagtgtcatcacagtaccatgtggcatgcgagtgtcgtggtaatgctccccgaccaaaccaccaaaccgagggttgggctgcttattctcgctgcccaataatgagatgcagataaactaggaaagaaaggagtttatttctgtaaccaggtacggggcgaaggcgtggaaaatatcccagaccgactcagaattacagagctttccagagcttatataccttatgtgtagttggtgactgcctctccagatgctgaggtgcctgtatcattggcacaggccagtgctgaaccgtaggtggagtaggctgtgccttccgaagcagtatctattcacaatgaagttgcagtctcccgaattccagtcacttttcacagaaggactgaagagtctgacaggtataaatgctttccatgagaactgaaggaagaaggaaataggagttgcctccattgtgcacgttgcaaaacctgtctggaaggagcataggaaatggctttagctaagtgccagtagcttcttgctgttgccacagtttcattagtgttgattctcaatgttgtctgctgatgttgctaaagcagccacacagtagcattacaaagcctgtgggaattttaatagcaccttcataaatatatttagtagtatatgtagaaatatgacctatacagcactggctatctattagattcacctggggagcttttaaagcacacatgctcgggttctacctgcagcctactgaattagaatctctgggtgggatgaccatctatatttttaataaaagctccacaagttaattctgatgcacagaagatagacgaaccattactttaacatgactcaccttgtattagcttattctcaaagctactttcccattcttgaaattggatgatggctttttaggtacgtgccagagataaatggcccagaatatgttgattcttttagattgttttaggcagactttaagtagagggcttaaatgcatgtttggttttgccgatgcttcactatcttttttaattggagagagtgaaaattgctaaaaattgctgtccaatagaaatttatgagcccatatgtaatataaacttttttactaaccacattaaaaagatagaaatggtgaaataaattttaataatta

SEQ ID NO: 195339 - DNA, 483 bp, Homo sapiens
  Payload ID: 18571
  Gene Name: tRNA nucleotidyl transferase, CCA-adding, 1
  ENST ID: ENST00000413000
  CDS Start-End: 298-483
agagttggtggcgtgagttgctgccccttccttcctgctgtgggccagaggcgccaccgcgcccggtcctcgaggaagacgggagcgggacgtggcgagaggcctcctcagcagtgggcaaaatagccccgacgcggaggtcgtgtccccgccacgtttccggcgaccgcaggcgcggattccttggcttccctcagcactttcccctccgcgcggacggccccgagacgctttttcactgggccttgtcgccagcacccggcgtgggggatgtgtagttggtgactgcctctccagatgctgaggtgcctgtatcattggcacaggccagtgctgaaccgtaggtggagtaggctgtgccttccgaagcagtatctattcacaatgaagttgcagtctcccgaattccagtcacttttcacagaaggactgaagagtctgacagaattatttgtcaaagagaatcacgaattaagaatagca

SEQ ID NO: 195340 - DNA, 854 bp, Homo sapiens
  Payload ID: 18571
  Gene Name: tRNA nucleotidyl transferase, CCA-adding, 1
  Uniprot ID: Q96Q11
  ENST ID: ENST00000420393
  CDS Start-End: 411-584
cagcggggccggtaagcgggcgcgcgccgctcagaggggcagagttggtggcgtgagttgctgccccttccttcctgctgtgggccagaggcgccaccgcgcccggtcctcgaggaagacgggagcgggacgtggcgagaggcctcctcagcagtgggcaaaatagccccgacgcggaggtcgtgtccccgccacgtttccggcgaccgcaggcgcggattccttggcttccctcagcactttcccctccgcgcggacggccccgagacgctttttcactgggccttgtcgccagcacccggcgtggggggtacggggcgaaggcgtggaaaatatcccagaccgactcagaattacagagctttccagagcttatataccttatgtgtagttggtgactgcctctccagatgctgaggtgcctgtatcattggcacaggccagtgctgaaccgtaggtggagtaggctgtgccttccgaagcagtatctattcacaatgaagttgcagtctcccgaattccagtcacttttcacagaaggactgaagagtctgacaggtataaatgctttccatgagaactgaaggaagaaggaaataggagttgcctccattgtgcacgttgcaaaacctgtctggaaggagcataggaaatggctttagctaagtgccagtagcttcttgctgttgccacagtttcattagtgttgattctcaatgttgtctgctgatgttgctaaagcagccacacagtagcattacaaagcctgtgggaattttaatagcaccttcataaatatatttagtagtatatgtagaaatatgacctatacagcactggctatctattagatt

SEQ ID NO: 195341 - DNA, 1871 bp, Homo sapiens
  Payload ID: 18571
  Gene Name: tRNA nucleotidyl transferase, CCA-adding, 1
  Uniprot ID: Q96Q11
  ENST ID: ENST00000434583
  CDS Start-End: 54-1358
tggcggctgcggcaacagcggggccgatgtgtagttggtgactgcctctccagatgctgaggtgcctgtatcattggcacaggccagtgctgaaccgtaggtggagtaggctgtgccttccgaagcagtatctattcacaatgaagttgcagtctcccgaattccagtcacttttcacagaaggactgaagagtctgacagaattatttgtcaaagagaatcacgaattaagaatagcaggaggagcagtgagggatttattaaatggagtaaagcctcaggatatagattttgccaccactgctacccctactcaaatgaaggagatgtttcagtcggctgggattcggatgataaacaacagaggagaaaagcacggaacaattactgccaggcttcatgaagaaaattttgagattactacactacggattgatgtcaccactgatggaagacatgctgaggtagaatttacaactgactggcagaaagatgcggaacgcagagatctcactataaattctatgtttttaggttttgatggcactttatttgactactttaatggttatgaagatttaaaaaataagaaagttagatttgttggacatgctaaacagagaatacaagaggattatcttagaattttaagatacttcaggttttatgggagaattgtagacaaacctggtgaccatgatcctgagactttggaagcaattgcagaaaatgcaaaaggcttggctggaatatcaggagaaaggatttgggtggaactgaaaaaaattcttgttggtaaccatgtaaatcatttgattcaccttatctatgatcttgatgtggctccttatataggtttacctgctaatgcaagtttagaagaatttgacaaagtcagtaaaaatgttgatggtttttcaccaaagccagtgactcttttggcctcattattcaaagtacaagatgatgtcacaaaattggatttgaggttgaagatcgcaaaagaggagaaaaaccttggcttatttatagttaaaaataggaaagatttaattaaagcaacagatagttcagacccattgaaaccctatcaagacttcattatagattctagggaacctgatgcaactactcgtgtatgtgaactactgaagtaccaaggagagcactgtctcctaaaggaaatgcagcagtggtccattcctccatttcctgtaagtggccatgacatcagaaaagtgggcatttcttcaggaaaagaaattggggctctattacaacagttgcgagaacagtggaaaaaaagtggttaccaaatggaaaaagatgaacttctgagttacataaagaagacctaaaactgatggctactaaaaagcagagcatttctgccagtcataacatctttgtactctatgagcaaatagtaattttggaccttgataaaacaattttgtagagtgtaatatttctaagaggaaatgtcacaggggctatgatgcaagaaagcctcagaaatgactgcatacaggaaataatctcatcatttccaaagatgtcttcatgtcccatcaatgacatgctaccagacatatcagattccacaggataatggcaccaagctacccaagtagatgtttctggtattctagactgccgttcatgcttgtttcctaaagtatacttaaaagtttcaaatacagtttcacttagaaactgcaaccctccaagtaatgttatgtttacttaggtattaatgttatgtttacttaggtatgtatcagaggcaataatttccaaagcagatcttagaatataaccaatttgttagataactttatctctatcacatctgtttacaagcaaagtat

SEQ ID NO: 195342 - DNA, 962 bp, Homo sapiens
  Payload ID: 18572
  Gene Name: tRNA phosphotransferase 1
  Uniprot ID: Q86TN4
  ENST ID: ENST00000317459
  CDS Start-End: 170-931
gcggtcgaggatcctggaggtttgtccccgccgccccgacgcttccgcccggtccgtcggcacgtcggccctgcctcccggaccaccctgcggggcgcaccagcgatctggggtgcggggctcggcctccctgcgctcctggctgaccgtgtgaccttgggtcttaaccatgaacttctctggaggagggaggcaggaagcagcagggtccaggggtagaagggctcccagaccccgagaacaggaccgagacgtgcagctgtccaaggctctgtcctatgccctgcgccatggggccttgaagctggggcttcccatgggagctgatggcttcgtgcccctgggcaccctcctgcagttgccccagttccgcggcttctctgctgaagatgtgcagcgcgtggtggacaccaataggaagcagcggttcgccctgcagctgggggatcccagcactggccttctcatccgggccaaccagggccattccctgcaggtacctaagttggagctgatgcccctggagacaccgcaggccctgcccccgatgctagtccatggtacattctggaagcactggccatccatcctactcaaaggcctgtcctgccagggaaggacgcacattcacctggccccaggactgcctggagaccccggtatcatcagtggcatgcggtcccattgtgaaatagctgtgttcatcgatggacccctggctctggcagatggaatacccttcttccgctctgccaatggggtgattctgactccagggaatactgatggcttcctccttcccaagtacttcaaggaggccctgcagctacgccctacccgaaagcccctttccttggctggtgatgaagagacagagtgtcagagtagccccaagcacagctccagagaaaggaggaggatccaacaataaaatattaatttataaaaaagaaattttaaaa

SEQ ID NO: 195343 - DNA, 1058 bp, Homo sapiens
  Payload ID: 18572
  Gene Name: tRNA phosphotransferase 1
  Uniprot ID: Q86TN4
  ENST ID: ENST00000394546
  CDS Start-End: 215-982
agtgcccgccccctttccacgcggcttttcattggcgggtccgccgcggtcgaggatcctggaggtttgtccccgccgccccgacgcttccgcccggtccgtcggcacgtcggccctgcctcccggaccaccctgcggggcgcaccagcgatctggggtgcggggctcggcctccctgcgctcctggctgaccgtgtgaccttgggtcttaaccatgaacttctctggaggagggaggcaggaagcagcagggtccaggggtagaagggctcccagaccccgagaacaggaccgagacgtgcagctgtccaaggctctgtcctatgccctgcgccatggggccttgaagctggggcttcccatgggagctgatggcttcgtgcccctgggcaccctcctgcagttgccccagttccgcggcttctctgctgaagatgtgcagcgcgtggtggacaccaataggaagcagcggttcgccctgcagctgggggatcccagcactggccttctcatccgggccaaccagggccattccctgcaggtcggggtacctaagttggagctgatgcccctggagacaccgcaggccctgcccccgatgctagtccatggtacattctggaagcactggccatccatcctactcaaaggcctgtcctgccagggaaggacgcacattcacctggccccaggactgcctggagaccccggtatcatcagtggcatgcggtcccattgtgaaatagctgtgttcatcgatggacccctggctctggcagatggaatacccttcttccgctctgccaatggggtgattctgactccagggaatactgatggcttcctccttcccaagtacttcaaggaggccctgcagctacgccctacccgaaagcccctttccttggctggtgatgaagagacagagtgtcagagtagccccaagcacagctccagagaaaggaggaggatccaacaataaaatattaatttataaaaaagaaattttaaaaagtaacaagaaagaactcgtttgaaaccatgtttcatcatcctgt

SEQ ID NO: 195344 - DNA, 865 bp, Homo sapiens
  Payload ID: 18572
  Gene Name: tRNA phosphotransferase 1
  Uniprot ID: Q86TN4
  ENST ID: ENST00000394547
  CDS Start-End: 174-788
gcacgtcggccctgcctcccggaccaccctgcggggcgcaccagcgatctggggtgcggggctcggcctccctgcgctcctggctgaccgtgtgaccttgggaccgagacgtgcagctgtccaaggctctgtcctatgccctgcgccatggggccttgaagctggggcttcccatgggagctgatggcttcgtgcccctgggcaccctcctgcagttgccccagttccgcggcttctctgctgaagatgtgcagcgcgtggtggacaccaataggaagcagcggttcgccctgcagctgggggatcccagcactggccttctcatccgggccaaccagggccattccctgcaggtacctaagttggagctgatgcccctggagacaccgcaggccctgcccccgatgctagtccatggtacattctggaagcactggccatccatcctactcaaaggcctgtcctgccagggaaggacgcacattcacctggccccaggactgcctggagaccccggtatcatcagtggcatgcggtcccattgtgaaatagctgtgttcatcgatggacccctggctctggcagatggaatacccttcttccgctctgccaatggggtgattctgactccagggaatactgatggcttcctccttcccaagtacttcaaggaggccctgcagctacgccctacccgaaagcccctttccttggctggtgatgaagagacagagtgtcagagtagccccaagcacagctccagagaaaggaggaggatccaacaataaaatattaatttataaaaaagaaattttaaaaagtaacaagaaagaactcgtttgaaaccatgtttcatcatcctgta

SEQ ID NO: 195345 - DNA, 684 bp, Homo sapiens
  Payload ID: 18572
  Gene Name: tRNA phosphotransferase 1
  ENST ID: ENST00000546089
  CDS Start-End: 158-661
ggtcttaaccatgaacttctctggaggagggaggcaggaagcagcagggtccaggggtagaagggctcccagaccccgagaacaggaccgagacgtgcagctgtccaaggctctgtcctatgccctgcgccatggggccttgaagctggggcttcccatgggagctgatggcttcgtgcccctgggcaccctcctgcagttgccccagttccgcggcttctctgctgaagatgtgcagcgcgtggtggacaccaataggaagcagcggttcgccctgcagctgggggatcccagcactggccttctcatccgggccaaccagggccattccctgcaggtacctaagttggagctgatgcccctggagacaccgcaggccctgcccccgatgctagtccatggtacattctggaagcactggccatccatcctactcaaaggcctgtcctgccagggaaggacgcacattcacctggccccaggactgcctggagaccccggtatcatcagtggcatgcggtcccattgtgaaatagctgtgttcatcgatggacccctggctctggcaggaaagcccctttccttggctggtgatgaagagacagagtgtcagagtagccccaagcacagctccagagaaaggaggaggatccaacaataaaatattaatttataaaaaagaaa

SEQ ID NO: 195346 - DNA, 941 bp, Homo sapiens
  Payload ID: 18572
  Gene Name: tRNA phosphotransferase 1
  Uniprot ID: Q86TN4
  ENST ID: ENST00000541278
  CDS Start-End: 215-865
agtgcccgccccctttccacgcggcttttcattggcgggtccgccgcggtcgaggatcctggaggtttgtccccgccgccccgacgcttccgcccggtccgtcggcacgtcggccctgcctcccggaccaccctgcggggcgcaccagcgatctggggtgcggggctcggcctccctgcgctcctggctgaccgtgtgaccttgggtcttaaccatgaacttctctggaggagggaggcaggaagcagcagggtccaggggtagaagggctcccagaccccgagaacaggaccgagacgtgcagctgtccaaggctctgtcctatgccctgcgccatggggccttgaagctggggcttcccatgggagctgatggcttcgtgcccctgggcaccctcctgcagttgccccagttccgcggcttctctgctgaagatgtgcagcgcgtggtggacaccaataggaagcagcggttcgccctgcagctgggggatcccagcactggccttctcatccgggccaaccagggccattccctgcaggtacctaagttggagctgatgcccctggagacaccgcaggccctgcccccgatgctagtccatggtacattctggaagcactggccatccatcctactcaaaggcctgtcctgccagggaaggacgcacattcacctggccccaggactgcctggagaccccggtatcatcagtggcatgcggtcccattgtgaaatagctgtgttcatcgatggacccctggctctggcaggaaagcccctttccttggctggtgatgaagagacagagtgtcagagtagccccaagcacagctccagagaaaggaggaggatccaacaataaaatattaatttataaaaaagaaattttaaaaagtaacaagaaagaactcgtttgaaaccatgtttcatcatcctgt

SEQ ID NO: 195347 - DNA, 382 bp, Homo sapiens
  Payload ID: 18572
  Gene Name: tRNA phosphotransferase 1
  ENST ID: ENST00000546133
  CDS Start-End: 1-336
atgctagtccatggtacattctggaagcactggccatccatcctactcaaaggcctgtcctgccagggaaggacgcacattcacctggccccaggactgcctggagaccccggtatcatcagtggcatgcggtcccattgtgaaatagctgtgttcatcgatggacccctggctctggcagggaatactgatggcttcctccttcccaagtacttcaaggaggccctgcagctacgccctacccgaaagcccctttccttggctggtgatgaagagacagagtgtcagagtagccccaagcacagctccagagaaaggaggaggatccaacaataaaatattaatttataaaaaagaaattttaaaaagtaacaagaaagaa

SEQ ID NO: 195348 - DNA, 681 bp, Homo sapiens
  Payload ID: 18572
  Gene Name: tRNA phosphotransferase 1
  ENST ID: ENST00000545812
  CDS Start-End: 109-681
acgtcggccctgcctcccggaccaccctgcggggcgcaccagcgatctggggtgcggggctcggcctccctgcgctcctggctgaccgtgtgaccttgggtcttaaccatgaacttctctggaggagggaggcaggaagcagcagggtccaggggtagaagggctcccagaccccgagaacaggaccgagacgtgcagctgtccaaggctctgtcctatgccctgcgccatggggccttgaagctggggcttcccatgggagctgatggcttcgtgcccctgggcaccctcctgcagttgccccagttccgcggcttctctgctgaagatgtgcagcgcgtggtggacaccaataggaagcagcggttcgccctgcagctgggggatcccagcactggccttctcatccgggccaaccagggccattccctgcaggtcggggtacctaagttggagctgatgcccctggagacaccgcaggccctgcccccgatgctagtccatggtacattctggaagcactggccatccatcctactcaaaggcctgtcctgccagggaaggacgcacattcacctggccccaggactgcctggagaccccggtatcatcagtggcatgcggtcccattgtgaaatagctgtgttcatcgatggacccctggctctggcagatggaata

SEQ ID NO: 195349 - DNA, 527 bp, Homo sapiens
  Payload ID: 18572
  Gene Name: tRNA phosphotransferase 1
  ENST ID: ENST00000544286
  CDS Start-End: 1-346
gccatccatcctactcaaaggcctgtcctgccagggaaggacgcacattcacctggccccaggactgcctggagaccccggtatcatcagtggcatgcggtcccattgtgaaatagctgtgttcatcgatggacccctggctctggcagatggaatacccttcttccgctctgccaatggggtgattctgactccagggaatactgatggcttcctccttcccaagtacttcaaggaggccctgcagctacgccctacccgtgagaaccaccaccccagcccctattccttgttcctgaaagctgtgcccttctgccctcacctctctcctagcttccaaccctagactgacttaggtgtccctttctctaaccaactcttgtctttatcaggaaagcccctttccttggctggtgatgaagagacagagtgtcagagtagccccaagcacagctccagagaaaggaggaggatccaacaataaaatattaatttataaaaaagaaattttaaaaagtaacaagaaa

SEQ ID NO: 195350 - DNA, 1799 bp, Homo sapiens
  Payload ID: 18573
  Gene Name: tRNA selenocysteine 1 associated protein 1
  Uniprot ID: Q9NX07
  ENST ID: ENST00000373830
  CDS Start-End: 27-890
gcaaagccccaccccggtgcgcgggtatggcggccagcctgtggatgggcgacctggaaccctacatggatgagaacttcatctccagagcctttgccaccatgggggagaccgtaatgagcgtcaaaattatccgaaaccgcctcactgggatcccagctggctactgctttgtagaatttgcagatttggccacagctgagaagtgtttgcataaaattaatgggaaaccccttccaggagccacacctgcgaaacgttttaaactgaactatgccacttacgggaaacaaccagataacagccctgagtattccctctttgtgggggacctgaccccggacgtggatgatggcatgctgtatgaattcttcgtcaaagtctacccctcctgtcggggaggcaaggtggttttggaccagacaggcgtgtctaagggttatggttttgtgaaattcacagatgaactggaacagaagcgagccctgacggagtgccagggagcagtgggactggggtctaagcctgtgcggctgagcgtggcaatccctaaagcgagccgtgtaaagccagtggaatatagtcagatgtacagttatagctacaaccagtattatcagcagtaccagaactactatgctcagtggggctatgaccagaacacaggcagctacagctacagttacccccagtatggctatacccagagcaccatgcagacatatgaagaagttggagatgatgcattggaagaccccatgccacagctggatgtgactgaggccaacaaggagttcatggaacagagtgaggagctgtatgacgctctgatggactgtcactggcagcccctggacacagtgtcttcagagatccctgccatgatgtagccaggccaaaggacaagccaggttgcatgatgtgagggagatgagagactcctttttaaaaattgtgaaacctttttggaaatatgatttgtaagattttaataatgactgtttttggagatcatgaatgtttctacaacactgctgcattcatttgaccatttgagtttgaagaccaagggaacaacttttaaacaaggttcaaattggtttccttcacaggaatcctttgtccaggtagttatccacataggacagtttgggattatccaaaactgggatgagcagcttgggataattcacacactaaagcctgagttcaaggtttctcagttgacaggtaggtatgtaaatcagggttctctggagtatttgtaggacctgccatatttgagtcctaacttggtgcaagtctggcagctaggtagaaaaggcactctagcaggtgtggtaggagcacgccccagaaggtagaatgtggtggggtgtgatggaacaggccagttggcctaagaattagtacttgctctaataatgggtttcatctattttcatgagttgcagcatctgcatatacaaggcctggatcactttaggatcaatattttgacacgggagaaggcagctcagaaaggattaaggaagatagctcaaagccaaagcagaccctccgtgtgaactttatactgctcacttccgtgtttcccaagtaaatggggaaactgtccaaccttgtcatgtgttgggacttactgcttgaggcaaagcattcatcctacatcataaaaaatctccaaagatctctttaagggctgggcatggtggctcactttgggagatggattgcttgagctcgggaagagaccagttcggtctctacaaaaaaatacaaacacaaatatactttta

SEQ ID NO: 195351 - DNA, 3107 bp, Homo sapiens
  Payload ID: 18574
  Gene Name: tRNA-histidine guanylyltransferase 1-like
  Uniprot ID: Q9NWX6
  ENST ID: ENST00000231198
  CDS Start-End: 245-1141
aagaccagcagataaaaaataatttttaaaaacctcgtgagactgatttgccgcaggacgggaggaggaagaagcaagcgtggaaggtgctaacggaggaacctaaacctccatcctctttgcctgggaggttaagaactacagggagaggcgagagagactatgactgccctacggctagagtagccgcgaagagaacacttccggggcggggctatctggccctttcctttccgcgtgtagaatgtggggcgcctgtaaagttaaggttcacgattccttggccaccatttccatcactctgagacggtacctgagattgggggcgaccatggcaaaaagcaagttcgagtacgtgagggacttcgaggctgacgacacctgcctggcacactgctgggtggtagtgcggctggacggccggaatttccatcggtttgctgagaagcacaactttgcaaaacccaatgacagccgtgctctccagctgatgaccaaatgtgcgcagactgtgatggaagaactagaggatattgtgatcgcgtatggacagagtgatgagtacagctttgtgttcaagcggaaaaccaattggtttaaaagaagagccagtaagttcatgactcacgtggcctcccagtttgcctccagctatgtgttttattggcgggattactttgaggaccagccccttctgtatcccccaggctttgacggaagagtcgtggtgtatcccagcaaccagactttaaaggactacctcagctggcgacaagcagattgtcacatcaataatctttataatacagttttctgggcacttatacaacaatctggactaacaccagtacaagcccaagggagattacagggaactcttgcagcagacaagaatgagattttgttttctgaattcaacatcaactataataatgagctgccgatgtataggaaagggactgtgttgatatggcagaaggtggatgaagtgatgacaaaagaaattaagctgccaacagaaatggaaggaaaaaagatggcagtgacccggaccaggacaaagccagtgcccttgcactgcgatatcatcggggatgctttctggaaggaacatccagagattctagatgaagacagctgacccttttgcgcttcagttctggtgtgcttaaccatgcaagccctcccacctcccagggctccttgccttaggtggctgtagcatccctaccacccaggacactggtgcgaatgacacaactcaagttgggaggggaacagggaaggaagggatggatgggggtggtgtatcttactctgtttaagcagaacaccttgtttgcggtgttggaacatggttcctttggcagaagtgctttttttttaatcgcagtactatttttataaagcaagaactattccatgccttggagaatgaatcatttttagattgtgacataaatcttgtaaaaacctgtcagttattttcatctatgagagaagaggagcccaaactctcgcccacctgttcttaaccagaaaacccactgactttgaaaatctcacctctgccacccatctacttgcattcgtctttggcagacctcaagataaatatgggttaatgcctgcatgatgcctctgaattcaggaattgcagggaaaactcggggctttgtgccagtctctaagttggcaactttggctgaacaaatgagtagtggcttcagtgtccttgcgtacacattctgtggattgatttaatggagttgtcagcatgatcatcatcttctagccaggggcatagttgccaaggccatttacctctttctaagaagaaacagaattatgtgtatatatgagagaaagaaacaagaatgcgtgaatgaggatgaagaaacatttaccccatgtactcaagacatttcagttttaaaagtcactttcctattagacttcttgaaaaacattctcacatagcctctatgtaatcagacaaatgacatttgatttcaagagcagaggggtaaacatcctctgctaatcgacaggtagcaggtgtcagaggaggcataatattaatagcgccaccttctgttgggtcagtggagatgggtgaggaacagcacagagcagcagggatcatcacatgcagccaaacttggcctctgaagggggaaggtagtgggaataggtggtgagagaactcacatttttctcttgtcctggttttatatttcggagggaaaggattatttggccccattaagaattaagaggctgggtgcggtggctcacgtctgtaatcccagcaccttgggaggcccaggcaggcagatcacctgaggtcgggagttcgagaccagcgtgaccaacgtggagaaacccccgtctctactaaaaatacaaaaaattagctgggcatggtggtgcatgcctgtgattccagctacttgggaggttgaggcaggagaatcatttgaactcaggaggcggaagttgcggtgagccaagattgtgccattgcactccagcctgggcaacgagcgaaactacatctcaaaaaaaaaaaaaaaagacatggctgggcatggtggctcacacctgtaatcccagcactttggggggctgaggcaggtagatcacttcaggccaggagtccaagaccagcacgtccaacatggcaaaacccagtctgtactaaaaatagaaaaattagctgggcgtggtggcgtgtgcctgcaataccagctactcagaaggctgaagcaggataattgcttgaacctggtaggtggaggttgcagtgagctgaaatcatgccactgcactccagcctgggtgacagagcaaaactgccttaaaaaaaaaaattaagagacagcccgtgtcccagtccctcgtcttgcactgcagaatttacatctaagaagaaaatgtatttttgaaagggtgatggctggcctcatccctcactaattgacaacccatctgtcgatgccattttttcccttcctgttctcactccacagaaagaggagatacggttcttgtttggtaattgctaaaatctctttgaggaaagaaataaagatgtcaactccttt

SEQ ID NO: 195352 - DNA, 919 bp, Homo sapiens
  Payload ID: 18574
  Gene Name: tRNA-histidine guanylyltransferase 1-like
  ENST ID: ENST00000521655
  CDS Start-End: 22-396
cctttcctttccgcgtgtagaatgtggggcgcctgtaaagttaaggttcacgattccttggccaccatttccatcactctgagacggtacctgagattgggggcgaccatggcaaaaagcaagttcgagtacgtgagggacttcgaggctgacgacacctgcctggcacactgctgggtggtagtgcggctggacggccggaatttccatcggtttgctgagaagcacaactttgcaaaacccaatgacagccgtgctctccagctgatgaccaaatgtgcgcagactgtgatggaagaactagaggatattgtgatcgcgtatggacagagtgatgagtacagctttgtgttcaagcggaaaaccaattggtttaaaagaagagccaggctttgacggaagagtcgtggtgtatcccagcaaccagactttaaaggactacctcagctggcgacaagcagattgtcacatcaataatctttataatacagttttctgggcacttatacaacaatctggactaacaccagtacaagcccaagggagattacagggaactcttgcagcagacaagaatgagattttgttttctgaattcaacatcaactataataatgagctgccgatgtataggaaagggactgtgttgatatggcagaaggtggatgaagtgatgacaaaagaaattaagctgccaacagaaatggaaggaaaaaagatggcagtgacccggaccaggacaaagccagtgcccttgcactgcgatatcatcggggatgctttctggaaggaacatccagagattctagatgaagacagctgacccttttgcgcttcagttctggtgtgcttaaccatgcaagccctcccacctcccagggctccttgccttaggtggctgtagcatccctaccaccca

SEQ ID NO: 195353 - DNA, 576 bp, Homo sapiens
  Payload ID: 18574
  Gene Name: tRNA-histidine guanylyltransferase 1-like
  ENST ID: ENST00000523575
  CDS Start-End: 1-103
tgagattttgttttctgaattcaacatcaactataataatgagctgccgatgtataggaaagggactgtgttgatatggcagaagtaccaaggagtaccttgagagctagtcattccactggcaactccagctctttgagttgttcaaaacatttattctttggtacagacttggatacttcttaatgcaggtggaaggtggatgaagtgatgacaaaagaaattaagctgccaacagaaatggaaggaaaaaagatggcagtgacccggaccaggacaaagccagtgcccttgcactgcgatatcatcggggatgctttctggaaggaacatccagagattctagatgaagacagctgacccttttgcgcttcagttctggtgtgcttaaccatgcaagccctcccacctcccagggctccttgccttaggtggctgtagcatccctaccacccaggacactggtgcgaatgacacaactcaagttgggaggggaacagggaaggaagggatggatgggggtggtgtatcttactctgtttaagcagaacaccttgtttgcggtgttggaacatg

SEQ ID NO: 195354 - DNA, 3348 bp, Homo sapiens
  Payload ID: 18575
  Gene Name: tRNA-yW synthesizing protein 1 homolog (S. cerevisiae)
  Uniprot ID: Q9NV66
  ENST ID: ENST00000359626
  CDS Start-End: 165-2363
gaaccaatcaggaccggcctggcagtgtcatggctgcccacaggtctgcaggcactcggtacgccgctaacgcggcgaggtagctcggtgcgtctcgcggtaccagtgcgaatcatcgggctatccaggtccgagatcctagtctcctgtcggctctgaggaggatggatccttctgcggatacatgggacctcttctcacctttaatatcattatggataaacaggttttacatttatttgggctttgctgttagcattagcctttggatttgtgtccagattgtcatcaagacgcagggcaagaacttacaggaaaaatctgttccaaaagcagctcaggatttgatgacaaatggttatgtctcccttcaagagaaagacatctttgtgtctggagtgaagattttttatggttctcagactggaacagcgaagggattcgcaacagttcttgctgaagcagttacatccctggatctgcctgtggccattattaatctaaaagaatatgatccagatgatcatctgatagaagaggtgactagtaaaaatgtctgtgtcttcctggttgcgacatacactgacggcctaccaactgaaagtgcagagtggttctgcaaatggttagaggaagcatccattgattttcgatttggcaaaacttacctgaagggtatgagatatgcggtatttggcctgggaaattctgcctatgctagccacttcaacaaggttggcaaaaatgttgacaagtggctctggatgcttggcgcgcatcgtgtgatgagtcgaggggagggcgactgcgacgtggttaaaagcaagcacggcagcattgaggccgacttcagagcatggaagaccaagttcatctcccagctgcaggcacttcagaaaggggagagaaagaagtcctgtggcggccactgcaagaaaggcaaatgtgaatctcaccaacatggctcagaggagagggaggaaggatctcatgagcaggatgaattgcatcatagagacaccgaggaggaagaaccctttgagagctccagtgaagaagagtttggtggtgaggaccatcagagcctaaattccattgttgatgttgaagatttgggcaaaattatggatcatgtgaagaaagaaaagagagaaaaggaacagcaggaagagaagtctggtttgttcaggaacatggggaggaatgaagatggtgaaagaagagctatgataactcctgctctccgagaagcccttactaaacaaggttatcagttgattgggagccactcgggggtgaagctttgcaggtggacaaagtccatgctccgagggagaggaggttgttacaaacacacattctatggaattgagagccatcgctgcatggaaaccaccccgagcttggcgtgtgctaataaatgtgtcttctgttggcggcaccacaccaaccccgtgggcactgagtggcggtggaagatggaccagcctgaaatgatcttgaaggaagccattgaaaaccatcagaacatgattaagcagtttaaaggagtaccgggcgtcaaagcagaacgctttgaagaaggaatgacggtaaagcactgtgcattgtccctcgtgggagaaccaataatgtacccagagatcaacaggtttttgaagctactccaccagtgtaaaatttccagcttcctggtcacaaacgcacaatttcctgcggaaatcaggaacctcgagccggttactcagctgtatgtcagtgtggatgccagtaccaaagacagcctgaagaaaatcgaccgcccactcttcaaggatttctggcagagattccttgacagtttaaaagccttggcagtcaagcaacaacgaactgtctacagactgacgctcgtgaaagcatggaacgtggacgagctccaggcctacgcgcagctcgtgtccctggggaatcctgacttcatcgaagtgaagggcgttacctactgcggagaaagttcagcaagcagtcttaccatggcccacgtgccctggcatgaggaagtggtacagtttgtccacgagttggtggatctgatccccgaatatgaaattgcatgtgaacacgaacactctaattgcctcctgatagcacacagaaagtttaaaattggtggtgaatggtggacatggatcgattataaccgcttccaggagctcatccaggaatatgaagatagtggtggatcaaaaacgttcagcgcaaaggattatatggccagaactcctcactgggcattatttggtgccagtgaaagaggctttgatcccaaggacacaagacatcagagaaagaacaaatcaaaggctatttctggatgttgagattatctgatttcaaggtactgaaggacaaaaacttggatggcctcaaaaggttcttgaacaccactgtgattctccaaggacgaattacgtaaattatactttcatacaaaggagacgataaggcagtaaacatggagacacgggggacagcgtccacactcagagggcctgggccacagccccgatgtttcttttcagaactcagcccctttcctgattttacttctaagaggaaaattattttggggaggaactacacagtcgtgattagaatttatctgatggttttgtattataacttgtaagacctgccagaatgctagtcccgagagtgtcagacaaggaagaagtccctgggcctcttccccttacccggcccttagatttcatggagcagccacttagcattgaattgcactaccctgagctaaacgtgtctgtgctttctaagataagagcttgatccctttcttctatcttaagacagcacctcctgaaaagaatcgaagttgtcacaactctcaattattttttaaatactgcatagattgagttttggtttattaccaacccttcccagaattgcgttggatctaaaactactagatctcatcccattcccatgtaaattaccacagaccgcagtaccggggctggagcggagtgaagctgtctgctgtaagaggagtggccatgtgagggcatggagtcattagtctcacaaacacactttggactgaagaggatcatttctttttgttcgtgaggtcactgtccaggcctctcatatcatgaccagacggcgggtctccatcttctttcactcctgtggccctggctgctttacacaatctgttctataaggttcaggtgttttcaagttggaaagatcataaatactcaaaattgttttcaagttagcaagttcttttaacagtcttttatgcaaaaattgaattaataaaataatcttttgtaaaga

SEQ ID NO: 195355 - DNA, 3255 bp, Homo sapiens
  Payload ID: 18575
  Gene Name: tRNA-yW synthesizing protein 1 homolog (S. cerevisiae)
  Uniprot ID: Q9NV66
  ENST ID: ENST00000361660
  CDS Start-End: 127-1281
cacaggtctgcaggcactcggtacgccgctaacgcggcgaggtagctcggtgcgtctcgcggtaccagtgcgaatcatcgggctatccaggtccgagatcctagtctcctgtcggctctgaggaggatggatccttctgcggatacatgggacctcttctcacctttaatatcattatggataaacaggttttacatttatttgggctttgctgttagcattagcctttggatttgtgtccagattgtcatcaagacgcagggcaagaacttacaggaaaaatctgttccaaaagcagctcaggatttgatgacaaatggttatgtctcccttcaagagaaagacatctttgtgtctggagtgaagattttttatggttctcagactggaacagcgaagggattcgcaacagttcttgctgaagcagttacatccctggatctgcctgtggccattattaatctaaaagaatatgatccagatgatcatctgatagaagaggtgactagtaaaaatgtctgtgtcttcctggttgcgacatacactgacggcctaccaactgaaagtgcagagtggttctgcaaatggttagaggaagcatccattgattttcgatttggcaaaacttacctgaagggtatgagatatgcggtatttggcctgggaaattctgcctatgctagccacttcaacaaggttggcaaaaatgttgacaagtggctctggatgcttggcgcgcatcgtgtgatgagtcgaggggagggcgactgcgacgtggttaaaagcaagcacggcagcattgaggccgacttcagagcatggaagaccaagttcatctcccagctgcaggcacttcagaaaggggagagaaagaagtcctgtggcggccactgcaagaaaggcaaatgtgaatctcaccaacatggctcagaggagagggaggaaggatctcatgagcaggatgaattgcatcatagagacaccgaggaggaagaaccctttgagagctccagtgaagaagagtttggtggtgaggaccatcagagcctaaattccattgttgatgttgaagatttgggcaaaattatggatcatgtgaagaaagaaaagagagaaaaggaacagcaggaagagaagtctggtttgttcaggaacatggggaggaatgaagatggtgaaagaagagctatgataactcctgctctccgagaagcccttactaaacaagtccatgctccgagggagaggaggttgttacaaacacacattctatggaattgagagccatcgctgcatggaaaccaccccgagcttggcgtgtgctaataaatgtgtcttctgttggcggcaccacaccaaccccgtgggcactgagtggcggtggaagatggaccagcctgaaatgatcttgaaggaagccattgaaaaccatcagaacatgattaagcagtttaaaggagtaccgggcgtcaaagcagaacgctttgaagaaggaatgacggtaaagcactgtgcattgtccctcgtgggagaaccaataatgtacccagagatcaacaggtttttgaagctactccaccagtgtaaaatttccagcttcctggtcacaaacgcacaatttcctgcggaaatcaggaacctcgagccggttactcagctgtatgtcagtgtggatgccagtaccaaagacagcctgaagaaaatcgaccgcccactcttcaaggatttctggcagagattccttgacagtttaaaagccttggcagtcaagcaacaacgaactgtctacagactgacgctcgtgaaagcatggaacgtggacgagctccaggcctacgcgcagctcgtgtccctggggaatcctgacttcatcgaagtgaagggcgttacctactgcggagaaagttcagcaagcagtcttaccatggcccacgtgccctggcatgaggaagtggtacagtttgtccacgagttggtggatctgatccccgaatatgaaattgcatgtgaacacgaacactctaattgcctcctgatagcacacagaaagtttaaaattggtggtgaatggtggacatggatcgattataaccgcttccaggagctcatccaggaatatgaagatagtggtggatcaaaaacgttcagcgcaaaggattatatggccagaactcctcactgggcattatttggtgccagtgaaagaggctttgatcccaaggacacaagacatcagagaaagaacaaatcaaaggctatttctggatgttgagattatctgatttcaaggtactgaaggacaaaaacttggatggcctcaaaaggttcttgaacaccactgtgattctccaaggacgaattacgtaaattatactttcatacaaaggagacgataaggcagtaaacatggagacacgggggacagcgtccacactcagagggcctgggccacagccccgatgtttcttttcagaactcagcccctttcctgattttacttctaagaggaaaattattttggggaggaactacacagtcgtgattagaatttatctgatggttttgtattataacttgtaagacctgccagaatgctagtcccgagagtgtcagacaaggaagaagtccctgggcctcttccccttacccggcccttagatttcatggagcagccacttagcattgaattgcactaccctgagctaaacgtgtctgtgctttctaagataagagcttgatccctttcttctatcttaagacagcacctcctgaaaagaatcgaagttgtcacaactctcaattattttttaaatactgcatagattgagttttggtttattaccaacccttcccagaattgcgttggatctaaaactactagatctcatcccattcccatgtaaattaccacagaccgcagtaccggggctggagcggagtgaagctgtctgctgtaagaggagtggccatgtgagggcatggagtcattagtctcacaaacacactttggactgaagaggatcatttctttttgttcgtgaggtcactgtccaggcctctcatatcatgaccagacggcgggtctccatcttctttcactcctgtggccctggctgctttacacaatctgttctataaggttcaggtgttttcaagttggaaagatcataaatactcaaaattgttttcaagttagcaagttcttttaacagtcttttatgcaaaaattgaattaataaaataatcttttgtaaa

SEQ ID NO: 195356 - DNA, 563 bp, Homo sapiens
  Payload ID: 18575
  Gene Name: tRNA-yW synthesizing protein 1 homolog (S. cerevisiae)
  ENST ID: ENST00000442959
  CDS Start-End: 160-563
aatcaggaccggcctggcagtgtcatggctgcccacaggtctgcaggcactcggtacgccgctaacgcggcgaggtagctcggtgcgtctcgcggtaccagtgcgaatcatcgggctatccaggtccgagatcctagtctcctgtcggctctgaggaggatggatccttctgcggatacatgggacctcttctcacctttaatatcattatggataaacaggttttacatttatttgggctttgctgttagcattagcctttggatttgtgtccagattgtcatcaagacgcagggcaagaacttacaggaaaaatctgttccaaaagcagctcaggatttgatgacaaatggttatgtctcccttcaagagaaagacatctttgtgtctggagtgaagattttttatggttctcagactggaacagcgaagggattcgcaacagttcttgctgaagcagttacatccctggatctgcctgtggccattattaatctaaaagaatatgatccagatgatcatctgatagaagaggttggcaaaaatgttgacaagtggctctg

SEQ ID NO: 195357 - DNA, 3156 bp, Homo sapiens
  Payload ID: 18575
  Gene Name: tRNA-yW synthesizing protein 1 homolog (S. cerevisiae)
  ENST ID: ENST00000615572
  CDS Start-End: 160-2166
aatcaggaccggcctggcagtgtcatggctgcccacaggtctgcaggcactcggtacgccgctaacgcggcgaggtagctcggtgcgtctcgcggtaccagtgcgaatcatcgggctatccaggtccgagatcctagtctcctgtcggctctgaggaggatggatccttctgcggatacatgggacctcttctcacctttaatatcattatggataaacaggttttacatttatttgggctttgctgttagcattagcctttggatttgtgtccagattgtcatcaagacgcagggattcgcaacagttcttgctgaagcagttacatccctggatctgcctgtggccattattaatctaaaagaatatgatccagatgatcatctgatagaagaggtgactagtaaaaatgtctgtgtcttcctggttgcgacatacactgacggcctaccaactgaaagtgcagagtggttctgcaaatggttagaggaagcatccattgattttcgatttggcaaaacttacctgaagggtatgagatatgcggtatttggcctgggaaattctgcctatgctagccacttcaacaaggttggcaaaaatgttgacaagtggctctggatgcttggcgcgcatcgtgtgatgagtcgaggggagggcgactgcgacgtggttaaaagcaagcacggcagcattgaggccgacttcagagcatggaagaccaagttcatctcccagctgcaggcacttcagaaaggggagagaaagaagtcctgtggcggccactgcaagaaaggcaaatgtgaatctcaccaacatggctcagaggagagggaggaaggatctcatgagcaggatgaattgcatcatagagacaccgaggaggaagaaccctttgagagctccagtgaagaagagtttggtggtgaggaccatcagagcctaaattccattgttgatgttgaagatttgggcaaaattatggatcatgtgaagaaagaaaagagagaaaaggaacagcaggaagagaagtctggtttgttcaggaacatggggaggaatgaagatggtgaaagaagagctatgataactcctgctctccgagaagcccttactaaacaagtccatgctccgagggagaggaggttgttacaaacacacattctatggaatgagagccatcgctgcatggaaaccaccccgagcttggcgtgtgctaataaatgtgtcttctgttggcggcaccacaccaaccccgtgggcactgagtggcggtggaagatggaccagcctgaaatgatcttgaaggaagccattgaaaaccatcagaacatgattaagcagtttaaaggagtaccgggcgtcaaagcagaacgctttgaagaaggaatgacggtaaagcactgtgcattgtccctcgtgggagaaccaataatgtacccagagatcaacaggtttttgaagctactccaccagtgtaaaatttccagcttcctggtcacaaacgcacaatttcctgcggaaatcaggaacctcgagccggttactcagctgtatgtcagtgtggatgccagtaccaaagacagcctgaagaaaatcgaccgcccactcttcaaggatttctggcagagattccttgacagtttaaaagccttggcagtcaagcaacaacgaactgtctacagactgacgctcgtgaaagcatggaacgtggacgagctccaggcctacgcgcagctcgtgtccctggggaatcctgacttcatcgaagtgaagggcgttacctactgcggagaaagttcagcaagcagtcttaccatggcccacgtgccctggcatgaggaagtggtacagtttgtccacgagttggtggatctgatccccgaatatgaaattgcatgtgaacacgaacactctaattgcctcctgatagcacacagaaagtttaaaattggtggtgaatggtggacatggatcgattataaccgcttccaggagctcatccaggaatatgaagatagtggtggatcaaaaacgttcagcgcaaaggattatatggccagaactcctcactgggcattatttggtgccagtgaaagaggctttgatcccaaggacacaagacatcagagaaagaacaaatcaaaggctatttctggatgttgagattatctgatttcaaggtactgaaggacaaaaacttggatggcctcaaaaggttcttgaacaccactgtgattctccaaggacgaattacgtaaattatactttcatacaaaggagacgataaggcagtaaacatggagacacgggggacagcgtccacactcagagggcctgggccacagccccgatgtttcttttcagaactcagcccctttcctgattttacttctaagaggaaaattattttggggaggaactacacagtcgtgattagaatttatctgatggttttgtattataacttgtaagacctgccagaatgctagtcccgagagtgtcagacaaggaagaagtccctgggcctcttccccttacccggcccttagatttcatggagcagccacttagcattgaattgcactaccctgagctaaacgtgtctgtgctttctaagataagagcttgatccctttcttctatcttaagacagcacctcctgaaaagaatcgaagttgtcacaactctcaattattttttaaatactgcatagattgagttttggtttattaccaacccttcccagaattgcgttggatctaaaactactagatctcatcccattcccatgtaaattaccacagaccgcagtaccggggctggagcggagtgaagctgtctgctgtaagaggagtggccatgtgagggcatggagtcattagtctcacaaacacactttggactgaagaggatcatttctttttgttcgtgaggtcactgtccaggcctctcatatcatgaccagacggcgggtctccatcttctttcactcctgtggccctggctgctttacacaatctgttctataaggttcaggtgttttcaagttggaaagatcataaatactcaaaattgttttcaagttagcaagttcttttaacagtcttttatgcaaaaattgaattaataaaataatcttttgtaaagacttgc

SEQ ID NO: 195358 - DNA, 1543 bp, Homo sapiens
  Payload ID: 18576
  Gene Name: tRNA-yW synthesizing protein 1 homolog B (S. cerevisiae)
  ENST ID: ENST00000612372
  CDS Start-End: 100-1515
gctaacgccgcgaggtagctcggtgcgtctcgcagtaccagtgcgaacctttgggctctccaggtccgagatcctagtctcctgtcggctctgaggaggatggatccttctgcggatacatgggacctctcctcacctttaatatcattatggataaacaggttttacatttatctgggctttgctgttagcattagcctttggatttgtgtccagattgtcatcgagatgcagggatttgcaacagttcttgctgaagcagttacgtccctggatctgcctgtggccattattaatctaaaagaatatgatccagatgatcatctgatagaagaggaggaagaacccttcgagagctccagtgaagaagagtttggtggtgaggaccatcagagcctaaattccattgttgatgttgaagatttgggcaaaattatggatcacgtgaagaaagaaaagagagaaaaggaacagcaggaagagaagtctggtttgttcaggaacatggggaggaatgaagatggtgaaagaagagctatgataactcctgctctccgagaagcccttactaaacaagtcgatgctccgagggagaggagcttgttacaaacacacattctatggaatgagagccatcgctgcatggaaaccaccccgagcttggcgtgtgctaataaatgtgtcttctgttggtggcaccacaacaaccctgtgggcactgaatggttgtggaagatggaccagcctgaaatgatcttgaaggaagccattgaaaaccatcagaacatgattaagcagtttaaaggagtaccgggcgtcaaagcagaacgctttgaagaaggaatgacggtaaagcactgtgcattgtccctcgtgggagaaccaataatgtacccagagatcaacaggtttttgaagctactccaccagtgtaaaatctccagcttcctggtcacaaatgcacaatttcctgcggaaatcaggaacctcgagccagttactcagctgtatgtcagtgtggatgccagtaccaaagacagcctgaagaaaatcgaccgcccactcttcaaggatttctggcagcaattccttgacagtttaaaagccttggcagtcaagcaacaacgaactgtctacagactgatgctcgtgaaagcatggaacgtggacgagctccaggcctacgcgcagctcgtgtccctggggaatcctgacttcatcgaagtgaagggcgttacctactgcagagaaagttcagcaagcagtcttaccatggcccatgtgccctggcatgaggaagtggtacagtttgtccgcgagctggtggatctgatccccgaatatgaaattgcatgtgaacacgaacactctaattgcctcctgatagcacacagaaagacagttttaggagggacaccaggccatggagtcacagaaatccagtgggaagagtggatcaagaaaagactaatcagccaggcacggtggctcatatctgttatcccagcacattgagaggctgaggcaggcagatcacttgagg

SEQ ID NO: 195359 - DNA, 3113 bp, Homo sapiens
  Payload ID: 18576
  Gene Name: tRNA-yW synthesizing protein 1 homolog B (S. cerevisiae)
  ENST ID: ENST00000620995
  CDS Start-End: 124-2130
agttctgcagccactcggtacggcgctaacgccgcgaggtagctcggtgcgtctcgcagtaccagtgcgaacctttgggctctccaggtccgagatcctagtctcctgtcggctctgaggaggatggatccttctgcggatacatgggacctctcctcacctttaatatcattatggataaacaggttttacatttatctgggctttgctgttagcattagcctttggatttgtgtccagattgtcatcgagatgcagggatttgcaacagttcttgctgaagcagttacgtccctggatctgcctgtggccattattaatctaaaagaatatgatccagatgatcatctgatagaagaggtgactagtaaaaatgtctgtgtcttcctggttgcgacatacactgacggcctaccaaccgaaagtgcagagtggttctgcaaatggttagaggaagcatccattgattttcgatttggcaaaacttacctgaagggtatgagagatgcggtatttggcctgggaaattctgcctatgctagccacttcaacaaggttggcaaaaatgttgacaagtggctctggatgcttggcgtgcatcgtgtgatgagtcgaggggagggcgactgcgacgtggttaaaagcaagcacggcagcattgaggccaacttcagagcatggaagaccaagttcatctcccagctgcaggcacttcagaaaggggagagaaagaagtcctgtggcggccactgcaagaaaggcaaatgtgaatctcaccaacatggctcagaggagagggaggaaggatctcaagagcaggacgaattgcatcacagagacaccaaggaggaagaacccttcgagagctccagtgaagaagagtttggtggtgaggaccatcagagcctaaattccattgttgatgttgaagatttgggcaaaattatggatcacgtgaagaaagaaaagagagaaaaggaacagcaggaagagaagtctggtttgttcaggaacatggggaggaatgaagatggtgaaagaagagctatgataactcctgctctccgagaagcccttactaaacaagtcgatgctccgagggagaggagcttgttacaaacacacattctatggaatgagagccatcgctgcatggaaaccaccccgagcttggcgtgtgctaataaatgtgtcttctgttggtggcaccacaacaaccctgtgggcactgaatggttgtggaagatggaccagcctgaaatgatcttgaaggaagccattgaaaaccatcagaacatgattaagcagtttaaaggagtaccgggcgtcaaagcagaacgctttgaagaaggaatgacggtaaagcactgtgcattgtccctcgtgggagaaccaataatgtacccagagatcaacaggtttttgaagctactccaccagtgtaaaatctccagcttcctggtcacaaatgcacaatttcctgcggaaatcaggaacctcgagccagttactcagctgtatgtcagtgtggatgccagtaccaaagacagcctgaagaaaatcgaccgcccactcttcaaggatttctggcagcaattccttgacagtttaaaagccttggcagtcaagcaacaacgaactgtctacagactgatgctcgtgaaagcatggaacgtggacgagctccaggcctacgcgcagctcgtgtccctggggaatcctgacttcatcgaagtgaagggcgttacctactgcagagaaagttcagcaagcagtcttaccatggcccatgtgccctggcatgaggaagtggtacagtttgtccgcgagctggtggatctgatccccgaatatgaaattgcatgtgaacacgaacactctaattgcctcctgatagcacacagaaagtttaaaattggtggtgaatggtggacatggatcgattataaccgcttccaggagctcatccaggaatatgaagatagtggtggatcaaaaacgttcagcgcaaaggattatatggccagaactcctcactgggcattatttggtgccaatgaaagaagctttgatcccaaggacacaagacatcagagaaagaacaaatcaaaggctatttctggatgttgagattatctgatttcaaggtactgaaggacaaaaacttggatggcctcaaaaggttcttgaacaccactctgattctccaaggacgaattacgtaaattatactttcatacaaaggagacgataaggcagtaaacatggagacacgggggacagcgtccacactcagagggcctgggccacagccccgatgtttcttttcagaactcagcccctttcctgattttacttctaagaggaaaattattttggggaggaactacacagtcgtgattagaatttaactgatggttttgtattataacttctaagacctgccagaatgctagtcctgagagtgtcagacaaggaagaaatccctgggcctcttcccctcacctggcccttggatttcatggagcagccacttagcattgaattgcactaccctgagctaaacgtgtctgtgctttctaagataagagcttgatccctttcttctgtcttaagacagcacctcctgaaaagaatcgaagttgtcacaactctcaattattttttaaatactgcatagattgagttttggtttattactaacccttcccaaaattgcatcggatctaaaactactagatctcatcccattcccatgtaaattaccacagaccgcagtaccggggctggagcggagtgaagctgtctgctgtaagaggagtggccatgtgagggcatggagtcattagtctcacaaacacactttggactgaagaggatcatttctttttgttcgtgaggtcactgtccgggcctctcatatcacgaccagacggcgggtctccatcttctttgactcctgtggccctcgctgctttacacaatctgttctataaggttcaggtgttttcaagttggaaagatcataaatactcaaaattgttttcaagttagcaaattcttttaacagtcttttatgcaaaaattgaattaataaaataatattttgtaaa

SEQ ID NO: 195360 - DNA, 1086 bp, Homo sapiens
  Payload ID: 18576
  Gene Name: tRNA-yW synthesizing protein 1 homolog B (S. cerevisiae)
  ENST ID: ENST00000610600
  CDS Start-End: 112-1086
actcggtacggcgctaacgccgcgaggtagctcggtgcgtctcgcagtaccagtgcgaacctttgggctctccaggtccgagatcctagtctcctgtcggctctgaggaggatggatccttctgcggatacatgggacctctcctcacctttaatatcattatggataaacaggttttacatttatctgggctttgctgttagcattagcctttggatttgtgtccagattgtcatcgagatgcagggatttgcaacagttcttgctgaagcagttacgtccctggatctgcctgtggccattattaatctaaaagaatatgatccagatgatcatctgatagaagaggttggcaaaaatgttgacaagtggctctggatgcttggcgtgcatcgtgtgatgagtcgaggggagggcgactgcgacgtggttaaaagcaagcacggcagcattgaggccaacttcagagcatggaagaccaagttcatctcccagctgcaggcacttcagaaaggggagagaaagaagtcctgtggcggccactgcaagaaaggcaaatgtgaatctcaccaacatggctcagaggagagggaggaaggatctcaagagcaggacgaattgcatcacagagacaccaaggaggaagaacccttcgagagctccagtgaagaagagtttggtggtgaggaccatcagagcctaaattccattgttgatgttgaagatttgggcaaaattatggatcacgtgaagaaagaaaagagagaaaaggaacagcaggaagagaagtctggtttgttcaggaacatggggaggaatgaagatggtgaaagaagagctatgataactcctgctctccgagaagcccttactaaacaagtcgatgctccgagggagaggagcttgttacaaacacacattctatggaatgagagccatcgctgcatggaaaccaccccgagcttggcgtgtgctaataaatgtgtcttctgttggtggcaccacaacaaccctgtgggcactgaatggttgtggaagatggaccagcctgaaatgatcttgaaggaagccattgaaaaccatcag

SEQ ID NO: 195361 - DNA, 3430 bp, Homo sapiens
  Payload ID: 18577
  Gene Name: tRNA-yW synthesizing protein 3 homolog (S. cerevisiae)
  Uniprot ID: Q6IPR3
  ENST ID: ENST00000370867
  CDS Start-End: 90-869
tcggccaccgctcgcttcaatatggctgcccccagggagagacgaggctaccatgaaggagccgagcgcagaccctgagtccgtcacccatggatcgcagcgcggagttcaggaaatggaaggcgcaatgtttgagcaaagcggacctcagccggaagggcagtgttgacgaggatgtggtagagcttgtgcagtttctgaacatgcgagatcagtttttcaccaccagctcctgcgctggccgcatcctactccttgaccggggtataaatggttttgaggttcagaaacaaaactgttgctggctactggttacacacaaactttgtgtaaaagatgatgtgattgtagctctgaagaaagcaaatggtgatgccactttgaaatttgaaccatttgttcttcatgtgcagtgtcgacaattgcaggatgcacagattctgcattccatggcaatagattctggtttcaggaactctggcataacggtgggaaagagaggaaaaactatgttggctgtccggagtacacatggcttagaagttccattaagccataagggaaaactgatggtgacagaggaatatattgacttcctgttaaatgtggcaaatcaaaaaatggaggaaaacaagaaaagaattgagaggttttacaactgcctacagcatgctttggaaagggaaacgatgactaacttacatcccaagatcaaagagaaaaataactcatcatatattcataagaaaaaaagaaacccagaaaaaacacgtgcccagtgtattactaaagaaagtgatgaagaacttgaaaatgatgatgatgatgatctaggaatcaatgttaccatcttccctgaagattactaagctttggttctgatgtgtcttggccgtaatgtttctagtaggttttataaagctgctcttcataagagtattttagtttgttgagtgtatcagccattcataagccagtaatgacaagtgcagagcttcaaactataactttgttgcccagaggatgtgcagttgtcatctaagctctcagcagtacccggcttatcctacgacttcacctgaaatgctatagttatccctacttttttaccagtttctcccagaagcacctgcttaataaatcaaagatgtttgaatggtgtcttattctgaaataacctgacctaagacaggtatttagattattttggatacattttgaaaagggatagcataaatattttaagtaaaaagacctttattttaaataatagtggatattttaatgctggaaattagcattatagttgatatgccagaaattatatctttggttgtgatttaaacttatgctataaactaaattaatgatgtaaatacatagttttaaacattcttttagggacatgtaacttttaagtatcacttcaataatacgtattattataggaacaaagatttgggaataattgattacaggtgaggaagtactggaattccagttcaaggagataccatttcatttaggactaaaaggacaagatacaagttcacatgatgggaaaaatcagaaaacctctcgcagacaaagggtatataatggatatgaggcatcaaaaagcatggtatagtcagtgatggggaatagtccagaaaggctgaaacacagcatgtgatgcgagtcaaggtagttgatgcccaactgtgaagggccgttctaatctagcatggaggtagacagtgtttccttaatatggctgcatatcagaattacctaggtcaggacgaggcatggagatgctactttaataggccctgccgcagatcttccaaaccagaatcttaatcctggagtctaggaatctttatttttcacacaactcatccaagtggttctgataaaatcagtccagcacttttagaacccactgataacagacttattcctggagacagcatttgaggaggaattgaagatttttctaatgaaaagaaaaagggtcacatgaacagatgttgcagtgtacctgtgccagggatttcatgtgtacactttataggagaataagcaagagcttaggtaagttatagtccttaccattgggtctaaggcagtttccaggaaagcatggcaactcgttcagctatgtaagttgaactctgtaccacttgggagggaacattcccctagatgacaatgtcagtggcactcgaagttgtgcagtgcacattcttatctaccaacatatacagcagtccttctgggaaggaaatttgggcaggaaagggaactcacagtgtcggaatgcctggagcatttcttctagtctggtggacagaatatgaaagtatctgcctggcagtgcagtaaatgaaaagagaagataaatgaataaaaaaaaaagttataaataacagtaggaaagagagagtgcaggtggaacgagcctatcctgtggtgaaatgacaacacattctgcagttttaaaatctaagaggctcattgacttttcttcattcatttaaattgatctccaagaaaactatgtattttaaagattccataaactgaatatatgaatgagaattaagaagagaggggctgcttcctaatctgtttatataaggtatagtatagtataatctgtttatataaggttagtagagaggagacaccaggtgctggccataaacctaagaagacattgaatcccattcactccttaacattccttaatatacattcatgagctacataacattttaatcatcaatgatggaccatataccatatacgatatggtggccccataagattataatggacctgaaaaattcctattgctagtgatgtggtcattgtaaagctgtagcacaacacattacccacgtttgtggtgacagtcatataaaagtatggtacatataattatgtacagtgcatacataatacttgataatatgttactggtttgtgtctttgctatgctttttatcattattttagggtatactacttaaaatgttaactgtaaaacagcttctgacaggtccttcaggaagtactccagaagaaggcattgttatcatagaaggtgacagcttcatgtgtgttattgcccctgaagaccttccagtggtacaagatgtggaggaggaagacagtgatactgaggattctgaccctgtgtaggcttaggctaatgtgtgtgtttatatcttagtttttcacaaaaaggtttttccaatgttaaaaaaaatatataaaaaagcttatagaataaggatataaagaaatattttgtacagctgtacaataagctaagcattattaccaaagagtcaaaaagttttaagaaattaaagtttataaaccaaatgttcattgtgagccaaggttaatttattgaagaaataaaacatttttaatg

SEQ ID NO: 195362 - DNA, 3335 bp, Homo sapiens
  Payload ID: 18577
  Gene Name: tRNA-yW synthesizing protein 3 homolog (S. cerevisiae)
  Uniprot ID: Q6IPR3
  ENST ID: ENST00000457880
  CDS Start-End: 94-774
cttttcggccaccgctcgcttcaatatggctgcccccagggagagacgaggctaccatgaaggagccgagcgcagaccctgagtccgtcacccatggatcgcagcgcggagttcaggaaatggaaggcgcaatgtttgagcaaagcggacctcagccggaagggcagtgttgacgaggatgtggtagagcttgtgcagtttctgaacatgcgagatcagtttttcaccaccagctcctgcgctggccgcatcctactccttgaccggggtataaatggttttgaggttcagaaacaaaactgttgctggctactggttacacacaaactttgtgtaaaagatgatgtgcattccatggcaatagattctggtttcaggaactctggcataacggtgggaaagagaggaaaaactatgttggctgtccggagtacacatggcttagaagttccattaagccataagggaaaactgatggtgacagaggaatatattgacttcctgttaaatgtggcaaatcaaaaaatggaggaaaacaagaaaagaattgagaggttttacaactgcctacagcatgctttggaaagggaaacgatgactaacttacatcccaagatcaaagagaaaaataactcatcatatattcataagaaaaaaagaaacccagaaaaaacacgtgcccagtgtattactaaagaaagtgatgaagaacttgaaaatgatgatgatgatgatctaggaatcaatgttaccatcttccctgaagattactaagctttggttctgatgtgtcttggccgtaatgtttctagtaggttttataaagctgctcttcataagagtattttagtttgttgagtgtatcagccattcataagccagtaatgacaagtgcagagcttcaaactataactttgttgcccagaggatgtgcagttgtcatctaagctctcagcagtacccggcttatcctacgacttcacctgaaatgctatagttatccctacttttttaccagtttctcccagaagcacctgcttaataaatcaaagatgtttgaatggtgtcttattctgaaataacctgacctaagacaggtatttagattattttggatacattttgaaaagggatagcataaatattttaagtaaaaagacctttattttaaataatagtggatattttaatgctggaaattagcattatagttgatatgccagaaattatatctttggttgtgatttaaacttatgctataaactaaattaatgatgtaaatacatagttttaaacattcttttagggacatgtaacttttaagtatcacttcaataatacgtattattataggaacaaagatttgggaataattgattacaggtgaggaagtactggaattccagttcaaggagataccatttcatttaggactaaaaggacaagatacaagttcacatgatgggaaaaatcagaaaacctctcgcagacaaagggtatataatggatatgaggcatcaaaaagcatggtatagtcagtgatggggaatagtccagaaaggctgaaacacagcatgtgatgcgagtcaaggtagttgatgcccaactgtgaagggccgttctaatctagcatggaggtagacagtgtttccttaatatggctgcatatcagaattacctaggtcaggacgaggcatggagatgctactttaataggccctgccgcagatcttccaaaccagaatcttaatcctggagtctaggaatctttatttttcacacaactcatccaagtggttctgataaaatcagtccagcacttttagaacccactgataacagacttattcctggagacagcatttgaggaggaattgaagatttttctaatgaaaagaaaaagggtcacatgaacagatgttgcagtgtacctgtgccagggatttcatgtgtacactttataggagaataagcaagagcttaggtaagttatagtccttaccattgggtctaaggcagtttccaggaaagcatggcaactcgttcagctatgtaagttgaactctgtaccacttgggagggaacattcccctagatgacaatgtcagtggcactcgaagttgtgcagtgcacattcttatctaccaacatatacagcagtccttctgggaaggaaatttgggcaggaaagggaactcacagtgtcggaatgcctggagcatttcttctagtctggtggacagaatatgaaagtatctgcctggcagtgcagtaaatgaaaagagaagataaatgaataaaaaaaaaagttataaataacagtaggaaagagagagtgcaggtggaacgagcctatcctgtggtgaaatgacaacacattctgcagttttaaaatctaagaggctcattgacttttcttcattcatttaaattgatctccaagaaaactatgtattttaaagattccataaactgaatatatgaatgagaattaagaagagaggggctgcttcctaatctgtttatataaggtatagtatagtataatctgtttatataaggttagtagagaggagacaccaggtgctggccataaacctaagaagacattgaatcccattcactccttaacattccttaatatacattcatgagctacataacattttaatcatcaatgatggaccatataccatatacgatatggtggccccataagattataatggacctgaaaaattcctattgctagtgatgtggtcattgtaaagctgtagcacaacacattacccacgtttgtggtgacagtcatataaaagtatggtacatataattatgtacagtgcatacataatacttgataatatgttactggtttgtgtctttgctatgctttttatcattattttagggtatactacttaaaatgttaactgtaaaacagcttctgacaggtccttcaggaagtactccagaagaaggcattgttatcatagaaggtgacagcttcatgtgtgttattgcccctgaagaccttccagtggtacaagatgtggaggaggaagacagtgatactgaggattctgaccctgtgtaggcttaggctaatgtgtgtgtttatatcttagtttttcacaaaaaggtttttccaatgttaaaaaaaatatataaaaaagcttatagaataaggatataaagaaatattttgtacagctgtacaataagctaagcattattaccaaagagtcaaaaagttttaagaaattaaagtttataaaccaaatgttcattgtgagccaaggttaatttattgaagaaataaaacatttttaatg

SEQ ID NO: 195363 - DNA, 708 bp, Homo sapiens
  Payload ID: 18577
  Gene Name: tRNA-yW synthesizing protein 3 homolog (S. cerevisiae)
  ENST ID: ENST00000483990
  CDS Start-End: 540-708
atttttttttcatttttaaatactgtgctagccaaatagctagagtacaactcaggtgctgctagtattatcccttatactaatccctttttttcttgcaaaatcatgaccatatttcagaagatgtttatcaagtagttttacctttcacataattttctacctcaagttatttgggctcattcttattctgggttaacattacccaaaaacataccgaattgtttttattaatacttaaaatcctgacttgggattattaatttaagaaagcctacaatatactatgcattatgcttattatttttgtaaaatattatatgaaacttaaattatgttattttttattttagggtataaatggttttgaggttcagaaacaaaactgttgctggctactggttacacacaaactttgtgtaaaagatgatgtgattgtagctctgaagaaagcaaatggtgatgccactttgaaatttgaaccatttgttcttcatgtgcagtgtcgacaattgcaggatgcacagattctgcattccatggcaatagattctggtttcaggaactctggcataacggtgggaaagagaggaaaaactatgttggctgtccggagtacacatggcttagaagttccattaagccataagggaaaactgatggtgacagaggaatatattgacttcctgttaaatgtggcaaatcaaa

SEQ ID NO: 195364 - DNA, 1130 bp, Homo sapiens
  Payload ID: 18577
  Gene Name: tRNA-yW synthesizing protein 3 homolog (S. cerevisiae)
  ENST ID: ENST00000479111
  CDS Start-End: 424-843
ggatcgcagcgcggagttcaggaaatggaaggcgcaatgtttgagcaaagcggacctcagccggaagggcagtgttgacgaggatgtggtagagcttgtgcagtttctgaacatgcgagatcagtttttcaccaccagctcctgcgctggccgcatcctactccttgaccgggttcagttaccccagtcaacagcagtctgaaaatattaaatgaaaattccagaaataaacaattaggtataaatggttttgaggttcagaaacaaaactgttgctggctactggttacacacaaactttgtgtaaaagatgatgtgattgtagctctgaagaaagcaaatggtgatgccactttgaaatttgaaccatttgttcttcatgtgcagtgtcgacaattgcaggatgcacagattctgcattccatggcaatagattctggtttcaggaactctggcataacggtgggaaagagaggaaaaactatgttggctgtccggagtacacatggcttagaagttccattaagccataagggaaaactgatggtgacagaggaatatattgacttcctgttaaatgtggcaaatcaaaaaatggaggaaaacaagaaaagaattgagaggttttacaactgcctacagcatgctttggaaagggaaacgatgactaacttacatcccaagatcaaagagaaaaataactcatcatatattcataagaaaaaaagaaacccagaaaaaacacgtgcccagtgtattactaaagaaagtgatgaagaacttgaaaatgatgatgatgatgatctaggaatcaatgttaccatcttccctgaagattactaagctttggttctgatgtgtcttggccgtaatgtttctagtaggttttataaagctgctcttcataagagtattttagtttgttgagtgtatcagccattcataagccagtaatgacaagtgcagagcttcaaactataactttgttgcccagaggatgtgcagttgtcatctaagctctcagcagtacccggcttatcctacgacttcacctgaaatgctatagttatccctacttttttaccagtttctcccagaagcacctgcttaataaatcaaagatgtttgaa

SEQ ID NO: 195365 - DNA, 4306 bp, Homo sapiens
  Payload ID: 18578
  Gene Name: tRNA-yW synthesizing protein 5
  Uniprot ID: A2RUC4
  ENST ID: ENST00000354611
  CDS Start-End: 267-1214
gcctcagcggtgtcggagaaagagactggagagcaaagtggacctgttgctgcagcctctggtgagtcggccccgtccccgctctccagcacgcagcccaggccgaggcccttcggcaacccgccccgcgctcggacccagccactctggagtctgccggcctcgcggaccttttctctgtcgctcgtgtttccgggcggatggcgctgaggaacgctttagagccgaagttccgaagacctggaagagggcaggcgtgagcaaccatggccgggcagcacctcccggtaccccggctggagggcgtttctcgggagcagttcatgcagcacctctacccacagagaaaacctcttgtgttggaagggattgatttggggccatgtacaagcaaatggacagtggattacctaagccaagttggagggaagaaagaagtaaagattcatgttgctgcagttgcacagatggacttcattagtaagaactttgtatatagaactttaccttttgaccagttggtccagagggcagctgaagagaaacataaagaattctttgtttcagaggatgagaaatactacttacggtcacttggagaagaccctagaaaggatgttgcagatatcagaaagcagtttcctttgttgaaaggagatattaagtttccagaattcttcaaagaggaacagttcttttccagtgtttttcgaattagttcaccaggattacaactatggactcattatgatgtaatggataatttgttaatacaagtgacaggaaaaaagcgtgttgtactcttcagtcctcgagatgcccagtatttatatttaaaaggtactaaatcagaagtactgaatatagataacccagacttggctaaatatccacttttttccaaggctagaagatatgaatgttcccttgaagctggtgatgtattattcattcctgctttatggttccataatgtaatttctgaagagtttggagtgggagtgaatatcttttggaagcaccttccatctgaatgctatgataaaacagatacctatggaaacaaagatcctacagcagcatcaagagctgcacaaattctggacagagccttgaaaacactggccgagttaccagaggaatatagggacttctatgcacgacgaatggtcctacacattcaagacaaagcctacagcaagaactctgagtaaataatgaagtgaatgcaatgcacattaacactttagtaaggtataacgatataaattaaagattttgttaaaataggaaagatacatcagatttacagattatgtaagtacgaaggggtgtttgtgtggattctacttgatacagattgttataattaaagaatgctgtgctgggaccactctttaacattcagatgctgaccactaaaagtccaacttaaaatgacttaaaaacagtaagaaaatatattgattcacaatacatgaaatctattgacagaatgtgctgcagtgtttctgatccaatgattcagtaatgtcatcaagaaccttgggaacccgcctccacaccccacccccttttcaaccacaacattggcatcatcctaaggctggctaccctcgtggtcatgggatgattgccagtagcagttggagccttgtgcatcttcatttacatgcagcggaagagtcaggctggattctaggggccctgtcctagtatgagaaagctttcccagaattcactttccatatccttaggtctcattgctctaaagtaacttagacctgtccatccctgagccagtcactggcaaagggtctagaataacctttagggcagtcaggtccactggagctgagagtagaagtggaggccacatgagggatatatggggacagaaaggatagtttttttaaaatcatggttctgataggaaaaacatgagcaacgcacaatatctattacatttgcctagaagcagaattttttgaggaactttaaaaaatgtacagatacctaggtcccaactttgtagactgattcaagagtgtttgggatttggtataggaacttaatagacctcacagggtgttctgatgcataatcagagctgagatcaactggagttgatgatagtgacttggattattagttttgtgattagtgcaaaacaaatgtttaatctgatcttgacttttcttgccacccagtatgtcagggtggtttttggtttttgaatgttacaaaataaataatttatacctatgtctaaaccttagcctagttaaagatttcccaactattttttccacctatcccttttttaaaagaaaaattacttaaagaatgaataaatgagatcctaaaagtgttgtcatcgaagacagtgagccattgtgtgtggatctctgcttttgttttgtacctagtaattatattgcagtgtcattgaagaccacataatcttcactgaacataaatgtgttcatctaaagcaatctcttagtacatcaatttggtgcattttaattagagaaaatcattttctctattgaagagaatccatccactcatgtcctataaattatagtaaataaggaaaagcatatataacattctgaatttcctaggtgtctttggaaacaggtaagttactcaggtgaataaaggtgaaaaaagtcttgtcagaaaaggaatgattatattagccaaatttaattaccaggttttgatcttcattaagcaaagcaaagaacttctttactgattccttgtccttcagtaaggaaaaagacaaaactctccttagtttacacattatttatggtcagtttttaataaatcttgttttttttcttaaccagcaagagaattgatacaaagtataaatccagagtcatgtagaaaacttggaagtattaataaaacagattacagtttgtgcactgaatagtcatcttaattgattgtttaatggagaagcaaactggatgaccttagacaaaataacatttatctatgaagcttattttcctcatctttaaaacagaactacaaaaatgcagagagttcaagggcaggcacatagttgataactggtgctagttcttctatttaattatattccatctttgttgagagatttgaggtagctcctgttgcagtattaatttataatattttaaaagttagagaactttcctttgggatgttttaaaattatttccctggtcataattaatattagggtctgtttatttcaaatacaaaatattttaatcttttcttcctactgggttaagaccaaatgagatgtttgtttttaatgtataaaatcttatacagtgtatgttagctgcaacttctcaggaattctgaatcttagaacttttttattgaaagagatcttagaagccatctaaccaacccagattgcttaatgattgtctgggttcacatagctatgggtgatagaaaccgggattcgttgtgaccagtaattctccattctccctaatgtgcagcacatctccagtacttctgaatagattacacagcttttctttggctagtttgggggcttgacctgatgcaaaaaggaatttttttcctctgccaacaaaatttctcactgcactgcttgctacacagacaagattcaaaataaaagtaatggtgggtcaggtgccatggctcatgcctgtaatcccagcactttgggaggccgaggtgggcagatcacgaggtcagatcaagaccattctggccaacatggtaaaaccccgtctctactaaaaatagaaaaattaaatgttacatgaaaaacatatttgaaactgtactgccatttgtgtaaaacaaggtatgtggtgtgtgaacatcttatttgcatatgcatataattatctctaaggatgcacgagaaaccagtgataattatgcctccaagaagaggttcaactaggtgggctgcttagaatctagttttgtattatttggacttttgttcacattatcctttcaaaatacattttaaaaatactatatgcaccgaggtgggtggatcatctgaactcaggagttcgagaccagcctgggcaacatggcgaaaccttgtctctaccaaaaatacagagaattagctggctgtggtggtgtgcgcctgtagtcccagctactcaggaggctaagataggaggatcacttgagcctgggaggtgcaggttgcagtgagctggaattgtgcaactgcactccagcctgggtgacagagtgagaccctgtctcaaaaaaaaaaaaaaaaaaa

SEQ ID NO: 195366 - DNA, 2042 bp, Homo sapiens
  Payload ID: 18578
  Gene Name: tRNA-yW synthesizing protein 5
  ENST ID: ENST00000441832
  CDS Start-End: 34-399
cgaagacctggaagagggcaggcgtgagcaaccatggccgggcagcacctcccggtaccccggctggagggcgtttctcgggagcagttcatgcagcacctctacccacagagaaaacctcttgtgttggaagggattgatttggggccatgtacaagcaaatggacagtggattacctaagccaagttggagggaagaaagaagtaaagattcatgttgctgcagttgcacagatggacttcattaaactttaccttttgaccagttggtccagagggcagctgaagagaaacataaagaattctttgtttcagaggatgagaaatactacttacggtcacttggagaagaccctagaaaggatgttgcagatatcagaaagcagtttcctttgttgaaaggagatattaagtttccagaattcttcaaagaggaacagttcttttccagtgtttttcgaattagttcaccaggattacaactatggactcattatgatgtactaaatcagaagtactgaatatagataacccagacttggctaaatatccacttttttccaaggctagaagatatgaatgttcccttgaagctggtgatgtattattcattcctgctttatggttccataatgtaatttctgaagagtttggagtgggagtgaatatcttttggaagcaccttccatctgaatgctatgataaaacagatacctatggaaacaaagatcctacagcagcatcaagagctgcacaaattctggacagagccttgaaaacactggccgagttaccagaggaatatagggacttctatgcacgacgaatggtcctacacattcaagacaaagcctacagcaagaactctgagtaaataatgaagtgaatgcaatgcacattaacactttagtaaggtataacgatataaattaaagattttgttaaaataggaaagatacatcagatttacagattatgtaagtacgaaggggtgtttgtgtggattctacttgatacagattgttataattaaagaatgctgtgctgggaccactctttaacattcagatgctgaccactaaaagtccaacttaaaatgacttaaaaacagtaagaaaatatattgattcacaatacatgaaatctattgacagaatgtgctgcagtgtttctgatccaatgattcagtaatgtcatcaagaaccttgggaacccgcctccacaccccacccccttttcaaccacaacattggcatcatcctaaggctggctaccctcgtggtcatgggatgattgccagtagcagttggagccttgtgcatcttcatttacatgcagcggaagagtcaggctggattctaggggccctgtcctagtatgagaaagctttcccagaattcactttccatatccttaggtctcattgctctaaagtaacttagacctgtccatccctgagccagtcactggcaaagggtctagaataacctttagggcagtcaggtccactggagctgagagtagaagtggaggccacatgagggatatatggggacagaaaggatagtttttttaaaatcatggttctgataggaaaaacatgagcaacgcacaatatctattacatttgcctagaagcagaattttttgaggaactttaaaaaatgtacagatacctaggtcccaactttgtagactgattcaagagtgtttgggatttggtataggaacttaatagacctcacagggtgttctgatgcataatcagagctgagatcaactggagttgatgatagtgacttggattattagttttgtgattagtgcaaaacaaatgtttaatctgatcttgacttttcttgccacccagtatgtcagggtggtttttggtttttgaatgttacaaaataaataatttatacctatgtctaaaccttagcctagttaaagatttcccaactattttttccacctatcccttttttaaaagaaaaattacttaaagaatgaataaatgagatcctaaaagtgttgtcatcgaa

SEQ ID NO: 195367 - DNA, 4287 bp, Homo sapiens
  Payload ID: 18578
  Gene Name: tRNA-yW synthesizing protein 5
  ENST ID: ENST00000483328
  CDS Start-End: 267-632
gcctcagcggtgtcggagaaagagactggagagcaaagtggacctgttgctgcagcctctggtgagtcggccccgtccccgctctccagcacgcagcccaggccgaggcccttcggcaacccgccccgcgctcggacccagccactctggagtctgccggcctcgcggaccttttctctgtcgctcgtgtttccgggcggatggcgctgaggaacgctttagagccgaagttccgaagacctggaagagggcaggcgtgagcaaccatggccgggcagcacctcccggtaccccggctggagggcgtttctcgggagcagttcatgcagcacctctacccacagagaaaacctcttgtgttggaagggattgatttggggccatgtacaagcaaatggacagtggattacctaagccaagttggagggaagaaagaagtaaagattcatgttgctgcagttgcacagatggacttcattaaactttaccttttgaccagttggtccagagggcagctgaagagaaacataaagaattctttgtttcagaggatgagaaatactacttacggtcacttggagaagaccctagaaaggatgttgcagatatcagaaagcagtttcctttgttgaaaggagatattaagtttccagaattcttcaaagaggaacagttcttttccagtgtttttcgaattagttcaccaggattacaactatggactcattatgatgtaatggataatttgttaatacaagtgacaggaaaaaagcgtgttgtactcttcagtcctcgagatgcccagtatttatatttaaaaggtactaaatcagaagtactgaatatagataacccagacttggctaaatatccacttttttccaaggctagaagatatgaatgttcccttgaagctggtgatgtattattcattcctgctttatggttccataatgtaatttctgaagagtttggagtgggagtgaatatcttttggaagcaccttccatctgaatgctatgataaaacagatacctatggaaacaaagatcctacagcagcatcaagagctgcacaaattctggacagagccttgaaaacactggccgagttaccagaggaatatagggacttctatgcacgacgaatggtcctacacattcaagacaaagcctacagcaagaactctgagtaaataatgaagtgaatgcaatgcacattaacactttagtaaggtataacgatataaattaaagattttgttaaaataggaaagatacatcagatttacagattatgtaagtacgaaggggtgtttgtgtggattctacttgatacagattgttataattaaagaatgctgtgctgggaccactctttaacattcagatgctgaccactaaaagtccaacttaaaatgacttaaaaacagtaagaaaatatattgattcacaatacatgaaatctattgacagaatgtgctgcagtgtttctgatccaatgattcagtaatgtcatcaagaaccttgggaacccgcctccacaccccacccccttttcaaccacaacattggcatcatcctaaggctggctaccctcgtggtcatgggatgattgccagtagcagttggagccttgtgcatcttcatttacatgcagcggaagagtcaggctggattctaggggccctgtcctagtatgagaaagctttcccagaattcactttccatatccttaggtctcattgctctaaagtaacttagacctgtccatccctgagccagtcactggcaaagggtctagaataacctttagggcagtcaggtccactggagctgagagtagaagtggaggccacatgagggatatatggggacagaaaggatagtttttttaaaatcatggttctgataggaaaaacatgagcaacgcacaatatctattacatttgcctagaagcagaattttttgaggaactttaaaaaatgtacagatacctaggtcccaactttgtagactgattcaagagtgtttgggatttggtataggaacttaatagacctcacagggtgttctgatgcataatcagagctgagatcaactggagttgatgatagtgacttggattattagttttgtgattagtgcaaaacaaatgtttaatctgatcttgacttttcttgccacccagtatgtcagggtggtttttggtttttgaatgttacaaaataaataatttatacctatgtctaaaccttagcctagttaaagatttcccaactattttttccacctatcccttttttaaaagaaaaattacttaaagaatgaataaatgagatcctaaaagtgttgtcatcgaagacagtgagccattgtgtgtggatctctgcttttgttttgtacctagtaattatattgcagtgtcattgaagaccacataatcttcactgaacataaatgtgttcatctaaagcaatctcttagtacatcaatttggtgcattttaattagagaaaatcattttctctattgaagagaatccatccactcatgtcctataaattatagtaaataaggaaaagcatatataacattctgaatttcctaggtgtctttggaaacaggtaagttactcaggtgaataaaggtgaaaaaagtcttgtcagaaaaggaatgattatattagccaaatttaattaccaggttttgatcttcattaagcaaagcaaagaacttctttactgattccttgtccttcagtaaggaaaaagacaaaactctccttagtttacacattatttatggtcagtttttaataaatcttgttttttttcttaaccagcaagagaattgatacaaagtataaatccagagtcatgtagaaaacttggaagtattaataaaacagattacagtttgtgcactgaatagtcatcttaattgattgtttaatggagaagcaaactggatgaccttagacaaaataacatttatctatgaagcttattttcctcatctttaaaacagaactacaaaaatgcagagagttcaagggcaggcacatagttgataactggtgctagttcttctatttaattatattccatctttgttgagagatttgaggtagctcctgttgcagtattaatttataatattttaaaagttagagaactttcctttgggatgttttaaaattatttccctggtcataattaatattagggtctgtttatttcaaatacaaaatattttaatcttttcttcctactgggttaagaccaaatgagatgtttgtttttaatgtataaaatcttatacagtgtatgttagctgcaacttctcaggaattctgaatcttagaacttttttattgaaagagatcttagaagccatctaaccaacccagattgcttaatgattgtctgggttcacatagctatgggtgatagaaaccgggattcgttgtgaccagtaattctccattctccctaatgtgcagcacatctccagtacttctgaatagattacacagcttttctttggctagtttgggggcttgacctgatgcaaaaaggaatttttttcctctgccaacaaaatttctcactgcactgcttgctacacagacaagattcaaaataaaagtaatggtgggtcaggtgccatggctcatgcctgtaatcccagcactttgggaggccgaggtgggcagatcacgaggtcagatcaagaccattctggccaacatggtaaaaccccgtctctactaaaaatagaaaaattaaatgttacatgaaaaacatatttgaaactgtactgccatttgtgtaaaacaaggtatgtggtgtgtgaacatcttatttgcatatgcatataattatctctaaggatgcacgagaaaccagtgataattatgcctccaagaagaggttcaactaggtgggctgcttagaatctagttttgtattatttggacttttgttcacattatcctttcaaaatacattttaaaaatactatatgcaccgaggtgggtggatcatctgaactcaggagttcgagaccagcctgggcaacatggcgaaaccttgtctctaccaaaaatacagagaattagctggctgtggtggtgtgcgcctgtagtcccagctactcaggaggctaagataggaggatcacttgagcctgggaggtgcaggttgcagtgagctggaattgtgcaactgcactccagcctgggtgacagagtgagaccctgtctcaaaaaaaaaaaaaaaaaaa

SEQ ID NO: 195368 - DNA, 4647 bp, Homo sapiens
  Payload ID: 18579
  Gene Name: trophinin
  Uniprot ID: Q12816
  ENST ID: ENST00000173898
  CDS Start-End: 113-4408
gggggataggctcagacacaaggagaggcttggagagagcagacgccttctggattcaagaagacgaggcccattcccctcaggctcacctgttactcggcctcccagaaagatggataggagaaatgactacggatatagggtgcctctatttcagggccctctgcctcccccggggagcctggggcttcccttccctccagatatacagactgagaccacagaagaggacagtgtcctgctgatgcataccctgttggcggcaaccaaggactccctggccatggacccaccagttgtcaaccggcctaagaaaagcaagaccaagaaggcccctataaagactattactaaggctgcacctgctgcccctccagtcccagctgccaatgagattgccaccaacaagcccaaaataacttggcaggctttaaacctgccagtcattacccagatcagccaggctttacctaccactgaggtaaccaatactcaggcttcttcagtcactgctcagcctaagaaagccaacaagatgaagagagttactgccaaggcagcccaaggctcccaatccccaactggccatgagggtggcactatacagctgaagtcacccttgcaggtcctaaagctaccagtcatctcacagaatattcacgctccaattgccaatgagtcagccagttcccaagccttgataacctctatcaagcctaagaaagcttccaaggctaagaaggctgcaaataaggccatagctagtgccaccgaggtctcgctggctgcaactgccacccatacagctaccacccaaggccaaattaccaatgagacagccagtatccacaccacagcagcctccatccgaaccaagaaagcctccaaagccaggaagacaattgctaaggtcataaatactgacactgagcatatagaggctctaaatgtcactgacgcagctaccaggcagattgaggcctcagtagtggctatcaggcccaaaaaatccaagggcaagaaggctgccagcaggggcccaaattctgtctctgagatctctgaggccccacttgccactcagatagtcacaaaccaagccctggcagccaccctgcgggtcaagagagggtctagggctcggaaggctgccactaaggctcgggcaactgaaagccagactccaaatgctgaccaaggggcccaggccaagatagcctctgctcagaccaacgtaagtgcccttgagactcaggttgctgctgctgtccaggccctggcagatgactatctggctcagttgagcctggagcccacaaccaggacccggggcaaaagaaaccgaaagtccaagcatctgaatggggatgagagaagtggcagtaattacaggcggatcccatggggccggaggcctgcaccaccgcgagatgtggccattttacaagaaagggctaataagttggtgaaatacctgttggttaaggaccagacaaagatccccatcaaacgctcagacatgctgagggatgtcatccaagaatatgatgaatatttcccagaaatcattgaacgagcaagctacactctggagaagatgtttcgagtcaatctgaaagaaattgataagcaaagtagcttgtatattctcatcagcactcaggaatcctctgcaggcatactgggaacgaccaaggacacacccaagctgggtctcctcatggtgattctgagtgtcatttttatgaatggcaacaaggccagtgaggctgtcatctgggaggtgctgcgcaagttggggctgcgccctggggtgaggcattcactctttggggaagtgaggaagctcatcacagacgagtttgtgaagcagaagtacctggagtacaagagggtccctaacagcagaccacctgaatatgagttcttctggggcttgcgctcctaccacgagactagcaagatgaaagtcctcaagtttgcatgcagggtgcagaagaaagaccccaaggactgggctgtgcagtaccgcgaggcagtggagatggaagtccaagctgcagctgtggctgtggctgaggctgaagccagggctgaggcaagagcccaaatggggattggagaggaagctgtggctgggccctggaattgggatgacatggatatcgactgcctaacaagggaagagttaggcgatgatgctcaggcctggagcagattttcatttgaaattgaggccagagcccaagaaaatgcagatgccagcaccaacgtcaacttcagcagaggagctagtaccagggctggcttcagcgatggtgctagtattagcttcaatggtgcacccagctccagtggtggcttcagtggtggacctggcattacctttggtgttgcacccagcaccagtgccagcttcagcaatacagccagcattagctttggtggtacactgagcactagctccagcttcagcagcgcagccagcattagctttggttgtgcacacagcaccagcactagtttcagcagtgaagccagcattagctttggtggcatgccttgtaccagtgccagctttagtggtggagtcagctctagttttagtggcccactcagcaccagtgccactttcagtggtggagccagctctggctttggaggcacactcagcaccacggctggctttagtggtgtactcagcactagcaccagctttggcagtgcacccacaacgagcacagtcttcagtagtgcgcttagcaccagcactggctttggaggcatactcagcaccagtgtctgttttggtggctctcccagctccagtggtagctttggtggtacactcagtaccagtatctgcttcggtggctctccctgcaccagcactggctttggaggcacacttagcaccagtgtctcctttggtggctcttccagcaccagtgccaattttggtggtacactaagtaccagcatctgctttgatggctctcccagcactggtgctggctttggtggtgctctcaacaccagtgccagctttggcagtgtgctcaacaccagtactggttttggtggtgctatgagcaccagtgctgactttggcggtacactaagcaccagtgtctgctttggtggctctcctggcaccagtgtcagctttggcagtgcactcaacaccaatgctggttatggtggtgctgtcagcaccaacactgactttggtggtacactaagcaccagcgtctgttttggtggctctcccagcaccagtgctggctttggtggtgcactcaacaccaatgccagctttggctgtgccgtcagcaccagtgccagcttcagtggtgctgtcagcaccagtgcttgcttcagtggtgcaccaatcaccaaccctggctttggcggtgcatttagcaccagtgctggcttcggtggggcacttagtaccgctgctgacttcggtggtactcccagcaacagcattggctttggtgctgctcccagcaccagtgtcagctttggtggtgctcatggcaccagcctctgttttggtggagctcccagcaccagcctctgctttggcagtgcatctaatactaacctatgctttggtggccctcctagcaccagtgcctgctttagtggtgctaccagccctagtttttgtgatggacccagcaccagtaccggtttcagctttggcaatgggttaagcaccaatgctggatttggtggtggactgaacaccagtgctggctttggtggtggcctaggcaccagtgctggcttcagtggtggcctaagcacaagttctggctttgatggtgggctaggtaccagcgctggcttcggtggaggaccaggcaccagcactggttttggtggtggactgggcaccagtgctggcttcagtggcggactgggcaccagtgctggctttggtggtggactggtcactagtgatggctttggtggtggactgggcaccaatgctagtttcggcagcacacttggcaccagtgctggctttagtggtggcctcagcaccagcgatggctttggcagtaggcctaatgccagcttcgacagaggactgagtaccatcattggctttggcagtggttccaacaccagcactggctttactggcgaacccagcaccagcacgggcttcagtagtggacccagttctattgttggcttcagcggtggaccaagcactggtgttggcttctgcagtggaccaagcaccagtggcttcagcggtggaccgagcacaggagctggcttcggcggtggaccaaacactggtgctggctttggtggtggaccgagcaccagtgctggctttggcagtggagccgccagtcttggtgcctgtggcttctcgtatggctagtgaggtttcagatttattccccatgtttacagataccgctaataaattgcagtagtccttcccatggagccaaagtacatccttggaatctttgtccacacagcagtcaaggcagttatggccaatcagctgagggtgtcatgtgatggaaaaatctgtttgctgttcctgctttattgtttgctttctgtgtgctgtcatattttggtatcagagttacattaaatttgcaaaatgaa

SEQ ID NO: 195369 - DNA, 2326 bp, Homo sapiens
  Payload ID: 18579
  Gene Name: trophinin
  Uniprot ID: Q12816
  ENST ID: ENST00000319167
  CDS Start-End: 113-2233
gggggataggctcagacacaaggagaggcttggagagagcagacgccttctggattcaagaagacgaggcccattcccctcaggctcacctgttactcggcctcccagaaagatggataggagaaatgactacggatatagggtgcctctatttcagggccctctgcctcccccggggagcctggggcttcccttccctccagatatacagactgagaccacagaagaggacagtgtcctgctgatgcataccctgttggcggcaaccaaggactccctggccatggacccaccagttgtcaaccggcctaagaaaagcaagaccaagaaggcccctataaagactattactaaggctgcacctgctgcccctccagtcccagctgccaatgagattgccaccaacaagcccaaaataacttggcaggctttaaacctgccagtcattacccagatcagccaggctttacctaccactgaggtaaccaatactcaggcttcttcagtcactgctcagcctaagaaagccaacaagatgaagagagttactgccaaggcagcccaaggctcccaatccccaactggccatgagggtggcactatacagctgaagtcacccttgcaggtcctaaagctaccagtcatctcacagaatattcacgctccaattgccaatgagtcagccagttcccaagccttgataacctctatcaagcctaagaaagcttccaaggctaagaaggctgcaaataaggccatagctagtgccaccgaggtctcgctggctgcaactgccacccatacagctaccacccaaggccaaattaccaatgagacagccagtatccacaccacagcagcctccatccgaaccaagaaagcctccaaagccaggaagacaattgctaaggtcataaatactgacactgagcatatagaggctctaaatgtcactgacgcagctaccaggcagattgaggcctcagtagtggctatcaggcccaaaaaatccaagggcaagaaggctgccagcaggggcccaaattctgtctctgagatctctgaggccccacttgccactcagatagtcacaaaccaagccctggcagccaccctgcgggtcaagagagggtctagggctcggaaggctgccactaaggctcgggcaactgaaagccagactccaaatgctgaccaaggggcccaggccaagatagcctctgctcagaccaacgtaagtgcccttgagactcaggttgctgctgctgtccaggccctggcagatgactatctggctcagttgagcctggagcccacaaccaggacccggggcaaaagaaaccgaaagtccaagcatctgaatggggatgagagaagtggcagtaattacaggcggatcccatggggccggaggcctgcaccaccgcgagatgtggccattttacaagaaagggctaataagttggtgaaatacctgttggttaaggaccagacaaagatccccatcaaacgctcagacatgctgagggatgtcatccaagaatatgatgaatatttcccagaaatcattgaacgagcaagctacactctggagaagatgtttcgagtcaatctgaaagaaattgataagcaaagtagcttgtatattctcatcagcactcaggaatcctctgcaggcatactgggaacgaccaaggacacacccaagctgggtctcctcatggtgattctgagtgtcatttttatgaatggcaacaaggccagtgaggctgtcatctgggaggtgctgcgcaagttggggctgcgccctggggtgaggcattcactctttggggaagtgaggaagctcatcacagacgagtttgtgaagcagaagtacctggagtacaagagggtccctaacagcagaccacctgaatatgagttcttctggggcttgcgctcctaccacgagactagcaagatgaaagtcctcaagtttgcatgcagggtgcagaagaaagaccccaaggactgggctgtgcagtaccgcgaggcagtggagatggaagtccaagctgcagctgtggctgtggctgaggctgaagccagggctgagatttattccccatgtttacagataccgctaataaattgcagtagtccttcccatggagccaaagtacatccttggaatctttgtccacacagcagtcaaggcagttatggccaatcagctgagggtgtcatgtgatggaaaaatctgtttgctgttcctgctttattgtttgctttctgtgtgctgtcatattttggtatcagagttacattaaatttgcaaaatgaa

SEQ ID NO: 195370 - DNA, 2306 bp, Homo sapiens
  Payload ID: 18579
  Gene Name: trophinin
  Uniprot ID: Q12816
  ENST ID: ENST00000375022
  CDS Start-End: 93-2213
ataggctcagacacaaggagaggcttggagagagcagacgccttctggattcaagaagacgaggctcacctgttactcggcctcccagaaagatggataggagaaatgactacggatatagggtgcctctatttcagggccctctgcctcccccggggagcctggggcttcccttccctccagatatacagactgagaccacagaagaggacagtgtcctgctgatgcataccctgttggcggcaaccaaggactccctggccatggacccaccagttgtcaaccggcctaagaaaagcaagaccaagaaggcccctataaagactattactaaggctgcacctgctgcccctccagtcccagctgccaatgagattgccaccaacaagcccaaaataacttggcaggctttaaacctgccagtcattacccagatcagccaggctttacctaccactgaggtaaccaatactcaggcttcttcagtcactgctcagcctaagaaagccaacaagatgaagagagttactgccaaggcagcccaaggctcccaatccccaactggccatgagggtggcactatacagctgaagtcacccttgcaggtcctaaagctaccagtcatctcacagaatattcacgctccaattgccaatgagtcagccagttcccaagccttgataacctctatcaagcctaagaaagcttccaaggctaagaaggctgcaaataaggccatagctagtgccaccgaggtctcgctggctgcaactgccacccatacagctaccacccaaggccaaattaccaatgagacagccagtatccacaccacagcagcctccatccgaaccaagaaagcctccaaagccaggaagacaattgctaaggtcataaatactgacactgagcatatagaggctctaaatgtcactgacgcagctaccaggcagattgaggcctcagtagtggctatcaggcccaaaaaatccaagggcaagaaggctgccagcaggggcccaaattctgtctctgagatctctgaggccccacttgccactcagatagtcacaaaccaagccctggcagccaccctgcgggtcaagagagggtctagggctcggaaggctgccactaaggctcgggcaactgaaagccagactccaaatgctgaccaaggggcccaggccaagatagcctctgctcagaccaacgtaagtgcccttgagactcaggttgctgctgctgtccaggccctggcagatgactatctggctcagttgagcctggagcccacaaccaggacccggggcaaaagaaaccgaaagtccaagcatctgaatggggatgagagaagtggcagtaattacaggcggatcccatggggccggaggcctgcaccaccgcgagatgtggccattttacaagaaagggctaataagttggtgaaatacctgttggttaaggaccagacaaagatccccatcaaacgctcagacatgctgagggatgtcatccaagaatatgatgaatatttcccagaaatcattgaacgagcaagctacactctggagaagatgtttcgagtcaatctgaaagaaattgataagcaaagtagcttgtatattctcatcagcactcaggaatcctctgcaggcatactgggaacgaccaaggacacacccaagctgggtctcctcatggtgattctgagtgtcatttttatgaatggcaacaaggccagtgaggctgtcatctgggaggtgctgcgcaagttggggctgcgccctggggtgaggcattcactctttggggaagtgaggaagctcatcacagacgagtttgtgaagcagaagtacctggagtacaagagggtccctaacagcagaccacctgaatatgagttcttctggggcttgcgctcctaccacgagactagcaagatgaaagtcctcaagtttgcatgcagggtgcagaagaaagaccccaaggactgggctgtgcagtaccgcgaggcagtggagatggaagtccaagctgcagctgtggctgtggctgaggctgaagccagggctgagatttattccccatgtttacagataccgctaataaattgcagtagtccttcccatggagccaaagtacatccttggaatctttgtccacacagcagtcaaggcagttatggccaatcagctgagggtgtcatgtgatggaaaaatctgtttgctgttcctgctttattgtttgctttctgtgtgctgtcatattttggtatcagagttacattaaatttgcaaaatgaa

SEQ ID NO: 195371 - DNA, 3488 bp, Homo sapiens
  Payload ID: 18579
  Gene Name: trophinin
  Uniprot ID: Q12816
  ENST ID: ENST00000375041
  CDS Start-End: 145-3249
agacgccttctggattcaagaagacgaggtgagctgaggtacctggctttagtgaagaccctgtgggggcttcctggctgcggcttcgacgtgcctgactccacacgcccctaaggctcacctgttactcggcctcccagaaagatggataggagaaatgactacggatatagggtgcctctatttcagtccaagcatctgaatggggatgagagaagtggcagtaattacaggcggatcccatggggccggaggcctgcaccaccgcgagatgtggccattttacaagaaagggctaataagttggtgaaatacctgttggttaaggaccagacaaagatccccatcaaacgctcagacatgctgagggatgtcatccaagaatatgatgaatatttcccagaaatcattgaacgagcaagctacactctggagaagatgtttcgagtcaatctgaaagaaattgataagcaaagtagcttgtatattctcatcagcactcaggaatcctctgcaggcatactgggaacgaccaaggacacacccaagctgggtctcctcatggtgattctgagtgtcatttttatgaatggcaacaaggccagtgaggctgtcatctgggaggtgctgcgcaagttggggctgcgccctggggtgaggcattcactctttggggaagtgaggaagctcatcacagacgagtttgtgaagcagaagtacctggagtacaagagggtccctaacagcagaccacctgaatatgagttcttctggggcttgcgctcctaccacgagactagcaagatgaaagtcctcaagtttgcatgcagggtgcagaagaaagaccccaaggactgggctgtgcagtaccgcgaggcagtggagatggaagtccaagctgcagctgtggctgtggctgaggctgaagccagggctgaggcaagagcccaaatggggattggagaggaagctgtggctgggccctggaattgggatgacatggatatcgactgcctaacaagggaagagttaggcgatgatgctcaggcctggagcagattttcatttgaaattgaggccagagcccaagaaaatgcagatgccagcaccaacgtcaacttcagcagaggagctagtaccagggctggcttcagcgatggtgctagtattagcttcaatggtgcacccagctccagtggtggcttcagtggtggacctggcattacctttggtgttgcacccagcaccagtgccagcttcagcaatacagccagcattagctttggtggtacactgagcactagctccagcttcagcagcgcagccagcattagctttggttgtgcacacagcaccagcactagtttcagcagtgaagccagcattagctttggtggcatgccttgtaccagtgccagctttagtggtggagtcagctctagttttagtggcccactcagcaccagtgccactttcagtggtggagccagctctggctttggaggcacactcagcaccacggctggctttagtggtgtactcagcactagcaccagctttggcagtgcacccacaacgagcacagtcttcagtagtgcgcttagcaccagcactggctttggaggcatactcagcaccagtgtctgttttggtggctctcccagctccagtggtagctttggtggtacactcagtaccagtatctgcttcggtggctctccctgcaccagcactggctttggaggcacacttagcaccagtgtctcctttggtggctcttccagcaccagtgccaattttggtggtacactaagtaccagcatctgctttgatggctctcccagcactggtgctggctttggtggtgctctcaacaccagtgccagctttggcagtgtgctcaacaccagtactggttttggtggtgctatgagcaccagtgctgactttggcggtacactaagcaccagtgtctgctttggtggctctcctggcaccagtgtcagctttggcagtgcactcaacaccaatgctggttatggtggtgctgtcagcaccaacactgactttggtggtacactaagcaccagcgtctgttttggtggctctcccagcaccagtgctggctttggtggtgcactcaacaccaatgccagctttggctgtgccgtcagcaccagtgccagcttcagtggtgctgtcagcaccagtgcttgcttcagtggtgcaccaatcaccaaccctggctttggcggtgcatttagcaccagtgctggcttcggtggggcacttagtaccgctgctgacttcggtggtactcccagcaacagcattggctttggtgctgctcccagcaccagtgtcagctttggtggtgctcatggcaccagcctctgttttggtggagctcccagcaccagcctctgctttggcagtgcatctaatactaacctatgctttggtggccctcctagcaccagtgcctgctttagtggtgctaccagccctagtttttgtgatggacccagcaccagtaccggtttcagctttggcaatgggttaagcaccaatgctggatttggtggtggactgaacaccagtgctggctttggtggtggcctaggcaccagtgctggcttcagtggtggcctaagcacaagttctggctttgatggtgggctaggtaccagcgctggcttcggtggaggaccaggcaccagcactggttttggtggtggactgggcaccagtgctggcttcagtggcggactgggcaccagtgctggctttggtggtggactggtcactagtgatggctttggtggtggactgggcaccaatgctagtttcggcagcacacttggcaccagtgctggctttagtggtggcctcagcaccagcgatggctttggcagtaggcctaatgccagcttcgacagaggactgagtaccatcattggctttggcagtggttccaacaccagcactggctttactggcgaacccagcaccagcacgggcttcagtagtggacccagttctattgttggcttcagcggtggaccaagcactggtgttggcttctgcagtggaccaagcaccagtggcttcagcggtggaccgagcacaggagctggcttcggcggtggaccaaacactggtgctggctttggtggtggaccgagcaccagtgctggctttggcagtggagccgccagtcttggtgcctgtggcttctcgtatggctagtgaggtttcagatttattccccatgtttacagataccgctaataaattgcagtagtccttcccatggagccaaagtacatccttggaatctttgtccacacagcagtcaaggcagttatggccaatcagctgagggtgtcatgtgatggaaaaatctgtttgctgttcctgctttattgtttgctttctgtgtgctgtcatattttggtatcagagttacattaaatttgcaaaatgaa

SEQ ID NO: 195372 - DNA, 1115 bp, Homo sapiens
  Payload ID: 18579
  Gene Name: trophinin
  Uniprot ID: Q12816
  ENST ID: ENST00000399736
  CDS Start-End: 93-1022
ataggctcagacacaaggagaggcttggagagagcagacgccttctggattcaagaagacgaggctcacctgttactcggcctcccagaaagatggataggagaaatgactacggatatagggtgcctctatttcagtccaagcatctgaatggggatgagagaagtggcagtaattacaggcggatcccatggggccggaggcctgcaccaccgcgagatgtggccattttacaagaaagggctaataagttggtgaaatacctgttggttaaggaccagacaaagatccccatcaaacgctcagacatgctgagggatgtcatccaagaatatgatgaatatttcccagaaatcattgaacgagcaagctacactctggagaagatgtttcgagtcaatctgaaagaaattgataagcaaagtagcttgtatattctcatcagcactcaggaatcctctgcaggcatactgggaacgaccaaggacacacccaagctgggtctcctcatggtgattctgagtgtcatttttatgaatggcaacaaggccagtgaggctgtcatctgggaggtgctgcgcaagttggggctgcgccctggggtgaggcattcactctttggggaagtgaggaagctcatcacagacgagtttgtgaagcagaagtacctggagtacaagagggtccctaacagcagaccacctgaatatgagttcttctggggcttgcgctcctaccacgagactagcaagatgaaagtcctcaagtttgcatgcagggtgcagaagaaagaccccaaggactgggctgtgcagtaccgcgaggcagtggagatggaagtccaagctgcagctgtggctgtggctgaggctgaagccagggctgagatttattccccatgtttacagataccgctaataaattgcagtagtccttcccatggagccaaagtacatccttggaatctttgtccacacagcagtcaaggcagttatggccaatcagctgagggtgtcatgtgatggaaaaatctgtttgctgttcctgctttattgtttgctttctgtgtgctgtcatattttggtatcagagttacattaaatttgcaaaatgaa

SEQ ID NO: 195373 - DNA, 976 bp, Homo sapiens
  Payload ID: 18579
  Gene Name: trophinin
  ENST ID: ENST00000452830
  CDS Start-End: 764-976
agagaactacattcctcctaggggaaacaggagaatcaaataggaacggagatacagagtggggaatagagaagtcaaatggagaataagagggagtgataactgaataggggtagtaagaagaaaaagggagctacattgaggagaatggaaagttgaaagtaggtatggaggggaggagactgacaggcaggaacggagacccccctctggaggcggaaagaggcaggaccacttccggccagggagggggataggctcagacacaaggagaggcttggagagagcagacgccttctggattcaagaagacgaggctcacctgttactcggcctcccagaaagatggataggagaaatgactacggatatagggtgcctctatttcaggtgaggcctctctgcattctctctaggccatctgccccatcctgagttcacttactgctcttcagaccccttccaccgtgtagtttcataattccctgcctaactcgtctcagtcctcccttacatggtgaaggagaggagaggaaaacctgcctgactctattccttccttgctccctaccccattttaattaaccactgctcagaggaagggaaggcctttgtggaaagggatgggctttagcgaggccaaatggcccagaggatggtaatcctaagtgtgtagggccctctgcctcccccggggagcctggggcttcccttccctccagatatacagactgagaccacagaagaggacagtgtcctgctgatgcataccctgttggcggcaaccaaggactccctggccatggacccaccagttgtcaaccggcctaagaaaagcaagaccaagaaggcccctataaagactattactaaggctgcacctgctgcccctccagtcccagctgccaatgagattgccaccaacaagcccaaaataacttggcaggctttaaacctgccagtcattacccagatc

SEQ ID NO: 195374 - DNA, 1196 bp, Homo sapiens
  Payload ID: 18579
  Gene Name: trophinin
  ENST ID: ENST00000411534
  CDS Start-End: 505-1196
agagcagctctagggaagagagacatagacacaaggtataacaacactatgtaaatagtgttgggatagagggtctgtaggaagggttggtgtgggagttcagagaactacattcctcctaggggaaacaggagaatcaaataggaacggagatacagagtggggaatagagaagtcaaatggagaataagagggagtgataactgaataggggtagtaagaagaaaaagggagctacattgaggagaatggaaagttgaaagtaggtatggaggggaggagactgacaggcaggaacggagacccccctctggaggcggaaagaggcaggaccacttccggccagggagggggataggctcagacacaaggagaggcttggagagagcagacgccttctggattcaagaagacgagggccctctgcctcccccggggagcctggggcttcccttccctccagatatacagactgagaccacagaagaggacagtgtcctgctgatgcataccctgttggcggcaaccaaggactccctggccatggacccaccagttgtcaaccggcctaagaaaagcaagaccaagaaggcccctataaagactattactaaggctgcacctgctgcccctccagtcccagctgccaatgagattgccaccaacaagcccaaaataacttggcaggctttaaacctgccagtcattacccagatcagccaggctttacctaccactgaggtaaccaatactcaggcttcttcagtcactgctcagcctaagaaagccaacaagatgaagagagttactgccaaggcagcccaaggctcccaatccccaactggccatgagggtggcactatacagctgaagtcacccttgcaggtcctaaagctaccagtcatctcacagaatattcacgctccaattgccaatgagtcagccagttcccaagccttgataacctctatcaagcctaagaaagcttccaaggctaagaaggctgcaaataaggccatagctagtgccaccgaggtctcgctggctgcaactgccacccatacagctaccacccaaggccaaattaccaatgagacagccagtatccacaccacagcagcctccatccgaaccaagaaagcctccaaagccaggaagacaattgctaaggtcataaatactgacactgagcatat

SEQ ID NO: 195375 - DNA, 578 bp, Homo sapiens
  Payload ID: 18579
  Gene Name: trophinin
  ENST ID: ENST00000449980
  CDS Start-End: 210-578
aagtaacgatctggactcggttcgggccgtgaaagggagggatgcagacctagttgggaccgcagaaaggaaggatcgagaaatccttcagacggctcacctgttactcggcctcccagaaagatggataggagaaatgactacggatatagggtgcctctatttcagatatacagactgagaccacagaagaggacagtgtcctgctgatgcataccctgttggcggcaaccaaggactccctggccatggacccaccagttgtcaaccggcctaagaaaagcaagaccaagaaggcccctataaagactattactaaggctgcacctgctgcccctccagtcccagctgccaatgagattgccaccaacaagcccaaaataacttggcaggctttaaacctgccagtcattacccagatcagccaggctttacctaccactgaggtaaccaatactcaggcttcttcagtcactgctcagcctaagaaagccaacaagatgaagagagttactgccaaggcagcccaaggctcccaatccccaactggccatgagggtggcactatacagctgaag

SEQ ID NO: 195376 - DNA, 626 bp, Homo sapiens
  Payload ID: 18579
  Gene Name: trophinin
  ENST ID: ENST00000442098
  CDS Start-End: 123-626
acttccggccagggagggggataggctcagacacaaggagaggcttggagagagcagacgccttctggattcaagaagacgaggtgagctgaggctcacctgttactcggcctcccagaaagatggataggagaaatgactacggatatagggtgcctctatttcagggccctctgcctcccccggggagcctggggcttcccttccctccagatatacagactgagaccacagaagaggacagtgtcctgctgatgcataccctgttggcggcaaccaaggactccctggccatggacccaccagttgtcaaccggcctaagaaaagcaagaccaagaaggcccctataaagactattactaaggctgcacctgctgcccctccagtcccagctgccaatgagattgccaccaacaagcccaaaataacttggcaggctttaaacctgccagtcattacccagatcagccaggctttacctaccactgaggtaaccaatactcaggcttcttcagtcactgctcagcctaagaaagccaacaagatgaagagagttactgccaaggcagcccaaggctcccaatccccaactggccatgagggtggcactatacagctgaagtca

SEQ ID NO: 195377 - DNA, 594 bp, Homo sapiens
  Payload ID: 18579
  Gene Name: trophinin
  ENST ID: ENST00000416704
  CDS Start-End: 89-594
ccggtttgaaagggaagagacaggacctggtagggtttgagaacaggaatacacagaaggctcacctgttactcggcctcccagaaagatggataggagaaatgactacggatatagggtgcctctatttcagggccctctgcctcccccggggagcctggggcttcccttccctccagatatacagactgagaccacagaagaggacagtgtcctgctgatgcataccctgttggcggcaaccaaggactccctggccatggacccaccagttgtcaaccggcctaagaaaagcaagaccaagaaggcccctataaagactattactaaggctgcacctgctgcccctccagtcccagctgccaatgagattgccaccaacaagcccaaaataacttggcaggctttaaacctgccagtcattacccagatcagccaggctttacctaccactgaggtaaccaatactcaggcttcttcagtcactgctcagcctaagaaagccaacaagatgaagagagttactgccaaggcagcccaaggctcccaatccccaactggccatgagggtggcactatacagctgaagtcacc

SEQ ID NO: 195378 - DNA, 2597 bp, Homo sapiens
  Payload ID: 18579
  Gene Name: trophinin
  ENST ID: ENST00000445561
  CDS Start-End: 93-2138
ataggctcagacacaaggagaggcttggagagagcagacgccttctggattcaagaagacgaggctcacctgttactcggcctcccagaaagatggataggagaaatgactacggatatagggtgcctctatttcagggccctctgcctcccccggggagcctggggcttcccttccctccagatatacagactgagaccacagaagaggacagtgtcctgctgatgcataccctgttggcggcaaccaaggactccctggccatggacccaccagttgtcaaccggcctaagaaaagcaagaccaagaaggcccctataaagactattactaaggctgcacctgctgcccctccagtcccagctgccaatgagattgccaccaacaagcccaaaataacttggcaggctttaaacctgccagtcattacccagatcagccaggctttacctaccactgaggtaaccaatactcaggcttcttcagtcactgctcagcctaagaaagccaacaagatgaagagagttactgccaaggcagcccaaggctcccaatccccaactggccatgagggtggcactatacagctgaagtcacccttgcaggtcctaaagctaccagtcatctcacagaatattcacgctccaattgccaatgagtcagccagttcccaagccttgataacctctatcaagcctaagaaagcttccaaggctaagaaggctgcaaataaggccatagctagtgccaccgaggtctcgctggctgcaactgccacccatacagctaccacccaaggccaaattaccaatgagacagccagtatccacaccacagcagcctccatccgaaccaagaaagcctccaaagccaggaagacaattgctaaggtcataaatactgacactgagcatatagaggctctaaatgtcactgacgcagctaccaggcagattgaggcctcagtagtggctatcaggcccaaaaaatccaagggcaagaaggctgccagcaggggcccaaattctgtctctgagatctctgaggccccacttgccactcagatagtcacaaaccaagccctggcagccaccctgcgggtcaagagagggtctagggctcggaaggctgccactaaggctcgggcaactgaaagccagactccaaatgctgaccaaggggcccaggccaagatagcctctgctcagaccaacgtaagtgcccttgagactcaggttgctgctgctgtccaggccctggcagatgactatctggctcagttgagcctggagcccacaaccaggacccggggcaaaagaaaccgaaagtccaagcatctgaatggggatgagagaagtggcagtaattacaggcggatcccatggggccggaggcctgcaccaccgcgagatgtggccattttacaagaaagggctaataagttggtgaaatacctgttggttaaggaccagacaaagatccccatcaaacgctcagacatgctgagggatgtcatccaagaatatgatgaatatttcccagaaatcattgaacgagcaagctacactctggagaagatgtttcgagtcaatctgaaagaaattgataagcaaagtagcttgtatattctcatcagcactcaggaatcctctgcaggcatactgggaacgaccaaggacacacccaagctgggtctcctcatggtgattctgagtgtcatttttatgaatggcaacaaggccagtgaggctgtcatctgggaggtgctgcgcaagttggggctgcgccctggggtgaggcattcactctttggggaagtgaggaagctcatcacagacgagtttgtgaagcagaagtacctggagtacaagagggtccctaacagcagaccacctgaatatgagttcttctggggcttgcgctcctaccacgagactagcaagatgaaagtcctcaagtttgcatgcagggtgcagaagaaagaccccaaggactgggctgtgcagtaccgcgaggcagtggagatggaagtccaagctgcagctgtggctgtggctgaggctgaagccagggctgagtggttccaacaccagcactggctttactggcgaacccagcaccagcacgggcttcagtagtggacccagttctattgttggcttcagcggtggaccaagcactggtgttggcttctgcagtggaccaagcaccagtggcttcagcggtggaccgagcacaggagctggcttcggcggtggaccaaacactggtgctggctttggtggtggaccgagcaccagtgctggctttggcagtggagccgccagtcttggtgcctgtggcttctcgtatggctagtgaggtttcagatttattccccatgtttacagataccgctaataaattgcagtagtccttcccatggagccaaagtacatccttggaatctttgtccacacagcagtcaaggcagttatggccaatcagctgagggtgtcatgtgatggaaaaatctgtttgctgttcctgctttattgtttgctttctgtgtgctgtcatattttggtatcagagttacattaaatttgcaaaatgaa

SEQ ID NO: 195379 - DNA, 599 bp, Homo sapiens
  Payload ID: 18579
  Gene Name: trophinin
  ENST ID: ENST00000440072
  CDS Start-End: 590-599
agacacaaggagaggcttggagagagcagacgccttctggattcaagaagacgaggtgagctgaggtacctggctttagtgaagaccctgtgggggcttcctggctgcggcttcgacgtgcctgactccacacgcccctaaggctcacctgttactcggcctcccagaaagatggataggagaaatgactacggatatagggtgcctctatttcaggtgaggcctctctgcattctctctaggccatctgccccatcctgagttcacttactgctcttcagaccccttccaccgtgtagtttcataattccctgcctaactcgtctcagtcctcccttacatggtgaaggagaggagaggaaaacctgcctgactctattccttccttgctccctaccccattttaattaaccactgctcagaggaagggaaggcctttgtggaaagggatgggctttagcgaggccaaatggcccagaggatggtaatcctaagtgtgtagggccctctgcctcccccggggagcctggggcttcccttccctccagatatacagactgagaccacagaagaggacagtgtcctgctgatgcataccc

SEQ ID NO: 195380 - DNA, 3613 bp, Homo sapiens
  Payload ID: 18579
  Gene Name: trophinin
  Uniprot ID: Q12816
  ENST ID: ENST00000420798
  CDS Start-End: 488-3376
agagaactacattcctcctaggggaaacaggagaatcaaataggaacggagatacagagtggggaatagagaagtcaaatggagaataagagggagtgataactgaataggggtagtaagaagaaaaagggagctacattgaggagaatggaaagttgaaagtaggtatggaggggaggagactgacaggcaggaacggagacccccctctggaggcggaaagaggcaggaccacttccggccagggagggggataggctcagacacaaggagaggcttggagagagcagacgccttctggattcaagaagacgagtccaagcatctgaatggggatgagagaagtggcagtaattacaggcggatcccatggggccggaggcctgcaccaccgcgagatgtggccattttacaagaaagggctaataagttggtgaaatacctgttggttaaggaccagacaaagatccccatcaaacgctcagacatgctgagggatgtcatccaagaatatgatgaatatttcccagaaatcattgaacgagcaagctacactctggagaagatgtttcgagtcaatctgaaagaaattgataagcaaagtagcttgtatattctcatcagcactcaggaatcctctgcaggcatactgggaacgaccaaggacacacccaagctgggtctcctcatggtgattctgagtgtcatttttatgaatggcaacaaggccagtgaggctgtcatctgggaggtgctgcgcaagttggggctgcgccctggggtgaggcattcactctttggggaagtgaggaagctcatcacagacgagtttgtgaagcagaagtacctggagtacaagagggtccctaacagcagaccacctgaatatgagttcttctggggcttgcgctcctaccacgagactagcaagatgaaagtcctcaagtttgcatgcagggtgcagaagaaagaccccaaggactgggctgtgcagtaccgcgaggcagtggagatggaagtccaagctgcagctgtggctgtggctgaggctgaagccagggctgaggcaagagcccaaatggggattggagaggaagctgtggctgggccctggaattgggatgacatggatatcgactgcctaacaagggaagagttaggcgatgatgctcaggcctggagcagattttcatttgaaattgaggccagagcccaagaaaatgcagatgccagcaccaacgtcaacttcagcagaggagctagtaccagggctggcttcagcgatggtgctagtattagcttcaatggtgcacccagctccagtggtggcttcagtggtggacctggcattacctttggtgttgcacccagcaccagtgccagcttcagcaatacagccagcattagctttggtggtacactgagcactagctccagcttcagcagcgcagccagcattagctttggttgtgcacacagcaccagcactagtttcagcagtgaagccagcattagctttggtggcatgccttgtaccagtgccagctttagtggtggagtcagctctagttttagtggcccactcagcaccagtgccactttcagtggtggagccagctctggctttggaggcacactcagcaccacggctggctttagtggtgtactcagcactagcaccagctttggcagtgcacccacaacgagcacagtcttcagtagtgcgcttagcaccagcactggctttggaggcatactcagcaccagtgtctgttttggtggctctcccagctccagtggtagctttggtggtacactcagtaccagtatctgcttcggtggctctccctgcaccagcactggctttggaggcacacttagcaccagtgtctcctttggtggctcttccagcaccagtgccaattttggtggtacactaagtaccagcatctgctttgatggctctcccagcactggtgctggctttggtggtgctctcaacaccagtgccagctttggcagtgtgctcaacaccagtactggttttggtggtgctatgagcaccagtgctgactttggcggtacactaagcaccagtgtctgctttggtggctctcctggcaccagtgtcagctttggcagtgcactcaacaccaatgctggttatggtggtgctgtcagcaccaacactgactttggtggtacactaagcaccagcgtctgttttggtggctctcccagcaccagtgctggctttggtggtgcactcaacaccaatgccagctttggctgtgccgtcagcaccagtgccagcttcagtggtgctgtcagcaccagtgcttgcttcagtggtgcaccaatcaccaaccctggctttggcggtgcatttagcaccagtgctggcttcggtggggcacttagtaccgctgctgacttcggtggtactcccagcaacagcattggctttggtgctgctcccagcaccagtgtcagctttggtggtgctcatggcaccagcctctgttttggtggagctcccagcaccagcctctgctttggcagtgcatctaatactaacctatgctttggtggccctcctagcaccagtgcctgctttagtggtgctaccagccctagtttttgtgatggacccagcaccagtaccggtttcagctttggcaatgggttaagcaccaatgctggatttggtggtggactgaacaccagtgctggctttggtggtggcctaggcaccagtgctggcttcagtggtggcctaagcacaagttctggctttgatggtgggctaggtaccagcgctggcttcggtggaggaccaggcaccagcactggttttggtggtggactgggcaccagtgctggcttcagtggcggactgggcaccagtgctggctttggtggtggactggtcactagtgatggctttggtggtggactgggcaccaatgctagtttcggcagcacacttggcaccagtgctggctttagtggtggcctcagcaccagcgatggctttggcagtaggcctaatgccagcttcgacagaggactgagtaccatcattggctttggcagtggttccaacaccagcactggctttactggcgaacccagcaccagcacgggcttcagtagtggacccagttctattgttggcttcagcggtggaccaagcactggtgttggcttctgcagtggaccaagcaccagtggcttcagcggtggaccgagcacaggagctggcttcggcggtggaccaaacactggtgctggctttggtggtggaccgagcaccagtgctggctttggcagtggagccgccagtcttggtgcctgtggcttctcgtatggctagtgaggtttcagatttattccccatgtttacagataccgctaataaattgcagtagtccttcccatggagccaaagtacatccttggaatctttgtccacacagcagtcaaggcagttatggccaatcagctgagggtgtcatgtgatggaaaaatctgtttgctgttcctgctttattgtttgctttctgtgtgctgtcatattttggtatcagagttacattaaatttgcaaaatg

SEQ ID NO: 195381 - DNA, 562 bp, Homo sapiens
  Payload ID: 18579
  Gene Name: trophinin
  ENST ID: ENST00000427099
  CDS Start-End: 199-562
gcgcactatcgagttgcggagggggcgtgtaaaggggtggggtcgtagaactgactctctcggaggcaaaaggagctgggccttggaaaccagatggcctgggttttttagggccctctgcctcccccggggagcctggggcttcccttccctccagatatacagactgagaccacagaagaggacagtgtcctgctgatgcataccctgttggcggcaaccaaggactccctggccatggacccaccagttgtcaaccggcctaagaaaagcaagaccaagaaggcccctataaagactattactaaggctgcacctgctgcccctccagtcccagctgccaatgagattgccaccaacaagcccaaaataacttggcaggctttaaacctgccagtcattacccagatcagccaggctttacctaccactgaggtaaccaatactcaggcttcttcagtcactgctcagcctaagaaagccaacaagatgaagagagttactgccaaggcagcccaaggctcccaatccccaactggccatgagggtggcactatacagc

SEQ ID NO: 195382 - DNA, 672 bp, Homo sapiens
  Payload ID: 18579
  Gene Name: trophinin
  ENST ID: ENST00000440759
  CDS Start-End: 145-672
agacgccttctggattcaagaagacgaggtgagctgaggtacctggctttagtgaagaccctgtgggggcttcctggctgcggcttcgacgtgcctgactccacacgcccctaaggctcacctgttactcggcctcccagaaagatggataggagaaatgactacggatatagggtgcctctatttcagggccctctgcctcccccggggagcctggggcttcccttccctccagatatacagactgagaccacagaagaggacagtgtcctgctgatgcataccctgttggcggcaaccaaggactccctggccatggacccaccagttgtcaaccggcctaagaaaagcaagaccaagaaggcccctataaagactattactaaggctgcacctgctgcccctccagtcccagctgccaatgagattgccaccaacaagcccaaaataacttggcaggctttaaacctgccagtcattacccagatcagccaggctttacctaccactgaggtaaccaatactcaggcttcttcagtcactgctcagcctaagaaagccaacaagatgaagagagttactgccaaggcagcccaaggctcccaatccccaactggccatgagggtggcactatacagctgaagtcacccttgcaggtcctaaagctacca

SEQ ID NO: 195383 - DNA, 405 bp, Homo sapiens
  Payload ID: 18579
  Gene Name: trophinin
  ENST ID: ENST00000431115
  CDS Start-End: 99-405
gacacaaggagaggcttggagagagcagacgccttctggattcaagaagacgaggcccattcccctcaggctcacctgttactcggcctcccagaaagatggataggagaaatgactacggatatagggtgcctctatttcagtccaagcatctgaatggggatgagagaagtggcagtaattacaggcggatcccatggggccggaggcctgcaccaccgcgagatgtggccattttacaagaaagggctaataagttggtgaaatacctgttggttaaggaccagacaaagatccccatcaaacgctcagacatgctgagggatgtcatccaagaatatgatgaatatttcccagaaatcattgaacgagcaagctacactctggagaagatgtttcgagtca

SEQ ID NO: 195384 - DNA, 868 bp, Homo sapiens
  Payload ID: 18579
  Gene Name: trophinin
  ENST ID: ENST00000430420
  CDS Start-End: 293-868
acttccggccagggagggggataggctcagacacaaggagaggcttggagagagcagacgccttctggattcaagaagacgaggtttgaagaaaacctgctggaggtttgggacctaaccgcatcaaagtcgcctttagcggtgcctggacccagttcgcacgggaggaagtaggaggctcacctgttactcggcctcccagaaagatggataggagaaatgactacggatatagggtgcctctatttcagatatacagactgagaccacagaagaggacagtgtcctgctgatgcataccctgttggcggcaaccaaggactccctggccatggacccaccagttgtcaaccggcctaagaaaagcaagaccaagaaggcccctataaagactattactaaggctgcacctgctgcccctccagtcccagctgccaatgagattgccaccaacaagcccaaaataacttggcaggctttaaacctgccagtcattacccagatcagccaggctttacctaccactgaggtaaccaatactcaggcttcttcagtcactgctcagcctaagaaagccaacaagatgaagagagttactgccaaggcagcccaaggctcccaatccccaactggccatgagggtggcactatacagctgaagtcacccttgcaggtcctaaagctaccagtcatctcacagaatattcacgctccaattgccaatgagtcagccagttcccaagccttgataacctctatcaagcctaagaaagcttccaaggctaagaaggctgcaaataaggccatagctagtgccaccgaggtctcgctggctgcaactgccacccatacagctaccacccaaggc

SEQ ID NO: 195385 - DNA, 722 bp, Homo sapiens
  Payload ID: 18579
  Gene Name: trophinin
  ENST ID: ENST00000453081
  CDS Start-End: 531-722
gggggataggctcagacacaaggagaggcttggagagagcagacgccttctggattcaagaagacgaggcccattcccctcaggctcacctgttactcggcctcccagaaagatggataggagaaatgactacggatatagggtgcctctatttcaggtgaggcctctctgcattctctctaggccatctgccccatcctgagttcacttactgctcttcagaccccttccaccgtgtagtttcataattccctgcctaactcgtctcagtcctcccttacatggtgaaggagaggagaggaaaacctgcctgactctattccttccttgctccctaccccattttaattaaccactgctcagaggaagggaaggcctttgtggaaagggatgggctttagcgaggccaaatggcccagaggatggtaatcctaagtgtgtagggccctctgcctcccccggggagcctggggcttcccttccctccagatatacagactgagaccacagaagaggacagtgtcctgctgatgcataccctgttggcggcaaccaaggactccctggccatggacccaccagttgtcaaccggcctaagaaaagcaagaccaagaaggcccctataaagactattactaaggctgcacctgctgcccctccagtcccagctgccaatgagattgccaccaacaagcccaaaataacttggcaggctttaaac

SEQ ID NO: 195386 - DNA, 1403 bp, Homo sapiens
  Payload ID: 18579
  Gene Name: trophinin
  ENST ID: ENST00000622017
  CDS Start-End: 93-1166
ataggctcagacacaaggagaggcttggagagagcagacgccttctggattcaagaagacgaggctcacctgttactcggcctcccagaaagatggataggagaaatgactacggatatagggtgcctctatttcagtccaagcatctgaatggggatgagagaagtggcagtaattacaggcggatcccatggggccggaggcctgcaccaccgcgagatgtggccattttacaagaaagggctaataagttggtgaaatacctgttggttaaggaccagacaaagatccccatcaaacgctcagacatgctgagggatgtcatccaagaatatgatgaatatttcccagaaatcattgaacgagcaagctacactctggagaagatgtttcgagtcaatctgaaagaaattgataagcaaagtagcttgtatattctcatcagcactcaggaatcctctgcaggcatactgggaacgaccaaggacacacccaagctgggtctcctcatggtgattctgagtgtcatttttatgaatggcaacaaggccagtgaggctgtcatctgggaggtgctgcgcaagttggggctgcgccctggggtgaggcattcactctttggggaagtgaggaagctcatcacagacgagtttgtgaagcagaagtacctggagtacaagagggtccctaacagcagaccacctgaatatgagttcttctggggcttgcgctcctaccacgagactagcaagatgaaagtcctcaagtttgcatgcagggtgcagaagaaagaccccaaggactgggctgtgcagtaccgcgaggcagtggagatggaagtccaactgcagctgtggctgtggctgaggctgaagccagggctgagtggttccaacaccagcactggctttactggcgaacccagcaccagcacgggcttcagtagtggacccagttctattgttggcttcagcggtggaccaagcactggtgttggcttctgcagtggaccaagcaccagtggcttcagcggtggaccgagcacaggagctggcttcggcggtggaccaaacactggtgctggctttggtggtggaccgagcaccagtgctggctttggcagtggagccgccagtcttggtgcctgtggcttctcgtatggctagtgaggtttcagatttattccccatgtttacagataccgctaataaattgcagtagtccttcccatggagccaaagtacatccttggaatctttgtccacacagcagtcaaggcagttatggccaatcagctgagggtgtcatgtgatggaaaaatctgtttgctgttcctgctttattgtttgctttctgtgtgctgtcatattttggtatcagagttacattaaatttgcaaaatg

SEQ ID NO: 195387 - DNA, 2527 bp, Homo sapiens
  Payload ID: 18580
  Gene Name: trophinin associated protein
  Uniprot ID: Q12815
  ENST ID: ENST00000257909
  CDS Start-End: 77-2413
ctccagcagcacccgagagggtcaggagaaaagcggaggaagctgggtaggccctgaggggcctcggtaagccatcatgaccacccggcaagccacgaaggatcccctcctccggggtgtatctcctacccctagcaagattccggtacgctctcagaaacgcacgcctttccccactgttacatcgtgcgccgtggaccaggagaaccaagatccaaggagatgggtgcagaaaccaccgctcaatattcaacgccccctcgttgattcagcaggccccaggccgaaagccaggcaccaggcagagacatcacaaagattggtggggatcagtcagcctcggaaccccttggaagagctcaggcctagccctaggggtcaaaatgtggggcctgggccccctgcccagacagaggctccagggaccatagagtttgtggctgaccctgcagccctggccaccatcctgtcaggtgagggtgtgaagagctgtcacctggggcgccagcctagtctggctaaaagagtactggttcgaggaagtcagggaggcaccacccagagggtccagggtgttcgggcctctgcatatttggcccccagaacccccacccaccgactggaccctgccagggcttcctgcttctctaggctggagggaccaggacctcgaggccggacattgtgcccccagaggctacaggctctgatttcaccttcaggaccttcctttcacccttccactcgccccagtttccaggagctaagaagggagacagctggcagcagccggacttcagtgagccaggcctcaggattgctcctggagaccccagtccagcctgctttctctcttcctaaaggagaacgcgaggttgtcactcactcagatgaaggaggtgtggcctctcttggtctggcccagcgagtaccattaagagaaaaccgagaaatgtcacataccagggacagccatgactcccacctgatgccctcccctgcccctgtggcccagcccttgcctggccatgtggtgccatgtccatcaccctttggacgggctcagcgtgtaccctccccaggccctccaactctgacctcatattcagtgttgcggcgtctcaccgttcaacctaaaacccggttcacacccatgccatcaacccccagagttcagcaggcccagtggctgcgtggtgtctcccctcagtcctgctctgaagatcctgccctgccctgggagcaggttgccgtccggttgtttgaccaggagagttgtataaggtcactggagggttctgggaaaccaccggtggccactccttctggaccccactctaacagaacccccagcctccaggaggtgaagattcaacgcatcggtatcctgcaacagctgttgagacaggaagtagaggggctggtagggggccagtgtgtccctcttaatggaggctcttctctggatatggttgaacttcagcccctgctgactgagatttctagaactctgaatgccacagagcataactctgggacttcccaccttcctggactgttaaaacactcagggctgccaaagccctgtcttccagaggagtgcggggaaccacagccctgccctccggcagagcctgggcccccagaggccttctgtaggagtgagcctgagataccagagccctccctccaggaacagcttgaagtaccagagccctaccctccagcagaacccaggcccctagagtcctgctgtaggagtgagcctgagataccggagtcctctcgccaggaacagcttgaggtacctgagccctgccctccagcagaacccaggcccctagagtcctactgtaggattgagcctgagataccggagtcctctcgccaggaacagcttgaggtacctgagccctgccctccagcagaacccgggccccttcagcccagcacccaggggcagtctggacccccagggccctgccctagggtagagctgggggcatcagagccctgcaccctggaacatagaagtctagagtccagtctaccaccctgctgcagtcagtgggctccagcaaccaccagcctgatcttctcttcccaacacccgctttgtgccagcccccctatctgctcactccagtctttgagacccccagcaggccaggcaggcctcagcaatctggcccctcgaaccctagccctgagggagcgcctcaaatcgtgtttaaccgccatccactgcttccacgaggctcgtctggacgatgagtgtgccttttacaccagccgagcccctccctcaggccccacccgggtctgcaccaaccctgtggctacattactcgaatggcaggatgccctgtgtttcattccagttggttctgctgccccccagggctctccatgatgagacaaccactcctgccctgccgtacttcttccttttagcccttatttattgtcggtctgcccatgggactgggagccgcccacttttgtcctcaataaagtttctaaagta

SEQ ID NO: 195388 - DNA, 675 bp, Homo sapiens
  Payload ID: 18580
  Gene Name: trophinin associated protein
  Uniprot ID: Q12815
  ENST ID: ENST00000380327
  CDS Start-End: 101-535
gtattttacaaactgagaaagtagctccagcagcacccgagagggtcaggagaaaagcggaggaagctgggtaggccctgaggggcctcggtaagccatcatgaccacccggcaagccacgaaggatcccctcctccggggtgtatctcctacccctagcaagattccggtacgctctcagaaacgcacgcctttccccactgttacatcgtgcgccgtggaccaggagaaccaagatccaaggagatgggtgcagaaaccaccgctcaatattcaacgccccctcgttgattcagcaggccccaggccgaaagccaggcaccaggcagagacatcacaaagattggtggggatcagtcagcctcggaaccccttggaagagctcaggcctagccctaggggtcaaaatgtggggcctgggccccctgcccagacagtcctggtcccagctcctggaaagctctttgctcttagaagatctccctttcctccagcaaaatgtcatctcgccaggtgccatggcttgtacctgtaatcacagctactcaggaggctgaagcaggaggatcactggaggccaggagttggagaccagcctggatgacagagggagatcccatctctttaaaaaataaataaataaataaataataaatatcacttcttctgaagcct

SEQ ID NO: 195389 - DNA, 932 bp, Homo sapiens
  Payload ID: 18580
  Gene Name: trophinin associated protein
  ENST ID: ENST00000549891
  CDS Start-End: 101-262
gtattttacaaactgagaaagtagctccagcagcacccgagagggtcaggagaaaagcggaggaagctgggtaggccctgaggggcctcggtaagccatcatgaccacccggcaagccacgaaggatcccctcctccggggtgtatctcctacccctagcaagattccggtacgctctcagaaacgcacgcctttccccactgttacatcgtgcgccgtggaccaggagaaccaagatccaaggaggctccagggaccatagagtttgtggctgaccctgcagccctggccaccatcctgtcaggacttcagtgagccaggcctcaggattgctcctggagaccccagtccagcctgctttctctcttcctaaaggagaacgcgaggttgtcactcactcagatgaaggaggtgtggcctctcttggtctggcccagcgagtaccattaagagaaaaccgagaaatgtcacataccagggacagccatgactcccacctgatgccctcccctgcccctgtggcccagcccttgcctggccatgtggtgccatgtccatcaccctttggacgggctcagcgtgtaccctccccaggccctccaactctgacctcatattcagtgttgcggcgtctcaccgttcaacctaaaacccggttcacacccatgccatcaacccccagagttcagcaggcccagtggctgcgtggtgtctcccctcagtcctgctctgaagatcctgccctgccctgggtaagtatcagaagcttccccctactgagatcccttgccctgtgctgccagcctggaggcccaggagtttgaggcacacgtgctttctgggccaggcatggtggctcacacctgtaatcccagcactttgggaggctgaggtaggaggattgcttgagctcagatctttgagaccagcct

SEQ ID NO: 195390 - DNA, 915 bp, Homo sapiens
  Payload ID: 18580
  Gene Name: trophinin associated protein
  ENST ID: ENST00000547807
  CDS Start-End: 46-915
agcggaggaagctgggtaggccctgaggggcctcggtaagccatcatgaccacccggcaagccacgaaggatcccctcctccggggtgtatctcctacccctagcaagattccggtacgctctcagaaacgcacgcctttccccactgttacatcgtgcgccgtggaccaggagaaccaagatccaaggagatgggtgcagaaaccaccgctcaatattcaacgccccctcgttgattcagcaggccccaggccgaaagccaggcaccaggcagagacatcacaaagattggtggggatcagtcagcctcggaaccccttggaagagctcaggcctagccctaggggtcaaaatgtggggcctgggccccctgcccagacagaggctccagggaccatagagtttgtggctgaccctgcagccctggccaccatcctgtcaggtgagggtgtgaagagctgtcacctggggcgccagcctagtctggctaaaagagtactggttcgaggaagtcagggaggcaccacccagagggtccagggtgttcgggcctctgcatatttggcccccagaacccccacccaccgactggaccctgccagggcttcctgcttctctaggctggagggaccaggacctcgaggccggacattgtgcccccagaggctacaggctctgatttcaccttcaggaccttcctttcacccttccactcgccccagtttccaggagctaagaagggagacagctggcagcagccggacttcagtgagccaggcctcaggattgctcctggagaccccagtccagcctggagaacgcgaggttgtcactcactcagatgaaggaggtgtggcctctcttggtctggcccagcgagtaccattaagagaaaaccgagaaatgtcacatacc

SEQ ID NO: 195391 - DNA, 577 bp, Homo sapiens
  Payload ID: 18580
  Gene Name: trophinin associated protein
  ENST ID: ENST00000551567
  CDS Start-End: 236-577
aacgaaggctgctgggttcatagggaggagggcagtttggggcccgagggcgaaagagtaggctcggggtgtctggagatagcacccataagagcggtcttgcaggcgccgggggcttgtgggcgcgtggattagggcggaggtatcagggatggcaggacaggtgccccgagaactggttgatctttgatcttagattctgcctgccttcttccccgtctcaattgtagccatcatgaccacccggcaagccacgaaggatcccctcctccggggtgtatctcctacccctagcaagattccggtacgctctcagaaacgcacgcctttccccactgttacatcgtgcgccgtggaccaggagaaccaagatccaaggagatgggtgcagaaaccaccgctcaatattcaacgccccctcgttgattcagcaggccccaggccgaaagccaggcaccaggcagagacatcacaaagattggtggggatcagtcagcctcggaaccccttggaagagctcaggcctagccctaggggtcaaaatgtggggcctgggccccctgcccagacagaggct

SEQ ID NO: 195392 - DNA, 1652 bp, Homo sapiens
  Payload ID: 18580
  Gene Name: trophinin associated protein
  ENST ID: ENST00000547923
  CDS Start-End: 188-1561
gctggctaatgtccttattgtcatcaggacttcagtgagccaggcctcaggattgctcctggagaccccagtccagcctgctttctctcttcctaaaggagaacgcgaggttgtcactcactcagatgaaggaggtgtggcctctcttggtctggcccagcgagtaccattaagagaaaaccgagaaatgtcacataccagggacagccatgactcccacctgatgccctcccctgcccctgtggcccagcccttgcctggccatgtggtgccatgtccatcaccctttggacgggctcagcgtgtaccctccccaggccctccaactctgacctcatattcagtgttgcggcgtctcaccgttcaacctaaaacccggttcacacccatgccatcaacccccagagttcagcaggcccagtggctgcgtggtgtctcccctcagtcctgctctgaagatcctgccctgccctgggagcaggttgccgtccggttgtttgaccaggagagttgtataaggtcactggagggttctgggaaaccaccggtggccactccttctggaccccactctaacagaacccccagcctccaggaggtgaagattcaacgcatcggtatcctgcaacagctgttgagacaggaagtagaggggctggtagggggccagtgtgtccctcttaatggaggctcttctctggatatggttgaacttcagcccctgctgactgagatttctagaactctgaatgccacagagcataactctgggacttcccaccttcctggactgttaaaacactcagggctgccaaagccctgtcttccagaggagtgcggggaaccacagccctgccctccggcagagcctgggcccccagaggccttctgtaggagtgagcctgagataccagagccctccctccaggaacagcttgaagtaccagagccctaccctccagcagaacccaggcccctagagtcctgctgtaggagtgagcctgagataccggagtcctctcgccaggaacagcttgaggaacagcttgaggtacctgagccctgccctccagcagaacccgggccccttcagcccagcacccaggggcagtctggacccccagggccctgccctagggtagagctgggggcatcagagccctgcaccctggaacatagaagtctagagtccagtctaccaccctgctgcagtcagtgggctccagcaaccaccagcctgatcttctcttcccaacacccgctttgtgccagcccccctatctgctcactccagtctttgagacccccagcaggccaggcaggcctcagcaatctggcccctcgaaccctagccctgagggagcgcctcaaatcgtgtttaaccgccatccactgcttccacgaggctcgtctggacgatgagtgtgccttttacaccagccgagcccctccctcaggccccacccgggtctgcaccaaccctgtggctacattactcgaatggcaggatgccctgtgtttcattccagttggttctgctgccccccagggctctccatgatgagacaaccactcctgccctgccgtacttcttccttttagcccttatttattgtcggtctgcccatgggactgggagccgcccacttttg

SEQ ID NO: 195393 - DNA, 2771 bp, Homo sapiens
  Payload ID: 18580
  Gene Name: trophinin associated protein
  ENST ID: ENST00000551245
  CDS Start-End: 112-2718
aagagcttggcgtattttacaaactgagaaagtagctccagcagcacccgagagggtcaggagaaaagcggaggaagctgggtaggccctgaggggcctcggtaagccatcatgaccacccggcaagccacgaaggatcccctcctccggggtgtatctcctacccctagcaagattccggtacgctctcagaaacgcacgcctttccccactgttacatcgtgcgccgtggaccaggagaaccaagatccaaggagatgggtgcagaaaccaccgctcaatattcaacgccccctcgttgattcagcaggccccaggccgaaagccaggcaccaggcagagacatcacaaagattggtggggatcagtcagcctcggaaccccttggaagagctcaggcctagccctaggggtcaaaatgtggggcctgggccccctgcccagacagaggctccagggaccatagagtttgtggctgaccctgcagccctggccaccatcctgtcaggtgagggtgtgaagagctgtcacctggggcgccagcctagtctggctaaaagagtactggttcgaggaagtcagggaggcaccacccagagggtccagggtgttcgggcctctgcatatttggcccccagaacccccacccaccgactggaccctgccagggcttcctgcttctctaggctggagggaccaggacctcgaggccggacattgtgcccccagaggctacaggctctgatttcaccttcaggaccttcctttcacccttccactcgccccagtttccaggagctaagaagggagacagctggcagcagccggacttcagtgagccaggcctcaggattgctcctggagaccccagtccagcctgctttctctcttcctaaaggagaacgcgaggttgtcactcactcagatgaaggaggtgtggcctctcttggtctggcccagcgagtaccattaagagaaaaccgagaaatgtcacataccagggacagccatgactcccacctgatgccctcccctgcccctgtggcccagcccttgcctggccatgtggtgccatgtccatcaccctttggacgggctcagcgtgtaccctccccaggccctccaactctgacctcatattcagtgttgcggcgtctcaccgttcaacctaaaacccggttcacacccatgccatcaacccccagagttcagcaggcccagtggctgcgtggtgtctcccctcagtcctgctctgaagatcctgccctgccctgggagcaggttgccgtccggttgtttgaccaggagagttgtataaggtcactggagggttctgggaaaccaccggtggccactccttctggaccccactctaacagaacccccagcctccaggaggtgaagattcaacgcatcggtatcctgcaacagctgttgagacaggaagtagaggggctggtagggggccagtgtgtccctcttaatggaggctcttctctggatatggttgaacttcagcccctgctgactgagatttctagaactctgaatgccacagagcataactctgggacttcccaccttcctggactgttaaaacactcagggctgccaaagccctgtcttccagaggagtgcggggaaccacagccctgccctccggcagagcctgggcccccagaggccttctgtaggagtgagcctgagataccagagccctccctccaggaacagcttgaagtaccagagccctaccctccagcagaacccaggcccctagagtcctgctgtaggagtgagcctgagataccggagtcctctcgccaggaacagcttgaggtacctgagccctgccctccagcagaacccaggcccctagagtcctactgtaggattgagcctgagataccggagtcctctcgccaggaacagcttgaggtacctgagccctgccctccagcagaacccgggccccttcagcccagcacccaggggcagtctggacccccagggccctgccctagggtagagctgggggcatcagagccctgcaccctggaacatagaagtctagagtccagtctaccaccctgctgcagtcagtgggctccagcaaccaccagcctgatcttctcttcccaacacccgctttgtgccagcccccctatctgctcactccagtctttgagacccccagcaggccaggcaggtaaggagttggctgggaaggagtgtgaacacaagaggtcctcacctcactgtgagctgcacacctgccctgcccctaccccaggcaatctcatgcttccacaccttccaccctggcccagcctggctctccctcaggaagaggggaggggctgcacttccagccctgtgctcctaattggcttggccgttggtgggggaggaggagaggacagtacatggtggaagtataggaccccagacctccctctaaattttccatgcccctcaggcctcagcaatctggcccctcgaaccctagccctgagggagcgcctcaaatcgtgtttaaccgccatccactgcttccacgaggctcgtctggacgatgagtgtgccttttacaccagccgagcccctccctcaggccccacccgggtctgcaccaaccctgtggctacattactcgaatggcaggatgccctgtgtttcattccagttggttctgctgccccccagggctctccatgatgagacaaccactcctgccctgccgtacttcttccttttagcccttatttatt

SEQ ID NO: 195394 - DNA, 1213 bp, Homo sapiens
  Payload ID: 18580
  Gene Name: trophinin associated protein
  ENST ID: ENST00000546735
  CDS Start-End: 99-260
attttacaaactgagaaagtagctccagcagcacccgagagggtcaggagaaaagcggaggaagctgggtaggccctgaggggcctcggtaagccatcatgaccacccggcaagccacgaaggatcccctcctccggggtgtatctcctacccctagcaagattccggtacgctctcagaaacgcacgcctttccccactgttacatcgtgcgccgtggaccaggagaaccaagatccaaggaggctccagggaccatagagtttgtggctgaccctgcagccctggccaccatcctgtcaggtgagggtgtgaagagctgtcacctggggcgccagcctagtctggctaaaagagtactggttcgaggaagtcagggaggcaccacccagagggtccagggtgttcgggcctctgcatatttggcccccagaacccccacccaccgactggaccctgccagggcttcctgcttctctaggctggagggaccaggacctcgaggccggacattgtgcccccagaggctacaggctctgatttcaccttcaggaccttcctttcacccttccactcgccccagtttccaggagctaagaagggagacagctggcagcagccggacttcagtgagccaggcctcaggattgctcctggagaccccagtccagcctgctttctctcttcctaaaggagaacgcgaggttgtcactcactcagatgaaggaggtgtggcctctcttggtctggcccagcgagtaccattaagagaaaaccgagaaatgtcacataccagggacagccatgactcccacctgatgccctcccctgcccctgtggcccagcccttgcctggccatgtggtgccatgtccatcaccctttggacgggctcagcgtgtaccctccccaggccctccaactctgacctcatattcagtgttgcggcgtctcaccgttcaacctaaaacccggttcacacccatgccatcaacccccagagttcagcaggcccagtggctgcgtggtgtctcccctcagtcctgctctgaagatcctgccctgccctgggtaagtatcagaagcttccccctactgagatcccttgccctgtgctgccagcctggaggcccaggagtttgaggcacacgtgctttctgggccaggcatggtggctcacacctgtaatcccagcactttgggaggctgaggtag

SEQ ID NO: 195395 - DNA, 623 bp, Homo sapiens
  Payload ID: 18580
  Gene Name: trophinin associated protein
  Uniprot ID: Q12815
  ENST ID: ENST00000548311
  CDS Start-End: 101-481
gtattttacaaactgagaaagtagctccagcagcacccgagagggtcaggagaaaagcggaggaagctgggtaggccctgaggggcctcggtaagccatcatgaccacccggcaagccacgaaggatcccctcctccggggtgtatctcctacccctagcaagattccggtacgctctcagaaacgcacgcctttccccactgttacatcgtgcgccgtggaccaggagaaccaagatccaaggagatgggtgcagaaaccaccgctcaatattcaacgccccctcgttgattcagcaggccccaggccgaaagccaggcaccaggcagagacatcacaaagattggtggggatcagtcagcctcggaaccccttggaagagctcaggcctagccctaggggtcaaaatgtggggcctgggccccctgcccagacaggtgccatggcttgtacctgtaatcacagctactcaggaggctgaagcaggaggatcactggaggccaggagttggagaccagcctggatgacagagggagatcccatctctttaaaaaataaataaataaataaataataaatatcacttcttctgaagccttttccagttccccatgtcacaatc

SEQ ID NO: 195396 - DNA, 839 bp, Homo sapiens
  Payload ID: 18580
  Gene Name: trophinin associated protein
  ENST ID: ENST00000549534
  CDS Start-End: 83-241
aagtagctccagcagcacccgagagggtcaggagaaaagcggaggaagctgggtaggccctgaggggcctcggtaagccatcatgaccacccggcaagccacgaaggatcccctcctccggggtgtatctcctacccctagcaagattccggtacgctctcagaaacgcacgcctttccccactgttacatcgtgcgccgtggaccaggagaaccaagatccaagggtaagaggggcctaatgggggaagacagtagtcacaccagtaatgcaccccaacactaaacctcacctttttgtccccgctccctcccctagagatgggtgcagaaaccaccgctcaatattcaacgccccctcgttgattcagcaggccccaggccgaaagccaggcaccaggcagagacatcacaaagattggtggggatcagtcagcctcggaaccccttggaagagctcaggcctagccctaggggtcaaaatgtggggcctgggccccctgcccagacaggtacctgttggagccatggtaacacggcctccatggctgagtaggggactaggaagggtaaaagtggggttttggggttttgcactcactcctgctgtctcctacttactgtgatagtcctggtcccagctcctggaaagctctttgctcttagaagatctccctttcctccagcaaaatgtcatctcgccaggtgccatggcttgtacctgtaatcacagctactcaggaggctgaagcaggaggatcactggaggccaggagttggagaccagcctggatgacagagggagatcccatctctttaaaaaataaataaataaataaa

SEQ ID NO: 195397 - DNA, 1011 bp, Homo sapiens
  Payload ID: 18580
  Gene Name: trophinin associated protein
  ENST ID: ENST00000546776
  CDS Start-End: 77-340
ctccagcagcacccgagagggtcaggagaaaagcggaggaagctgggtaggccctgaggggcctcggtaagccatcatgaccacccggcaagccacgaaggatcccctcctccggggtgtatctcctacccctagcaagattccggtacgctctcagaaacgcacgcctttccccactgttacatcgtgcgccgtggaccaggagaaccaagatccaaggagatgggtgcagaaaccaccgctcaatattcaacgccccctcgttgattcagcaggccccaggccgaaagccaggcaccaggcagagacatcacaaagattgaggctccagggaccatagagtttgtggctgaccctgcagccctggccaccatcctgtcaggtgagggtgtgaagagctgtcacctggggcgccagcctagtctggctaaaagagtactggttcgaggaagtcagggaggcaccacccagagggtccagggtgttcgggcctctgcatatttggcccccagaacccccacccaccgactggaccctgccagggcttcctgcttctctaggctggagggaccaggacctcgaggccggacattgtgcccccagaggctacaggctctgatttcaccttcaggaccttcctttcacccttccactcgccccagtttccaggagctaagaagggagacagctggcagcagccggacttcagtgagccaggcctcaggattgctcctggagaccccagtccagcctgctttctctcttcctaaaggagaacgcgaggttgtcactcactcagatgaaggaggtgtggcctctcttggtctggcccagcgagtaccattaagagaaaaccgagaaatgtcacataccagggacagccatgactcccacctgatgccctcccctgcccctgtggcccagcccttgcctggccatgtggtgccatgtccatcaccctttggacgggctcagcgtgtaccctccccaggccctccaactctggtttgt

SEQ ID NO: 195398 - DNA, 640 bp, Homo sapiens
  Payload ID: 18580
  Gene Name: trophinin associated protein
  ENST ID: ENST00000550346
  CDS Start-End: 100-640
tattttacaaactgagaaagtagctccagcagcacccgagagggtcaggagaaaagcggaggaagctgggtaggccctgaggggcctcggtaagccatcatgaccacccggcaagccacgaaggatcccctcctccggggtgtatctcctacccctagcaagattccggtacgctctcagaaacgcacgcctttccccactgttacatcgtgcgccgtggaccaggagaaccaagatccaaggggtgttcgggcctctgcatatttggcccccagaacccccacccaccgactggaccctgccagggcttcctgcttctctaggctggagggaccaggacctcgaggccggacattgtgcccccagaggctacaggctctgatttcaccttcaggaccttcctttcacccttccactcgccccagtttccaggagctaagaagggagacagctggcagcagccggacttcagtgagccaggcctcaggattgctcctggagaccccagtccagcctgctttctctcttcctaaaggagaacgcgaggttgtcactcactcagatgaaggaggtgtggcctctcttggtctggcccagcgagtaccattaagagaaaaccgagaaatgtcacataccaggg

SEQ ID NO: 195399 - DNA, 348 bp, Homo sapiens
  Payload ID: 18580
  Gene Name: trophinin associated protein
  ENST ID: ENST00000549275
  CDS Start-End: 120-326
ggccaatcaagagcttggcgtattttacaaactgagaaagtagctccagcagcacccgagagggtcaggagaaaagcggaggaagctgggtaggccctgaggggcctcggtaagccatcatgaccacccggcaagccacgaaggatcccctcctccggggtgtatctcctacccctagcaagattccggtacgctctcagaaacgcacgcctttccccactgttacatcgtgcgccgtggaccaggagaaccaagatccaaggcaaaatgtcatctcgccaggtgccatggcttgtacctgtaatcacagctactcaggaggctgaagcaggaggatcactggaggcc

SEQ ID NO: 195400 - DNA, 778 bp, Homo sapiens
  Payload ID: 18580
  Gene Name: trophinin associated protein
  ENST ID: ENST00000550709
  CDS Start-End: 99-479
attttacaaactgagaaagtagctccagcagcacccgagagggtcaggagaaaagcggaggaagctgggtaggccctgaggggcctcggtaagccatcatgaccacccggcaagccacgaaggatcccctcctccggggtgtatctcctacccctagcaagattccggtacgctctcagaaacgcacgcctttccccactgttacatcgtgcgccgtggaccaggagaaccaagatccaaggagatgggtgcagaaaccaccgctcaatattcaacgccccctcgttgattcagcaggccccaggccgaaagccaggcaccaggcagagacatcacaaagattggtggggatcagtcagcctcggaaccccttggaagagctcaggcctagccctaggggtcaaaatgtggggcctgggccccctgcccagacaggtacctgttggagccatggtaacacggcctccatggctgagtaggggactaggaagggtaaaagtggggttttggggttttgcactcactcctgctgtctcctacttactgtgatagtcctggtcccagctcctggaaagctctttgctcttagaagatctccctttcctccagcaaaatgtcatctcgccaggtgccatggcttgtacctgtaatcacagctactcaggaggctgaagcaggaggatcactggaggccaggagttggagaccagcctggatgacagagggagatcccatctctttaaaaaataaataaataaataaataataaatatcactt

SEQ ID NO: 195401 - DNA, 1469 bp, Homo sapiens
  Payload ID: 18580
  Gene Name: trophinin associated protein
  ENST ID: ENST00000551192
  CDS Start-End: 73-549
agcagcacccgagagggtcaggagaaaagcggaggaagctgggtaggccctgaggggcctcggtaagccatcatgaccacccggcaagccacgaaggatcccctcctccggggtgtatctcctacccctagcaagattccggtacgctctcagaaacgcacgcctttccccactgttacatcgtgcgccgtggaccaggagaaccaagatccaaggagatgggtgcagaaaccaccgctcaatattcaacgccccctcgttgattcagcaggccccaggccgaaagccaggcaccaggcagagacatcacaaagattggtggggatcagtcagcctcggaaccccttggaagagctcaggcctagccctaggggtcaaaatgtggggcctgggccccctgcccagacagaggctccagggaccatagagtttgtggctgaccctgcagccctggccaccatcctgtcagggtgttcgggcctctgcatatttggcccccagaacccccacccaccgactggaccctgccagggcttcctgcttctctaggctggagggaccaggacctcgaggccggacattgtgcccccagaggctacaggctctgatttcaccttcaggaccttcctttcacccttccactcgccccagtttccaggagctaagaagggagacagctggcagcagccggacttcagtgagccaggcctcaggattgctcctggagaccccagtccagcctgctttctctcttcctaaaggagaacgcgaggttgtcactcactcagatgaaggaggtgtggcctctcttggtctggcccagcgagtaccattaagagaaaaccgagaaatgtcacataccagggacagccatgactcccacctgatgccctcccctgcccctgtggcccagcccttgcctggccatgtggtgccatgtccatcaccctttggacgggctcagcgtgtaccctccccaggccctccaactctgacctcatattcagtgttgcggcgtctcaccgttcaacctaaaacccggttcacacccatgccatcaacccccagagttcagcaggcccagtggctgcgtggtgtctcccctcagtcctgctctgaagatcctgccctgccctgggtaagtatcagaagcttccccctactgagatcccttgccctgtgctgccagcctggaggcccaggagtttgaggcacacgtgctttctgggccaggcatggtggctcacacctgtaatcccagcactttgggaggctgaggtaggaggattgcttgagctcagatctttgagaccagcctgggcaacatagtgagaccctgtctccactaaaattttaaaaattagaaagtgctctctggaaaagctgcctaactctcactgcttctctgctgcccctcctaatgtacatctagggcctctcagttaggggcttcaatccattcctcatga

SEQ ID NO: 195402 - DNA, 6484 bp, Homo sapiens
  Payload ID: 18581
  Gene Name: trophoblast glycoprotein
  Uniprot ID: Q13641
  ENST ID: ENST00000369750
  CDS Start-End: 618-1880
gttaatttccaccaggaggaggcgcgcagcccagctcccctagtctctcttcttaaatccccctacctacggctgccgaggttggccgcgcgtcgggaatctccccgacagtcctggccctcccccgccccccgggttggtttttcccagctgcggaggttgggaggttgggccaggggctggggtgcgaagagagtcggcgcccgcaacgcggagccgggaagtcgtcgctactctggtggaactcagagttggttctggaggcggcggacgcggaggtccctcagaggatccagcgaggggcgccaacaagaggcgaagaggtggcaccagggcggcggcaggaagaggagcgggagcaggagcgcggagcggagcgtcccgacccgccgtgcgtactttctggagggaaggggcgggggaatcggcccctgagggaagcgcccggtggcgagggggttagccaagttccggctgcggcgccactccctcggttccacgagaggaaagttttttttttccagacgcttccgccggctcgcgccctccgggcccagcctcccgagccttcggagcgggcgccgtcccagcccagctccggggaaacgcgagccgcgatgcctggggggtgctcccggggccccgccgccggggacgggcgtctgcggctggcgcgactagcgctggtactcctgggctgggtctcctcgtcttctcccacctcctcggcatcctccttctcctcctcggcgccgttcctggcttccgccgtgtccgcccagcccccgctgccggaccagtgccccgcgctgtgcgagtgctccgaggcagcgcgcacagtcaagtgcgttaaccgcaatctgaccgaggtgcccacggacctgcccgcctacgtgcgcaacctcttccttaccggcaaccagctggccgtgctccctgccggcgccttcgcccgccggccgccgctggcggagctggccgcgctcaacctcagcggcagccgcctggacgaggtgcgcgcgggcgccttcgagcatctgcccagcctgcgccagctcgacctcagccacaacccactggccgacctcagtcccttcgctttctcgggcagcaatgccagcgtctcggcccccagtccccttgtggaactgatcctgaaccacatcgtgccccctgaagatgagcggcagaaccggagcttcgagggcatggtggtggcggccctgctggcgggccgtgcactgcaggggctccgccgcttggagctggccagcaaccacttcctttacctgccgcgggatgtgctggcccaactgcccagcctcaggcacctggacttaagtaataattcgctggtgagcctgacctacgtgtccttccgcaacctgacacatctagaaagcctccacctggaggacaatgccctcaaggtccttcacaatggcaccctggctgagttgcaaggtctaccccacattagggttttcctggacaacaatccctgggtctgcgactgccacatggcagacatggtgacctggctcaaggaaacagaggtagtgcagggcaaagaccggctcacctgtgcatatccggaaaaaatgaggaatcgggtcctcttggaactcaacagtgctgacctggactgtgacccgattcttcccccatccctgcaaacctcttatgtcttcctgggtattgttttagccctgataggcgctattttcctcctggttttgtatttgaaccgcaaggggataaaaaagtggatgcataacatcagagatgcctgcagggatcacatggaagggtatcattacagatatgaaatcaatgcggaccccagattaacgaacctcagttctaactcggatgtctgagaaatattagaggacagaccaaggacaactctgcatgagatgtagacttaagctttatccctactaggcttgctccactttcatcctccactatagatacaacggactttgactaaaagcagtgaaggggatttgcttccttgttatgtaaagtttctcggtgtgttctgttaatgtaagacgatgaacagttgtgtatagtgttttaccctcttctttttcttggaactcctcaacacgtatggagggatttttcaggtttcagcatgaacatgggcttcttgctgtctgtctctctctcagtacagttcaaggtgtagcaagtgtacccacacagatagcattcaacaaaagctgcctcaactttttcgagaaaaatactttattcataaatatcagttttattctcatgtacctaagttgtggagaaaataattgcatcctataaactgcctgcagacgttagcaggctcttcaaaataactccatggtgcacaggagcacctgcatccaagagcatgcttacattttactgttctgcatattacaaaaaataacttgcaacttcataacttctttgacaaagtaaattacttttttgattgcagtttatatgaaaatgtactgatttttttttaataaactgcatcgagatccaaccgactgaattgttaaaaaaaaaaaaaataaagattcttaaaagaattacagtgtgtgcaagtttgctttgaaaaaaggatgaagggcaggagtattcaatggtcttggttccgatgataattattacttaacatagctgagaatcaaactgtagcaatgtctaatataaatagacttgggagatcgttttgaaatggtggatccttttagtatttaaatggagagtttgagtattcatgtgactgtatggtcccaaagttaatgctatttatgaaacagttttgtaagaacataatgaagttggtaaaagctaagcgttctgcacaataaacagttcccagtttggggctttttcaaggctaatgaagttattgttggtctagaaaaatagtatttacttaataaaactctgtttgaaattgttctgtggatttttagagcagaatttgaaacaaatgtaatgcaaataaatataaagataaagtgtcttaaagacaatattctgaaataaaagatataaaatataatttaaaaaatatttctcaatgtcttaatgtaaattgaaacttagattttcttgaggatattttcaaaaaaacatttaaagtggaacataaatgttctttagtttatcagagacccagctaatatgtttaaaaagttgacttgacatggttgaatatgaacttgaggaaataaccacagataaatgtctacatctgtaaacacgtgtctcaagtatttataggttcttatcttcagttcagtgtttaagaatttgaggatattttgattttagctaagctgttcataatgtaagtatatacacctttgtgaagaataaatcacatttaggtgtaaatacaggcaatcattaattgatacatccataatatacaaggcttttattattttttcagtttattatctgtcatttaatctgaaaagtaaattccattaatcagtcttcaggctcttttatcaagtgatttaaatgtagccattattgcttaactgaaagtattaggtaaacttgcatcagtaagtcttagggcttgcttttcctttgaactggttatgtccttcagtgctttatgtttgaaataaaatctacattttcatatttttataaataaaataggatcagatagtattttaggttctagaaatctttgctgattccttctttgaattaaattcagaaattttcaaagtagggctaaaaataagtaaatcttcctttttataggttagaatatatagtcagaatacaaagctgtaattccttaaattccatcaggcttgttttgtgaaatatagtatttattatttaagggttatatttcagatcctataattacctcagaaaaagctaaatatttggcacttaaaattccatcaaacagtttaagtgttcatcagaaattcctaaactgtctggttgccattatttggtaagaacaatgagatactaatctgtcaaaaatagtgaccactatcttagtaaactgttgatggacttagtaagtcttctgatattgtaggaaacaaattataatattgatagagcctctattgagaagaattgtttcttcatcacatgataatctaacagtttaaagtggagctttatctaagaaccagggaagcagtagattcattagtctagcttttctcatcaactctttgaagcaatgatgaatctgataaagtgaagccaagttttccctgttaggtagatggcttctttgaagttataatttattgcttctttttcatccccctacttattctcttgtttggactttccaattgctactgctttgttttccatcacatcactccttcctgttctccaaaatatggaaataaaaaagtcaattaaaagaacaccttattcttaagataaaaaattgttattatttgacaactaattaatgttttgcagccctaatattcttaagtctataagcttataaaacattctaagttccttggaagatagaggctatataaattcaataagtataagggaatatgggaaaaataaaagtatcactttatttaaaaataagacaagtctgtttgttttaaatactgttcttactattaatgcattgttgactctagaaacctgcaagtatccatttttaaaattttattttagttggtaatactctttattactgaacgtaaaattttcaacataaaacacccttcatttatcctttacaagtttcatttgaagaaagttagaaaaaatacttagaaattcaaggacttgatatatcccttaatttagaaagctattcaactatcccataaatttctatttaaagtagcaaaaattttaggataatacagctatttggccctgaattataactgccccctttgattgtaaccattcagtttgcagcattcgtttttgtaatagcagtttggctgctatgggtgtgattcaatggtaacctacaaggcaaatttgtacaggagctgacagatttttctaacaaaataaggagactttgaagcacattgaataggagtttttaaatgaataggattttttaaaggaaaaagagtaggagcttgggggggaaggctggttgaaataaatgagcaaatcacaaataataaatcctttagaaataccttgattggcagtaagtgtggattatgctcatctcagtatttaattagaaataacttacctttgtcttttgtctttttaattaaagtggctgtaaaaaagaaggtccagatgaactgagattgtttgcttaggaattctgttttactcttttccttttacctgatgttctaaaacagggcttaccttgttgaggaccttagaggctttgcaattctagattgtgattctttcatatcattttagtttttctcccaagactacactaaaggagacatcacgagatttgcaaggttaaaaacaattctgcacgtgcttcctcctgctcccaaatccggtcatccacctttcagagcagcaccgtaaagtgaagacagacatttattagatgaaattctggtttcacttttacacttgtgcaagcatttttaacagtaaaggagaggaaagggaggaatttatatttctagataatatatgaaaattaccttgatattgtatttttaagatctttcaccaatactgcagtgctgcactagaaataattagtttaagaaaatacattcaacattgtccaggtgatcctgtcaccttttagatgacgaaaaacatcttgaggatgttttgtacagttattttcccattgttactcttagagacttttgtttcaaaaaggcaggctcattttattttgttttatcttagaacattttagcagctctttgtcatgggttaaaaaaatctagaattaaaaaaatgtttaatatatgatttatataattttgacaagaatacaaattcttagtcgttcaaaattggaagcgctcttagaagtgtcaagctcagctttccattccacaaatgaagtaactggtaactgtgacttattatgttatacagtgacagttattatgttatacagtgtcagttatacagtgacaaccaggacaaaatcctagggttctagattccccttctggtgctctttttaccagatgatggcattactaattgcctaccttgaggcctttgaaatcaccatgtctgataaaaacatgcaattgctttggtgaatttgtttgttttattgttgttgctttgagtgaatgcttcagtttgctctagattttactttgttaaaaattaccatgttttaacccccgaaaacatttaatgtttttgaaatgattttttcataacaatcttatgagtctattatataataggaagtattttggaaatttaatggtgatatttctttggaaaagaaaaataaaaactctggaatgca

SEQ ID NO: 195403 - DNA, 2881 bp, Homo sapiens
  Payload ID: 18581
  Gene Name: trophoblast glycoprotein
  Uniprot ID: Q13641
  ENST ID: ENST00000543496
  CDS Start-End: 426-1688
acccggaggccgaccttccgccgaggcggtgcaggaaggaacgggagagggagaagtttggtagggaaggaattggggattaagcggtccctcagaggatccagcgaggggcgccaacaagaggcgaagaggtggcaccagggcggcggcaggaagaggagcgggagcaggagcgcggagcggagcgtcccgacccgccgtgcgtactttctggagggaaggggcgggggaatcggcccctgagggaagcgcccggtggcgagggggttagccaagttccggctgcggcgccactccctcggttccacgagaggaaagttttttttttccagacgcttccgccggctcgcgccctccgggcccagcctcccgagccttcggagcgggcgccgtcccagcccagctccggggaaacgcgagccgcgatgcctggggggtgctcccggggccccgccgccggggacgggcgtctgcggctggcgcgactagcgctggtactcctgggctgggtctcctcgtcttctcccacctcctcggcatcctccttctcctcctcggcgccgttcctggcttccgccgtgtccgcccagcccccgctgccggaccagtgccccgcgctgtgcgagtgctccgaggcagcgcgcacagtcaagtgcgttaaccgcaatctgaccgaggtgcccacggacctgcccgcctacgtgcgcaacctcttccttaccggcaaccagctggccgtgctccctgccggcgccttcgcccgccggccgccgctggcggagctggccgcgctcaacctcagcggcagccgcctggacgaggtgcgcgcgggcgccttcgagcatctgcccagcctgcgccagctcgacctcagccacaacccactggccgacctcagtcccttcgctttctcgggcagcaatgccagcgtctcggcccccagtccccttgtggaactgatcctgaaccacatcgtgccccctgaagatgagcggcagaaccggagcttcgagggcatggtggtggcggccctgctggcgggccgtgcactgcaggggctccgccgcttggagctggccagcaaccacttcctttacctgccgcgggatgtgctggcccaactgcccagcctcaggcacctggacttaagtaataattcgctggtgagcctgacctacgtgtccttccgcaacctgacacatctagaaagcctccacctggaggacaatgccctcaaggtccttcacaatggcaccctggctgagttgcaaggtctaccccacattagggttttcctggacaacaatccctgggtctgcgactgccacatggcagacatggtgacctggctcaaggaaacagaggtagtgcagggcaaagaccggctcacctgtgcatatccggaaaaaatgaggaatcgggtcctcttggaactcaacagtgctgacctggactgtgacccgattcttcccccatccctgcaaacctcttatgtcttcctgggtattgttttagccctgataggcgctattttcctcctggttttgtatttgaaccgcaaggggataaaaaagtggatgcataacatcagagatgcctgcagggatcacatggaagggtatcattacagatatgaaatcaatgcggaccccagattaacgaacctcagttctaactcggatgtctgagaaatattagaggacagaccaaggacaactctgcatgagatgtagacttaagctttatccctactaggcttgctccactttcatcctccactatagatacaacggactttgactaaaagcagtgaaggggatttgcttccttgttatgtaaagtttctcggtgtgttctgttaatgtaagacgatgaacagttgtgtatagtgttttaccctcttctttttcttggaactcctcaacacgtatggagggatttttcaggtttcagcatgaacatgggcttcttgctgtctgtctctctctcagtacagttcaaggtgtagcaagtgtacccacacagatagcattcaacaaaagctgcctcaactttttcgagaaaaatactttattcataaatatcagttttattctcatgtacctaagttgtggagaaaataattgcatcctataaactgcctgcagacgttagcaggctcttcaaaataactccatggtgcacaggagcacctgcatccaagagcatgcttacattttactgttctgcatattacaaaaaataacttgcaacttcataacttctttgacaaagtaaattacttttttgattgcagtttatatgaaaatgtactgatttttttttaataaactgcatcgagatccaaccgactgaattgttaaaaaaaaaaaaaataaagattcttaaaagaattacagtgtgtgcaagtttgctttgaaaaaaggatgaagggcaggagtattcaatggtcttggttccgatgataattattacttaacatagctgagaatcaaactgtagcaatgtctaatataaatagacttgggagatcgttttgaaatggtggatccttttagtatttaaatggagagtttgagtattcatgtgactgtatggtcccaaagttaatgctatttatgaaacagttttgtaagaacataatgaagttggtaaaagctaagcgttctgcacaataaacagttcccagtttggggctttttcaaggctaatgaagttattgttggtctagaaaaatagtatttacttaataaaactctgtttgaaattgttctgtggatttttagagcagaatttgaaacaaatgtaatgcaaataaatataaagataaagtgtcttaaagacaatattctgaaataaaagatataaaatataatttaaa

SEQ ID NO: 195404 - DNA, 3392 bp, Homo sapiens
  Payload ID: 18581
  Gene Name: trophoblast glycoprotein
  Uniprot ID: Q13641
  ENST ID: ENST00000535040
  CDS Start-End: 937-2199
tttctctctctctctctcttaaagttggcgcgctctcttcacaagttccatcactacccaagaagtgagggggcgggggggacaggcgggaaggcattaattacacctaaatctgaagtttgcggcctcaagtaccactttgatggggagagcttctgaagcttccatacaacctgccgtgcctttgctgctgccgcagtagattttcagctcatttctttctgctgctgcttcgcgctgctctgtcatgcctaaatctatctcgtcactgccaaaggtgcctgaatcagggtgaattccacgagattcaccagcggttttgctccagtccaaggaggaggcgcgcagcccagctcccctagtctctcttcttaaatccccctacctacggctgccgaggttggccgcgcgtcgggaatctccccgacagtcctggccctcccccgccccccgggttggtttttcccagctgcggaggttgggaggttgggccaggggctggggtgcgaagagagtcggcgcccgcaacgcggagccgggaagtcgtcgctactctggtggaactcagagttggttctggaggcggcggacgcggaggtccctcagaggatccagcgaggggcgccaacaagaggcgaagaggtggcaccagggcggcggcaggaagaggagcgggagcaggagcgcggagcggagcgtcccgacccgccgtgcgtactttctggagggaaggggcgggggaatcggcccctgagggaagcgcccggtggcgagggggttagccaagttccggctgcggcgccactccctcggttccacgagaggaaagttttttttttccagacgcttccgccggctcgcgccctccgggcccagcctcccgagccttcggagcgggcgccgtcccagcccagctccggggaaacgcgagccgcgatgcctggggggtgctcccggggccccgccgccggggacgggcgtctgcggctggcgcgactagcgctggtactcctgggctgggtctcctcgtcttctcccacctcctcggcatcctccttctcctcctcggcgccgttcctggcttccgccgtgtccgcccagcccccgctgccggaccagtgccccgcgctgtgcgagtgctccgaggcagcgcgcacagtcaagtgcgttaaccgcaatctgaccgaggtgcccacggacctgcccgcctacgtgcgcaacctcttccttaccggcaaccagctggccgtgctccctgccggcgccttcgcccgccggccgccgctggcggagctggccgcgctcaacctcagcggcagccgcctggacgaggtgcgcgcgggcgccttcgagcatctgcccagcctgcgccagctcgacctcagccacaacccactggccgacctcagtcccttcgctttctcgggcagcaatgccagcgtctcggcccccagtccccttgtggaactgatcctgaaccacatcgtgccccctgaagatgagcggcagaaccggagcttcgagggcatggtggtggcggccctgctggcgggccgtgcactgcaggggctccgccgcttggagctggccagcaaccacttcctttacctgccgcgggatgtgctggcccaactgcccagcctcaggcacctggacttaagtaataattcgctggtgagcctgacctacgtgtccttccgcaacctgacacatctagaaagcctccacctggaggacaatgccctcaaggtccttcacaatggcaccctggctgagttgcaaggtctaccccacattagggttttcctggacaacaatccctgggtctgcgactgccacatggcagacatggtgacctggctcaaggaaacagaggtagtgcagggcaaagaccggctcacctgtgcatatccggaaaaaatgaggaatcgggtcctcttggaactcaacagtgctgacctggactgtgacccgattcttcccccatccctgcaaacctcttatgtcttcctgggtattgttttagccctgataggcgctattttcctcctggttttgtatttgaaccgcaaggggataaaaaagtggatgcataacatcagagatgcctgcagggatcacatggaagggtatcattacagatatgaaatcaatgcggaccccagattaacgaacctcagttctaactcggatgtctgagaaatattagaggacagaccaaggacaactctgcatgagatgtagacttaagctttatccctactaggcttgctccactttcatcctccactatagatacaacggactttgactaaaagcagtgaaggggatttgcttccttgttatgtaaagtttctcggtgtgttctgttaatgtaagacgatgaacagttgtgtatagtgttttaccctcttctttttcttggaactcctcaacacgtatggagggatttttcaggtttcagcatgaacatgggcttcttgctgtctgtctctctctcagtacagttcaaggtgtagcaagtgtacccacacagatagcattcaacaaaagctgcctcaactttttcgagaaaaatactttattcataaatatcagttttattctcatgtacctaagttgtggagaaaataattgcatcctataaactgcctgcagacgttagcaggctcttcaaaataactccatggtgcacaggagcacctgcatccaagagcatgcttacattttactgttctgcatattacaaaaaataacttgcaacttcataacttctttgacaaagtaaattacttttttgattgcagtttatatgaaaatgtactgatttttttttaataaactgcatcgagatccaaccgactgaattgttaaaaaaaaaaaaaataaagattcttaaaagaattacagtgtgtgcaagtttgctttgaaaaaaggatgaagggcaggagtattcaatggtcttggttccgatgataattattacttaacatagctgagaatcaaactgtagcaatgtctaatataaatagacttgggagatcgttttgaaatggtggatccttttagtatttaaatggagagtttgagtattcatgtgactgtatggtcccaaagttaatgctatttatgaaacagttttgtaagaacataatgaagttggtaaaagctaagcgttctgcacaataaacagttcccagtttggggctttttcaaggctaatgaagttattgttggtctagaaaaatagtatttacttaataaaactctgtttgaaattgttctgtggatttttagagcagaatttgaaacaaatgtaatgcaaataaatataaagataaagtgtcttaaagacaatattctgaaataaaagatataaaatataatttaaa

SEQ ID NO: 195405 - DNA, 2881 bp, Homo sapiens; identical to SEQ ID NO: 195403
  Payload ID: 18581
  Gene Name: Trophoblast glycoprotein
  ENST ID: ENST00000634826
  CDS Start-End: 426-1688

SEQ ID NO: 195406 - DNA, 6484 bp, Homo sapiens; identical to SEQ ID NO: 195402
  Payload ID: 18581
  Gene Name: Trophoblast glycoprotein
  ENST ID: ENST00000635036
  CDS Start-End: 618-1880

SEQ ID NO: 195407 - DNA, 3392 bp, Homo sapiens; identical to SEQ ID NO: 195404
  Payload ID: 18581
  Gene Name: Trophoblast glycoprotein
  ENST ID: ENST00000634817
  CDS Start-End: 937-2199

SEQ ID NO: 195408 - DNA, 2793 bp, Homo sapiens
  Payload ID: 18582
  Gene Name: trophoblast glycoprotein-like
  Uniprot ID: P0DKB5
  ENST ID: ENST00000562197
  CDS Start-End: 146-1294
ctcagactttcgagacagcgaacggaccgaccgggactgccagccgctccgggtcaaggactcgccccacccgtgccccccaccaggcgctcccaactcactggtgagcgcggcggcccgggcgctggatgcgggggcggccgcgatggccccgcgcgcgggacagccggggctccaggggctgctgctcgtggcggcggcgctgagccagcccgcggcaccctgccccttccagtgctactgcttcggcggccccaagctgctgctgcgctgcgcgtcgggagccgagctccgccagcctccgcgggacgtgccgcccgacgcgcgcaacctcaccatcgtaggcgccaacctgacggtgctgcgcgcggccgccttcgccggcggggacggggacggcgaccaggcggcgggcgtgcgcctgccgctcctgagcgcgctgcgcctcacgcacaaccacatcgaggtggtggaggacggcgccttcgacgggctgcccagcctggcggcgctcgacctcagccacaacccgctgcgcgccctgggcggcggcgccttccgcgggctgcccgcgctgcgctcgctgcagctcaaccacgcgctggtgcgcggcggccccgcgctgctggccgcgctggacgctgcgctggcaccgctggccgagcttcgcctgctgggcctagcgggcaacgcgctgagccgtctgccgccagccgccctgcgcctggcgcgcctggagcagctggacgtgcgcctcaacgcgctggccggcctggaccccgacgagctgcgcgcgctggagcgcgatggcggcctccccgggccgcgcctgctgctcgccgacaaccccctgcgctgcggctgtgccgcacgccccctgctggcctggctgcgcaacgccacggagcgcgtgcccgactcgcggcgcctgcgctgcgccgccccgcgggcgctgctagaccggccgctactggacctggacggggcgcggcttcgctgcgcggacagcggcgccgacgctcgcggagaggaggcggaggccgccggcccggagctggaagcctcctacgtgttcttcgggctggtgctggcactcatcggcctcatcttcctcatggtgctctacctaaaccgccgcggcatccagcgctggatgcgcaacctgcgcgaggcgtgccgggaccagatggagggctaccactaccgctacgagcaggacgccgacccgcgccgcgcgcccgcgcccgccgcgcccgcgggctcccgcgccacctccccgggctcggggctctgagcggcgcccccgggctcggggcttcccttgcctggcccgaagccgtggagatgagacacccgcgagccccgagctctgagaccttcccctgactcggaggcgctaagccgtaccctctcgttcccgcctccgagagctcccaccgtcaaagacccagagatagccggtccgaatccagaaaccccgcctgcccaccctagtttccgaaacctccctcctgaaccactgaaagtccgttccccgtctcggagctcacacagagaatctgtccttcaaggccaaagctctgagacttgcccccagcaccctgtgcttggagctccgacacccgagactgcactgacctccctcgccagctcggagccctcagtcccctccggggcttgagggcccttccatcccattctggactcgaagcacagcacccccatcagaatggttttgtggattttgagccctttgtcccatcccagagctcagagccctccatcctgcatggaggcccaaccctggggctctgaggattgggcaccctcccctcatctaagaatatatttcatacccctgcccccccttcacccacccccgcctctggctcaggcccttcccttcctcggctcaggcatggggctcagctcctagtctgtccctcccatcccagggacaagcacagcccatctagccttagtgtggagccaactctcagcctttcccaccagggcgctgacctcccgatactcagtgctggtccccagtctcagactctcagctcttcaccccgatctgactttcgtcctcctgcccaagcctttggctcttgaccccccccccatacccaatgctggcactcagcacccacccctgccattcactagtcaaggtccagtgaggaatccgtccctgggatgtcctcatccccttttcgtcccaggacgagctcttcagtcctgccggataggtgcaggtgccatgcacccctagtgcatactggcagatccttgtagggaaggagagagtcttgggtgtgtgaaagggatagtggggcatcgtggcctcagagaggggcaggaagtggggtctgaagggctggaagttgctgcccttcgatttctctatgctctctcccacccctgtggctcttcgcccttggggattccttgccaccaccgctaccaccaccacctcaccccgtgtatcttctgaaagagaagtaggtctttcctcctgcctcaggcacaagccctcctggttcagggtcagaagctcagcaccttgccttctccatgatcccaaagcacaattggtgagtgggggagaggaccccctctccctgactccccaccctctagatcaggcagaatggctggcctgtgctgcgtctgcacacaggaagtcaccttcctttaatatattggcttgaggcctgcctgccctccccatacccagaaaatctggatctcccttgagcagttttctataaagtctgcaataatctcaga

SEQ ID NO: 195409 - DNA, 3343 bp, Homo sapiens
  Payload ID: 18583
  Gene Name: tropomodulin 1
  Uniprot ID: P28289
  ENST ID: ENST00000259365
  CDS Start-End: 214-1293
agctcccgcccgcccgcggccgcccgggagctcgtccagccccgcgctgcgctcgcccgcccgctgcccgccggagcaccgcggcctccgcccgcgtccatctgcccgccgcccgcgcctgttccgcagcccgcgtccgcgccggccccacagctctgcgtccgggtattactcagcacagaaattcaggagacacagacaagttcttccacgatgtcgtacagacgagaactagagaaataccgtgacctggatgaagatgaaatccttggagccctaacagaggaagagctgaggaccctggaaaatgagctggatgagctggaccctgataatgcactgctgcctgcaggcctgaggcagaaggatcagaccaccaaggcgcccacgggcccctttaaaagagaggagctcttggatcacttggaaaagcaagcaaaggagtttaaggaccgagaagatctggtcccctacacaggggaaaaacgaggaaaggtctgggttcctaagcagaagccactggatcctgtgctggaaagtgtgacgctggaaccggagctggaggaagccttggcaaatgcttcagatgcagaactctgtgacattgcagcgatcctgggcatgcacacgctcatgagtaaccagcagtactaccaggccctgagcagcagctccatcatgaacaaggaggggctcaacagcgtgattaaacccacacaatacaagcctgtgcccgacgaagaaccaaattcaacagacgtagaggaaacgctggaacggataaagaacaacgacccaaaacttgaagaagttaacctcaataatatccggaatatccccatccccaccctcaaggcatatgcagaagccctgaaagaaaactcatatgtgaagaagttcagcatcgtggggacacggagtaatgaccccgtggcgtatgcccttgctgagatgctcaaggagaacaaggtgttgaagacactgaatgtggaatccaacttcatttctggagctgggattctgcgcctggtagaagccctcccatacaacacttctctggtggaaatgaaaattgacaaccagagccagcccctgggcaacaaagtggaaatggagattgtgagcatgttggaaaaaaacgcaacacttctcaaattcggctaccactttacccagcaaggaccccggcttcgggcatccaacgcaatgatgaacaacaatgaccttgtgaggaagaggaggcttgcggacctgactgggcccatcattcccaagtgccggagtggtgtctagtgtgtggcggtggagtccatgcctttgaactggatgtgttctattgatgacctgtgctctgcaggggaaaccagaaggcaaaatgctggcagcatgaaacccttttgtggttcagttctttatgcactaaggttttaggttgactagtggttgtagttgaaaattttataaaataccgttaatgtgaagtttttctttagtcacagaagttgaatctggttattatttaaaaactagaagcccccaaaccagcagatcttactgaagatgatgttccagcagcagcgacttagccccaggagcccagtttcaatggccttgctgtgtggtgtttcaagtgcatttaaaatgtgtgacacagaaacggcacactcttccacatgcttttgaagtattataaaacactttattacaaatttgtcttagctattagcaaataaaactgattatcattctttattaaccctccttggaattttgaaaacctcgattaaagttgccaaattgattactggatccagaacacaattttcccctcagaacagatagacagactgaagccactgaactctgccaggagtcaacatgagattccttttgctggatatgcagaaatgataggaaaaaaaccaatggtgaaatttcaagtttcaaaaaccaacctttcattaccaatcccaggcaacaaacatgtccctgagtgttctttaagaacatttgggatttatgtacaatttaatactggagttagaactttttccttattgaatgccaaccttatgatggatgtgaaaatctacggccaaatacttttgaaaacacctttctatattgcacagtgggcaaatggcttatgtgaggtaagacactagagggataaatttccagatcaacatggctatggtatttagtaatggcccagcttagagacttcagctactgatctcatcacttattagacaaattgctgctgaccttacgcctgtatattaagcctccgcaggatgccggacaatggtgaagaaactccagatatcaaggaattgggaaatcctggccaaaccaccccaagatgattacactgaaatgtagtattagtactgctgccagatctctttttaacatcatgtgcgtctcttgggatccagcaaaagtgttaagccacaatgcccttgtgccttttaatataccacagtgccagttaaactaatatttttgtttgttgcttttgggagttattttcattagtgatttcagcaaatctcatgataaaggacaaggtcaagaactccagagcactgagcagagaggctggtgatgaaaaggtgaaggcctgcgcactgaactgtaaggcagtgggcagtacagggtaactggaggcggggccagggcctcagcgctatggaagagtgtccactgaggctgcacatggcccaggagtggcaccatgttgcagggacaaccatccccatttggcttctccttaaaacacaattgcagctgcattctgcatcgctgaaaactgcaatataatattaaatctgttggtctatgcatggctgcgtatgtgtttcttggaacctgtgtgacagggacatgtgcctggcacactggccagaagactgggcagccaccatggcagtgctggatgacctcagtaagaatgtgtcatgtattccaggtgctgatctaaaaactgtggctcaaatgtcaccgagcttatatgaagctcccagagagaacatttaaaagctcagagagtaagtgctggggaaagcagagctatcagaggaaatctctcatagaaacgaaaccaaaccaacagaaaatgaagaaggccacatctttaaggccacctctgcctctatcagatgagctgctggtctagatcaggggctggcaaacttttctgtaaaaggccagacagtaaaaatttccgattttgcaggccacatagtgtctgttgcaactattcaactctgccatagatcatgtgtaaaggaatgggtgtggctgttcaataaactatacagttgacccttgaacaata

SEQ ID NO: 195410 - DNA, 2516 bp, Homo sapiens
  Payload ID: 18583
  Gene Name: tropomodulin 1
  Uniprot ID: P28289
  ENST ID: ENST00000375175
  CDS Start-End: 262-960
gtgccaggtcagagctgcaactctgtgctacgtttctgtgtggctttcttgaaactacttctctttatttttgttggcgtggctatttattgttatctgtaacgacgcaatatgctgccgaagtctgggaaggagaggggagctgtaagtctacaccagtgttaactggctaaccttggatgcctgtcatttgatgttggacatttgaaagatggcagcatctctggggaaggagggactgaacacttttgaccacctaccatgtcccaggttctatcgatcctgggcatgcacacgctcatgagtaaccagcagtactaccaggccctgagcagcagctccatcatgaacaaggaggggctcaacagcgtgattaaacccacacaatacaagcctgtgcccgacgaagaaccaaattcaacagacgtagaggaaacgctggaacggataaagaacaacgacccaaaacttgaagaagttaacctcaataatatccggaatatccccatccccaccctcaaggcatatgcagaagccctgaaagaaaactcatatgtgaagaagttcagcatcgtggggacacggagtaatgaccccgtggcgtatgcccttgctgagatgctcaaggagaacaaggtgttgaagacactgaatgtggaatccaacttcatttctggagctgggattctgcgcctggtagaagccctcccatacaacacttctctggtggaaatgaaaattgacaaccagagccagcccctgggcaacaaagtggaaatggagattgtgagcatgttggaaaaaaacgcaacacttctcaaattcggctaccactttacccagcaaggaccccggcttcgggcatccaacgcaatgatgaacaacaatgaccttgtgaggaagaggaggcttgcggacctgactgggcccatcattcccaagtgccggagtggtgtctagtgtgtggcggtggagtccatgcctttgaactggatgtgttctattgatgacctgtgctctgcaggggaaaccagaaggcaaaatgctggcagcatgaaacccttttgtggttcagttctttatgcactaaggttttaggttgactagtggttgtagttgaaaattttataaaataccgttaatgtgaagtttttctttagtcacagaagttgaatctggttattatttaaaaactagaagcccccaaaccagcagatcttactgaagatgatgttccagcagcagcgacttagccccaggagcccagtttcaatggccttgctgtgtggtgtttcaagtgcatttaaaatgtgtgacacagaaacggcacactcttccacatgcttttgaagtattataaaacactttattacaaatttgtcttagctattagcaaataaaactgattatcattctttattaaccctccttggaattttgaaaacctcgattaaagttgccaaattgattactggatccagaacacaattttcccctcagaacagatagacagactgaagccactgaactctgccaggagtcaacatgagattccttttgctggatatgcagaaatgataggaaaaaaaccaatggtgaaatttcaagtttcaaaaaccaacctttcattaccaatcccaggcaacaaacatgtccctgagtgttctttaagaacatttgggatttatgtacaatttaatactggagttagaactttttccttattgaatgccaaccttatgatggatgtgaaaatctacggccaaatacttttgaaaacacctttctatattgcacagtgggcaaatggcttatgtgaggtaagacactagagggataaatttccagatcaacatggctatggtatttagtaatggcccagcttagagacttcagctactgatctcatcacttattagacaaattgctgctgaccttacgcctgtatattaagcctccgcaggatgccggacaatggtgaagaaactccagatatcaaggaattgggaaatcctggccaaaccaccccaagatgattacactgaaatgtagtattagtactgctgccagatctctttttaacatcatgtgcgtctcttgggatccagcaaaagtgttaagccacaatgcccttgtgccttttaatataccacagtgccagttaaactaatatttttgtttgttgcttttgggagttattttcattagtgatttcagcaaatctcatgataaaggacaaggtcaagaactccagagcactgagcagagaggctggtgatgaaaaggtgaaggcctgcgcactgaactgtaaggcagtgggcagtacagggtaactggaggcggggccagggcctcagcgctatggaagagtgtccactgaggctgcacatggcccaggagtggcaccatgttgcagggacaaccatccccatttggcttctccttaaaacacaattgcagctgcattctgcatcgctgaaaactgcaatataatattaaatctgttggtctatgca

SEQ ID NO: 195411 - DNA, 3259 bp, Homo sapiens
  Payload ID: 18583
  Gene Name: tropomodulin 1
  Uniprot ID: P28289
  ENST ID: ENST00000395211
  CDS Start-End: 137-1216
agacaaaacgatcgcggttaaagcttgcggctcagagcccacctggccgcgctgctgggaaacggacggagcggcgcttcaatcagaggtattactcagcacagaaattcaggagacacagacaagttcttccacgatgtcgtacagacgagaactagagaaataccgtgacctggatgaagatgaaatccttggagccctaacagaggaagagctgaggaccctggaaaatgagctggatgagctggaccctgataatgcactgctgcctgcaggcctgaggcagaaggatcagaccaccaaggcgcccacgggcccctttaaaagagaggagctcttggatcacttggaaaagcaagcaaaggagtttaaggaccgagaagatctggtcccctacacaggggaaaaacgaggaaaggtctgggttcctaagcagaagccactggatcctgtgctggaaagtgtgacgctggaaccggagctggaggaagccttggcaaatgcttcagatgcagaactctgtgacattgcagcgatcctgggcatgcacacgctcatgagtaaccagcagtactaccaggccctgagcagcagctccatcatgaacaaggaggggctcaacagcgtgattaaacccacacaatacaagcctgtgcccgacgaagaaccaaattcaacagacgtagaggaaacgctggaacggataaagaacaacgacccaaaacttgaagaagttaacctcaataatatccggaatatccccatccccaccctcaaggcatatgcagaagccctgaaagaaaactcatatgtgaagaagttcagcatcgtggggacacggagtaatgaccccgtggcgtatgcccttgctgagatgctcaaggagaacaaggtgttgaagacactgaatgtggaatccaacttcatttctggagctgggattctgcgcctggtagaagccctcccatacaacacttctctggtggaaatgaaaattgacaaccagagccagcccctgggcaacaaagtggaaatggagattgtgagcatgttggaaaaaaacgcaacacttctcaaattcggctaccactttacccagcaaggaccccggcttcgggcatccaacgcaatgatgaacaacaatgaccttgtgaggaagaggaggcttgcggacctgactgggcccatcattcccaagtgccggagtggtgtctagtgtgtggcggtggagtccatgcctttgaactggatgtgttctattgatgacctgtgctctgcaggggaaaccagaaggcaaaatgctggcagcatgaaacccttttgtggttcagttctttatgcactaaggttttaggttgactagtggttgtagttgaaaattttataaaataccgttaatgtgaagtttttctttagtcacagaagttgaatctggttattatttaaaaactagaagcccccaaaccagcagatcttactgaagatgatgttccagcagcagcgacttagccccaggagcccagtttcaatggccttgctgtgtggtgtttcaagtgcatttaaaatgtgtgacacagaaacggcacactcttccacatgcttttgaagtattataaaacactttattacaaatttgtcttagctattagcaaataaaactgattatcattctttattaaccctccttggaattttgaaaacctcgattaaagttgccaaattgattactggatccagaacacaattttcccctcagaacagatagacagactgaagccactgaactctgccaggagtcaacatgagattccttttgctggatatgcagaaatgataggaaaaaaaccaatggtgaaatttcaagtttcaaaaaccaacctttcattaccaatcccaggcaacaaacatgtccctgagtgttctttaagaacatttgggatttatgtacaatttaatactggagttagaactttttccttattgaatgccaaccttatgatggatgtgaaaatctacggccaaatacttttgaaaacacctttctatattgcacagtgggcaaatggcttatgtgaggtaagacactagagggataaatttccagatcaacatggctatggtatttagtaatggcccagcttagagacttcagctactgatctcatcacttattagacaaattgctgctgaccttacgcctgtatattaagcctccgcaggatgccggacaatggtgaagaaactccagatatcaaggaattgggaaatcctggccaaaccaccccaagatgattacactgaaatgtagtattagtactgctgccagatctctttttaacatcatgtgcgtctcttgggatccagcaaaagtgttaagccacaatgcccttgtgccttttaatataccacagtgccagttaaactaatatttttgtttgttgcttttgggagttattttcattagtgatttcagcaaatctcatgataaaggacaaggtcaagaactccagagcactgagcagagaggctggtgatgaaaaggtgaaggcctgcgcactgaactgtaaggcagtgggcagtacagggtaactggaggcggggccagggcctcagcgctatggaagagtgtccactgaggctgcacatggcccaggagtggcaccatgttgcagggacaaccatccccatttggcttctccttaaaacacaattgcagctgcattctgcatcgctgaaaactgcaatataatattaaatctgttggtctatgcatggctgcgtatgtgtttcttggaacctgtgtgacagggacatgtgcctggcacactggccagaagactgggcagccaccatggcagtgctggatgacctcagtaagaatgtgtcatgtattccaggtgctgatctaaaaactgtggctcaaatgtcaccgagcttatatgaagctcccagagagaacatttaaaagctcagagagtaagtgctggggaaagcagagctatcagaggaaatctctcatagaaacgaaaccaaaccaacagaaaatgaagaaggccacatctttaaggccacctctgcctctatcagatgagctgctggtctagatcaggggctggcaaacttttctgtaaaaggccagacagtaaaaatttccgattttgcaggccacatagtgtctgttgcaactattcaactctgccatagatcatgtgtaaaggaatgggtgtggctgttcaataaactatacagttgacccttg

SEQ ID NO: 195412 - DNA, 9191 bp, Homo sapiens
  Payload ID: 18584
  Gene Name: tropomodulin 2 (neuronal)
  Uniprot ID: Q9NZR1
  ENST ID: ENST00000249700
  CDS Start-End: 222-1277
gcgcgccccggcgccgcgcccggccgggagccgcctgttgatcgccgcgctcgccccggccacggcgccgcccctgttctcccggccccgctccaccggggctgacggactgacggccagcacagccggctccgggatgagcgcacggacggtattctgaagtctcaggaaactggaccatttaaatgtgcatggcccatgagaaaggcttataagaagccatggcactcccctttcaaaaagagctggagaaatacaagaacattgatgaagatgagcttcttggcaaactctcagaagaggaactgaaacagttggaaaatgttctagatgacctagatcctgagagtgccatgctgccagctggatttcgacagaaagaccagacacagaaggcagccaccggcccctttgaccgcgagcacctcctcatgtacctggagaaggaggctttggaacagaaagacagagaggactttgtgcccttcactggagaaaagaaagggagagtctttatccctaaagaaaagcctatagaaactcgtaaagaagaaaaagtgacccttgacccagaactggaagaagctttggccagtgcctctgacaccgaactctatgatcttgcagctgtccttggagtacacaatttgctcaacaatccaaagttcgatgaagaaacagccaacaataaaggtggcaaaggacctgtcagaaatgttgtcaaaggtgaaaaagtaaagccagtatttgaggaaccaccaaatcccacaaatgtggaaataagcctgcagcagatgaaagccaatgatcctagcttgcaagaagtcaacctcaacaacattaagaacattccaattccaaccctgagggaatttgcaaaggctctggagaccaacactcacgtgaagaagttcagcctggccgcaactcgcagcaatgaccctgtggccattgcttttgcagacatgctgaaagtaaacaagaccttgacaagtctaaacatagaatccaattttatcactggaactgggatcctggccctggtagaggcactgaaagaaaatgacaccttgacagaaatcaagattgacaaccagaggcagcagttgggaacagctgtagagatggaaattgcccagatgctggaggagaattcaaggatcctcaagtttggataccagtttaccaagcaagggccacgaacaagggtggcagctgccatcacaaagaataatgacctggttcgtaagaagagagttgaagcagaccgaaggtaaacttccttgaggagaagtgaagtttcactgtggtatggccattgaaaaacaaaaactcttcttcttccccatcaggaccattttatcaaagttcgttcatttccgttaaccacataactaataatttaattgttattcttttttagcactacttatttatcttggattttgtaatatatgcaattgttttatttgctcatgggcacttctggcaacttgacaaatggaccgatgcagattttagagagtgacgacatggaaaatgaatttaaccactttcttattgggttgtcttgctttcttacatgaacttgtttttttaatcactgaaaggaatttagtgtataatatgtgtttgtaactgtgattatgatagaggcctatctctgtttacatgcatagctttgagttaggctaaatacatcagaagtgttctactgaccacataagaagttagtattgccaatctttcactgcatgtgaaaatgtgaccaatttagcacaaattctctcttagttccagaaaaatcagtaaatgcacatgccctgttgattggagatcagtagtgtcatcttcataaagcaagacaacattatgacactttaaaacagtagcaaagaagtctatttattaacccacaaatgtagcatcaagccagactcacaggtagcaaaatgaattacacacctacttttactgactattcaacataaattgaatctttaacatgactttaaaggctatttacaaagctgttttaaagtttttcaaacatgatagaaattttctaaattttagtaagagagaagcttttaaaacagtacattcctgaataaaacaacaatattgtatcttaatcaaggctgtctgatgcagatgattgcattttttggcaaattttagaagcatttattgctttgtctttagtgtaacaagatcactggattaaatataaacattcaggttaattatctagatttttgtccacagtatatgatccatccagacatttgcaaacgtcaggagaaaaatgtgaattatttatccagatgcatgtcatctcaaggacaaagcctgtgaaagtacaagtgagatggttgcattgtagtatgcattaatctttcaatgtagtggtgtaaaaatgcagtgctaaactaatgaagcaggtgactgcagcctttggctcaagctcacaactctgataactgtcagtgcctgaggttgtgattggtgacattctgacactgcccaaggcaactcaccctctattcctcctttctcccctccctttcttccaattcattgtcttttttttcctcttttctctgtaatttgttactaaacaaattccagaatttgtttagtagctgagtgttcctgagttgcctagtagcaataaaacaagtgaataggaaaataattaatatattattctatttagcttgtaaaacacatggaatctgtttaagatagcccttgtaaaattgaacatttacctgtattgtaagtacccacatctgtgtctctgaagtcctttgaaacatctcattatcttgaaatttttttaatgtttgagaacaccataagcagaatattctaacacctttggcccctgaaaatcctttaattagtttatggcttcatctccttatctatttaaaaaacatagtaaataatgtttatggttttcagtctgatttttccttccctttcacccatttaggtgtgatgtgttggagtcaacttgtacaggcttgccaactgttatattttcaagaattttgcaaactggttgttcaatacagccattatttaaaattaaatgatgtgcacttacaactgaatgaattatattaaggacagaagtaacaaatactgtactcaaaaatcttacattttactattttctaacctcttagattatttacatctagtaggtatgtatgtagaaatattaccaaacagtatgctactgaacgtatcctctcaactccatgttcactaccttcttgttactacagtggcttgaaattggccatggtagaaatatttacaccacagaaattagcaatatgtaagaaattggggttttctccctctccagattgctggttgataaacattcatcagcacaccactgggtgaaattatacatttttttatacatatgtttcgcttatcatgttgccgaagggaagaacatttctcttagatgtcttttctcctctttggatttgttacaaacctgtttaagtgctgagtccctgacctgcctctccaagtaagcctttttcctttttttttttttttttcttactctcattcttgccttgactcttaaaatcctggaccctatagagcattccttgcagccccacagtgctgtgggctgggggctaaagcagttcttggcaaactctggcagaaagcaagaaaaaaagaatcagaattcaatcatggctgtttcttttgtacaagcagttgttgatagtattaaagcaagataatgggacattatcaaaaatatagcactgtttttaccttatgaaatagttgggttgcatgcaacagagtctatgaaatcaaatgttttttactaatcagtttgttttcttattacctgtgtttttaaagtggcttgaaaggtggcatttccatgagtgtgcacatattgatgataacccttagaaaaacatacacttgaggagcctatccatcatttaattagcctaggacttcatctccctctctgcccaaagtgtggaagtggtagctctttcatgatcatgggcacagttaatcctttgctatccattgtgatggggcataatgtatataaaatatttttctatgtatttgttctgccagatactgtgttgagatatttggcaatatctggataactgactgaagggagataacttctccccaggcctatctccctcccccttttagagttgtgcaggtccactttaagtgtaaaatcactcacctggacttgtgggcttgtatcaccaacatctattatggcacatgtagatgacatttaggagaaaaaccttagaagtctagaaatcatatgattagttcagcactgcagctccccatctgcttatagtgtataactggaagctctttcatcctcatcagcatgattaaatgacttcgtttctttcatctttggagggtataatgtaaataagtgtcgtgtgtgtatgtgtgtgtgtactgtcagatatctaactaggtatttggctacatctggacaactgattgaagggagatgctctctccccagtcctcttcccttgtcctttttagaattgctgcaggcccaggttaaatatgaaattactccctaggctttgcagtttatgttaccaaccaccacattttatagctatgtagaggatgactcttaggaaataaatattagaagcctagaaatcatttagttgttctagcaccaaatctatccatttgcctaatgtatttaacattccatcctcatcaacatgatgaagcccctttcttccatctttgtagggcacattgtatataaatattttgtacataaagatcatcaaataccataatggggtatttggcttcatctggaaaattgactggagggagatgctgtctcccagccctgcttccctcgtccctgtccaagttgctgcaggcccaggttagaagattaccaacctggaggggcatgcagttcatcttacaataaaagcccattcatttaaaaactcagaaatcatcccagtgcctgtactcctcaaaccaatttccctaagggaagactggcacaccagcccaaagagcaggtgcttctcttccaacagaaacatggcccctgacagggcaccagcattagggaaaccaatgtcctccgaatagctgccatgagaacatttcagatgctcaaactgaaaattcttaaaaccaatattaagcatcagcatgctttaagtgtaagatagccctttggaatttacaaacacatgtgcagctatttccttcttcacagatatgatgtactcagccccctcctaggcactacgaagaagacagaggaagcataaaaattctggactaatataattttatatgtgtttctgagattggggagtagactgagtgccttttttacaaagaagatcccatatttaattcaagtatttatagcatcagcaaaaatgggcagagggcgggaagttgagaacactaggttctgtgctatgttacctgtattcagtagaagtgtttctggagtcaggttttaagtcatgatcctgaagcttccttcccctcttccactaatgatgcaataatagctgttttcattttaacgagcagagaactaagaggaaaggtcctagctctgccttccacttgcagcttccctttacctcctcttattgctttcatctcaaatatccctgctactcaaccaatcctaaagctaaagtactgagatgcacacaaaggaaaggtgtgagagtgcttggaagcatccagctgagcccactggatgaaaatcagacgatagggcctcctgttgtaatatactagccagagaaaagcgccaagaacttcagggatattattcactgctttattgctccctaaccctagatcagattggattttactttgtagttcaggagttaagaagtcaaattgctgaccgaggtggggaaggatgatggaaattaaaggtttacatttgtttaatggcagaactgagatttgctcagcttatctctttcccatctgtctgtaatagcaatgactgaataatcagtagaccaatggaagaggagttgcaagtttaaatttgtaacctgactctgggttctgttctaggaatagtgcatgttttagaggctttgccagttgggatacattgttgacttgggggaggatgaaggagagaactgatgacctagacatagaaaagagtagttaactaactagatgttcttctgatctcttccatggtagacattctgagcacattggcccagttagttggtatggtgaaggggcaccgtactaacagatttggagactgaaacctaatcccatcaccaacacttagcaggtatatgatcatgggcaattcattcaattgcctgccaattatagactatatagggggaagagcactggatttggagtcaagaaacctggacacttggctccacacttccttagctgggtaactttgggcaaaccgcttggtctctcaagcctaaggttcttcagctataaaatgggaataatacttcactaactacctcacagagttgtggtaagaatataatcagataactggataaaaacactatataaactggaaagcgccgtacaaatgtgagagatcagttttattatcaaatcactgttttccactgcctcttgaatcggctttattctaaccaaccattacatctttctcatcttttggagtatgggtaattgaggcttgggtgtgtcatcagggactggagttatttcagctcccatgtagaggtgggagaggtggttgatggggcagtggaagttagataccagcgatgtatatggtaggacattttcctgggtcactttgacagtaccttgggaaattgtcagtccttgcagagggcctaggctgggcacaagggagaaagcgaacagttgactaagaattgaggggagggtctggagcgctactgccctcctgtcattgctgtgggtgggagaggctaagacttcaggtttgactggaggcctaggagagaagagtgtccttagggtttcaagaattttaatgcctagcagctgagtaacaggcattagttctgatagatagtgaaggggagaaagtgccacctgttgtgagatcacctctccagggcagcagctgccttgttatcaccagcaaccttagccctggtcagtaatatttctgctaagaaaggttttgaagcatggcctccaatgactttcataagcccttggaggcaggactgtgtctcatccatctttgtatcttcagtaccatcttgtaaggtgccttgtacatagtaggtgcttaatgaacaaatgttgcttgaatttagctgtcgtccagccccacagagttatgctccatttgccaccatgtgatatttttgagaaacaatagtgatttggatgccagctctatgtgactttgggcaagactctccatctatcttgtcttcatttcatctgtaaaatgaagtgagtagattcaatgctccctaaggtcccttccagctccaatacttgacaagcttgtgattctaaatcgtttccgttgcctctgaacatgggtgagtaatgcctccactgcagctgtttctctccaggaggctttgttcagaggaggtctgactattgcacagccagttttttcttcctcttcagcagttctttactgtcttcagaatggttctggataagcggccttttctgaaaggatatttaaaaatatatactatttaggctgggcccagtggctcatgcctgtaatcccagcactttgggaggtgaaggtgggtggatcacctgaggtcaggagttcaagaccagcctggccaacatggtgaaaccccgtctctactaaaaatacagaaattagctgggccctgtggcaagagcctgttatcccagctactggggaggctgaggcaggaaaatcgcttgaacccaggaggtggaggttgtagtgagccgagatcacaccactgcactccagcctgggtgacaagaacgaaactccatctcaaaaaataaaataaaatatatactatcttgctcctcagaaccagtggggaagaagagggaaggcaaagaaagaaactgagcatagtaaacacagcatttttttgtaggctcttatttaaaatgtgtgtgtgtgtgtgtatgtgtgtgtttctgagtaagtattgactgggaaaaagagagaagtcaatcaaaagtatactgtgcaattgagagaggctggcccaagatttaaaacttcctgtgggtaatctaactgtgagtagataggaatcggccatatgacgaaatgagatcaataggaaatgtgctttttgaggaaattttattttagtaccaaatgttgccagtgacaatcttcagttaagaagtaagttattctgacctaaaattcttatctctgccactttggtttaaaaacaaaaacccttatatacatggaatagttatattttaattaagcatttattttagttgttttcatccattcaagcaaaatgaataagcagcatttttcattgcacttaaaaatgtaaaatacctgcatgccactaatctgtaacattttaccagttcagatgcctgtaatgtgtgactttatgtgtgtctgtgttgttttgaagagaataaaggaaataatactttgcaaactgtttaaacaagtgtttaaacttctattggcaacatttattgggctaagcagttattgaaaactccgcatagttttattttccatttgaaacttcaatcaaatcaagactattatattcattagggaattaaagactaatttgctttttaaatgtgaagttgaacactgtgtggaaagtaaatgtgtgatgaagcaaaatgtataaagtatgaaatattatacttttaccctggataattattcaggaccccagttggcccaaataggtgcaatttttaatcctttgaaattagccagccagacctaatgctaaggtaaatgtaaactgttttaattaattaagatctttctgctttcgaaggtataatgtatctatttctgtcaggaatgatatttccaaatgaaaatgtaaagaacattgggaaataataaactttcctttcaaagtaaaagtaaa

SEQ ID NO: 195413 - DNA, 1490 bp, Homo sapiens
  Payload ID: 18584
  Gene Name: tropomodulin 2 (neuronal)
  Uniprot ID: Q9NZR1
  ENST ID: ENST00000435126
  CDS Start-End: 116-1063
ggactgacggccagcacagccggctccgggatgagcgcacggacggtattctgaagtctcaggaaactggaccatttaaatgtgcatggcccatgagaaaggcttataagaagccatggcactcccctttcaaaaagagctggagaaatacaagaacattgatgaagatgagcttcttggcaaactctcagaagaggaactgaaacagttggaaaatgttctagatgacctagatcctgagagtgccatgctgccagctggatttcgacagaaagaccagacacagaaggcagccaccggcccctttgaccgcgagcacctcctcatgtacctggagaaggaggctttggaacagaaagacagagaggactttgtgcccttcactggagaaaagaaagggagagtctttatccctaaagaaaagcctatagaaactcgtaaagaagaaaaagtgacccttgacccagaactggaagaagctttggccagtgcctctgacaccgaactctatgatcttgcagctgtccttggagtacacaatttgctcaacaatccaaagttcgatgaagaaacagccaacaataaaggtggcaaaggacctgtcagaaatgttgtcaaaggtgaaaaagtaaagccagtatttgaggaaccaccaaatcccacaaatgtggaaataagcctgcagcagatgaaagccaatgatcctagcttgcaagaagtcaacctcaacaacattaaggcttttgcagacatgctgaaagtaaacaagaccttgacaagtctaaacatagaatccaattttatcactggaactgggatcctggccctggtagaggcactgaaagaaaatgacaccttgacagaaatcaagattgacaaccagaggcagcagttgggaacagctgtagagatggaaattgcccagatgctggaggagaattcaaggatcctcaagtttggataccagtttaccaagcaagggccacgaacaagggtggcagctgccatcacaaagaataatgacctggttcgtaagaagagagttgaagcagaccgaaggtaaacttccttgaggagaagtgaagtttcactgtggtatggccattgaaaaacaaaaactcttcttcttccccatcaggaccattttatcaaagttcgttcatttccgttaaccacataactaataatttaattgttattcttttttagcactacttatttatcttggattttgtaatatatgcaattgttttatttgctcatgggcacttctggcaacttgacaaatggaccgatgcagattttagagagtgacgacatggaaaatgaatttaaccactttcttattgggttgtcttgctttcttacatgaacttgtttttttaatcactgaaaggaatttagtgtataatatgtgtttgtaactgtgattatgatagaggcctatctctgtttacatgcatagctttgagttaggctaaatacatcag

SEQ ID NO: 195414 - DNA, 3000 bp, Homo sapiens
  Payload ID: 18584
  Gene Name: tropomodulin 2 (neuronal)
  ENST ID: ENST00000539962
  CDS Start-End: 400-1323
gttgatcgccgcgctcgccccggccacggcgccgcccctgttctcccggccccgctccaccggggctgacggactgacggccagcacagccggctccgggatgagcgcacggacggtattctgaagtctcaggaaactggaccatttaaatgtgcatggcccatgagaaaggcttataagaagccatggcactcccctttcaaaaagagctggagaaatacaagaacattgatgaagatgagcttcttggcaaactctcagaagaggaactgaaacagttggaaaatgttctagatgacctagatcctgaggctggagtgccgtggcaagatctcggctcactgcaacctctgcctcccagattcaagcgattctcctacctcagcctcccagagtgccatgctgccagctggatttcgacagaaagaccagacacagaaggcagccaccggcccctttgaccgcgagcacctcctcatgtacctggagaaggaggctttggaacagaaagacagagaggactttgtgcccttcactggagaaaagaaagggagagtctttatccctaaagaaaagcctatagaaactcgtaaagaagaaaaagtgacccttgacccagaactggaagaagctttggccagtgcctctgacaccgaactctatgatcttgcagctgtccttggagtacacaatttgctcaacaatccaaagttcgatgaagaaacagccaacaataaaggtggcaaaggacctgtcagaaatgttgtcaaaggtgaaaaagtaaagccagtatttgaggaaccaccaaatcccacaaatgtggaaataagcctgcagcagatgaaagccaatgatcctagcttgcaagaagtcaacctcaacaacattaagaacattccaattccaaccctgagggaatttgcaaaggctctggagaccaacactcacgtgaagaagttcagcctggccgcaactcgcagcaatgaccctgtggccattgcttttgcagacatgctgaaagtaaacaagaccttgacaagtctaaacatagaatccaattttatcactggaactgggatcctggccctggtagaggcactgaaagaaaatgacaccttgacagaaatcaagattgacaaccagaggcagcagttgggaacagctgtagagatggaaattgcccagatgctggaggagaattcaaggatcctcaagtttggataccagtttaccaagcaagggccacgaacaagggtggcagctgccatcacaaagaataatgacctggttcgtaagaagagagttgaagcagaccgaaggtaaacttccttgaggagaagtgaagtttcactgtggtatggccattgaaaaacaaaaactcttcttcttccccatcaggaccattttatcaaagttcgttcatttccgttaaccacataactaataatttaattgttattcttttttagcactacttatttatcttggattttgtaatatatgcaattgttttatttgctcatgggcacttctggcaacttgacaaatggaccgatgcagattttagagagtgacgacatggaaaatgaatttaaccactttcttattgggttgtcttgctttcttacatgaacttgtttttttaatcactgaaaggaatttagtgtataatatgtgtttgtaactgtgattatgatagaggcctatctctgtttacatgcatagctttgagttaggctaaatacatcagaagtgttctactgaccacataagaagttagtattgccaatctttcactgcatgtgaaaatgtgaccaatttagcacaaattctctcttagttccagaaaaatcagtaaatgcacatgccctgttgattggagatcagtagtgtcatcttcataaagcaagacaacattatgacactttaaaacagtagcaaagaagtctatttattaacccacaaatgtagcatcaagccagactcacaggtagcaaaatgaattacacacctacttttactgactattcaacataaattgaatctttaacatgactttaaaggctatttacaaagctgttttaaagtttttcaaacatgatagaaattttctaaattttagtaagagagaagcttttaaaacagtacattcctgaataaaacaacaatattgtatcttaatcaaggctgtctgatgcagatgattgcattttttggcaaattttagaagcatttattgctttgtctttagtgtaacaagatcactggattaaatataaacattcaggttaattatctagatttttgtccacagtatatgatccatccagacatttgcaaacgtcaggagaaaaatgtgaattatttatccagatgcatgtcatctcaaggacaaagcctgtgaaagtacaagtgagatggttgcattgtagtatgcattaatctttcaatgtagtggtgtaaaaatgcagtgctaaactaatgaagcaggtgactgcagcctttggctcaagctcacaactctgataactgtcagtgcctgaggttgtgattggtgacattctgacactgcccaaggcaactcaccctctattcctcctttctcccctccctttcttccaattcattgtcttttttttcctcttttctctgtaatttgttactaaacaaattccagaatttgtttagtagctgagtgttcctgagttgcctagtagcaataaaacaagtgaataggaaaataattaatatattattctatttagcttgtaaaacacatggaatctgtttaagatagcccttgtaaaattgaacatttacctgtattgtaagtacccacatctgtgtctctgaagtcctttgaaacatctcattatcttgaaatttttttaatgtttgagaacaccataagcagaatattctaacacctttggcccctgaaaatcctttaattagtttatggcttcatctccttatctatttaaaaaacatagtaaataa

SEQ ID NO: 195415 - DNA, 535 bp, Homo sapiens
  Payload ID: 18584
  Gene Name: tropomodulin 2 (neuronal)
  ENST ID: ENST00000561407
  CDS Start-End: 1-331
ggccattgcttttgcagacatgctgaaagtaaacaagaccttgacaagtctaaacatagaatccaattttatcactggaactgggatcctggccctggtagaggcactgaaagaaaatgacaccttgacagaaatcaagattgacaaccagaggcagcagttgggaacagctgtagagatggaaattgcccagatgctggaggagaattcaaggatcctcaagtttggataccagtttaccaagcaagggccacgaacaagggtggcagctgccatcacaaagaataatgacctggttcgtaagaagagagttgaagcagaccgaaggtaaacttccttgaggagaagtgaagtttcactgtggtatggccattgaaaaacaaaaactcttcttcttccccatcaggaccattttatcaaagtgtgatgtgttggagtcaacttgtacaggcttgccaactgttatattttcaagaattttgcaaactggttgttcaatacagccattatttaaaattaaatgatgtgcacttac

SEQ ID NO: 195416 - DNA, 8255 bp, Homo sapiens
  Payload ID: 18585
  Gene Name: tropomodulin 3 (ubiquitous)
  Uniprot ID: Q9NYL9
  ENST ID: ENST00000308580
  CDS Start-End: 282-1340
gagtgcgcacgcgcgtcggaggcgaaggaggaacccaccgcacctacagggcggtcgagtgagggagctgctggcgggtgggtctggcaactctttgggaggccgacgcgggcggaccggcgggtgctgggaaccgagcctcggcttgcggccggcagtttccgtgggtctgtgaagaggtcggcggcccctgcgggcgccagtcagctttaagaaaaagtagagatcacttctgactgtactgaacagcaaaaattaagtgacttgctgccctgcacatcatggcactgccattccgtaaggacttagaaaagtacaaagaccttgatgaagatgagctccttgggaatctgtcagaaacagaactgaaacaactggaaactgttttggatgatcttgaccccgagaatgcccttctgcctgcagggttccggcagaagaaccagacatcaaagtccaccacagggccatttgatagagagcatctcctttcatatctggagaaagaagcattggagcataaagacagggaagactatgtgccctacactggagaaaaaaaagggaaaatatttatccccaaacagaaacctgtacagacttttacagaagaaaaagtgtctcttgatccagaattagaagaagctttgacaagtgcttctgatacagaattgtgtgacctcgcagcaattcttgggatgcacaatttgataacgaatacaaagttctgtaatataatgggaagtagtaatggtgttgaccaagaacatttttcaaatgtggtcaaaggtgaaaagattcttccggtatttgatgagccaccaaatccaaccaatgtagaagagagtttgaagagaactaaagaaaacgatgctcatcttgttgaagttaatttgaataatataaagaatatcccaattccaaccctaaaagattttgcaaaggctttggaaaccaacacacatgtgaaatgtttcagtcttgcagccacccggagcaatgaccctgttgctactgcttttgcagaaatgctgaaagtgaacaaaactttgaagagcttaaatgtggagtccaactttatcacgggagttgggattctggcactgattgatgcgttaagagataatgaaaccctggcagagctcaagattgacaatcagaggcagcagttggggacagctgtagaattggaaatggccaagatgcttgaggaaaatacaaatatccttaaatttggatatcagtttacacagcagggaccacgaaccagagcagctaatgctataacaaaaaacaatgacttagtgcgtaagagacgagttgaaggagatcaccagtaagtctgcaaaggtgtaatctttggaagacttcagaagatcaccaagggctcatgttggtgacatcatgtaaaattttcctgggtagaagggaaaagactggaaaaatttttttagtgacatgcattttttttttagttgttatcaaattgtaaaatcagtaatgtgatattttatattctgaaacatttctactttctgctaaaatcaattttaatttagtttaattgaatgatttatgatgaatcttgggcaaaaaaatacaactgtaaaaaatttcacaggtcatttgtgtagaataatttgaacattgtgaggaccaatcttttttaaatcaaaagggatgttgctggtatcagaattgttattgcttcatttagacataaaacacttaagtgttttcttcactccgtgacctggagagttttccattttttaaaatacatgaacttggcaagggtgtgatttttctttatcaagagaacaaaatgccagaatgttaaaacagttaactcaaaatctagtcatctgtgtaggagctaaagcaggtctccagggagagagggtggtcgtctgtgcattccaggttactgcacttgtctgatgtgacgtagcaacacccaggtcttcttaaaacaaagtcatcagctttgccaggttacatactttatttaaaagtatagtgaggtcgaagttcattccagtgtttcattttaataatgtgggcattattaaatttttgtggaagctaatagtaaaaaataaaagctgttttcaccacctccctccccaccccccaaaaaaggcgtacagccaactcttagttatttagggtaagagaaaaaagaaaactgttaaacaatgaaatcaaagataataaatatgatagatttccagtatgaggcacttgcaaaacagtcatttaaactgatggttactgtaagtcagttggaagctggcatgtatgtaaattacttggtgttacaccatatccgaagaagttcctatgtgcagtgcagaattgcataaacagtatttaatcactgctacaaatcttccaaccaagaaggaaaactgctattcttcataaatctaatttttagtatatgcttcctttcatcttatacttttatcaatatttataaaagtcatttctataataaaagcagtctttcttgctcaaagtattaaggtgaacaattgaatagagtactgtggtcgggagactgatttgagactgcagagctgatgctgggtagagggtctggacttgtattcatgttctgtctcagggcagcccctggagcaggagatggcagaggcatttacagctgcagaaaacagggaggaatggaatctgaggtagccctggcctcaaaattcaggcctggctgtatcatttacagagatttttctggagggaaaagtctcatttctgaggaaggcaaggtggctaatcattattaattttttttaaactttttgggccgggcgcagtggctcacgcctgtaatcccagcacttttgggaagccaaagtgggtggatcacttaaggtcaggagttcaagaccagcctggccaacatggtgaaaccctgtctctactaaaaatcaaaaaagtagccgggtgtggtggtgcacacctgtaatcccagctactcaggaggctgaggcaggagaattgcttgaacctgggagatggagattgcagtgagctgagatcgtaccactgcactgcagtctgggtgacaaagcaagactctgtctcaaaaaacaaacaaacaaacaaactttttgaaattgaattgcaatatgtctgctactttggcttgggctggacagtttatctaataagcaaggcagcttcttgtgtgctatggtaataagccttcttaacaggctaagcttccctcataagaactgtggtgtttctctttttttttttttgttttggtttgttttggttttttggttttgttttgttttgttttttaaatcagtatccaatgttttataggggccaaaggttaactttgcactattccctgtcagttaaaggccactgatatttttctaagttagcaaggctcacttgcttgctttcttgcctcccttgcctccatccctctcccttcctaccttctctatttacctatttctctccctccctctcttctcctctctttttttttccccgcatatgcagctttttgattgtacttgattttatagagactgcacagttccagcaagattgggagtcaggcatggagcaggcatctcaggctaccagaaagaattggtcacctagactttcagtcaggcatcctcgtttgcattgtcctgtaagtcaattagttgataaatagttcccccttcatcccttaagttttgtttttgtttttgtttttaatataggtaagtgggactctacctaaaattttgcatcatacttatgggtaatatctttttcatatattatttatcaaagtatgaagttgagtattttgcttgtaccatttcaattctgcattatagtagttcattgtataactgaaagaaatgatttcttcataagtgacattaaatatgaacattcatccaattgaatttacaaaatctttccaaaattataagggagaaaaatcgggtttacttcaatctttaaaaatctggcacctcttagtaactttcagtatttctaaattgctctaaaattttataataaatagattagggttttgcaatagtcttaatttttaagccaaaggttttctgagaccttaggttttgtagtctaaccagcttatgtggttatttaaaagaatattctttgtgtttttaaattgctatttttaaaaaagctttttattacccattttataaaatgttatactcatatttgtctgaatttttccagtattcctacatgaaattgtatgtattaaaaactcaatattagtggcaaatattaatactattaaaatggattttggtgctatattcttgtagctaaagcctagtagaattctcaagaataggtgaaatacactttcaaagttgcctgtcatttaaaagaccaaataagcattttgtattaaataaattagcagatggttagagacttcaaggagagttagcttggtcatttaattgcgacttcatgttatttgattgaaataacccacatccttgctttgtataagatattcgctctggagaagttacatgtaaatagaattctataaattgttttccagttgaccgagtatctgttgtgtttttgtttaaaaagaggattccatgacataataaaaattattttaaaaaatgttttgggccgggtgcggtggctcacgcctgtaatcctagcactttgggaggccgaggtgggcggatcacctgaggtcaggagttcgagaccagcctgaccaacatggagaaaccctgtctctactaaaaatacaaaattagccaggcgtggtggcacacacctgtgatctcagctactcgggaggctgaggcaggagaatcactagaactcgggaggcggaggttgcagttagctgaggtcgcgccattgcactccagcatgggcaacaagagtgaaactccgtctcaaaaaaaaaaaaatttttttttttttataaaatgttactcatatcatattgtacgttatatttaactcttgctgtcattaaaataagatgacaacatttatgaagttttataaaatcttacattttagggtctgtgttcccagggctgcctcactttttccctaaaaaactaggaaccactgttaacctcccagcagatgcaaggatcatgctttctctggagtccttagtcacttccattctttgcaagtttagtactgcccaaatttactcattctacagtgttactgcactttgaacgtattgacccatgtcacccaagagaagcaaacatatggatgcactagagacaactcgggttgctgctctcagttaagggctatgagttcttggggtctaagtatctgtaaaattatcctctccatcagctctcactgatcattaatgtttctggatatttcttaccctaagatttgcttaccaacaaatcaaagaaacgcttcactaattatttttaaattgagaaaatagtattcagaggcaaagatttttatattcttttttgagaccaagtctcactctgtcatccaggctggagtgcagtggtgcgatctcagctcactgcagcttccacctcccagattcaagtgattctcctgcctcagcctcccaagtagctgggattacaggcgtccgccaccacgcccggataactttttgtatttttaatagagacggggtttcaccatgttggccgggctgttctcaaagtgacctcaggtgatccactcgcctcggcctcccaaagtgctgggattacaggcttgagccaccacactcagccttattcttatattttaatttggtcattcttagatctacagattgaacatccctaattgaaaactttttgagtactaacatagtgttcaaaggaaatgcttattggagcatttagaatttcagattttcagattagggatgctgaactggtgtaatgcccagtattccaaaatccaaaataatttgaaatctgaaacacttaatggtcccagcatgttggataagggatactcaacctgtattgatttttctccactataattcagttctataagttcttccctataaaaaatgaatgaattagaaatttgataataaaacatattttattaattttaaactctatcttgcagtctgatcattcagaaaggtcaacctagaaaaaagacatggctaagtaaactattttaagccataactaagtattttggaaagccttcattaacacataaagaattttggccaagtactgtggcttatgcctgtaatcctagcactttggaaagccgaggccgacggatcacttgagctcaggagtttgagaccaacctgcgtaacatggtgaaaccccatatctacaaaaagtacaaaaattagctgggtgcggtggcgcatgcctgtagtcccatctactcggaagactgaggcagcagaaccgcttgagcctaggaggtggaggttgcagtaagatgagatcatgctgctgtactctagcctgggcaatgagagtgaaactcttatctcaaaaaaaaaaaaaaaaaaagagctatactcatagtactttgggagaccaagcagggaggattacttgagaccaggagtttgagactaccatggacaacatagcaagaccccatctttacaaaaaatttaaaaattagccagacacctatagtaccagctacttaggagtctaaagtgggagaattgcttgagcctgggaggttgaagcagcagtgagctttgatcatgccactgcattccagcctgggtaacaagagtgagactgtctcaaaaaacaaaacaaaacaaaaaaatgggtttttttgttgttgtttttgtcttttacttaggacacctgctctagaggctagataaaaatagattgtaatggccgggtgcagtggctcacacttgtaatcccagcactgtggaggctgaggtgggcggatcacttgaggtcaggagtacgagaccagtctggccaacatggtgaaaccccatctctactaaaaatacaaaaaattagttgggcgtggtgatgcgcacctgtaattctagctacttgggagcctaaggcaggagaatcacttgaacctgggaggcagaagttgcagtgagccgagattgtgccattgcactccagcctgggtgacagagtgagactccatctcaaaaaaatatatgtattaagaaataccaccagcagtgttttgctaacatagctgtaacaaattattaagttcttttttttttttaagatggaggttcactcttgtcgcccaggctggagcgcaatggtgcgatctcagctcactgcaacctccgcctcctgggttcagatgattttcctgcctcagcctcctgggtagctgggactacaggtgcccgccaccacgcctgactaatttttgtattttcagtagagacggagtttcaccatcttggccaggctggtctcgaactcctgacctcgtaatccacccgcctcggcctcccaaagtgctgggattacaggtgtttgccaccgcgcccagcccaaattattacattcgtaagacagacacctcttagaatctatatatatgaggttttactcccttttctacactcagtatgttttaattgatgcaaagcaattaattggcctaaaatgtttcaaatattatagtctatacattcagaaagtaaggtttaagaatgaattattggtgcttcttggtgggtgtatatagcagtttttagaagtttaaatttcacctctactcagaaagataagcttttgattcagtggtttcaaattttcagatcaatccatttaagaattgttttttcaaatgtatatacacgtataacataaaaatttttgtaatttcaaatgtctttttttcagttttttggatgaattattatatttggttttagttacatttaaaagcttgaaaattacctttctaacaatcatttgaatgtcattcattgtcacatgaaatcaggtatttacgtttttttctaatgctaaaatatccaacattgtaattgccctatttttccatttttataagtataaaagcaatgaattttaacactggtatttaaataatacaaaatattatccaaattcataacagcacagtgaagtttcttttgaagactatgtactggaagcatttagaacttaccaatatatactgggataaatcgtttcaataaagtttatcaaatattctgtaaa

SEQ ID NO: 195417 - DNA, 2054 bp, Homo sapiens
  Payload ID: 18585
  Gene Name: tropomodulin 3 (ubiquitous)
  Uniprot ID: Q9NYL9
  ENST ID: ENST00000544199
  CDS Start-End: 48-1106
gactgtactgaacagcaaaaattaagtgacttgctgccctgcacatcatggcactgccattccgtaaggacttagaaaagtacaaagaccttgatgaagatgagctccttgggaatctgtcagaaacagaactgaaacaactggaaactgttttggatgatcttgaccccgagaatgcccttctgcctgcagggttccggcagaagaaccagacatcaaagtccaccacagggccatttgatagagagcatctcctttcatatctggagaaagaagcattggagcataaagacagggaagactatgtgccctacactggagaaaaaaaagggaaaatatttatccccaaacagaaacctgtacagacttttacagaagaaaaagtgtctcttgatccagaattagaagaagctttgacaagtgcttctgatacagaattgtgtgacctcgcagcaattcttgggatgcacaatttgataacgaatacaaagttctgtaatataatgggaagtagtaatggtgttgaccaagaacatttttcaaatgtggtcaaaggtgaaaagattcttccggtatttgatgagccaccaaatccaaccaatgtagaagagagtttgaagagaactaaagaaaacgatgctcatcttgttgaagttaatttgaataatataaagaatatcccaattccaaccctaaaagattttgcaaaggctttggaaaccaacacacatgtgaaatgtttcagtcttgcagccacccggagcaatgaccctgttgctactgcttttgcagaaatgctgaaagtgaacaaaactttgaagagcttaaatgtggagtccaactttatcacgggagttgggattctggcactgattgatgcgttaagagataatgaaaccctggcagagctcaagattgacaatcagaggcagcagttggggacagctgtagaattggaaatggccaagatgcttgaggaaaatacaaatatccttaaatttggatatcagtttacacagcagggaccacgaaccagagcagctaatgctataacaaaaaacaatgacttagtgcgtaagagacgagttgaaggagatcaccagtaagtctgcaaaggtgtaatctttggaagacttcagaagatcaccaagggctcatgttggtgacatcatgtaaaattttcctgggtagaagggaaaagactggaaaaatttttttagtgacatgcattttttttttagttgttatcaaattgtaaaatcagtaatgtgatattttatattctgaaacatttctactttctgctaaaatcaattttaatttagtttaattgaatgatttatgatgaatcttgggcaaaaaaatacaactgtaaaaaatttcacaggtcatttgtgtagaataatttgaacattgtgaggaccaatcttttttaaatcaaaagggatgttgctggtatcagaattgttattgcttcatttagacataaaacacttaagtgttttcttcactccgtgacctggagagttttccattttttaaaatacatgaacttggcaagggtgtgatttttctttatcaagagaacaaaatgccagaatgttaaaacagttaactcaaaatctagtcatctgtgtaggagctaaagcaggtctccctccccaccccccaaaaaaggcgtacagccaactcttagttatttagggtaagagaaaaaagaaaactgttaaacaatgaaatcaaagataataaatatgatagatttccagtatgaggcacttgcaaaacagtcatttaaactgatggttactgtaagtcagttggaagctggcatgtatgtaaattacttggtgttacaccatatccgaagaagttcctatgtgcagtgcagaattgcataaacagtatttaatcactgctacaaatcttccaaccaagaaggaaaactgctattcttcataaatctaatttttagtatatgcttcctttcatcttatacttttatcaatatttataaaagtcatttctataataaaagcagtctttcttgctca

SEQ ID NO: 195418 - DNA, 1139 bp, Homo sapiens
  Payload ID: 18585
  Gene Name: tropomodulin 3 (ubiquitous)
  ENST ID: ENST00000561438
  CDS Start-End: 1-563
atgtggtcaaaggtgaaaagattcttccggtatttgatgagccaccaaatccaaccaatgtagaagagagtttgaagagaactaaagaaaacgatgctcatcttgttgaagttaatttgaataatataaagaatatcccaattccaaccctaaaagattttgcaaaggctttggaaaccaacacacatgtgaaatgtttcagtcttgcagccacccggagcaatgaccctgttgctactgcttttgcagaaatgctgaaagtgaacaaaactttgaagagcttaaatgtggagtccaactttatcacgggagttgggattctggcactgattgatgcgttaagagataatgaaaccctggcagagctcaagattgacaatcagaggcagcagttggggacagctgtagaattggaaatggccaagatgcttgaggaaaatacaaatatccttaaatttggatatcagtttacacagcagggaccacgaaccagagcagctaatgctataacaaaaaacaatgacttagtgcgtaagagacgagttgaaggagatcaccagtaagtctgcaaaggtgtaatctttggaagacttcagaagatcaccaagggctcatgttggtgacatcatagactgcacagttccagcaagattgggagtcaggcatggagcaggcatctcaggctaccagaaagaattggtcacctagactttcagtcaggcatcctcgtttgcattgtcctagacaggagactctctccatcatgtgaagatacagcaaaacagcagctgtctgcaagccaggaagggaaccctcaccaggaaccaaaccatgatctcggacgtcccagcctctaggaacgtcacttgctctggggaaagccacctgccatgccgtgaggacattcaaactgcctatggagaggtccacatagtgaaaaactaaggcccctgccaaaacccatgtgagccatcttggaaacagatccttcagccctaggcaagcccttagataatgtagtgccagccaacatcttgacagcagcctgcaagagactctgagttagaaacaaccagcgaagccattcctgaattcctaatcctcagaatcagcatgataatagtaaatgcttattgtaa

SEQ ID NO: 195419 - DNA, 1474 bp, Homo sapiens
  Payload ID: 18585
  Gene Name: tropomodulin 3 (ubiquitous)
  ENST ID: ENST00000560549
  CDS Start-End: 380-1021
aaaggtaaatttaacccagttgccttaaactaaggacttcccatatgctgtccaagttatttattcacagttatgttagctttccagaaaacctcctctttctcacctttctgagtatgtgatttctttggaggaaagacagacctgatcccttagtaaaccagaaagatcatgattataaacctgcctacatcaagaggattacataaccaccactgggcaattggtttccgctaagtccaaagggaaaatatttatccccaaacagaaacctgtacagacttttacagaagaaaaagtgtctcttgatccagaattagaagaagctttgacaagtgcttctgatacagaattgtgtgacctcgcagcaattcttgggatgcacaatttgataacgaatacaaagttctgtaatataatgggaagtagtaatggtgttgaccaagaacatttttcaaatgtggtcaaaggtgaaaagattcttccggtatttgatgagccaccaaatccaaccaatgtagaagagagtttgaagagaactaaagaaaacgatgctcatcttgttgaagttaatttgaataatataaagaatatcccaattccaaccctaaaagattttgcaaaggctttggaaaccaacacacatgtgaaatgtttcagtcttgcagccacccggagcaatgaccctgttgctactgcttttgcagaaatgctgaaagtgaacaaaactttgaagagcttaaatgtggagtccaactttatcacgggagttgggattctggcactgattgatgcgttaagagataatgaaaccctggcagagctcaagattgacaatcagaggcagcagttggggacagctgtagaattggaaatggccaagatgcttgaggaaaatacaaatatccttaaatttggatatcagtttacacagcagggaccacgaaccagagcagctaatgctataacaaaaaacaatgacttagtgcgtaagagacgagttgaaggagatcaccagtaagtctgcaaaggtgtaatctttggaagacttcagaagatcaccaagggctcatctttttgattgtacttgattttatagagactgcacagttccagcaagattgggagtcaggcatggagcaggcatctcaggctaccagaaagaattggtcacctagactttcagtcaggcatcctcgtttgcattgtcctagacaggagactctctccatcatgtgaagatacagcaaaacagcagctgtctgcaagccaggaagggaaccctcaccaggaaccaaaccatgatctcggacgtcccagcctctaggaacgcctttccatcttcctagagtgcctaacctggcctgtgtgcttgtaagcttctgctcattcttcaatacccagcagagacttcctcctccatgcagccttccaagacccacctgagtacagaaattggctcttcctcctgctg

SEQ ID NO: 195420 - DNA, 447 bp, Homo sapiens
  Payload ID: 18585
  Gene Name: tropomodulin 3 (ubiquitous)
  ENST ID: ENST00000558455
  CDS Start-End: 349-447
gggagtgcgcacgcgcgtcggaggcgaaggaggaacccaccgcacctacagggcggtcgagtgagggagctgctggcgggtgggtctggcaactctttgggaggccgacgcgggcggaccggcgggtgctgggaaccgagcctcggcttgcggccggcagtttccgtgggtctgtgaagaggtcggcggcccctgcgggcgccagtcagattgggacttgactgagattgatccagggctagttaccatgtatttcctgatggaagaatgttaactttaagaaaaagtagagatcacttctgactgtactgaacagcaaaaattaagtgacttgctgccctgcacatcatggcactgccattccgtaaggacttagaaaagtacaaagaccttgatgaagatgagctccttgggaatctgtcagaaacagaactgaaacaactggaa

SEQ ID NO: 195421 - DNA, 1267 bp, Homo sapiens
  Payload ID: 18586
  Gene Name: tropomodulin 4 (muscle)
  Uniprot ID: Q9NZQ9
  ENST ID: ENST00000295314
  CDS Start-End: 136-1173
ccgggctcctcctgctgctgggacagtgctctagtagaacagacagacctactgacacaggggaggtgagaagggaggtgaccaccaggactggctctgtgagtaccacacagtggggagggggtgggggccaccatgtcatcatatcagaaggaactggagaaatacagagacatagatgaagatgagatcctaaggaccttgagccccgaggagctagagcagctggactgcgaactacaggagatggatcctgagaacatgctcctgccagctggactaagacaacgtgaccagacaaagaagagcccaacggggccactggaccgagaggcccttttgcagtacttggagcaacaggcactagaagtcaaagagcgtgatgacttggtgcccttcacaggcgagaagaaggggaaaccctatattcagcccaagagggaaatcccagcagaggagcagatcaccctggagcctgagctggaggaggcactggcacatgccacagatgctgaaatgtgtgacattgcagcaattctggacatgtacacactgatgagtaacaagcaatactatgatgccctctgcagtggagaaatctgcaacactgaaggcattagcagtgtggtacagcctgacaagtataagccagtgccggatgaacccccaaatcccacaaacattgaggagatactaaagagggtccgaagcaatgacaaggagctggaggaggtgaacttgaataatatacaggacatcccaatacccatgctaagtgagctgtgtgaggcaatgaaggcaaatacctatgtgcggagcttcagtctggtagccacgaggagtggtgaccccattgccaatgcagtggctgacatgttgcgtgagaatcgtagcctccagagcctaaacatcgaatccaacttcattagcagcacaggactcatggctgtgctgaaggcagttcgggaaaatgccacactcactgagctccgtgtagacaatcagcgccagtggcctggtgatgcagtggagatggagatggccaccgtgctagagcagtgtccctctattgtccgctttggctaccactttacacagcaggggccacgagctcgggcagcccaggccatgacccgaaacaatgaactacgtcgccagcaaaagaagagataacactgcatttccctttaccaactagcgctgggagcactggacacttaaatcctcatctgtcctcctttcctgtaaataaaagcccttctatcca

SEQ ID NO: 195422 - DNA, 493 bp, Homo sapiens
  Payload ID: 18586
  Gene Name: tropomodulin 4 (muscle)
  ENST ID: ENST00000441701
  CDS Start-End: 68-493
agacagacctactgacacaggggaggctctgtgagtaccacacagtggggagggggtgggggccaccatgtcatcatatcagaaggaactggagaaatacagagacatagatgaagatgagatcctaaggaccttgagccccgaggagctagagcagctggactgcgaactacaggagatggatcctgagaacatgctcctgccagctggactaagacaacgtgaccagacaaagaagagcccaacggggccactggaccgagaggcccttttgcagtacttggagcaacaggcactagaagtcaaagagcgtgatgacttggtgcccttcacaggcgagaagaaggggaaaccctatattcagcccaagagggaaatcccagcagaggagcagatcaccctggagcctgagctggaggaggcactggcacatgccacagatgctgaaatgtgtgacattgcagcaattctggacatgtacacactgatgagt

SEQ ID NO: 195423 - DNA, 441 bp, Homo sapiens
  Payload ID: 18586
  Gene Name: tropomodulin 4 (muscle)
  ENST ID: ENST00000466891
  CDS Start-End: 1-371
atgatgccctctgcagtggagaaatctgcaacactgaaggcattagcagtgtggtacagcctgacaagtataagccagtgccggatgaacccccaaatcccacaaacattgaggagatactaaagagggtccgaagcaatgacaaggagctggaggaggtgaacttgaataatatacaggcagtggctgacatgttgcgtgagaatcgtagcctccagagcctaaacatcgaatccaacttcattagcagcacaggactcatggctgtgctgaaggcagttcgggaaaatgccacactcactgagctccgtgtagacaatcaggtcgccagcaaaagaagagataacactgcatttccctttaccaactagcgctgggagcactggacacttaaatcctcatctgtcctcctttcctgtaaataaaagcccttctatccat

SEQ ID NO: 195424 - DNA, 1183 bp, Homo sapiens
  Payload ID: 18586
  Gene Name: tropomodulin 4 (muscle)
  ENST ID: ENST00000463543
  CDS Start-End: 73-204
agaacagacagacctactgacacaggggaggctctgtgagtaccacacagtggggagggggtgggggccaccatgtcatcatatcagaaggaactggagaaatacagagacatagatgaagatgagatcctaaggaccttgagccccgaggagctagagcagctggactgcgaactacaggagatggatcctgagctggactaagacaacgtgaccagacaaagaagagcccaacggggccactggaccgagaggcccttttgcagtacttggagcaacaggcactagaagtcaaagagcgtgatgacttggtgcccttcacaggcgagaagaaggggaaaccctatattcagcccaagagggaaatcccagcagaggagcagatcaccctggagcctgagctggaggaggcactggcacatgccacagatgctgaaatgtgtgacattgcagcaattctggacatgtacacactgatgagtaacaagcaatactatgatgccctctgcagtggagaaatctgcaacactgaaggcattagcagtgtggtacagcctgacaagtataagccagtgccggatgaacccccaaatcccacaaacattgaggagatactaaagagggtccgaagcaatgacaaggagctggaggaggtgaacttgaataatatacaggacatcccaatacccatgctaagtgagctgtgtgaggcaatgaaggcaaatacctatgtgcggagcttcagtctggtagccacgaggagtggtgaccccattgccaattggctgacatgttgcgtgagaatcgtagcctccagagcctaaacatcgaatccaacttcattagcagcacaggactcatggctgtgctgaaggcagttcgggaaaatgccacactcactgagctccgtgtagacaatcagcgccagtggcctggtgatgcagtggagatggagatggccaccgtgctagagcagtgtccctctattgtccgctttggctaccactttacacagcaggggccacgagctcgggcagcccaggccatgacccgaaacaatgaactacgtcgccagcaaaagaagagataacactgcatttccctttaccaactagcgctgggagcactggacacttaaatcctcatctgtcctcctttcctgtaaataaaagcccttctatcc

SEQ ID NO: 195425 - DNA, 1670 bp, Homo sapiens
  Payload ID: 18587
  Gene Name: tropomyosin 1 (alpha)
  Uniprot ID: P09493
  ENST ID: ENST00000267996
  CDS Start-End: 73-927
cgctcctccgcccgaccgcgcgctcgccccgccgctcctgctgcagccccagggcccctcgccgccgccaccatggacgccatcaagaagaagatgcagatgctgaagctcgacaaggagaacgccttggatcgagctgagcaggcggaggccgacaagaaggcggcggaagacaggagcaagcagctcgaggaggacatcgcggccaaggagaagttgctgcgggtgtcggaggacgagcgggaccgggtgctggaggagctgcacaaggcggaggacagcctcctggccgccgaagaggccgccgccaaggctgaagccgacgtagcttctctgaacagacgcatccagctggttgaggaagagttggatcgtgcccaggagcgtctggcaacagctttgcagaagctggaggaagctgagaaggcagcagatgagagtgagagaggcatgaaagtcattgagagtcgagcccaaaaagatgaagaaaaaatggaaattcaggagatccaactgaaagaggccaagcacattgctgaagatgccgaccgcaaatatgaagaggtggcccgtaagctggtcatcattgagagcgacctggaacgtgcagaggagcgggctgagctctcagaaggcaaatgtgccgagcttgaagaagaattgaaaactgtgacgaacaacttgaagtcactggaggctcaggctgagaagtactcgcagaaggaagacagatatgaggaagagatcaaggtcctttccgacaagctgaaggaggctgagactcgggctgagtttgcggagaggtcagtaactaaattggagaaaagcattgatgacttagaagagaaagtggctcatgccaaagaagaaaaccttagtatgcatcagatgctggatcagactttactggagttaaacaacatgtgaaaacctccttagctgcgaccacattctttcgttttgttttgttttgtttttaaacacctgcttaccccttaaatgcaatttatttacttttaccactgtcacagaaacatccacaagataccagctaggtcagggggtggggaaaacacatacaaaaaggcaagcccatgtcagggcgatcctggttcaaatgtgccatttcccgggttgatgctgccacactttgtagagagtttagcaacacagtgtgcttagtcagcgtaggaatcctcactaaagcagaagaagttccattcaaagtgccaatgatagagtcaacaggaaggttaatgttggaaacacaatcaggtgtggattggtgctactttgaacaaaaggtccccctgtggtcttttgttcaacattgtacaatgtagaactctgtccaacactaatttattttgtcttgagttttactacaagatgagactatggatcccgcatgcctgaattcactaaagccaagggtctgtaagccacgctgctcttccgagacttccattcctttctgattggcacacgtgcagctcatgacaatctgtaggataacaatcagtgtggatttccactcttttcagtccttcatgttaaagatttagacaccacatacaactggtaaaggacgttttcttgagagttttaactatatgtaaacattgtataatgatatggaataaaatgcacattgtaggacattttctaaa

SEQ ID NO: 195426 - DNA, 1295 bp, Homo sapiens
  Payload ID: 18587
  Gene Name: tropomyosin 1 (alpha)
  Uniprot ID: P09493
  ENST ID: ENST00000288398
  CDS Start-End: 199-1053
gagaggaggaaggggggcaggagaaaaaagcttttccaaaaaagtattggctgtcttgaggaatgcggtcgcccccttgggaaagtacatatctgggagaagcaggcggctccgcgctcgcactcccgctcctccgcccgaccgcgcgctcgccccgccgctcctgctgcagccccagggcccctcgccgccgccaccatggacgccatcaagaagaagatgcagatgctgaagctcgacaaggagaacgccttggatcgagctgagcaggcggaggccgacaagaaggcggcggaagacaggagcaagcagctggaagatgagctggtgtcactgcaaaagaaactcaagggcaccgaagatgaactggacaaatactctgaggctctcaaagatgcccaggagaagctggagctggcagagaaaaaggccaccgatgctgaagccgacgtagcttctctgaacagacgcatccagctggttgaggaagagttggatcgtgcccaggagcgtctggcaacagctttgcagaagctggaggaagctgagaaggcagcagatgagagtgagagaggcatgaaagtcattgagagtcgagcccaaaaagatgaagaaaaaatggaaattcaggagatccaactgaaagaggccaagcacattgctgaagatgccgaccgcaaatatgaagaggtggcccgtaagctggtcatcattgagagcgacctggaacgtgcagaggagcgggctgagctctcagaaggccaagtccgacagctggaagaacaattaagaataatggatcagaccttgaaagcattaatggctgcagaggataagtactcgcagaaggaagacagatatgaggaagagatcaaggtcctttccgacaagctgaaggaggctgagactcgggctgagtttgcggagaggtcagtaactaaattggagaaaagcattgatgacttagaagacgagctgtacgctcagaaactgaagtacaaagccatcagcgaggagctggaccacgctctcaacgatatgacttccatgtaaacgttcatccactctgcctgcttacaccctgccctcatgctaatataagtttctttgcttcacttctcccaagactccctcgtcgagctggatgtcccacctctctgagctctgcatttgtctattctccagctgaccctggttctctctcttagcatcctgccttagagccaggcacacactgtgctttctattgtacagaagctcttcgtttcagtgtcaaataaacactgtgtaagcta

SEQ ID NO: 195427 - DNA, 738 bp, Homo sapiens
  Payload ID: 18587
  Gene Name: tropomyosin 1 (alpha)
  ENST ID: ENST00000317516
  CDS Start-End: 1-738
atggcggggagtagctcgctggaggcggtgcgcaggaagatccggagcctgcaggagcaggcggacgccgctgaggagcgcgcgggcaccctgcagcgcgagctggaccacgagaggaagctgagggagaccgctgaagccgacgtagcttctctgaacagacgcatccagctggttgaggaagagttggatcgtgcccaggagcgtctggcaacagctttgcagaagctggaggaagctgagaaggcagcagatgagagtgagagaggcatgaaagtcattgagagtcgagcccaaaaagatgaagaaaaaatggaaattcaggagatccaactgaaagaggccaagcacattgctgaagatgccgaccgcaaatatgaagaggtggcccgtaagctggtcatcattgagagcgacctggaacgtgcagaggagcgggctgagctctcagaaggccaagtccgacagctggaagaacaattaagaataatggatcagaccttgaaagcattaatggctgcagaggataagtactcgcagaaggaagacagatatgaggaagagatcaaggtcctttccgacaagctgaaggaggctgagactcgggctgagtttgcggagaggtcagtaactaaattggagaaaagcattgatgacttagaagatcaactctaccagcaacttgagcaaaatcgccgcctcactaatgaactaaagctggccctgaatgaggattaa

SEQ ID NO: 195428 - DNA, 1637 bp, Homo sapiens
  Payload ID: 18587
  Gene Name: tropomyosin 1 (alpha)
  Uniprot ID: P09493
  ENST ID: ENST00000334895
  CDS Start-End: 211-948
cgcgcgcgcccgcctgcggtttgtctgcgcagccctggaggctgcgacttccggactgctcctggccgcagggggcgccgccatcgcacagagaggcctgggcggggcggaccggcgctgggcagccaggacagccgcggcagccgggtccgcagggcagcagccggcctctcccactgcagccctcccgcccgcctaccgtccggcgcgatggcggggagtagctcgctggaggcggtgcgcaggaagatccggagcctgcaggagcaggcggacgccgctgaggagcgcgcgggcaccctgcagcgcgagctggaccacgagaggaagctgagggagaccgctgaagccgacgtagcttctctgaacagacgcatccagctggttgaggaagagttggatcgtgcccaggagcgtctggcaacagctttgcagaagctggaggaagctgagaaggcagcagatgagagtgagagaggcatgaaagtcattgagagtcgagcccaaaaagatgaagaaaaaatggaaattcaggagatccaactgaaagaggccaagcacattgctgaagatgccgaccgcaaatatgaagaggtggcccgtaagctggtcatcattgagagcgacctggaacgtgcagaggagcgggctgagctctcagaaggcaaatgtgccgagcttgaagaagaattgaaaactgtgacgaacaacttgaagtcactggaggctcaggctgagaagtactcgcagaaggaagacagatatgaggaagagatcaaggtcctttccgacaagctgaaggaggctgagactcgggctgagtttgcggagaggtcagtaactaaattggagaaaagcattgatgacttagaagatcaactctaccagcaacttgagcaaaatcgccgcctcactaatgaactaaagctggccctgaatgaggattaaacttaagagtgaaaaaacttgggctgaattctaggcgtggagcccatgtgcagaaaatctaagactgtcctaccttcaactaatagagttgaaaacagttgctttctgcagaaatgcaaatgcaaggaattggctgaaaggctggccttgcctgcttgtttctctatatggctggaataattacgttctctttaatcacaaaacagcttttatggtagaatacttatatcaattcagcactgctccttgaaatagcaggtcctcttgtttgaactgataaataatgaggagcccccccaaaaaatgttttctatttcctgacagccatgagtcctactttaagtatgtatatatatatatatatgtgtgtgtgtgtgtgtgtgtatatattcctatcagatactcatattcctaacttctaaatatctggtatagtgtttgaaatatgattaaatgtacctatgcttgggcaaaatagcttttgaaaacaggaactcatgccagaagcccctggttgtctgaaaggtatgctttactcagtctaatggtgctgttggagtctggggagaatgtcatgctaataaatagaacactataaaaatattaagagaatgtcctaatgaagtgtgcatgaaacatgttgacaattttttatgagcaacagaaataaatcattttaaaagttctca

SEQ ID NO: 195429 - DNA, 1800 bp, Homo sapiens
  Payload ID: 18587
  Gene Name: tropomyosin 1 (alpha)
  ENST ID: ENST00000357980
  CDS Start-End: 80-1060
gcactcccgctcctccgcccgaccgcgcgctcgccccgccgctcctgctgcagccccagggcccctcgccgccgccaccatggacgccatcaagaagaagatgcagatgctgaagctcgacaaggagaacgccttggatcgagctgagcaggcggaggccgacaagaaggcggcggaagacaggagcaagcagctcgaggaggacatcgcggccaaggagaagttgctgcgggtgtcggaggacgagcgggaccgggtgctggaggagctgcacaaggcggaggacagcctcctggccgccgaagaggccgccgccaagctggaagatgagctggtgtcactgcaaaagaaactcaagggcaccgaagatgaactggacaaatactctgaggctctcaaagatgcccaggagaagctggagctggcagagaaaaaggccaccgatgctgaagccgacgtagcttctctgaacagacgcatccagctggttgaggaagagttggatcgtgcccaggagcgtctggcaacagctttgcagaagctggaggaagctgagaaggcagcagatgagagtgagagaggcatgaaagtcattgagagtcgagcccaaaaagatgaagaaaaaatggaaattcaggagatccaactgaaagaggccaagcacattgctgaagatgccgaccgcaaatatgaagaggtggcccgtaagctggtcatcattgagagcgacctggaacgtgcagaggagcgggctgagctctcagaaggcaaatgtgccgagcttgaagaagaattgaaaactgtgacgaacaacttgaagtcactggaggctcaggctgagaagtactcgcagaaggaagacagatatgaggaagagatcaaggtcctttccgacaagctgaaggaggctgagactcgggctgagtttgcggagaggtcagtaactaaattggagaaaagcattgatgacttagaagagaaagtggctcatgccaaagaagaaaaccttagtatgcatcagatgctggatcagactttactggagttaaacaacatgtgaaaacctccttagctgcgaccacattctttcgttttgttttgttttgtttttaaacacctgcttaccccttaaatgcaatttatttacttttaccactgtcacagaaacatccacaagataccagctaggtcagggggtggggaaaacacatacaaaaaggcaagcccatgtcagggcgatcctggttcaaatgtgccatttcccgggttgatgctgccacactttgtagagagtttagcaacacagtgtgcttagtcagcgtaggaatcctcactaaagcagaagaagttccattcaaagtgccaatgatagagtcaacaggaaggttaatgttggaaacacaatcaggtgtggattggtgctactttgaacaaaaggtccccctgtggtcttttgttcaacattgtacaatgtagaactctgtccaacactaatttattttgtcttgagttttactacaagatgagactatggatcccgcatgcctgaattcactaaagccaagggtctgtaagccacgctgctcttccgagacttccattcctttctgattggcacacgtgcagctcatgacaatctgtaggataacaatcagtgtggatttccactcttttcagtccttcatgttaaagatttagacaccacatacaactggtaaaggacgttttcttgagagttttaactatatgtaaacattgtataatgatatggaataaaatgcacattgtaggacattttct

SEQ ID NO: 195430 - DNA, 1717 bp, Homo sapiens
  Payload ID: 18587
  Gene Name: tropomyosin 1 (alpha)
  Uniprot ID: P09493
  ENST ID: ENST00000358278
  CDS Start-End: 146-1000
tcttgaggaatgcggtcgcccccttgggaaagtacatatctgggagaagcaggcggctccgcgctcgcactcccgctcctccgcccgaccgcgcgctcgccccgccgctcctgctgcagccccagggcccctcgccgccgccaccatggacgccatcaagaagaagatgcagatgctgaagctcgacaaggagaacgccttggatcgagctgagcaggcggaggccgacaagaaggcggcggaagacaggagcaagcagctggaagatgagctggtgtcactgcaaaagaaactcaagggcaccgaagatgaactggacaaatactctgaggctctcaaagatgcccaggagaagctggagctggcagagaaaaaggccaccgatgctgaagccgacgtagcttctctgaacagacgcatccagctggttgaggaagagttggatcgtgcccaggagcgtctggcaacagctttgcagaagctggaggaagctgagaaggcagcagatgagagtgagagaggcatgaaagtcattgagagtcgagcccaaaaagatgaagaaaaaatggaaattcaggagatccaactgaaagaggccaagcacattgctgaagatgccgaccgcaaatatgaagaggtggcccgtaagctggtcatcattgagagcgacctggaacgtgcagaggagcgggctgagctctcagaaggccaagtccgacagctggaagaacaattaagaataatggatcagaccttgaaagcattaatggctgcagaggataagtactcgcagaaggaagacagatatgaggaagagatcaaggtcctttccgacaagctgaaggaggctgagactcgggctgagtttgcggagaggtcagtaactaaattggagaaaagcattgatgacttagaagagaaagtggctcatgccaaagaagaaaaccttagtatgcatcagatgctggatcagactttactggagttaaacaacatgtgaaaacctccttagctgcgaccacattctttcgttttgttttgttttgtttttaaacacctgcttaccccttaaatgcaatttatttacttttaccactgtcacagaaacatccacaagataccagctaggtcagggggtggggaaaacacatacaaaaaggcaagcccatgtcagggcgatcctggttcaaatgtgccatttcccgggttgatgctgccacactttgtagagagtttagcaacacagtgtgcttagtcagcgtaggaatcctcactaaagcagaagaagttccattcaaagtgccaatgatagagtcaacaggaaggttaatgttggaaacacaatcaggtgtggattggtgctactttgaacaaaaggtccccctgtggtcttttgttcaacattgtacaatgtagaactctgtccaacactaatttattttgtcttgagttttactacaagatgagactatggatcccgcatgcctgaattcactaaagccaagggtctgtaagccacgctgctcttccgagacttccattcctttctgattggcacacgtgcagctcatgacaatctgtaggataacaatcagtgtggatttccactcttttcagtccttcatgttaaagatttagacaccacatacaactggtaaaggacgttttcttgagagttttaactatatgtaaacattgtataatgatatggaataaa

SEQ ID NO: 195431 - DNA, 1568 bp, Homo sapiens
  Payload ID: 18587
  Gene Name: tropomyosin 1 (alpha)
  ENST ID: ENST00000404484
  CDS Start-End: 110-856
gcggggcggaccggcgctgggcagccaggacagccgcggcagccgggtccgcagggcagcagccggcctctcccactgcagccctcccgcccgcctaccgtccggcgcgatggcggggagtagctcgctggaggcggtgcgcaggaagatccggagcctgcaggagcaggcggacgccgctgaggagcgcgcgggcaccctgcagcgcgagctggaccacgagaggaagctgagggagaccgctgaagccgacgtagcttctctgaacagacgcatccagctggttgaggaagagttggatcgtgcccaggagcgtctggcaacagctttgcagaagctggaggaagctgagaaggcagcagatgagagtgagagaggcatgaaagtcattgagagtcgagcccaaaaagatgaagaaaaaatggaaattcaggagatccaactgaaagaggccaagcacattgctgaagatgccgaccgcaaatatgaagaggtggcccgtaagctggtcatcattgagagcgacctggaacgtgcagaggagcgggctgagctctcagaaggccaagtccgacagctggaagaacaattaagaataatggatcagaccttgaaagcattaatggctgcagaggataagtactcgcagaaggaagacagatatgaggaagagatcaaggtcctttccgacaagctgaaggaggctgagactcgggctgagtttgcggagaggtcagtaactaaattggagaaaagcattgatgacttagaagagaaagtggctcatgccaaagaagaaaaccttagtatgcatcagatgctggatcagactttactggagttaaacaacatgtgaaaacctccttagctgcgaccacattctttcgttttgttttgttttgtttttaaacacctgcttaccccttaaatgcaatttatttacttttaccactgtcacagaaacatccacaagataccagctaggtcagggggtggggaaaacacatacaaaaaggcaagcccatgtcagggcgatcctggttcaaatgtgccatttcccgggttgatgctgccacactttgtagagagtttagcaacacagtgtgcttagtcagcgtaggaatcctcactaaagcagaagaagttccattcaaagtgccaatgatagagtcaacaggaaggttaatgttggaaacacaatcaggtgtggattggtgctactttgaacaaaaggtccccctgtggtcttttgttcaacattgtacaatgtagaactctgtccaacactaatttattttgtcttgagttttactacaagatgagactatggatcccgcatgcctgaattcactaaagccaagggtctgtaagccacgctgctcttccgagacttccattcctttctgattggcacacgtgcagctcatgacaatctgtaggataacaatcagtgtggatttccactcttttcagtccttcatgttaaagatttagacaccacatacaactggtaaaggacgttttcttgagagttttaactatatgtaaacattgtataatgatatgga

SEQ ID NO: 195432 - DNA, 1049 bp, Homo sapiens
  Payload ID: 18587
  Gene Name: tropomyosin 1 (alpha)
  Uniprot ID: P09493
  ENST ID: ENST00000403994
  CDS Start-End: 81-935
cgcactcccgctcctccgcccgaccgcgcgctcgccccgccgctcctgctgcagccccagggcccctcgccgccgccaccatggacgccatcaagaagaagatgcagatgctgaagctcgacaaggagaacgccttggatcgagctgagcaggcggaggccgacaagaaggcggcggaagacaggagcaagcagctggaagatgagctggtgtcactgcaaaagaaactcaagggcaccgaagatgaactggacaaatactctgaggctctcaaagatgcccaggagaagctggagctggcagagaaaaaggccaccgatgctgaagccgacgtagcttctctgaacagacgcatccagctggttgaggaagagttggatcgtgcccaggagcgtctggcaacagctttgcagaagctggaggaagctgagaaggcagcagatgagagtgagagaggcatgaaagtcattgagagtcgagcccaaaaagatgaagaaaaaatggaaattcaggagatccaactgaaagaggccaagcacattgctgaagatgccgaccgcaaatatgaagaggtggcccgtaagctggtcatcattgagagcgacctggaacgtgcagaggagcgggctgagctctcagaaggcaaatgtgccgagcttgaagaagaattgaaaactgtgacgaacaacttgaagtcactggaggctcaggctgagaagtactcgcagaaggaagacagatatgaggaagagatcaaggtcctttccgacaagctgaaggaggctgagactcgggctgagtttgcggagaggtcagtaactaaattggagaaaagcattgatgacttagaagacgagctgtacgctcagaaactgaagtacaaagccatcagcgaggagctggaccacgctctcaacgatatgacttccatataagtttctttgcttcacttctcccaagactccctcgtcgagctggatgtcccacctctctgagctctgcatttgtctattctccagctgaccctggttctctctcttagcatcctg

SEQ ID NO: 195433 - DNA, 2687 bp, Homo sapiens
  Payload ID: 18587
  Gene Name: tropomyosin 1 (alpha)
  ENST ID: ENST00000558264
  CDS Start-End: 1395-1673
aacatacattcaaagtggatgaggatattttacctgattagtaaattccatctcccacttccatgcacaatatttaaacagccaccagtgcaagtgtgtataatggaccatcatagtcttataagtgttctgaggctcatagcaacaatttcttatgacaggaaaaaaatcattgcctctcaaagaaaccaacattttatttcagtgacagataccaagtaaaaacagtacttgtattatttttctttttaggagtttgatacttttcttgtattaaccttgacttcaaagaaaaatcataggcttacatcaaaaacacttgggaaatttgtcttggctctgttccaatgaggccagttattctaaaaggggttactggattgtgttgggccttcatgtggtgtgtattttagaaccactgaattttaaactatttaagttcctttgtaaggatcctatgataaagtggcttgaaggaaagagttgagtgaaactcttgagtccgatttctggctgtactgctattgtcttacatggctgagcctgggtaagtcttgtctcagttcacacttcaggcccccagtgagtgaggtggccgtgatgacgctcttgtttaacaggcaagtaaagccagggtgttgaactctacggaagtgggccgggcgcagtggctcacgcctgtaatcccagcactttgagaggccaaggcaggtggataaggaggtcaggagattgagaccatcctggctaacacggtgaaaccccgtctctactaaaaatacaaaaaaattagccgggcgttgtggcgggcgcctgtagtcccaactactcgggaggctgaggcaggagaatggcgtgaatccaggaggcggagtttgcagtgagctgagatcgtgccactgcaccccagcctgggtgatagagcgagaccctgtctcaaaaacaaaacaaaacaaaacaaaaaaatctacggaagaaaggaaccatgtgaaagagcgtttgctaatgatctgtctgtctgatgagaattgtgtgtatagatttgtgtatacacaaatatggatgttcactgtataaatcaatgtgtaaatgtgtccgagaactccagagttgatgagggcttgtaatgcacttaaaggtagctcaccacaagacagtcttcctatctgaaatcagcattgcagtcccagccatttcctgaagctaccaccctcactttctccccaactctgaaatgcttttcactctctacctaggctgaagccgacgtagcttctctgaacagacgcatccagctggttgaggaagagttggatcgtgcccaggagcgtctggcaacagctttgcagaagctggaggaagctgagaaggcagcagatgagagtgagagaggcatgaaagtcattgagagtcgagcccaaaaagatgaagaaaaaatggaaattcaggagatccaactgaaagaggccaagcacattgctgaagatgccgaccgcaaatatgaagaggtggcccgtaagctggtcatcattgagagcgacctggaacgtgcagaggagcgggctgagctctcagaaggccaagtccgacagctggaagaacaattaagaataatggatcagaccttgaaagcattaatggctgcagaggataagcaaatgtgccgagcttgaagaagaattgaaaactgtgacgaacaacttgaagtcactggaggctcaggctgagaagtactcgcagaaggaagacagatatgaggaagagatcaaggtcctttccgacaagctgaaggaggctgagactcgggctgagtttgcggagaggtcagtaactaaattggagaaaagcattgatgacttagaagagaaagtggctcatgccaaagaagaaaaccttagtatgcatcagatgctggatcagactttactggagttaaacaacatgtgaaaacctccttagctgcgaccacattctttcgttttgttttgttttgtttttaaacacctgcttaccccttaaatgcaatttatttacttttaccactgtcacagaaacatccacaagataccagctaggtcagggggtggggaaaacacatacaaaaaggcaagcccatgtcagggcgatcctggttcaaatgtgccatttcccgggttgatgctgccacactttgtagagagtttagcaacacagtgtgcttagtcagcgtaggaatcctcactaaagcagaagaagttccattcaaagtgccaatgatagagtcaacaggaaggttaatgttggaaacacaatcaggtgtggattggtgctactttgaacaaaaggtccccctgtggtcttttgttcaacattgtacaatgtagaactctgtccaacactaatttattttgtcttgagttttactacaagatgagactatggatcccgcatgcctgaattcactaaagccaagggtctgtaagccacgctgctcttccgagacttccattcctttctgattggcacacgtgcagctcatgacaatctgtaggataacaatcagtgtggatttccactcttttcagtccttcatgttaaagatttagacaccacatacaactggtaaaggacgttttcttgagagttttaactatatgtaaacattgtataatgatatggaataaaatgcacattgtaggacattttct

SEQ ID NO: 195434 - DNA, 851 bp, Homo sapiens
  Payload ID: 18587
  Gene Name: tropomyosin 1 (alpha)
  ENST ID: ENST00000559281
  CDS Start-End: 1-747
atggcggggagtagctcgctggaggcggtgcgcaggaagatccggagcctgcaggagcaggcggacgccgctgaggagcgcgcgggcaccctgcagcgcgagctggaccacgagaggaagctgagggagaccgctgaagccgacgtagcttctctgaacagacgcatccagctggttgaggaagagttggatcgtgcccaggagcgtctggcaacagctttgcagaagctggaggaagctgagaaggcagcagatgagagtgagagaggcatgaaagtcattgagagtcgagcccaaaaagatgaagaaaaaatggaaattcaggagatccaactgaaagaggccaagcacattgctgaagatgccgaccgcaaatatgaagaggtggcccgtaagctggtcatcattgagagcgacctggaacgtgcagaggagcgggctgagctctcagaaggcaaatgtgccgagcttgaagaagaattgaaaactgtgacgaacaacttgaagtcactggaggctcaggctgagaagtactcgcagaaggaagacagatatgaggaagagatcaaggtcctttccgacaagctgaaggaggctgagactcgggctgagtttgcggagaggtcagtaactaaattggagaaaagcattgatgacttagaagacgagctgtacgctcagaaactgaagtacaaagccatcagcgaggagctggaccacgctctcaacgatatgacttccatataagtttctttgcttcacttctcccaagactccctcgtcgagctggatgtcccacctctctgagctctgcatttgtctattctccagctgaccctggttctctctct

SEQ ID NO: 195435 - DNA, 1232 bp, Homo sapiens
  Payload ID: 18587
  Gene Name: tropomyosin 1 (alpha)
  ENST ID: ENST00000558910
  CDS Start-End: 1-100
cattgatgacttagaagacgagctgtacgctcagaaactgaagtacaaagccatcagcgaggagctggaccacgctctcaacgatatgacttccatgtaaacgttcatccactctgcctgcttacaccctgccctcatgctaatgtaataaactcaccaccatgccttccttgctccctaatctccatctttgcactcttgtgttcaccctttttgtcataacctagaatagtcattgttttttcactttctgctaatataaaggccaattagattaagtctgtctatacaaaccattttcttttcagaatccgtttattttgtaaacgctgaactagagcagtgaactagaatgagtgaccttgagcactgtccttttgggaaattaagctaaactcaagtaaaactagaaggccatgccgtttgttgtacaggaacttctcaaaaaatatcaaaatttgtttcctgaaattcaactaagtacaacataatcattttcgttaaatataatttgaaggaacccttaaagtgtcaggttattgagaatctgaggataaggaaattggcatgatccaatacagctttaacagtggtactacaaaagatcatctcttttacttttaagaattctagagtaggccgggcacagtggctcacgcctgtaatcccagcactttgggaggccgaggcgggcggatcacgaggtcaggagattgagaccatcctggctaacacggtgaaaccctgtctctactaaaaatacaaaaaaaattagccgggcgtggtggtggatgcctgtagtcccagctactcaggaggctgaggcaggagaatggcatgaacccgggaggtggagcttgcagtcagccgagatcgcaccaccgcactccagcctggacgacagagcgagactctgtctcaagaaaaaaaagaatggtagagtaaaaagaaccctctgctgagtaaccaagcctttaattttgtgtttttatgaaaggaattaaaatacccacgataaatatttaccacaacctgtgtcaaataaatgggaaattaaacacagattgtacaatgtgagcttgggagttaatggcccagattttactgttaggcagtaagagttggagtaggtagtcttgttatcatgagaagaaccttgaacagatacaactaatttacatattactaaccaaacttaaacattaaactttttctactactttaaattctaa

SEQ ID NO: 195436 - DNA, 1655 bp, Homo sapiens
  Payload ID: 18587
  Gene Name: tropomyosin 1 (alpha)
  Uniprot ID: P09493
  ENST ID: ENST00000559397
  CDS Start-End: 73-927
cgctcctccgcccgaccgcgcgctcgccccgccgctcctgctgcagccccagggcccctcgccgccgccaccatggacgccatcaagaagaagatgcagatgctgaagctcgacaaggagaacgccttggatcgagctgagcaggcggaggccgacaagaaggcggcggaagacaggagcaagcagctcgaggaggacatcgcggccaaggagaagttgctgcgggtgtcggaggacgagcgggaccgggtgctggaggagctgcacaaggcggaggacagcctcctggccgccgaagaggccgccgccaaggctgaagccgacgtagcttctctgaacagacgcatccagctggttgaggaagagttggatcgtgcccaggagcgtctggcaacagctttgcagaagctggaggaagctgagaaggcagcagatgagagtgagagaggcatgaaagtcattgagagtcgagcccaaaaagatgaagaaaaaatggaaattcaggagatccaactgaaagaggccaagcacattgctgaagatgccgaccgcaaatatgaagaggtggcccgtaagctggtcatcattgagagcgacctggaacgtgcagaggagcgggctgagctctcagaaggccaagtccgacagctggaagaacaattaagaataatggatcagaccttgaaagcattaatggctgcagaggataagtactcgcagaaggaagacagatatgaggaagagatcaaggtcctttccgacaagctgaaggaggctgagactcgggctgagtttgcggagaggtcagtaactaaattggagaaaagcattgatgacttagaagagaaagtggctcatgccaaagaagaaaaccttagtatgcatcagatgctggatcagactttactggagttaaacaacatgtgaaaacctccttagctgcgaccacattctttcgttttgttttgttttgtttttaaacacctgcttaccccttaaatgcaatttatttacttttaccactgtcacagaaacatccacaagataccagctaggtcagggggtggggaaaacacatacaaaaaggcaagcccatgtcagggcgatcctggttcaaatgtgccatttcccgggttgatgctgccacactttgtagagagtttagcaacacagtgtgcttagtcagcgtaggaatcctcactaaagcagaagaagttccattcaaagtgccaatgatagagtcaacaggaaggttaatgttggaaacacaatcaggtgtggattggtgctactttgaacaaaaggtccccctgtggtcttttgttcaacattgtacaatgtagaactctgtccaacactaatttattttgtcttgagttttactacaagatgagactatggatcccgcatgcctgaattcactaaagccaagggtctgtaagccacgctgctcttccgagacttccattcctttctgattggcacacgtgcagctcatgacaatctgtaggataacaatcagtgtggatttccactcttttcagtccttcatgttaaagatttagacaccacatacaactggtaaaggacgttttcttgagagttttaactatatgtaaacattgtataatgatatggaataaaatgcacattgt

SEQ ID NO: 195437 - DNA, 1525 bp, Homo sapiens
  Payload ID: 18587
  Gene Name: tropomyosin 1 (alpha)
  ENST ID: ENST00000558347
  CDS Start-End: 76-549
tcccgctcctccgcccgaccgcgcgctcgccccgccgctcctgctgcagccccagggcccctcgccgccgccaccatggacgccatcaagaagaagatgcagatgctgaagctcgacaaggagaacgccttggatcgagctgagcaggcggaggccgacaagaaggcggcggaagacaggagcaagcagctggaagatgagctggtgtcactgcaaaagaaactcaagggcaccgaagatgaactggacaaatactctgaggctctcaaagatgcccaggagaagctggagctggcagagaaaaaggccaccgatgctgaagccgacgtagcttctctgaacagacgcatccagctggttgaggaagagttggatcgtgcccaggagcgtctggcaacagctttgcagaagctggaggaagctgagaaggcagcagatgagagtgagaggtggcccgtaagctggtcatcattgagagcgacctggaacgtgcagaggagcgggctgagctctcagaaggccaagtccgacagctggaagaacaattaagaataatggatcagaccttgaaagcattaatggctgcagaggataagtactcgcagaaggaagacagatatgaggaagagatcaaggtcctttccgacaagctgaaggaggctgagactcgggctgagtttgcggagaggtcagtaactaaattggagaaaagcattgatgacttagaagagaaagtggctcatgccaaagaagaaaaccttagtatgcatcagatgctggatcagactttactggagttaaacaacatgtgaaaacctccttagctgcgaccacattctttcgttttgttttgttttgtttttaaacacctgcttaccccttaaatgcaatttatttacttttaccactgtcacagaaacatccacaagataccagctaggtcagggggtggggaaaacacatacaaaaaggcaagcccatgtcagggcgatcctggttcaaatgtgccatttcccgggttgatgctgccacactttgtagagagtttagcaacacagtgtgcttagtcagcgtaggaatcctcactaaagcagaagaagttccattcaaagtgccaatgatagagtcaacaggaaggttaatgttggaaacacaatcaggtgtggattggtgctactttgaacaaaaggtccccctgtggtcttttgttcaacattgtacaatgtagaactctgtccaacactaatttattttgtcttgagttttactacaagatgagactatggatcccgcatgcctgaattcactaaagccaagggtctgtaagccacgctgctcttccgagacttccattcctttctgattggcacacgtgcagctcatgacaatctgtaggataacaatcagtgtggatttccactcttttcagtccttcatgttaaagatttagacaccacatacaactggtaaaggacgttttcttgagagttttaactatatgtaaacattgtataatgatatggaa

SEQ ID NO: 195438 - DNA, 573 bp, Homo sapiens
  Payload ID: 18587
  Gene Name: tropomyosin 1 (alpha)
  ENST ID: ENST00000559831
  CDS Start-End: 1-429
aaggccaccgatgctgaagccgacgtagcttctctgaacagacgcatccagctggttgaggaagagttggatcgtgcccaggagcgtctggcaacagctttgcagaagctggaggaagctgagaaggcagcagatgagagtgagagaggcatgaaagtcattgagagtcgagcccaaaaagatgaagaaaaaatggaaattcaggagatccaactgaaagaggccaagcacattgctgaagatgccgaccgcaaatatgaagaggtggcccgtaagctggtcatcattgagagcgacctggaacgtgcagaggagcgggctgagctctcagaaggccaagtccgacagctggaagaacaattaagaataatggatcagaccttgaaagcattaatggctgcagaggataagcaaatgtgccgagcttgaagaagaattgaaaactgtgacgaacaacttgaagtcactggaggctcaggctgagaagtactcgcagaaggaagacagatatgaggaagagatcaaggtcctttccgacaagctgaaggaggctgagactcgggctgagtttgc

SEQ ID NO: 195439 - DNA, 485 bp, Homo sapiens
  Payload ID: 18587
  Gene Name: tropomyosin 1 (alpha)
  ENST ID: ENST00000560445
  CDS Start-End: 84-296
gctcgcactcccgctcctccgcccgaccgcgcgctcgccccgccgctcctgctgcagccccagggcccctcgccgccgccaccatggacgccatcaagaagaagatgcagatgctgaagctcgacaaggagaacgccttggatcgagctgagcaggcggaggccgacaagaaggcggcggaagacaggagcaagcagctggaagatgagctggtgtcactgcaaaagaaactcaagggcaccgaagatgaactggacaaatactctgagctctgcatttgtctattctccagctgaccctggttctctctcttagcatcctgccttagagccaggcacacactgtgctttctattgtacagaagctcttcgtttcagtgtcaaataaacactgtgtaagctatttctgtttgctattctttttacttcttatttattgacattttagtttcaacattgaataaaactacaaagctgcttcacaca

SEQ ID NO: 195440 - DNA, 570 bp, Homo sapiens
  Payload ID: 18587
  Gene Name: tropomyosin 1 (alpha)
  ENST ID: ENST00000560615
  CDS Start-End: 247-570
ccacgcctccagggcgcacctggcgcacctgggccagctggcggcgggctctggggaggggcccggcctgttctcctgagcctttgttttccatctcgctgatccaaagctgaagccgacgtagcttctctgaacagacgcatccagctggttgaggaagagttggatcgtgcccaggagcgtctggcaacagctttgcagaagctggaggaagctgagaaggcagcagatgagagtgagagaggcatgaaagtcattgagagtcgagcccaaaaagatgaagaaaaaatggaaattcaggagatccaactgaaagaggccaagcacattgctgaagatgccgaccgcaaatatgaagaggtggcccgtaagctggtcatcattgagagcgacctggaacgtgcagaggagcgggctgagctctcagaaggccaagtccgacagctggaagaacaattaagaataatggatcagaccttgaaagcattaatggctgcagaggataagtactcgcagaaggaagacagatatgaggaagagatcaaggtcctttccgacaagctgaaggag

SEQ ID NO: 195441 - DNA, 1039 bp, Homo sapiens
  Payload ID: 18587
  Gene Name: tropomyosin 1 (alpha)
  ENST ID: ENST00000560970
  CDS Start-End: 1-797
atcgagctgagcaggcggaggccgacaagaaggcggcggaagacaggagcaagcagctggaagatgagctggtgtcactgcaaaagaaactcaagggcaccgaagatgaactggacaaatactctgaggctctcaaagatgcccaggagaagctggagctggcagagaaaaaggccaccgatgctgaagccgacgtagcttctctgaacagacgcatccagctggttgaggaagagttggatcgtgcccaggagcgtctggcaacagctttgcagaagctggaggaagctgagaaggcagcagatgagagtgagagaggcatgaaagtcattgagagtcgagcccaaaaagatgaagaaaaaatggaaattcaggagatccaactgaaagaggccaagcacattgctgaagatgccgaccgcaaatatgaagaggtggcccgtaagctggtcatcattgagagcgacctggaacgtgcagaggagcgggctgagctctcagaaggcaaatgtgccgagcttgaagaagaattgaaaactgtgacgaacaacttgaagtcactggaggctcaggctgagaagtactcgcagaaggaagacagatatgaggaagagatcaaggtcctttccgacaagctgaaggaggctgagactcgggctgagtttgcggagaggtcagtaactaaattggagaaaagcattgatgacttagaagacgagctgtacgctcagaaactgaagtacaaagccatcagcgaggagctggaccacgctctcaacgatatgacttccatgtaaacgttcatccactctgcctgcttacaccctgccctcatgctaatataagtttctttgcttcacttctcccaagactccctcgtcgagctggatgtcccacctctctgagctctgcatttgtctattctccagctgaccctggttctctctcttagcatcctgccttagagccaggcacacactgtgctttctattgtacagaagctcttcgtttcagtgtcaaataaacactgtgtaagcta

SEQ ID NO: 195442 - DNA, 673 bp, Homo sapiens
  Payload ID: 18587
  Gene Name: tropomyosin 1 (alpha)
  ENST ID: ENST00000561395
  CDS Start-End: 1-207
ctgaacagacgcatccagctggttgaggaagagttggatcgtgcccaggagcgtctggcaacagctttgcagaagctggaggaagctgagaaggcagcagatgagagtgagagaggcatgaaagtcattgagagtcgagcccaaaaagatgaagaaaaaatggaaattcaggagatccaactgaaagagcaaatgtgccgagcttgaagaagaattgaaaactgtgacgaacaacttgaagtcactggaggctcaggctgagaagtactcgcagaaggaagacagatatgaggaagagatcaaggtcctttccgacaagctgaaggaggctgagactcgggctgagtttgcggagaggtcagtaactaaattggagaaaagcattgatgacttagaagacgagctgtacgctcagaaactgaagtacaaagccatcagcgaggagctggaccacgctctcaacgatatgacttccatataagtttctttgcttcacttctcccaagactccctcgtcgagctggatgtcccacctctctgagctctgcatttgtctattctccagctgaccctggttctctctcttagcatcctgccttagagccaggcacacactgtgctttctattgtacagaagctcttcgtttcagtgtcaaataaacactgtgtaagc

SEQ ID NO: 195443 - DNA, 292 bp, Homo sapiens
  Payload ID: 18587
  Gene Name: tropomyosin 1 (alpha)
  ENST ID: ENST00000560679
  CDS Start-End: 269-292
atgtgcaaggctggaatgaacatgaggtgctgtttccttcctttctggtgactcggctgtgtggggagctggggatagagacctgtcacccagagggttctttccccaaagcataaacagtcgtctttctgctgaagccgacgtagcttctctgaacagacgcatccagctggttgaggaagagttggatcgtgcccaggagcgtctggcaacagctttgcagaagctggaggaagctgagaaggcagcagatgagagtgagagaggcatgaaagtcattgagagtcgagcc

SEQ ID NO: 195444 - DNA, 582 bp, Homo sapiens
  Payload ID: 18587
  Gene Name: tropomyosin 1 (alpha)
  ENST ID: ENST00000561425
  CDS Start-End: 80-202
gcactcccgctcctccgcccgaccgcgcgctcgccccgccgctcctgctgcagccccagggcccctcgccgccgccaccatggacgccatcaagaagaagatgcagatgctgaagctcgacaaggagaacgccttggatcgagctgagcaggcggaggccgacaagaaggcggcggaagacaggagcaagcagtggacttgagcccgctgagacctcggcaggagtctcgtcccagggcaggtgggtgtgcggggtgagccgcggagcggttccagctcgggtaaagaggaagttacctcgggtcctttgcactccaactcggcggcgccccgagcccgaggggccccagccaacccgacgcccgtgtgttgtgtgtgtctaacacccggtccgtgccggccgcccgcgcccgcccgccgctgcccccagctcgaggaggacatcgcggccaaggagaagttgctgcgggtgtcggaggacgagcgggaccgggtgctggaggagctgcacaaggcggaggacagcctcctggccgccgaagaggccgccgccaaggctgaagccgacgtagcttctctgaa

SEQ ID NO: 195445 - DNA, 925 bp, Homo sapiens
  Payload ID: 18587
  Gene Name: tropomyosin 1 (alpha)
  ENST ID: ENST00000560959
  CDS Start-End: 15-842
taccgtccggcgcgatggcggggagtagctcgctggaggcggtgcgcaggaagatccggagcctgcaggagcaggcggacgccgctgaggagcgcgcgggcaccctgcagcgcgagctggaccacgagaggaagctgagggagaccgctgaagccgacgtagcttctctgaacagacgcatccagctggttgaggaagagttggatcgtgcccaggagcgtctggcaacagctttgcagaagctggaggaagctgagaaggcagcagatgagagtgagagaggcatgaaagtcattgagagtcgagcccaaaaagatgaagaaaaaatggaaattcaggagatccaactgaaagaggccaagcacattgctgaagatgccgaccgcaaatatgaagaggtggcccgtaagctggtcatcattgagagcgacctggaacgtgcagaggagcgggctgagctctcagaaggccaagtccgacagctggaagaacaattaagaataatggatcagaccttgaaagcattaatggctgcagaggataagtactcgcagaaggaagacagatatgaggaagagatcaaggtcctttccgacaagctgaaggaggctgagactcgggctgagtttgcggagaggtcagtaactaaattggagaaaagcattgatgacttagaaggtaagatcttaagtagtgtttttagtttaatccttatggttgaataccaacctggcaaaacaattttccaattcaagggcatccacattgatacgctcctttgcacttgcacattcttcctgtgtgtcctctggggtttttctctgtggctcttgaactcatgaacctaagtcttctgctcacgaggtgactagttagccaccagccatagtggcaaatgccatccagcttgacttcatgctcatta

SEQ ID NO: 195446 - DNA, 1399 bp, Homo sapiens
  Payload ID: 18587
  Gene Name: tropomyosin 1 (alpha)
  ENST ID: ENST00000558544
  CDS Start-End: 77-226
ccgcggcagccgggtccgcagggcagcagccggcctctcccactgcagccctcccgcccgcctaccgtccggcgcgatggcggggagtagctcgctggaggcggtgcgcaggaagatccggagcctgcaggagcaggcggacgccgctgaggagcgcgcgggcaccctgcagcgcgagctggaccacgagaggaagctgagggagaccaggcatgaaagtcattgagagtcgagcccaaaaagatgaagaaaaaatggaaattcaggagatccaactgaaagaggccaagcacattgctgaagatgccgaccgcaaatatgaagaggtggcccgtaagctggtcatcattgagagcgacctggaacgtgcagaggagcgggctgagctctcagaaggccaagtccgacagctggaagaacaattaagaataatggatcagaccttgaaagcattaatggctgcagaggataagtactcgcagaaggaagacagatatgaggaagagatcaaggtcctttccgacaagctgaaggaggctgagactcgggctgagtttgcggagaggtcagtaactaaattggagaaaagcattgatgacttagaagagaaagtggctcatgccaaagaagaaaaccttagtatgcatcagatgctggatcagactttactggagttaaacaacatgtgaaaacctccttagctgcgaccacattctttcgttttgttttgttttgtttttaaacacctgcttaccccttaaatgcaatttatttacttttaccactgtcacagaaacatccacaagataccagctaggtcagggggtggggaaaacacatacaaaaaggcaagcccatgtcagggcgatcctggttcaaatgtgccatttcccgggttgatgctgccacactttgtagagagtttagcaacacagtgtgcttagtcagcgtaggaatcctcactaaagcagaagaagttccattcaaagtgccaatgatagagtcaacaggaaggttaatgttggaaacacaatcaggtgtggattggtgctactttgaacaaaaggtccccctgtggtcttttgttcaacattgtacaatgtagaactctgtccaacactaatttattttgtcttgagttttactacaagatgagactatggatcccgcatgcctgaattcactaaagccaagggtctgtaagccacgctgctcttccgagacttccattcctttctgattggcacacgtgcagctcatgacaatctgtaggataacaatcagtgtggatttccactcttttcagtccttcatgttaaagatttagacaccacatacaactggtaaaggacgttttcttgagagttttaactatatgtaaacattgtataatgatatg

SEQ ID NO: 195447 - DNA, 977 bp, Homo sapiens
  Payload ID: 18587
  Gene Name: tropomyosin 1 (alpha)
  Uniprot ID: P09493
  ENST ID: ENST00000559556
  CDS Start-End: 73-927
cgctcctccgcccgaccgcgcgctcgccccgccgctcctgctgcagccccagggcccctcgccgccgccaccatggacgccatcaagaagaagatgcagatgctgaagctcgacaaggagaacgccttggatcgagctgagcaggcggaggccgacaagaaggcggcggaagacaggagcaagcagctggaagatgagctggtgtcactgcaaaagaaactcaagggcaccgaagatgaactggacaaatactctgaggctctcaaagatgcccaggagaagctggagctggcagagaaaaaggccaccgatgctgaagccgacgtagcttctctgaacagacgcatccagctggttgaggaagagttggatcgtgcccaggagcgtctggcaacagctttgcagaagctggaggaagctgagaaggcagcagatgagagtgagagaggcatgaaagtcattgagagtcgagcccaaaaagatgaagaaaaaatggaaattcaggagatccaactgaaagaggccaagcacattgctgaagatgccgaccgcaaatatgaagaggtggcccgtaagctggtcatcattgagagcgacctggaacgtgcagaggagcgggctgagctctcagaaggcaaatgtgccgagcttgaagaagaattgaaaactgtgacgaacaacttgaagtcactggaggctcaggctgagaagtactcgcagaaggaagacagatatgaggaagagatcaaggtcctttccgacaagctgaaggaggctgagactcgggctgagtttgcggagaggtcagtaactaaattggagaaaagcattgatgacttagaagagaaagtggctcatgccaaagaagaaaaccttagtatgcatcagatgctggatcagactttactggagttaaacaacatgtgaaaacctccttagctgcgaccacattctttcgttttgttttgttttgtttt

SEQ ID NO: 195448 - DNA, 671 bp, Homo sapiens
  Payload ID: 18587
  Gene Name: tropomyosin 1 (alpha)
  ENST ID: ENST00000561266
  CDS Start-End: 1-671
aggagctgcacaaggcggaggacagcctcctggccgccgaagaggccgccgccaaggctgaagccgacgtagcttctctgaacagacgcatccagctggttgaggaagagttggatcgtgcccaggagcgtctggcaacagctttgcagaagctggaggaagctgagaaggcagcagatgagagtgagagaggcatgaaagtcattgagagtcgagcccaaaaagatgaagaaaaaatggaaattcaggagatccaactgaaagaggccaagcacattgctgaagatgccgaccgcaaatatgaagaggtggcccgtaagctggtcatcattgagagcgacctggaacgtgcagaggagcgggctgagctctcagaaggcaaatgtgccgagcttgaagaagaattgaaaactgtgacgaacaacttgaagtcactggaggctcaggctgagaagtactcgcagaaggaagacagatatgaggaagagatcaaggtcctttccgacaagctgaaggaggctgagactcgggctgagtttgcggagaggtcagtaactaaattggagaaaagcattgatgacttagaagacgagctgtacgctcagaaactgaagtacaaagccatcagcgaggagctggaccacgctctcaacgatatgacttccatgtaa

SEQ ID NO: 195449 - DNA, 3957 bp, Homo sapiens
  Payload ID: 18587
  Gene Name: tropomyosin 1 (alpha)
  ENST ID: ENST00000610733
  CDS Start-End: 144-464
ttgaggaatgcggtcgcccccttgggaaagtacatatctgggagaagcaggcggctccgcgctcgcactcccgctcctccgcccgaccgcgcgctcgccccgccgctcctgctgcagccccagggcccctcgccgccgccaccatggacgccatcaagaagaagatgcagatgctgaagctcgacaaggagaacgccttggatcgagctgagcaggcggaggccgacaagaaggcggcggaagacaggagcaagcagctggaagatgagctggtgtcactgcaaaagaaactcaagggcaccgaagatgaactggacaaatactctgaggctctcaaagatgcccaggagaagctggagctggcagagaaaaaggccaccgatgtaagtgcacgctcacactgcttccctcacctcttgcctgcgtggccactccggggtcaccacagggctggagagcaatgaaggaagtttaccttttcctgctggacacctgcacacagccctgccatggcccagagcattggatgccgcctctgactgctactgcacacattcatttatatttcatccactcctctcttcttctcctttcctttacctccctgggggtggaggtgggtggatgagaggctgggagaatagagcagctgaaattggactctggaggtgaacttcacctccctggtggcagaaaacccttgaggtgtcatcaccaaggtttgtgtagagaatgccaggttttcttcactttctttccttttgccgtttccagtgggtgggaagttctgggtttggtggtgggtctagtcagggttcagagaacctggcctctaaatgaaagaaatgacacagcggtacctttacttagatggctgcacttcatggtggggcacagagacactttgaggcttcctttctcattagtgtaagccttaatccaccccttaagatctgcctgggaagatgatacttgcttgggtctgcagtctgaaggcactagatccagaaagtaagctgtgagttatatatagctcagtgctttatatggtatagtgagctagctgccccctgcccctcctgctggccccgcccccacctgtcagccttctgacaaccaccacatagttgcaggggtgatgcacacagctaaggctctcctaagctctttgtccactgccctttggaagctttttaattgatagcttgcctcttctgcctcggaaagtcaagccaaaggaccaacttcttttcacaccgttggattccattctaaaagctaattaagcctagaggcccaattagaaaagaattccttgggaagttggtaacaattccaagaatgtgtgagcaccagggaaagctatgccagcagttgaaacaccgagagcaacagcagacttttttatatgaaagtaacatgcaaataactgaagggtctcaggtcttgaaattagtgaagtcttttgtagcatgaaaggcttgagatgtatatccaggtgtgctttgtaaatgagaactccagagacgacatttaggatctgacaaaaagaaattttcagtgaaaatcaagcttcctggaaaggggatttggggggaagcactgatttcgctaaaacatttaaattctaaactacctggctttggaaaaagagccaaaaaccatatatgactctgagcctactttgtataatgcagatcagatgcctgctctatatatggctaaatggaagatgcctgcctcccgcaaattctccagcaggacgtttatttagctttttcaaaagagctgctaatagatcaaggaaagatattccttataaggaaaagaatgcagagaatttgaaaatagcccagtaagactgaaggcaaaagagggagaaaaaggttactacaattcttaagggaaaaaaataggataataattattgtaactatgtagtgctaacatgtctttattgaaaagtcttgttgaagggagcgctggaatggggtggggcagaaatgggaaagaagttatttaaagtcagctggtgtgggaagcagcaggggagggagcttcttgaatcttgttttggttatttttcccaccgggaaactgcccctaaatctggcatatatggcttttttgatagtgtattgatcacattcccttttaggacactttaggttgtctggagtttggagcccgtaggaatattgaagaagttagtgaagaaatgctatacagtcatttgttgattaatgaagggggataaggtctgagacatgtgtcgttaggtgatttattcattgtgcaaacaccatagagtgtatggtacttacacaaacctagagggtatagcctactaaacacctaggctacaaacttgtacagtgtgttactgtactgaatactgtcaacaattgtaacacaaatcaccaggcgataggaattttttagttctattgtaatcttatgaggctactctcatatatgcagcccctcattgaccaaaacatcattatgcagtgcatgaccatattgagagtattcgttttttatttactaaaaaatagtcaaaacttgaggaggaagagacagatgtcactagaaaaagggagaagtccggtaagggagaagtcagcttcctgaggtggaatcgtattacctttgggattaggacatttcattgtcattattcaccagtgtaaaacacttttacatttttctactattattactaaaaacatttttctactactttacaaatcctattctggaagtgggctctacctagcttagaagattgtcattcaggagtagtatccctgatggtcttgtttcgaattttgtgttgtctttccacctaagtcaaaagtgaggctgaaggggatcgaagactccatttttttctggcccccaatctcttccccagtaactgtgatatatctgatatttatagcatatgagtctttatccctttgtaggtctttacttcttaacttagggattctcaaccttctctaaacataatcacttagggagcttttaaaacccaaagttaggatgcacccaaagccagttaaatcagaatccctggggatgcaacccaggcggcagcatttaaaaaatacccaagtgattccaacctacagacaaggatgagaaaactctcctaaactcttgtataatgacatcggcatgaaaatgaactcacctgaaactgaccttcccaggacattaagtcactagttggctgcttatggcacttgccagtgtccagcagtttcctggctgctcctggaggttgccagacacccggttcccccattctcaatgttggaggcccacagtctctgcacttaggggaccagctgtaacctccccacctgaccagatgaaccgcggggaaacaaagcgagaagctcccacctacaggatgcaaggacccaagctgggatttgtgagagtctcagcagaggctgtgaggaactccacagaaaatgaggcaggaaagcaaaagttccttgttagggcttggaggaggagagggttgtcaagcatgttttctttattattcccacacataagggagctggctttaagagctttctgtgacaaacctgaggagaaaaagccctgagacttagaaggcatttaagaatacagctcaagggggaaatcggtggagactgtatctgcggtggttttctccacctgtagccagaggctctctcatagggttctgtggctttccttggggtgccttttaaaggcatcccagtccagcccaggactgactggattccaggagatctcagaggctggtctgacaccaaagaaggctgtaaagagaagagaccatttggatgactgttttcatggaaagtgagccccagggaggctggcctgagattacacagctgattatgggcctcagcctgactcttaaaacaatgcttgtgtatttcttaa

SEQ ID NO: 195450 - DNA, 1189 bp, Homo sapiens
  Payload ID: 18588
  Gene Name: tropomyosin 2 (beta)
  Uniprot ID: P07951
  ENST ID: ENST00000360958
  CDS Start-End: 106-960
cccgctccgtcctcctcgcctgccaccggtgcacccagtccgctcacccagcccagtccgtccggtcctcaccgcctgccggccggcccaccccccaccgcagccatggacgccatcaagaagaagatgcagatgctgaagctggacaaggagaacgccatcgaccgcgccgagcaggccgaagccgacaagaagcaagctgaggaccgctgcaagcagctggaggaggagcagcaggccctccagaagaagctgaaggggacagaggatgaggtggaaaagtattctgaatccgtgaaggaggcccaggagaaactggagcaggccgagaagaaggccactgatgctgaggcagatgtggcctccctgaaccgccgcattcagctggttgaggaggagctggaccgggcccaggagcgcctggctacagccctgcagaagctggaggaggccgagaaggcggctgatgagagcgagagaggaatgaaggtcatcgaaaaccgggccatgaaggatgaggagaagatggaactgcaggagatgcagctgaaggaggccaagcacatcgctgaggattcagaccgcaaatatgaagaggtggccaggaagctggtgatcctggaaggagagctggagcgctcggaggagagggctgaggtggccgagagtaaatgtggggacctagaggaggagctgaaaattgttaccaacaacttgaaatccctggaggcccaggcggacaagtattccaccaaagaagataaatatgaagaggagatcaaactgttggaggagaagctgaaggaggctgagacccgagcagagtttgccgagaggtctgtggcaaagttggagaaaaccatcgatgacctagaagatgaagtctatgcccagaagatgaagtacaaggccattagcgaggaactggacaacgcactcaatgacatcacctccctctgagccccacgccagcgtggccacctcagctctcttctctcctctcctttccattctctctatggggaggggagcaggcaggaggagcagaaattgccaacattgcacagccaggctgggagcagcctagggagagcccccatcatgcccaccacccactctggcactggcttcatcctttacctatccccttccaccctcctttgctgcttaataaattctgaacttggtc

SEQ ID NO: 195451 - DNA, 1018 bp, Homo sapiens
  Payload ID: 18588
  Gene Name: tropomyosin 2 (beta)
  ENST ID: ENST00000329305
  CDS Start-End: 97-951
tcctcctcgcctgccaccggtgcacccagtccgctcacccagcccagtccgtccggtcctcaccgcctgccggccggcccaccccccaccgcagccatggacgccatcaagaagaagatgcagatgctgaagctggacaaggagaacgccatcgaccgcgccgagcaggccgaagccgacaagaagcaagctgaggaccgctgcaagcagctggaggaggagcagcaggccctccagaagaagctgaaggggacagaggatgaggtggaaaagtattctgaatccgtgaaggaggcccaggagaaactggagcaggccgagaagaaggccactgatgctgaggcagatgtggcctccctgaaccgccgcattcagctggttgaggaggagctggaccgggcccaggagcgcctggctacagccctgcagaagctggaggaggccgagaaggcggctgatgagagcgagagaggaatgaaggtcatcgaaaaccgggccatgaaggatgaggagaagatggaactgcaggagatgcagctgaaggaggccaagcacatcgctgaggattcagaccgcaaatatgaagaggtggccaggaagctggtgatcctggaaggagagctggagcgctcggaggagagggctgaggtggccgagagtaaatgtggggacctagaggaggagctgaaaattgttaccaacaacttgaaatccctggaggcccaggcggacaagtattccaccaaagaagataaatatgaagaggagatcaaactgttggaggagaagctgaaggaggctgagacccgagcagagtttgccgagaggtctgtggcaaagttggagaaaaccatcgatgacctagaagagaccttggccagtgccaaggaggagaacgtcgagattcaccagaccttggaccagaccctgctggaactcaacaacctgtgagggccagccccacccccagccaggctatggttgccaccccaacccaataaaactgatgttactagcc

SEQ ID NO: 195452 - DNA, 2147 bp, Homo sapiens
  Payload ID: 18588
  Gene Name: tropomyosin 2 (beta)
  Uniprot ID: P07951
  ENST ID: ENST00000378292
  CDS Start-End: 1204-2058
gagaaggcacctcgccccggaccccctatgccccgcagctcagtgactcttcccctcgccctccgccttccccgccgcagcccggctccgcctcccaatggggaaacatcccaaaaaagggcagaaaagaaatttcagcataaagttggcccactgggaaagagaggagcgtccgcggggagcgggggagaagagggaaggcgcgcggaggggagtggggccaggcggagccaggggcggggagcggaggggctcgggacgcgtccgggtgggagcgggggcggggaacgcgcggtgaccagcctggccgcagccgcgtggaaaatatgcggggcacgtggggggcggggcggggagctgggtcctgagccgccgggtgctcgcaggaagggcctggctccaggggcaggggctgggaggggaggcgaggggatgagaggtcaggccggtcctgggggcagcaagcccggccacactccccaccgcgaccggggctctgggctcgcttcctgcttcagtttccccaagctcccgatgagactccgctactaccaccacgtcgataacgcaaacctagagggactcagggtaaactgaggcactcaaactgccgaggagctccgcctcccgagagacatttaatccggggggatttgcaggaaacttctaaattaagggtagcggctgctgcagctgagggggggcacgccggtccctgcgcccgggcagctgccgtgagctcacgccccgaaatagccccaggggccccagccgcagctgccactgggtccggctgtcactcagaggaagcacggagcccccagcccaagggtcccctccccttcgcatcgccggggtttttccagccgaccgtcggccactttttcctccgacggctggcagggaagagggggatgggggcgggaccccaagggaggcggtccccagtgggtgggcgaagggggcggccgcaccccccggccgggccgtgcttctgcccctacaaggtttgggccgaggtgggggagggtcctggttgccggccccgcccggtccctccccgccttttaggcgcccgcgtggccgggacgtcccagtcccgctccgtcctcctcgcctgccaccggtgcacccagtccgctcacccagcccagtccgtccggtcctcaccgcctgccggccggcccaccccccaccgcagccatggacgccatcaagaagaagatgcagatgctgaagctggacaaggagaacgccatcgaccgcgccgagcaggccgaagccgacaagaagcaagctgaggaccgctgcaagcagctggaggaggagcagcaggccctccagaagaagctgaaggggacagaggatgaggtggaaaagtattctgaatccgtgaaggaggcccaggagaaactggagcaggccgagaagaaggccactgatgctgaggcagatgtggcctccctgaaccgccgcattcagctggttgaggaggagctggaccgggcccaggagcgcctggctacagccctgcagaagctggaggaggccgagaaggcggctgatgagagcgagagaggaatgaaggtcatcgaaaaccgggccatgaaggatgaggagaagatggaactgcaggagatgcagctgaaggaggccaagcacatcgctgaggattcagaccgcaaatatgaagaggtggccaggaagctggtgatcctggaaggagagctggagcgctcggaggagagggctgaggtggccgagagccgagccagacagctggaggaggaacttcgaaccatggaccaggccctcaagtccctgatggcctcagaggaggagtattccaccaaagaagataaatatgaagaggagatcaaactgttggaggagaagctgaaggaggctgagacccgagcagagtttgccgagaggtctgtggcaaagttggagaaaaccatcgatgacctagaagagaccttggccagtgccaaggaggagaacgtcgagattcaccagaccttggaccagaccctgctggaactcaacaacctgtgagggccagccccacccccagccaggctatggttgccaccccaacccaataaaactgatgttactagcctctcaaggccctttaatccttt

SEQ ID NO: 195453 - DNA, 1771 bp, Homo sapiens
  Payload ID: 18588
  Gene Name: tropomyosin 2 (beta)
  ENST ID: ENST00000378300
  CDS Start-End: 87-1055
ctgccaccggtgcacccagtccgctcacccagcccagtccgtccggtcctcaccgcctgccggccggcccaccccccaccgcagccatggacgccatcaagaagaagatgcagatgctgaagctggacaaggagaacgccatcgaccgcgccgagcaggccgaagccgacaagaagcaagctgaggaccgctgcaagcagctggaggaggagcagcaggccctccagaagaagctgaaggggacagaggatgaggtggaaaagtattctgaatccgtgaaggaggcccaggagaaactggagcaggccgagaagaaggccactgatgctgaggcagatgtggcctccctgaaccgccgcattcagctggttgaggaggagctggaccgggcccaggagcgcctggctacagccctgcagaagctggaggaggccgagaaggcggctgatgagagcgagagaggaatgaaggtcatcgaaaaccgggccatgaaggatgaggagaagatggaactgcaggagatgcagctgaaggaggccaagcacatcgctgaggattcagaccgcaaatatgaagaggtggccaggaagctggtgatcctggaaggagagctggagcgctcggaggagagggctgaggtggccgagagtaaatgtggggacctagaggaggagctgaaaattgttaccaacaacttgaaatccctggaggcccaggcggacaagtattccaccaaagaagataaatatgaagaggagatcaaactgttggaggagaagctgaaggaggctgagacccgagcagagtttgccgagaggtctgtggcaaagttggagaaaaccatcgatgacctagaagagagcacctctatcgccaccacggagcactggttcactcctgacaccctggcacttactgacacccccagcccctgcactgagcccacccacaaaacaccatggcccacgctgaaacccctctgcacaggcactccctggctgtcgctctctgattcaccactgcatgtgggcacgtgtggccccatcaaaccatgaccgcctctggtgccaatccctgacctcagagcacttagctggggttccaggatcaaacagagtgactggaaaggaagtagggtggtgaggtgcaggacaggggcaagaaggttgcaaaaggtctggaatggagcttggaaaaatgttggatatcagcaacatggggctttcactgcagcagcaggtctgttttctacctcaagtctgtctgtctggcccttcctttcctggcgcagtctttgtcttaccttctgtctccaacttccttaaaccttctaaagaagaggataaagtagtttatgactcagccctccccaccccacctctatgaccccaaggccttgagtgaggcatccacgtccgtcctgttcccctcatcctagtcagtccatctgtttgtccctgccaaggggccctgaggtccgtgaatgcatgtgtcttccttgacccactccatgtctatatgtcaccttcccctggccctgcctccccacgtctcccccttgtgtctcccttctccctcacctgctgcttcccctcacagagaccttggccagtgccaaggaggagaacgtcgagattcaccagaccttggaccagaccctgctggaactcaacaacctgtgagggccagccccacccccagccaggctatggttgccaccccaacccaataaaactgatgttactagcctctcaaggccctttaatccttt

SEQ ID NO: 195454 - DNA, 518 bp, Homo sapiens
  Payload ID: 18588
  Gene Name: tropomyosin 2 (beta)
  ENST ID: ENST00000607559
  CDS Start-End: 1-336
atcgctgaggattcagaccgcaaatatgaagaggtggccaggaagctggtgatcctggaaggagagctggagcgctcggaggagagggctgaggtggccgagagtaaatgtggggacctagaggaggagctgaaaattgttaccaacaacttgaaatccctggaggcccaggcggacaagtattccaccaaagaagataaatatgaagaggagatcaaactgttggaggagaagctgaaggaggctgagacccgagcagagtttgccgagaggtctgtggcaaagttggagaaaaccatcgatgacctagaaggtaaaagaagcctttataagtaggtccacacctgccgtgattatcagtctgtcctgtaccttctcatcccattttatttgccaccaataaactagggttgggccacctaggaccctaccaactccccaactctgtgggccatgtctacaattcaagtaattgtagctgcccacggcgcaacaactccagtgcttctcaaacttca

SEQ ID NO: 195455 - DNA, 1219 bp, Homo sapiens
  Payload ID: 18589
  Gene Name: tropomyosin 3
  ENST ID: ENST00000271850
  CDS Start-End: 41-898
ctccagtgttcacaggtgagcctaccaacagccactgctcatgatggaggccatcaagaaaaagatgcagatgctgaagttagacaaggagaatgctctggatcgggcagagcaagctgaagctgagcagaagcaggcagaagaaagaagtaaacagctggaggatgagctggcagccatgcagaagaagctgaaagggacagaggatgagctggacaagtattctgaagctttgaaggatgcccaggagaagctggaactggcagagaagaaggctgctgatgctgaggctgaggtggcctccttgaaccgtaggatccagctggttgaagaagagctggaccgtgctcaggagcgcctggccactgccctgcaaaagctggaagaagctgaaaaagctgctgatgagagtgagagaggtatgaaggttattgaaaaccgggccttaaaagatgaagaaaagatggaactccaggaaatccaactcaaagaagctaagcacattgcagaagaggcagataggaagtatgaagaggtggctcgtaagttggtgatcattgaaggagacttggaacgcacagaggaacgagctgagctggcagagtcccgttgccgagagatggatgagcagattagactgatggaccagaacctgaagtgtctgagtgctgctgaagaaaagtactctcaaaaagaagataaatatgaggaagaaatcaagattcttactgataaactcaaggaggcagagacccgtgctgagtttgctgagagatcggtagccaagctggaaaagacaattgatgacctggaagataaactgaaatgcaccaaagaggagcacctctgtacacaaaggatgctggaccagaccctgcttgacctgaatgagatgtagaacgccccagtcccaccctgctgctgctcctccctctgacccagactccgcctgaggccagcctgcgggaagctgacctttaactgagggctgatctttaactggaaggctgctttctcctttcaccaccccctccttccctgtgtctttttcgccaaactgtctctgcctcttcccggagaatccagctgggctagaggctgagcacctttggaaacaacatttaagggaatgtgagcacaatgcataatgtctttaaaaagcatgttgtgatgtacacattttgtaattaccttttttgttgttttgtagcaaccattt

SEQ ID NO: 195456 - DNA, 741 bp, Homo sapiens
  Payload ID: 18589
  Gene Name: tropomyosin 3
  Uniprot ID: P06753
  ENST ID: ENST00000302206
  CDS Start-End: 209-685
ggtgagctgcatgatgtcttacatttcatgagcttcctctaaatctagttgtatttttcgtctgaggggggctgaggctgaggtggcctccttgaaccgtaggatccagctggttgaagaagagctggaccgtgctcaggagcgcctggccactgccctgcaaaagctggaagaagctgaaaaagctgctgatgagagtgagagaggtatgaaggttattgaaaaccgggccttaaaagatgaagaaaagatggaactccaggaaatccaactcaaagaagctaagcacattgcagaagaggcagataggaagtatgaagaggtggctcgtaagttggtgatcattgaaggagacttggaacgcacagaggaacgagctgagctggcagagtctaagtgttctgagctggaggaggagctgaagaatgtcaccaacaacctcaagtctcttgaggctcaggcggagaagtactctcaaaaagaagataaatatgaggaagaaatcaagattcttactgataaactcaaggaggcagagacccgtgctgagtttgctgagagatcggtagccaagctggaaaagacaattgatgacctggaagataaactgaaatgcaccaaagaggagcacctctgtacacaaaggatgctggaccagaccctgcttgacctgaatgagatgtagaacgccccagtcccaccctgctgctgctcctccctctgacccagactccgcctgag

SEQ ID NO: 195457 - DNA, 2108 bp, Homo sapiens
  Payload ID: 18589
  Gene Name: tropomyosin 3
  Uniprot ID: P06753
  ENST ID: ENST00000330188
  CDS Start-End: 87-833
gcaggcggaagtaagggtgagaggaggctgcaacgccgagcggaggaggcaggaaccggagcgcgagcagtagctgggtgggcaccatggctgggatcaccaccatcgaggcggtgaagcgcaagatccaggttctgcagcagcaggcagatgatgcagaggagcgagctgagcgcctccagcgagaagttgagggagaaaggcgggcccgggaacaggctgaggctgaggtggcctccttgaaccgtaggatccagctggttgaagaagagctggaccgtgctcaggagcgcctggccactgccctgcaaaagctggaagaagctgaaaaagctgctgatgagagtgagagaggtatgaaggttattgaaaaccgggccttaaaagatgaagaaaagatggaactccaggaaatccaactcaaagaagctaagcacattgcagaagaggcagataggaagtatgaagaggtggctcgtaagttggtgatcattgaaggagacttggaacgcacagaggaacgagctgagctggcagagtctaagtgttctgagctggaggaggagctgaagaatgtcaccaacaacctcaagtctcttgaggctcaggcggagaagtactctcaaaaagaagataaatatgaggaagaaatcaagattcttactgataaactcaaggaggcagagacccgtgctgagtttgctgagagatcggtagccaagctggaaaagacaattgatgacctggaagataaactgaaatgcaccaaagaggagcacctctgtacacaaaggatgctggaccagaccctgcttgacctgaatgagatgtagaacgccccagtcccaccctgctgctgctcctccctctgacccagactccgcctgaggccagcctgcgggaagctgacctttaactgagggctgatctttaactggaaggctgctttctcctttcaccaccccctccttccctgtgtctttttcgccaaactgtctctgcctcttcccggagaatccagctgggctagaggctgagcacctttggaaacaacatttaagggaatgtgagcacaatgcataatgtctttaaaaagcatgttgtgatgtacacattttgtaattaccttttttgttgttttgtagcaaccatttgtaaaacattccaaataattccacagtcctgaagcagcaatcgaatccctttctcacttttggaaggtgacttttcaccttaatgcatattcccctctccatagaggagaggaaaaggtgtaggcctgccttaccgagagccaaacagagcccagggagactccgctgtgggaaacctcattgttctgtacaaagtactagctaaaccagaaaggtgattccaggaggagttagccaaacaacaacaaaaacaaaaaatgtgctgttcaagttttcagctttaagatatctttggataatgttatttctattttttatttttttcattagaagttaccaaattaagatggtaagacctctgagaccaaaattttgtcccatctctaccccctcacaactgcttacagaatggatcatgtcccccttatgttgaggtgaccacttaattgctttcctgcctccttgaaagaaagaaagaaagaagactgtgtttttgccactgatttagccatgtgaaactcatctcattacccttttctgggtttgaagctgctgtctctagaagtgccatctcaattgtgctttgtatcagtcagtgctggagaaatcttgaatagcttatgtacaaaactttttaaattttatattattttgaaactttgctttgggtttgtggcaccctggccaccccatctggctgtgacagcctctgcagtccgtgggctggcagtttgttgatcttttaagtttccttccctacccagtccccattttctggtaaggtttctaggaggtctgttaggtgtacatcctgcagcttattggcttaaaatgtactctccttttatgtggtctctttggggccgattgggagaaagagaaatcaatagtgcaactgttttgatactgaatattgacaagtgtctttttgaaataaagaaccagtccctccaa

SEQ ID NO: 195458 - DNA, 2007 bp, Homo sapiens
  Payload ID: 18589
  Gene Name: tropomyosin 3
  ENST ID: ENST00000341372
  CDS Start-End: 63-734
aggctgcaacgccgagcggaggaggcaggaaccggagcgcgagcagtagctgggtgggcaccatggctgggatcaccaccatcgaggcggtgaagcgcaagatccaggttctgcagcagcaggcagatgatgcagaggagcgagctgagcgcctccagcgagaagttgagggagaaagccgtgctcaggagcgcctggccactgccctgcaaaagctggaagaagctgaaaaagctgctgatgagagtgagagaggtatgaaggttattgaaaaccgggccttaaaagatgaagaaaagatggaactccaggaaatccaactcaaagaagctaagcacattgcagaagaggcagataggaagtatgaagaggtggctcgtaagttggtgatcattgaaggagacttggaacgcacagaggaacgagctgagctggcagagtcccgttgccgagagatggatgagcagattagactgatggaccagaacctgaagtgtctgagtgctgctgaagaaaagtactctcaaaaagaagataaatatgaggaagaaatcaagattcttactgataaactcaaggaggcagagacccgtgctgagtttgctgagagatcggtagccaagctggaaaagacaattgatgacctggaagataaactgaaatgcaccaaagaggagcacctctgtacacaaaggatgctggaccagaccctgcttgacctgaatgagatgtagaacgccccagtcccaccctgctgctgctcctccctctgacccagactccgcctgaggccagcctgcgggaagctgacctttaactgagggctgatctttaactggaaggctgctttctcctttcaccaccccctccttccctgtgtctttttcgccaaactgtctctgcctcttcccggagaatccagctgggctagaggctgagcacctttggaaacaacatttaagggaatgtgagcacaatgcataatgtctttaaaaagcatgttgtgatgtacacattttgtaattaccttttttgttgttttgtagcaaccatttgtaaaacattccaaataattccacagtcctgaagcagcaatcgaatccctttctcacttttggaaggtgacttttcaccttaatgcatattcccctctccatagaggagaggaaaaggtgtaggcctgccttaccgagagccaaacagagcccagggagactccgctgtgggaaacctcattgttctgtacaaagtactagctaaaccagaaaggtgattccaggaggagttagccaaacaacaacaaaaacaaaaaatgtgctgttcaagttttcagctttaagatatctttggataatgttatttctattttttatttttttcattagaagttaccaaattaagatggtaagacctctgagaccaaaattttgtcccatctctaccccctcacaactgcttacagaatggatcatgtcccccttatgttgaggtgaccacttaattgctttcctgcctccttgaaagaaagaaagaaagaagactgtgtttttgccactgatttagccatgtgaaactcatctcattacccttttctgggtttgaagctgctgtctctagaagtgccatctcaattgtgctttgtatcagtcagtgctggagaaatcttgaatagcttatgtacaaaactttttaaattttatattattttgaaactttgctttgggtttgtggcaccctggccaccccatctggctgtgacagcctctgcagtccgtgggctggcagtttgttgatcttttaagtttccttccctacccagtccccattttctggtaaggtttctaggaggtctgttaggtgtacatcctgcagcttattggcttaaaatgtactctccttttatgtggtctctttggggccgattgggagaaagagaaatcaatagtgcaactgttttgatactgaatattgacaagtgtctttttgaaataaagaaccagtccctcc

SEQ ID NO: 195459 - DNA, 2063 bp, Homo sapiens
  Payload ID: 18589
  Gene Name: tropomyosin 3
  ENST ID: ENST00000341485
  CDS Start-End: 90-788
gtagcaggcggaagtaagggtgagaggaggctgcaacgccgagcggaggaggcaggaaccggagcgcgagcagtagctgggtgggcaccatggctgggatcaccaccatcgaggcggtgaagcgcaagatccaggttctgcagcagcaggcagatgatgcagaggagcgagctgagcgcctccagcgagaagttgagggagaaaggcgggcccgggaacaggctgaggctgaggtggcctccttgaaccgtaggatccagctggttgaagaagagctggaccgtgctcaggagcgcctggccactgccctgcaaaagctggaagaagctgaaaaagctgctgatgaagaaaagatggaactccaggaaatccaactcaaagaagctaagcacattgcagaagaggcagataggaagtatgaagaggtggctcgtaagttggtgatcattgaaggagacttggaacgcacagaggaacgagctgagctggcagagtcccgttgccgagagatggatgagcagattagactgatggaccagaacctgaagtgtctgagtgctgctgaagaaaagtactctcaaaaagaagataaatatgaggaagaaatcaagattcttactgataaactcaaggaggcagagacccgtgctgagtttgctgagagatcggtagccaagctggaaaagacaattgatgacctggaagataaactgaaatgcaccaaagaggagcacctctgtacacaaaggatgctggaccagaccctgcttgacctgaatgagatgtagaacgccccagtcccaccctgctgctgctcctccctctgacccagactccgcctgaggccagcctgcgggaagctgacctttaactgagggctgatctttaactggaaggctgctttctcctttcaccaccccctccttccctgtgtctttttcgccaaactgtctctgcctcttcccggagaatccagctgggctagaggctgagcacctttggaaacaacatttaagggaatgtgagcacaatgcataatgtctttaaaaagcatgttgtgatgtacacattttgtaattaccttttttgttgttttgtagcaaccatttgtaaaacattccaaataattccacagtcctgaagcagcaatcgaatccctttctcacttttggaaggtgacttttcaccttaatgcatattcccctctccatagaggagaggaaaaggtgtaggcctgccttaccgagagccaaacagagcccagggagactccgctgtgggaaacctcattgttctgtacaaagtactagctaaaccagaaaggtgattccaggaggagttagccaaacaacaacaaaaacaaaaaatgtgctgttcaagttttcagctttaagatatctttggataatgttatttctattttttatttttttcattagaagttaccaaattaagatggtaagacctctgagaccaaaattttgtcccatctctaccccctcacaactgcttacagaatggatcatgtcccccttatgttgaggtgaccacttaattgctttcctgcctccttgaaagaaagaaagaaagaagactgtgtttttgccactgatttagccatgtgaaactcatctcattacccttttctgggtttgaagctgctgtctctagaagtgccatctcaattgtgctttgtatcagtcagtgctggagaaatcttgaatagcttatgtacaaaactttttaaattttatattattttgaaactttgctttgggtttgtggcaccctggccaccccatctggctgtgacagcctctgcagtccgtgggctggcagtttgttgatcttttaagtttccttccctacccagtccccattttctggtaaggtttctaggaggtctgttaggtgtacatcctgcagcttattggcttaaaatgtactctccttttatgtggtctctttggggccgattgggagaaagagaaatcaatagtgcaactgttttgatactgaatattgacaagtgtctttttgaaataaagaaccagtccctccaa

SEQ ID NO: 195460 - DNA, 1523 bp, Homo sapiens
  Payload ID: 18589
  Gene Name: tropomyosin 3
  Uniprot ID: P06753
  ENST ID: ENST00000368530
  CDS Start-End: 194-1051
gttcccccaggagaacaatgatggggtggagggagctggaaagaccatattaggaacaaaaggtggagctatgagcacagataaagactcaagtctggggacctcctggtcactcaggcagcagccccttctttcttgccccagtctccagttctccagtgttcacaggtgagcctaccaacagccactgctcatgatggaggccatcaagaaaaagatgcagatgctgaagttagacaaggagaatgctctggatcgggcagagcaagctgaagctgagcagaagcaggcagaagaaagaagtaaacagctggaggatgagctggcagccatgcagaagaagctgaaagggacagaggatgagctggacaagtattctgaagctttgaaggatgcccaggagaagctggaactggcagagaagaaggctgctgatgctgaggctgaggtggcctccttgaaccgtaggatccagctggttgaagaagagctggaccgtgctcaggagcgcctggccactgccctgcaaaagctggaagaagctgaaaaagctgctgatgagagtgagagaggtatgaaggttattgaaaaccgggccttaaaagatgaagaaaagatggaactccaggaaatccaactcaaagaagctaagcacattgcagaagaggcagataggaagtatgaagaggtggctcgtaagttggtgatcattgaaggagacttggaacgcacagaggaacgagctgagctggcagagtctaagtgttctgagctggaggaggagctgaagaatgtcaccaacaacctcaagtctcttgaggctcaggcggagaagtactctcaaaaagaagataaatatgaggaagaaatcaagattcttactgataaactcaaggaggcagagacccgtgctgagtttgctgagagatcggtagccaagctggaaaagacaattgatgacctggaagatgagctctatgcccagaaactgaagtacaaggccattagcgaggagctggaccacgccctcaatgacatgacctctatataattatcaccgtttctgctctgttctggatctgccccctttactcctcggggaacccaaggccccactctcgctctggattccatttgggtcagcctggctggtccccaaggcattaggatgggggagcaaaaagcaacttatgtattttcttccacccccaccccaaattaaaatgttaagctgctggaaacctcatgccaccctgcatttgtgtcattgacaaagctgttgctgtccctaagaaggagccttgggggtgtgatgtggggaagagctattgtaggctccccctcctctgacttatgtaatcaaagccacttttgtgtgtgtctattttttcttgacatttaaactcagctgatctgattctaccagagtgatggatttagtacaggttactcaggatagtaattttagttatactcctcaagctgaacaagattaaattccttatttccaggttcttaaatca

SEQ ID NO: 195461 - DNA, 1115 bp, Homo sapiens
  Payload ID: 18589
  Gene Name: tropomyosin 3
  Uniprot ID: P06753
  ENST ID: ENST00000368531
  CDS Start-End: 12-755
gggtgggcaccatggctgggatcaccaccatcgaggcggtgaagcgcaagatccaggttctgcagcagcaggcagatgatgcagaggagcgagctgagcgcctccagcgagaagttgagggagaaaggcgggcccgggaacaggctgaggctgaggtggcctccttgaaccgtaggatccagctggttgaagaagagctggaccgtgctcaggagcgcctggccactgccctgcaaaagctggaagaagctgaaaaagctgctgatgagagtgagagaggtatgaaggttattgaaaaccgggccttaaaagatgaagaaaagatggaactccaggaaatccaactcaaagaagctaagcacattgcagaagaggcagataggaagtatgaagaggtggctcgtaagttggtgatcattgaaggagacttggaacgcacagaggaacgagctgagctggcagagtcccgttgccgagagatggatgagcagattagactgatggaccagaacctgaagtgtctgagtgctgctgaagaaaagtactctcaaaaagaagataaatatgaggaagaaatcaagattcttactgataaactcaaggaggcagagacccgtgctgagtttgctgagagatcggtagccaagctggaaaagacaattgatgacctggaagagcgtctctacagccaacttgagcgaaaccgcctgctttctaatgagctgaagctaacgctgcatgatctgtgtgactgatgggcagggctcaatgatgcccattaaactgagcttactgctcacaccactgacctggaccccaacaaaaagctgattgtctttttaaaagttattattttgccctgagcaaattgcattttaattggggcagttagaatgttgatttcctaacagcattgtgaagttgaccattgtgaagtttctgtccctttagaagagattatgggtgaagaagggaggggcctgagagattatagtgagaaaacttgcgagaattttgttttccacccttatttgctgctctttcacttgggcactgactgtaggatatgttcccttgcatggatgtttttaacaataaaaggactgacttgacaa

SEQ ID NO: 195462 - DNA, 1088 bp, Homo sapiens
  Payload ID: 18589
  Gene Name: tropomyosin 3
  Uniprot ID: P06753
  ENST ID: ENST00000323144
  CDS Start-End: 46-789
ggaggaggcaggaaccggagcgcgagcagtagctgggtgggcaccatggctgggatcaccaccatcgaggcggtgaagcgcaagatccaggttctgcagcagcaggcagatgatgcagaggagcgagctgagcgcctccagcgagaagttgagggagaaaggcgggcccgggaacaggctgaggctgaggtggcctccttgaaccgtaggatccagctggttgaagaagagctggaccgtgctcaggagcgcctggccactgccctgcaaaagctggaagaagctgaaaaagctgctgatgagagtgagagaggtatgaaggttattgaaaaccgggccttaaaagatgaagaaaagatggaactccaggaaatccaactcaaagaagctaagcacattgcagaagaggcagataggaagtatgaagaggtggctcgtaagttggtgatcattgaaggagacttggaacgcacagaggaacgagctgagctggcagagtctaagtgttctgagctggaggaggagctgaagaatgtcaccaacaacctcaagtctcttgaggctcaggcggagaagtactctcaaaaagaagataaatatgaggaagaaatcaagattcttactgataaactcaaggaggcagagacccgtgctgagtttgctgagagatcggtagccaagctggaaaagacaattgatgacctggaagagcgtctctacagccaacttgagcgaaaccgcctgctttctaatgagctgaagctaacgctgcatgatctgtgtgactgatgggcagggctcaatgatgcccattaaactgagcttactgctcacaccactgacctggaccccaacaaaaagctgattgtctttttaaaagttattattttgccctgagcaaattgcattttaattggggcagttagaatgttgatttcctaacagcattgtgaagttgaccattgtgaagtttctgtccctttagaagagattatgggtgaagaagggaggggcctgagagattatagtgagaaaacttgcgagaattttgttttccacccttatttgctgctctttcacttgggcac

SEQ ID NO: 195463 - DNA, 1771 bp, Homo sapiens
  Payload ID: 18589
  Gene Name: tropomyosin 3
  Uniprot ID: P06753
  ENST ID: ENST00000328159
  CDS Start-End: 1-747
atggctgggatcaccaccatcgaggcggtgaagcgcaagatccaggttctgcagcagcaggcagatgatgcagaggagcgagctgagcgcctccagcgagaagttgagggagaaaggcgggcccgggaacaggctgaggctgaggtggcctccttgaaccgtaggatccagctggttgaagaagagctggaccgtgctcaggagcgcctggccactgccctgcaaaagctggaagaagctgaaaaagctgctgatgagagtgagagaggtatgaaggttattgaaaaccgggccttaaaagatgaagaaaagatggaactccaggaaatccaactcaaagaagctaagcacattgcagaagaggcagataggaagtatgaagaggtggctcgtaagttggtgatcattgaaggagacttggaacgcacagaggaacgagctgagctggcagagtcccgttgccgagagatggatgagcagattagactgatggaccagaacctgaagtgtctgagtgctgctgaagaaaagtactctcaaaaagaagataaatatgaggaagaaatcaagattcttactgataaactcaaggaggcagagacccgtgctgagtttgctgagagatcggtagccaagctggaaaagacaattgatgacctggaagatgagctctatgcccagaaactgaagtacaaggccattagcgaggagctggaccacgccctcaatgacatgacctctatataaactgaaatgcaccaaagaggagcacctctgtacacaaaggatgctggaccagaccctgcttgacctgaatgagatgtagaacgccccagtcccaccctgctgctgctcctccctctgacccagactccgcctgaggccagcctgcgggaagctgacctttaactgagggctgatctttaactggaaggctgctttctcctttcaccaccccctccttccctgtgtctttttcgccaaactgtctctgcctcttcccggagaatccagctgggctagaggctgagcacctttggaaacaacatttaagggaatgtgagcacaatgcataatgtctttaaaaagcatgttgtgatgtacacattttgtaattaccttttttgttgttttgtagcaaccatttgtaaaacattccaaataattccacagtcctgaagcagcaatcgaatccctttctcacttttggaaggtgacttttcaccttaatgcatattcccctctccatagaggagaggaaaaggtgtaggcctgccttaccgagagccaaacagagcccagggagactccgctgtgggaaacctcattgttctgtacaaagtactagctaaaccagaaaggtgattccaggaggagttagccaaacaacaacaaaaacaaaaaatgtgctgttcaagttttcagctttaagatatctttggataatgttatttctattttttatttttttcattagaagttaccaaattaagatggtaagacctctgagaccaaaattttgtcccatctctaccccctcacaactgcttacagaatggatcatgtcccccttatgttgaggtgaccacttaattgctttcctgcctccttgaaagaaagaaagaaagaagactgtgtttttgccactgatttagccatgtgaaactcatctcattacccttttctgggtttgaagctgctgtctctagaagtgccatctcaattgtgctttgtatcagtcagtgctggagaaatcttgaatagcttatgt

SEQ ID NO: 195464 - DNA, 3131 bp, Homo sapiens
  Payload ID: 18589
  Gene Name: tropomyosin 3
  Uniprot ID: P06753
  ENST ID: ENST00000368533
  CDS Start-End: 54-800
cgccgagcggaggaggcaggaaccggagcgcgagcagtagctgggtgggcaccatggctgggatcaccaccatcgaggcggtgaagcgcaagatccaggttctgcagcagcaggcagatgatgcagaggagcgagctgagcgcctccagcgagaagttgagggagaaaggcgggcccgggaacaggctgaggctgaggtggcctccttgaaccgtaggatccagctggttgaagaagagctggaccgtgctcaggagcgcctggccactgccctgcaaaagctggaagaagctgaaaaagctgctgatgagagtgagagaggtatgaaggttattgaaaaccgggccttaaaagatgaagaaaagatggaactccaggaaatccaactcaaagaagctaagcacattgcagaagaggcagataggaagtatgaagaggtggctcgtaagttggtgatcattgaaggagacttggaacgcacagaggaacgagctgagctggcagagtcccgttgccgagagatggatgagcagattagactgatggaccagaacctgaagtgtctgagtgctgctgaagaaaagtactctcaaaaagaagataaatatgaggaagaaatcaagattcttactgataaactcaaggaggcagagacccgtgctgagtttgctgagagatcggtagccaagctggaaaagacaattgatgacctggaagataaactgaaatgcaccaaagaggagcacctctgtacacaaaggatgctggaccagaccctgcttgacctgaatgagatgtagaacgccccagtcccaccctgctgctgctcctccctctgacccagactccgcctgaggccagcctgcgggaagctgacctttaactgagggctgatctttaactggaaggctgctttctcctttcaccaccccctccttccctgtgtctttttcgccaaactgtctctgcctcttcccggagaatccagctgggctagaggctgagcacctttggaaacaacatttaagggaatgtgagcacaatgcataatgtctttaaaaagcatgttgtgatgtacacattttgtaattaccttttttgttgttttgtagcaaccatttgtaaaacattccaaataattccacagtcctgaagcagcaatcgaatccctttctcacttttggaaggtgacttttcaccttaatgcatattcccctctccatagaggagaggaaaaggtgtaggcctgccttaccgagagccaaacagagcccagggagactccgctgtgggaaacctcattgttctgtacaaagtactagctaaaccagaaaggtgattccaggaggagttagccaaacaacaacaaaaacaaaaaatgtgctgttcaagttttcagctttaagatatctttggataatgttatttctattttttatttttttcattagaagttaccaaattaagatggtaagacctctgagaccaaaattttgtcccatctctaccccctcacaactgcttacagaatggatcatgtcccccttatgttgaggtgaccacttaattgctttcctgcctccttgaaagaaagaaagaaagaagactgtgtttttgccactgatttagccatgtgaaactcatctcattacccttttctgggtttgaagctgctgtctctagaagtgccatctcaattgtgctttgtatcagtcagtgctggagaaatcttgaatagcttatgtacaaaactttttaaattttatattattttgaaactttgctttgggtttgtggcaccctggccaccccatctggctgtgacagcctctgcagtccgtgggctggcagtttgttgatcttttaagtttccttccctacccagtccccattttctggtaaggtttctaggaggtctgttaggtgtacatcctgcagcttattggcttaaaatgtactctccttttatgtggtctctttggggccgattgggagaaagagaaatcaatagtgcaactgttttgatactgaatattgacaagtgtctttttgaaataaagaaccagtccctccaaccctcagacctatttgacttttatttattaaaactaaatgtgctttctccacagaagctatgaggtttgggttaaaaatagcatctttgtgggtggtagcaacaggatttattctttattattattatttttgagatgaagtttcattcttgttgcctgggctggagcgtaatggctcgatctcggctcactgcaacctccgcctcctggttcaagagattctcctgcctcagcctcccgagtagctgggattacaggcacctgccaccatgcccgggtaattttttatattttaagtagagacagggcttcaccatgttggccaggctggtctcgaactcctgaccttcaggtgatccacctgcctcagcttcccaaaatgctgggattacgggcgtgagccaccgcacccagctggagcaacaggatttaatatagagcaaatgtttagttttatcatctgtaaaatggagataagtattgtcagagtaaacatgaagattagaaagaacacttaatgtgctgggccttttataggttaacactgacatctcaggctgaactatatacattttccttcacaaccatatcaatccttataaactatggatttatgctccttaaaacaatatataatgctgatcactactataaatgcgtggttttaaccaactgtactgaaacagctttgagtttatattctgtttggatatttggagaaaacaacaagtgctctcaagagtatttgcttagaggccggctgtgtgagtggataactttgaaagctgcttttgagacgccagtgtctggcatttcctgcattctggcctggaggccggacgtgaatctgacttctagtaaaaatacacggttcccttgacaaagtcgagctgtttatcccagagactgcacaattttccgttgataggcatggaccaatgctaactggaaatcattgcaaaaagtttttttgtcgggcggagggtgtggtgttaagataaacagtgtgcaacagaagaaattaaaactggaagaaattaaagggttttttttaga

SEQ ID NO: 195465 - DNA, 543 bp, Homo sapiens
  Payload ID: 18589
  Gene Name: tropomyosin 3
  ENST ID: ENST00000509601
  CDS Start-End: 90-377
gtagcaggcggaagtaagggtgagaggaggctgcaacgccgagcggaggaggcaggaaccggagcgcgagcagtagctgggtgggcaccatggctgggatcaccaccatcgaggcggtgaagcgcaagatccaggttctgcagcagcaggcagatgatgcagaggagcgagctgagcgcctccagcgagaagttgagggagaaaggcgggcccgggaacaggctgaggctgaggtggcctccttgaaccgtaggatccagctggttgaagaagagctggaccgtgctcaggagcgcctggccactgccctgcaaaagctggaagaagctgaaaaagctgctgatgagagtgagagatggatgagcagattagactgatggaccagaacctgaagtgtctgagtgctgctgaagaaaagtactctcaaaaagaagataaatatgaggaagaaatcaagattcttactgataaactcaaggaggcagagacccgtgctgagtttgctgagagatcggtagccaagctggaaaagacaattgatga

SEQ ID NO: 195466 - DNA, 587 bp, Homo sapiens
  Payload ID: 18589
  Gene Name: tropomyosin 3
  ENST ID: ENST00000515609
  CDS Start-End: 362-587
gagaaatttcccatgtgggaatccggctggatccctgtgagggaagacccttggagaacgcagcctggagttctggtaaaaagccctagaagaggagaggactcctgtggactgcaggctgcttcctggcagaagtttcctctcttaccctcagtctaaagccttagtttcaattctgccaggcaaggtggggaactataagtcttctcttctggagcccacgatggagcctgccagggagacaagttattcttctgttctggacatccaagggtgactttaaggaggatgcctggaggacatggggagaagtctccagttctccagtgttcacaggtgagcctaccaacagccactgctcatgatggaggccatcaagaaaaagatgcagatgctgaagttagacaaggagaatgctctggatcgggcagagcaagctgaagctgagcagaagcaggcagaagaaagaagtaaacagctggaggatgagctggcagccatgcagaagaagctgaaagggacagaggatgagctggacaagtattctgaagctttgaaggatgcccaggagaagctggaactggcag

SEQ ID NO: 195467 - DNA, 1248 bp, Homo sapiens
  Payload ID: 18589
  Gene Name: tropomyosin 3
  ENST ID: ENST00000509409
  CDS Start-End: 109-258
agttccggtatttcagggcgtagcaggcggaagtaagggtgagaggaggctgcaacgccgagcggaggaggcaggaaccggagcgcgagcagtagctgggtgggcaccatggctgggatcaccaccatcgaggcggtgaagcgcaagatccaggttctgcagcagcaggcagatgatgcagaggagcgagctgagcgcctccagcgagaagttgagggagaaaggcgggcccgggaacagaggtatgaaggttattgaaaaccgggccttaaaagatgaagaaaagatggaactccaggaaatccaactcaaagaagctaagcacattgcagaagaggcagataggaagtatgaagaggtggctcgtaagttggtgatcattgaaggagacttggaacgcacagaggaacgagctgagctggcagagtcccgttgccgagagatggatgagcagattagactgatggaccagaacctgaagtgtctgagtgctgctgaagaaaagtactctcaaaaagaagataaatatgaggaagaaatcaagattcttactgataaactcaaggaggcagagacccgtgctgagtttgctgagagatcggtagccaagctggaaaagacaattgatgacctggaagataaactgaaatgcaccaaagaggagcacctctgtacacaaaggatgctggaccagaccctgcttgacctgaatgagatgtagaacgccccagtcccaccctgctgctgctcctccctctgacccagactccgcctgaggccagcctgcgggaagctgacctttaactgagggctgatctttaactggaaggctgctttctcctttcaccaccccctccttccctgtgtctttttcgccaaactgtctctgcctcttcccggagaatccagctgggctagaggctgagcacctttggaaacaacatttaagggaatgtgagcacaatgcataatgtctttaaaaagcatgttgtgatgtacacattttgtaattaccttttttgttgttttgtagcaaccatttgtaaaacattccaaataattccacagtcctgaagcagcaatcgaatccctttctcacttttggaaggtgacttttcaccttaatgcatattcccctctccatagaggagaggaaaaggtgtaggcctgccttaccgagagccaaacagagcccagggagactccgctgtgggaaacctcattgttctgtacaaagtactagctaaa

SEQ ID NO: 195468 - DNA, 3149 bp, Homo sapiens
  Payload ID: 18589
  Gene Name: tropomyosin 3
  ENST ID: ENST00000611659
  CDS Start-End: 131-814
gtcacatccgggcgggttggtgagttccggtatttcagggcgtagcaggcggaagtaagggtgagaggaggctgcaacgccgagcggaggaggcaggaaccggagcgcgagcagtagctgggtgggcaccatggctgggatcaccaccatcgaggcggtgaagcgcaagatccaggttctgcagcagcaggcagatgatgcagaggagcgagctgagcgcctccagcgagaagttgagggagaaaggcgggcccgggaacaggctgaggctgaggtggcctccttgaaccgtaggatccagctggttgaagaagagctggaccgtgctcaggagcgcctggccactgccctgcaaaagctggaagaagctgaaaaagctgctgatgagagtgagagaggtatgaaggttattgaaaaccgggccttaaaagatgaagaaaagatggaactccaggaaatccaactcaaagaagctaagcacattgcagaagaggcagataggaagtatgaagaggtggctcgtaagttggtgatcattgaaggagacttggaacgcacagaggaacgagctgagctggcagagtcccgttgccgagagatggatgagcagattagactgatggaccagaacctgaagtgtctgagtgctgctgaagaaaaggcagagacccgtgctgagtttgctgagagatcggtagccaagctggaaaagacaattgatgacctggaagataaactgaaatgcaccaaagaggagcacctctgtacacaaaggatgctggaccagaccctgcttgacctgaatgagatgtagaacgccccagtcccaccctgctgctgctcctccctctgacccagactccgcctgaggccagcctgcgggaagctgacctttaactgagggctgatctttaactggaaggctgctttctcctttcaccaccccctccttccctgtgtctttttcgccaaactgtctctgcctcttcccggagaatccagctgggctagaggctgagcacctttggaaacaacatttaagggaatgtgagcacaatgcataatgtctttaaaaagcatgttgtgatgtacacattttgtaattaccttttttgttgttttgtagcaaccatttgtaaaacattccaaataattccacagtcctgaagcagcaatcgaatccctttctcacttttggaaggtgacttttcaccttaatgcatattcccctctccatagaggagaggaaaaggtgtaggcctgccttaccgagagccaaacagagcccagggagactccgctgtgggaaacctcattgttctgtacaaagtactagctaaaccagaaaggtgattccaggaggagttagccaaacaacaacaaaaacaaaaaatgtgctgttcaagttttcagctttaagatatctttggataatgttatttctattttttatttttttcattagaagttaccaaattaagatggtaagacctctgagaccaaaattttgtcccatctctaccccctcacaactgcttacagaatggatcatgtcccccttatgttgaggtgaccacttaattgctttcctgcctccttgaaagaaagaaagaaagaagactgtgtttttgccactgatttagccatgtgaaactcatctcattacccttttctgggtttgaagctgctgtctctagaagtgccatctcaattgtgctttgtatcagtcagtgctggagaaatcttgaatagcttatgtacaaaactttttaaattttatattattttgaaactttgctttgggtttgtggcaccctggccaccccatctggctgtgacagcctctgcagtccgtgggctggcagtttgttgatcttttaagtttccttccctacccagtccccattttctggtaaggtttctaggaggtctgttaggtgtacatcctgcagcttattggcttaaaatgtactctccttttatgtggtctctttggggccgattgggagaaagagaaatcaatagtgcaactgttttgatactgaatattgacaagtgtctttttgaaataaagaaccagtccctccaaccctcagacctatttgacttttatttattaaaactaaatgtgctttctccacagaagctatgaggtttgggttaaaaatagcatctttgtgggtggtagcaacaggatttattctttattattattatttttgagatgaagtttcattcttgttgcctgggctggagcgtaatggctcgatctcggctcactgcaacctccgcctcctggttcaagagattctcctgcctcagcctcccgagtagctgggattacaggcacctgccaccatgcccgggtaattttttatattttaagtagagacagggcttcaccatgttggccaggctggtctcgaactcctgaccttcaggtgatccacctgcctcagcttcccaaaatgctgggattacgggcgtgagccaccgcacccagctggagcaacaggatttaatatagagcaaatgtttagttttatcatctgtaaaatggagataagtattgtcagagtaaacatgaagattagaaagaacacttaatgtgctgggccttttataggttaacactgacatctcaggctgaactatatacattttccttcacaaccatatcaatccttataaactatggatttatgctccttaaaacaatatataatgctgatcactactataaatgcgtggttttaaccaactgtactgaaacagctttgagtttatattctgtttggatatttggagaaaacaacaagtgctctcaagagtatttgcttagaggccggctgtgtgagtggataactttgaaagctgcttttgagacgccagtgtctggcatttcctgcattctggcctggaggccggacgtgaatctgacttctagtaaaaatacacggttcccttgacaaagtcgagctgtttatcccagagactgcacaattttccgttgataggcatggaccaatgctaactggaaatcattgcaaaaagtttttttgtcgggcggagggtgtggtgttaagataaacagtgtgcaacagaagaaattaaaactggaagaaattaaagggttttttttagacttt

SEQ ID NO: 195469 - DNA, 2666 bp, Homo sapiens
  Payload ID: 18590
  Gene Name: tropomyosin 4
  Uniprot ID: P67936
  ENST ID: ENST00000300933
  CDS Start-End: 261-1007
aagtcccgaaaaggggcactttccagcagctgtggccagcggtgccgacgtcaggccctcccccagcggtgctgacgtcggcggtccggccgggtgacctcatcgccccgacggcagccggcccggggggcggggagaggcgggggcggcccccgcgcaggcaaaggcttggggggccggggcgcggctgtgcagctctcgccggagccgagcccagccgagcgtccgccgctgcccgtgcgcctctgcgcctccgcgccatggccggcctcaactccctggaggcggtgaaacgcaagatccaggccctgcagcagcaggcggacgaggcggaagaccgcgcgcagggcctgcagcgggagctggacggcgagcgcgagcggcgcgagaaagctgaaggtgatgtggccgccctcaaccgacgcatccagctcgttgaggaggagttggacagggctcaggaacgactggccacggccctgcagaagctggaggaggcagaaaaagctgcagatgagagtgagagaggaatgaaggtgatagaaaaccgggccatgaaggatgaggagaagatggagattcaggagatgcagctcaaagaggccaagcacattgcggaagaggctgaccgcaaatacgaggaggtagctcgtaagctggtcatcctggagggtgagctggagagggcagaggagcgtgcggaggtgtctgaactaaaatgtggtgacctggaagaagaactcaagaatgttactaacaatctgaaatctctggaggctgcatctgaaaagtattctgaaaaggaggacaaatatgaagaagaaattaaacttctgtctgacaaactgaaagaggctgagacccgtgctgaatttgcagagagaacggttgcaaaactggaaaagacaattgatgacctggaagagaaacttgcccaggccaaagaagagaacgtgggcttacatcagacactggatcagacactaaacgaacttaactgtatataagcaaaacagaagagtcttgttccaacagaaactctggagctccgtgggtctttctcttctcttgtaagaagttccttttgttattgccatcttcgctttgctggaaatgtcaagcaaattatgaatacatgaccaaatattttgtatcggagaagctttgagcaccagttaaatctcattccttccctttttttttcaaatggcaccagctttttcagctctcttattttttccttaagtagcatttattcctaaggtaggcagggtatttcctagtaagcatactttcttaagacggaggccatttggttcctgggagaataggcagccccacactttgaagaatacagaccccagtatctagtcgtggatataattaaaacgctgaagaccataaccttttgggtcaactgttggtcaaactataggagagaccagggaccatcacatgggtagggattttccatccagagccaataaaaggactggtgggggccgggggtggctattgtgggaagtcataacccacagatagatcaacctaagaatcctggcccttctccactctccaccatgcaggacaaacatcttctcaagcagtcaacgtagaatgcttgggaaatagtcataattacccacatatagtaattaatagatggtaattaattgatccttgatgtgatgttcttttgcatatttccttcattctaaagttgttccctggccgggagcgttggctttcgcctgtaatcccaacactttgggaggccaggacagatcacttgaggtcaggagttcgagaccagcccagccaacatggcgaaaccatgtctctactaaaaatacaaaaattatggtgacgcctgcctgtagtcccagctactcgggaggctgaggcaggaggatcgcttgaacccaggaagtggagactgcagtgagccgatatcgcaccacagcgctccagcctggtcgacagagtgagactccatctcaagaaaaaataaaaataaagttgttctctgaagagcaaatgtctcattccagtaatgacccactcagcaggaatatggtggagttcagtccaattcaggtcagccatatccaaaagaccacaagtcattactaagttgagcaaaagagtttttatctattagcagaaagggcctctctggcagcagagattaaaaactggcccaacttcatttccatacttcagggaacagcaaattgaggatttacttatctaggacttgaattccttctttgggaccaagttaataaaagaccaagaaactcctgattaaactggataatgaaggattctgtagacagggctgcacgtatcggctttgtttgacttctcttttctcagttaacatctcagagctagaacattccacattccccagcagcgtgtgggggctgactaaagtttacaattccaactaaaaatcaccctgcttctggcttatctgaatcccttacccaccccaccccaccaccctactcctatttattcagcaccacactacccaggaaatacactagcaaattgtgcaatggaataaaatccacactttagattcttgcaactgtatcatatgtaatagtatcactttttctacattttggtcaaataaatttttacataaactacaa

SEQ ID NO: 195470 - DNA, 1417 bp, Homo sapiens
  Payload ID: 18590
  Gene Name: tropomyosin 4
  Uniprot ID: P67936
  ENST ID: ENST00000344824
  CDS Start-End: 119-973
ataaggccctctcctccaccctgccaggctcactctgccccacagccacagcccctgactgccgcagcccccacagagcccgccgcgcaccccacgtcccccacgccagcgcccagccatggaggccatcaagaagaaaatgcagatgctgaagttggacaaggagaatgccatcgaccgcgcggagcaggcggaggcggataagaaagccgctgaggacaagtgcaagcaggtggaggaggagctgacgcacctccagaagaaactaaaagggacagaggacgagctggataaatattccgaggacctgaaggacgcgcaggagaagctggagctcacggagaagaaggcctccgacgctgaaggtgatgtggccgccctcaaccgacgcatccagctcgttgaggaggagttggacagggctcaggaacgactggccacggccctgcagaagctggaggaggcagaaaaagctgcagatgagagtgagagaggaatgaaggtgatagaaaaccgggccatgaaggatgaggagaagatggagattcaggagatgcagctcaaagaggccaagcacattgcggaagaggctgaccgcaaatacgaggaggtagctcgtaagctggtcatcctggagggtgagctggagagggcagaggagcgtgcggaggtgtctgaactaaaatgtggtgacctggaagaagaactcaagaatgttactaacaatctgaaatctctggaggctgcatctgaaaagtattctgaaaaggaggacaaatatgaagaagaaattaaacttctgtctgacaaactgaaagaggctgagacccgtgctgaatttgcagagagaacggttgcaaaactggaaaagacaattgatgacctggaagagaaacttgcccaggccaaagaagagaacgtgggcttacatcagacactggatcagacactaaacgaacttaactgtatataagcaaaacagaagagtcttgttccaacagaaactctggagctccgtgggtctttctcttctcttgtaagaagttccttttgttattgccatcttcgctttgctggaaatgtcaagcaaattatgaatacatgaccaaatattttgtatcggagaagctttgagcaccagttaaatctcattccttccctttttttttcaaatggcaccagctttttcagctctcttattttttccttaagtagcatttattcctaaggtaggcagggtatttcctagtaagcatactttcttaagacggaggccatttggttcctgggagaataggcagccccacactttgaagaatacagaccccagtatctagtcgtggatataattaaaacgctgaagaccataaccttttgggtcaactgttggtcaaactataggagagaccagggacca

SEQ ID NO: 195471 - DNA, 801 bp, Homo sapiens
  Payload ID: 18590
  Gene Name: tropomyosin 4
  ENST ID: ENST00000588483
  CDS Start-End: 752-801
gaaaatgacaaagcggggattccagcccagcactttttggccctggagttcctggtttaatgcttcccattgtacttcctttcttgtaggtaaaaacaccttgaaaagccaataacactattggggtatgtcttccatgcctgcaaccaagttttctttccctttccatatctttttgtcctgccatctctcagccaggcggattgaaggatggaattccaacgaggctcccccgcctcgtcccaccttggtaattgcatggccaacatttaactgagggctccatagtcttgcatttatcttgccattcaggtgaatgggagcggaactcacaggacacaatgagccgggtcactgatggccttgctttctaagaatctcacagtgagccctagaactctctacgtggtaacactgtgtgcctttttcagagaagagcctatcttagatcttagcctaacgttgggtctattgtgttgctggagagaccagcactgacattcatctcaaagcacatggctggagtgcagtggcacgatctcagctcacggcaacctccgcctcccgggttcaagtgattcttctgcctcagcctcctgagcatgtggaactacaggcacgtgatgtggccgccctcaaccgacgcatccagctcgttgaggaggagttggacagggctcaggaacgactggccacggccctgcagaagctggaggaggcagaaaaagctgcagatgagagtgagagaggaatgaaggtgatagaaaaccgggccatgaaggatgaggagaagatggagat

SEQ ID NO: 195472 - DNA, 586 bp, Homo sapiens
  Payload ID: 18590
  Gene Name: tropomyosin 4
  ENST ID: ENST00000589897
  CDS Start-End: 378-586
agagaaaagtgtgtgtgtgggcggtgggggaggggggaaacggggaattgctcattttacttaacaagtactttcccatttttaggggaccaggtactcagtgggccacagacaagaccaaggcagaaaagacaggcgcctccccacattgcagcaccgggaccccgagcccacccacagccctcttcattcctcccaacgatggatggggaaactgaggcagcccagagcagcccccaccctaggtcctgcccgggacacgcccacgcgggacctgtgtcaccaggctcactctgccccacagccacagcccctgactgccgcagcccccacagagcccgccgcgcaccccacgtcccccacgccagcgcccagccatggaggccatcaagaagaaaatgcagatgctgaagttggacaaggagaatgccatcgaccgcgcggagcaggcggaggcggataagaaagccgctgaggacaagtgcaagcaggtggaggaggagctgacgcacctccagaagaaactaaaagggacagaggacgagctggataaatattccgaggacctgaaggacgcgcaggagaa

SEQ ID NO: 195473 - DNA, 635 bp, Homo sapiens
  Payload ID: 18590
  Gene Name: tropomyosin 4
  ENST ID: ENST00000592138
  CDS Start-End: 329-635
tgtttttcccagacattttccgggaagatcatactgaaattttggtatgagtgtaaattccctatggcctggactcctgggtgggctttgacggggaagatcaggttaacagagggcaggacatgggggaggctcccactggtggctggcctgatacttcttaacatggctgcacctccgacctccccaggctgaaggtgatgtggccgccctcaaccgacgcatccagctcgttgaggaggagttggacagggctcaggaacgactggccacggccctgcagaagctggaggaggcagaaaaagctgcagatgagagtgagagaggaatgaaggtgatagaaaaccgggccatgaaggatgaggagaagatggagattcaggagatgcagctcaaagaggccaagcacattgcggaagaggctgaccgcaaatacgaggaggtagctcgtaagctggtcatcctggagggtgagctggagagggcagaggagcgtgcggaggtgtctgaactaaaatgtggtgacctggaagaagaactcaagaatgttactaacaatctgaaatctctggaggctgcatctgaaaagtattctgaaaaggaggacaaatatgaagaagaaattaaacttctgt

SEQ ID NO: 195474 - DNA, 558 bp, Homo sapiens
  Payload ID: 18590
  Gene Name: tropomyosin 4
  ENST ID: ENST00000586833
  CDS Start-End: 22-558
gagattgcttaactccagatcatggtggaggaggagctgacgcacctccagaagaaactaaaagggacagaggacgagctggataaatattccgaggacctgaaggacgcgcaggagaagctggagctcacggagaagaaggcctccgacgctgaaggtgatgtggccgccctcaaccgacgcatccagctcgttgaggaggagttggacagggctcaggaacgactggccacggccctgcagaagctggaggaggcagaaaaagctgcagatgagagtgagagaggaatgaaggtgatagaaaaccgggccatgaaggatgaggagaagatggagattcaggagatgcagctcaaagaggccaagcacattgcggaagaggctgaccgcaaatacgaggaggtagctcgtaagctggtcatcctggagggtgagctggagagggcagaggagcgtgcggaggtgtctgaactaaaatgtggtgacctggaagaagaactcaagaatgttactaacaatctgaaatctctggaggctgcatctgaaaagtattctgaa

SEQ ID NO: 195475 - DNA, 563 bp, Homo sapiens
  Payload ID: 18590
  Gene Name: tropomyosin 4
  ENST ID: ENST00000588410
  CDS Start-End: 149-563
gtgcaggctccgactccggggctggcgccggggtcccgggccgaggggaacccgcgaccggacttgtgggggagaatgaggatgaaaacgtggagcttccattgtctagggtaaaaacaccttgaaaagccaataacactattggggtatgtcttccatgcctgcaaccaagttttctttccctttccatatctttttgtcctgccatctctcagccaggcggattgaaggatggaattccaacgaggctcccccgcctcgtcccaccttggctgaaggtgatgtggccgccctcaaccgacgcatccagctcgttgaggaggagttggacagggctcaggaacgactggccacggccctgcagaagctggaggaggcagaaaaagctgcagatgagagtgagagaggaatgaaggtgatagaaaaccgggccatgaaggatgaggagaagatggagattcaggagatgcagctcaaagaggccaagcacattgcggaagaggctgaccgcaaatacgaggaggtagctcgtaagctggtcatcctggagggtgagctggaga

SEQ ID NO: 195476 - DNA, 712 bp, Homo sapiens
  Payload ID: 18590
  Gene Name: tropomyosin 4
  ENST ID: ENST00000588032
  CDS Start-End: 1-331
gctggagagggcagaggagcgtgcggaggtgtctgaactaaaatgtggtgacctggaagaagaactcaagaatgttactaacaatctgaaatctctggaggctgcatctgaaaagtattctgaaaaggaggacaaatatgaagaagaaattaaacttctgtctgacaaactgaaagaggctgagacccgtgctgaatttgcagagagaacggttgcaaaactggaaaagacaattgatgacctggaagagaaacttgcccaggccaaagaagagaacgtgggcttacatcagacactggatcagacactaaacgaacttaactgtatataagcaaaacagaagagtcttgttccaacagaaactctggagctccgtgggtctttctcttctcttttgttccctggccgggagcgttggctttcgcctgtaatcccaacactttgggaggccaggacagatcacttgaggtcaggagttcgagaccagcccagccaacatggcgaaaccatgtctctactaaaaatacaaaaattatggtgacgcctgcctgtagtcccagctactcgggaggctgaggcaggaggatcgcttgaacccaggaagtggagactgcagtgagccgatatcgcaccacagcgctccagcctggtcgacagagtgagactccatctcaagaaaaaataaaaataaagttgttctctgaagagcaaa

SEQ ID NO: 195477 - DNA, 367 bp, Homo sapiens
  Payload ID: 18590
  Gene Name: tropomyosin 4
  ENST ID: ENST00000588507
  CDS Start-End: 78-367
gctggataaatattccgaggacctgaaggacgcgcaggagaagctggagctcacggagaagaaggcctccgacaggaatgaaggtgatagaaaaccgggccatgaaggatgaggagaagatggagattcaggagatgcagctcaaagaggccaagcacattgcggaagaggctgaccgcaaatacgaggaggtagctcgtaagctggtcatcctggagggtgagctggagagggcagaggagcgtgcggaggtgtctgaactaaaatgtggtgacctggaagaagaactcaagaatgttactaacaatctgaaatctctggaggctgcatctgaaaagtattctgaaaaggaggacaaatatgaaga

SEQ ID NO: 195478 - DNA, 262 bp, Homo sapiens
  Payload ID: 18590
  Gene Name: tropomyosin 4
  ENST ID: ENST00000592822
  CDS Start-End: 1-180
aaacttctgtctgacaaactgaaagaggctgagacccgtgctgaatttgcagagagaacggttgcaaaactggaaaagacaattgatgacctggaagatgagttatacgctcagaagctcaagtacaaagctatcagcgaggaactggaccacgctctcaacgacatgacctctctctgagaggcagccaggtcgctgccctctgtccttctcacatggtgcctcctacgcccctgtgggcttctaggagctccggtggcct

SEQ ID NO: 195479 - DNA, 708 bp, Homo sapiens
  Payload ID: 18590
  Gene Name: tropomyosin 4
  ENST ID: ENST00000586499
  CDS Start-End: 198-708
gaggcggataagaaagccgctgaggacaagtgcaagcaggtgaggtgccctccgctgggccgctccgggctgctgggagtcctctctgtgcggaaggccggggtctggagcccagttgggggtcgcagacacctgcgggaggataggaggctgatgctttggcggaggaagagcgaggggaccattgccttccttggatggggtcctgggctggaagaggggtgacgatcggacccacccccagcagggccagtgcgaacaaagtggaggaggagctgacgcacctccagaagaaactaaaagggacagaggacgagctggataaatattccgaggacctgaaggacgcgcaggagaagctggagctcacggagaagaaggcctccgacgctgaaggtgatgtggccgccctcaaccgacgcatccagctcgttgaggaggagttggacagggctcaggaacgactggccacggccctgcagaagctggaggaggcagaaaaagctgcagatgagagtgagagaggaatgaaggtgatagaaaaccgggccatgaaggatgaggagaagatggagattcaggagatgcagctcaaagaggccaagcacattgcggaagaggctgaccgcaaatacgaggaggtagctcgtaagctggtcatcctggagggtgagctggagagggcagaggagcgtgcggaggtgtctg

SEQ ID NO: 195480 - DNA, 714 bp, Homo sapiens
  Payload ID: 18591
  Gene Name: troponin C type 1 (slow)
  Uniprot ID: P63316
  ENST ID: ENST00000232975
  CDS Start-End: 56-541
atttaagtcaagggccggctggcaaccccagcaagctgtcctgtgagccgccagcatggatgacatctacaaggctgcggtagagcagctgacagaagagcagaaaaatgagttcaaggcagccttcgacatcttcgtgctgggcgctgaggatggctgcatcagcaccaaggagctgggcaaggtgatgaggatgctgggccagaaccccacccctgaggagctgcaggagatgatcgatgaggtggacgaggacggcagcggcacggtggactttgatgagttcctggtcatgatggttcggtgcatgaaggacgacagcaaagggaaatctgaggaggagctgtctgacctcttccgcatgtttgacaaaaatgctgatggctacatcgacctggatgagctgaagataatgctgcaggctacaggcgagaccatcacggaggacgacatcgaggagctcatgaaggacggagacaagaacaacgacggccgcatcgactatgatgagttcctggagttcatgaagggtgtggagtagatgctgaccttcacccagagctgcctatgcccagcctccaactccagctgagtcctggggttggggagggggtcggggtcccaggacctgagcctggccatgtcctcaaccccaaatcccccgactccctccccagatctgtcctgggggatgcaaataaagcctgctctccc

SEQ ID NO: 195481 - DNA, 727 bp, Homo sapiens
  Payload ID: 18591
  Gene Name: troponin C type 1 (slow)
  ENST ID: ENST00000496590
  CDS Start-End: 430-727
cagctgtccttcgggccacccagcttgagtttcatcaggggccgaaagggcattgagtggtcactgactattgttactgagggtcaccttggtcctgaagggggtgcccacctgtcaccctggccctgagcccagtcgcagtgaggccagctgggtcacgtcagggctttgggggcagggagggaggactgagacctccactctgtggcctggaaatagcctgcctcctccagctccagccttctcacctgtggaatgggttggtttcctcagcagcagctatacctgagtctgagccttgagattccctttcctttctaggtagagcagctgacagaagagcagaaaaatgagttcaaggcagccttcgacatcttcgtgctgggcgctgaggatggctgcatcagcaccaaggagctgggcaaggtgatgaggatgctgggccagaaccccacccctgaggagctgcaggagatgatcgatgaggtggacgaggacggcagcggcacggtggactttgatgagttcctggtcatgatggttcggtgcatgaaggacgacagcaaagggaaatctgaggaggagctgtctgacctcttccgcatgtttgacaaaaatgctgatggctacatcgacctggatgagctgaagataatgctgcaggctacaggcgagaccatcacggaggacgacatcgaggagctcatgaaggacggagacaagaaca

SEQ ID NO: 195482 - DNA, 710 bp, Homo sapiens
  Payload ID: 18592
  Gene Name: troponin C type 2 (fast)
  Uniprot ID: P02585
  ENST ID: ENST00000372555
  CDS Start-End: 94-576
aaatcccgggggctagagcaggccaggtcatctttgggtggtggagtgcaaaggaggcgacctgcaacagaggagtcccggtcaccagcaaccatgacggaccagcaggctgaggccaggtcctacctcagcgaagagatgatcgctgagttcaaggctgcctttgacatgtttgatgctgatggtggtggggacatcagcgtcaaggagttgggcacggtgatgaggatgctgggccagacacccaccaaggaggagctggacgccatcatcgaggaggtggatgaggacggcagcggcaccatcgacttcgaggagttcttggtcatgatggtgcgccagatgaaagaggacgcgaaagggaagagcgaggaggagctggccgagtgcttccgcatcttcgacaggaatgcagacggctacatcgacccggaggagctggctgagattttcagggcctccggggagcacgtgacggacgaggagatcgaatctctgatgaaagacggcgacaagaacaacgacggccgcattgacttcgacgagttcctgaagatgatggagggcgtgcagtaaggagtggacagtcgcctctaccaagatcgcgtgtccctagggtgtgggagactccgccctgccgggtccccaccagggaggcgcgaccccttgtgggtctttgtctggaaggaataaaagcaaatgttccaaaa

SEQ ID NO: 195483 - DNA, 780 bp, Homo sapiens
  Payload ID: 18592
  Gene Name: troponin C type 2 (fast)
  ENST ID: ENST00000372557
  CDS Start-End: 209-646
gggcccttggctccaggagggacttgggaagcctgggtcggcctgagggagtcccaggcctgccgcagagtcatcccagtccggccagtgttcacaggcttgcacaatctgatttgaacctcacacatgggaagtaggcaaacagggaaactgaggaccagagaggacggaccagcaggctgaggccaggtcctacctcagcgaagagatgatcgctgagttcaaggctgcctttgacatgtttgatgctgatggtggtggggacatcagcgtcaaggagttgggcacggtgatgaggatgctgggccagacacccaccaaggaggagctggacgccatcatcgaggaggtggatgaggacggcagcggcaccatcgacttcgaggagttcttggtcatgatggtgcgccagatgaaagaggacgcgaaagggaagagcgaggaggagctggccgagtgcttccgcatcttcgacaggaatgcagacggctacatcgacccggaggagctggctgagattttcagggcctccggggagcacgtgacggacgaggagatcgaatctctgatgaaagacggcgacaagaacaacgacggccgcattgacttcgacgagttcctgaagatgatggagggcgtgcagtaaggagtggacagtcgcctctaccaagatcgcgtgtccctagggtgtgggagactccgccctgccgggtccccaccagggaggcgcgaccccttgtgggtctttgtctggaaggaataaaagcaaatgttccaaaa

SEQ ID NO: 195484 - DNA, 1750 bp, Homo sapiens
  Payload ID: 18593
  Gene Name: troponin I type 1 (skeletal, slow)
  Uniprot ID: P19237
  ENST ID: ENST00000336092
  CDS Start-End: 798-1361
aaactgccccagcaggccccagggaaggacggcaggctgggatgccgtccccacggactccctctcctctcttagccctggcactaagtgcgttcctctggcaaagaagaaaataatttctgtccctcgccatctgctgcatgggaagatgggaatggagtgagcacggcaagacagatgctgcgtcctgcaatggccccaccatggaccctcgtcatccaaccgaagtcgcccccttgcctggctttatcttcactatattgtgaggctgcttcattgaatcttatcccagactttaacttttccatgactgccgtgattttgccatgttgttcacacagagtgtgtctgaccttagctgcattgccaccgcctttgggaccctgagccttcttgccagcactgtcactcccagaggttgcttccactttccccttttccagaaccacttgttcctttgggtggcatcctggaaacttgctgttgaagtctcaactgcctcagtggttcttcaagggaggtcctcaggccaccacctgagaaattgttagaaatgcaagtttctgggctgcatcccagacctgctgaatcagaaatttggggaggagcacggactttggcaccagagagctgggtgcagctctcagctctgcgtcatccttgctgtgggaccctgggttattgctgagccactgtgagtctgtttcctcgtgggtatagtaggtctgcagtctacggcgaggcacaggccagcccagctccacgaggactgaacaaggtgctgtctcactgccaccatgccggaagtcgagagaaaacccaagatcactgcctcccgcaaactcttgctgaagagcctgatgctggccaaggccaaggaatgctgggagcaggagcacgaggagcgcgaggctgagaaggtgcgctacctggcagagcgcatccccacgctgcagacccgtggcctgtccctcagtgccctgcaggacctgtgccgggagctgcacgccaaggtggaggtggtggatgaggagcgatacgacattgaggccaaatgcctccacaacaccagggagattaaggacctgaagctgaaggtgatggacctccgtgggaagttcaagcgcccgcccctgcgtcgagtccgtgtctcggctgacgccatgctccgggccctgctgggctccaagcacaaggtgtccatggatctgcgggccaacctcaagtctgtgaagaaggaagacacagagaaggagcggcctgtggaggtgggtgactggaggaagaacgtggaggccatgtctggcatggaaggccggaagaagatgtttgatgccgccaagtctccgacctcacaatagaggccagcttgctgtgctgcgctctgagctcctgcttcatgcttcttctccaacccagctcactcacctctctgcctgtgtctggagcatcccttcccacctctcccccacttcttccctccagcctgcatgccctcctctggaactgggattaaacagatacccaagaggcaggaaaaacgcgagtgtctgaagacctcaccctggcagggtgggcttctatccacccatgaggcacctggggcttctcagccaccccgtggtgtaacaagtggaggaggaggagggggtgagaacacctttcctccagccctgtgccacactccttctatgtgtgtacagtgtccacaggcatcacaccttcttcattaaaaacccagtttcctggt

SEQ ID NO: 195485 - DNA, 5413 bp, Homo sapiens
  Payload ID: 18593
  Gene Name: troponin I type 1 (skeletal, slow)
  Uniprot ID: P19237
  ENST ID: ENST00000361379
  CDS Start-End: 94-657
ctcggctctgcccctcacagtctgcagtctacggcgaggcacaggccagcccagctccacgaggactgaacaaggtgctgtctcactgccaccatgccggaagtcgagagaaaacccaagatcactgcctcccgcaaactcttgctgaagagcctgatgctggccaaggccaaggaatgctgggagcaggagcacgaggagcgcgaggctgagaaggtgcgctacctggcagagcgcatccccacgctgcagacccgtggcctgtccctcagtgccctgcaggacctgtgccgggagctgcacgccaaggtggaggtggtggatgaggagcgatacgacattgaggccaaatgcctccacaacaccagggagattaaggacctgaagctgaaggtgatggacctccgtgggaagttcaagcgcccgcccctgcgtcgagtccgtgtctcggctgacgccatgctccgggccctgctgggctccaagcacaaggtgtccatggatctgcgggccaacctcaagtctgtgaagaaggaagacacagagaaggagcggcctgtggaggtgggtgactggaggaagaacgtggaggccatgtctggcatggaaggccggaagaagatgtttgatgccgccaagtctccgacctcacaatagaggccagcttgctgtgctgcgctctgagctcctgcttcatgcttcttctccaacccagctcactcacctctctgcctgtgtctggagcatcccttcccacctctcccccacttcttccctccagcctgcatgccctcctctggaactgggattaaacagatacccaagaggcaggaaaaacgcgagtgtctgaagacctcaccctggcagggtgggcttctatccacccatgaggcacctggggcttctcagccaccccgtggtgtaacaagtggaggaggaggagggggtgagaacacctttcctccagccctgtgccacactccttctatgtgtgtacagtgtccacaggcatcacaccttcttcattaaaaacccagtttcctggtcatttctgcagctctgactgtgagccctgagaagaaagggaagacttggggcttgggaagagagggctgtgctgggctccagtcaccctgtctgcagtccggagctcgggatctgaagggagggctaaggaattggtggctgcttgccagggtcccctggggccccttctgcccagtccctgtgacgtcacactgcacacactcaccacccaggatgctcagctcaccagagccctgacctccgagaaatgaccccgtcctgcccctgactctggccatcagaagaggcctctccattaagagccgcttctcctgccggctttcatactctccttcctctgcaaacctggattaactctccctgatgtgtgctgggttgagaggtcagggcactttcaatccctcacctagtcctgctgcacagggcaggaggcctcacagaagagatacttgcagttccaggcctggccaccaggtgacgccttccttctctcctgggctctcctgtccctccggcctctgctctccccacgttcacccaccctcctcccaattgtttccccttcacactcctgcactggtcctatcccccaggactgattctttcccggagatggggtggccacttatctgtcctctggatcaggtcctttctccatcccactacctcctgggtccaaagcctggtgagagcatagggccttctggggtggaaggggggtctggggcagcctctcttcccccaacatactcactagagtggctcctgtgaagcagagaccaaagttctgacttttctttttccttttttttttttttttgagatggagtctcgctgtgtcacccaggctggagtgcagtgacgcgatctcgactcactgcaacctccgcctcccaggttcaagcgattctcctgcttcaacctcctgagtagctgggattacaggtgcgtgccaccacaccccgctaatttttgtatttttagtagagacagggtttcaccatgttggtcaggctggtctcgaactcctgacctcgtaatctgcccacctcggcctcccaaagttctgggattacaggtgtgagcgaccacatccggtcaagttctgacttttcagggcagtgggatggtgacttctgagctaagcctgcaagggaagtggctgttcccagacctggggtcccttggcttttcgaccaccctagcactggccctaggaggggctgagttatcagagcagcaacccttctacccaccctactgagtccccattctaccttcgaatcccatgtattatcttccataagtgccagaaattggtacaaagtgcagtgccagctgctccccagggcatggtctggctctctgggctgctgggctgccagcccctttcagaaagcatggcagtgggaaccagcaacttgggctaccttaggggaagcagcactctgcccagggttcttgctataaataggtcagtgggcagagaggcagatgtgtgcaaaaagcacaaccccaatcacacacagaaacccgtaggcacggacacacccagtctcaatgcacgaagttggagaacctgacagggctggtccaggccacagaggatggggttaggcttcatgccttcatgcccaggcagccacagaaacccactcttccccgcctcacagggctcctccggttggcctggatccaaagcgatctccttgtttcacctctttccagctcttccctagagcctggccccaagttccagagtcaaatcccagttttgcagtcaactattaacctggggccctggcagattggggtatccacccagtcatgtaaaggcaggagacctgctctgggcctgactcaaagcaaacacgtgggtgcagaagacccatgggaggaggaggtggggcccactcaacacacctaagccagtggccctctaggaggggcagaagagccaaccagagggttcctggaggtcatcgggttcctccttctgcttccaggcagcaacagacctaattcatctcctgtgaggatggagcaagggcgaatataggcatagacatatctggagcgcaaggattgagaggccctgtggacaaggggaaggagagcttgggggtgggagagggatctatggaaggggctgttgtagccaagaatggggcctgggctgggggcctggcctctggagagccctgattctactccagtcttctctcaccatggagacaacaccagtagagctgggagctggggcctgccactgagtaacagctcacacatgtagcacacttatgcgtcaggcaccagcatgtacaccttaatttatttaactttcacaacaaccctaggagaaaggtacagctactattctcatggtacagtggggaaaactgaggcacagagaggttagggacttttcatgatcacacagctaataagtggtggtcccaggattcaacccaagaagtctgttagaatccatactcttatcgactattttaataacagcatttcaataatagtaatatgtgatgttaaatgctttatctgagttatatcattgcattctcacaaaaatggtacatttgttagctcaaatttacagatgaggaaatggaggcctggagagttcaagtagctcactctaagttacagggtttgctagctgcagactggagactagatctcaggtcactctgccttggggttgcccttttctgagatcagactggccttaacagagcccaactttcttggaaggacacagctgggggtcgagggtcctgcatatgcacctggggagtccccacacacccgcaccaaaggggaaacattcaaaggagatgcaggtgacatacagatgggctaaggtgaggccttcctccaacatggggccctggctgagagtggagggatagggtgctacttgggggatatctattactaatcagcacacaatagctgggtgggcaccccctctctctgcagctggtggagatgggcctggtgctcctctctgcttggtaggaatgaccagggcaggatgccacctgctacactcttgcctgtcccagagcccttgggagaccagctgttgctcccacctttccccacagggtgcccggtccccacggcgcaaggaggccaagctcagctgtgtgtctgagcccactcagcagcaggcatgatcagggcagggcccagcgctaagggctgctggggctaaagtgccttgctgaaggaggggcagagttaaacattagccacaatggccccccgcgaagtgagtcatactccccacaagtctctgggctgggcagccgggggcgggggggttagcttcgttccaggtgggtgaccaagctgcggaagcccaggacagttcgctgggaccagtgctaatggcagcttctgctcctgacccccatcaggtctctttcctcagacatccccaaagcttgtctgcctgtgggtctttcattaaaggtgacgggcaagggttttctcttccttccaagacacacttctaggctggcttgtgggtcccctgagacgaaggctgagcagggtgagcctcgaaaaccccatagcactggcccagagcactgcggtcaatgtccgaaggaccagagagggagggtgacttgctcaaggtcacaaacctaactggagctaggaagtaggtccccagactcccagtctgaggaaattggatgtggacagggctttggtctcctggccagaggcaaacgcccagggatctgaacaggctgcccatctctggcctcaactcagcaccccaactggctccagtgccaaccattggcctctctcactggttggcacaggctgggtgagcctggccctttgccctgggttcaggagagaggtatggctttgcctggcagtcaggggaggtgttccaacctgggagcccctgggggaggagcgtgtgtgtgaacgcttgtgcctgttcatcagaaggggtgagcatggtgtgtatgcgtgggcatgcagaatgcagggtgatgacctgtctgcccgccctgagtgtcacagacacctgtgtgtcccctgtactagtgcctcccagatgctcttctcctgactggctctttgtgacctaaatttcaactgctccaccccacaaggaggaaaccagggccacaaatgtagtgagattttcataaagctaaatgtattcagtggaaacgaccttcctctgatctaaaagcatgcatgcctttgttttattactggagtattaaattagcccttacttatggaataggaggacagtaggtggcaattgttttctaatgctcttacttcacaaaataaaatggtggcagcacaa

SEQ ID NO: 195486 - DNA, 1100 bp, Homo sapiens
  Payload ID: 18593
  Gene Name: troponin I type 1 (skeletal, slow)
  Uniprot ID: P19237
  ENST ID: ENST00000367312
  CDS Start-End: 66-629
ctacggcgaggcacaggccagcccagctccacgaggactgaacaaggtgctgtctcactgccaccatgccggaagtcgagagaaaacccaagatcactgcctcccgcaaactcttgctgaagagcctgatgctggccaaggccaaggaatgctgggagcaggagcacgaggagcgcgaggctgagaaggtgcgctacctggcagagcgcatccccacgctgcagacccgtggcctgtccctcagtgccctgcaggacctgtgccgggagctgcacgccaaggtggaggtggtggatgaggagcgatacgacattgaggccaaatgcctccacaacaccagggagattaaggacctgaagctgaaggtgatggacctccgtgggaagttcaagcgcccgcccctgcgtcgagtccgtgtctcggctgacgccatgctccgggccctgctgggctccaagcacaaggtgtccatggatctgcgggccaacctcaagtctgtgaagaaggaagacacagagaaggagcggcctgtggaggtgggtgactggaggaagaacgtggaggccatgtctggcatggaaggccggaagaagatgtttgatgccgccaagtctccgacctcacaatagaggtacctagagaccagctcccttctctggggtccatcagagtctagaggataatgagggagtccacaatgggcaggcgggttgtacttagtgtggtgcacggatgcacggactaaggcaccgatgagactgatttgagtcggctctcctgggctcagtcctggctccagcaccatgatacttgggcatgtcatttctgtttggcggccctttttgttcccattatctatgaaattgggggctgtatcaaatcagtggttctccaagtgtggtcctgggaccagcagcgtctacatcacctgggatgcaaatgatcagcccccaccccagatccactaaattggaaactctggggtgaggccagccttctaggtgattctgatgcacatgagagtttgagaaccactaggttagagggtccctgggatcccttcatctctgactttctgagaatctatgcacttttaaata

SEQ ID NO: 195487 - DNA, 580 bp, Homo sapiens
  Payload ID: 18593
  Gene Name: troponin I type 1 (skeletal, slow)
  ENST ID: ENST00000555948
  CDS Start-End: 77-394
cagtctgcagtctacggcgaggcacaggccagcccagctccacgaggactgaacaaggtgctgtctcactgccaccatgccggaagtcgagagaaaacccaagatcactgcctcccgcaaactcttgctgaagagcctgatgctggccaaggccaaggaatgctgggagcaggagcacgaggagcgcgaggctgagaaggtgcgctacctggcagagcgcatccccacgctgcagacccgtggcctgtccctcagtgccctgcaggacctgtgccgggagctgcacgccaaggtggaggtggtggatgaggagcgatacgacattgaggccatgtctggcatggaaggccggaagaagatgtttgatgccgccaagtctccgacctcacaatagaggccagcttgctgtgctgcgctctgagctcctgcttcatgcttcttctccaacccagctcactcacctctctgcctgtgtctggagcatcccttcccacctctcccccacttcttccctccagcctgcatgccctcctctggaactgggattaaacagatacccaagaggcaggaaaaacgcgag

SEQ ID NO: 195488 - DNA, 565 bp, Homo sapiens
  Payload ID: 18593
  Gene Name: troponin I type 1 (skeletal, slow)
  ENST ID: ENST00000555340
  CDS Start-End: 173-565
tctgcagtctacggcgaggcacaggccagcccagctccacgaggactgaacaaggtgctgtctcactgccaccatgccggaagtgtaagtagtctcactgccatctggggccccaggaagcgagagaaaacccaagatcactgcctcccgcaaactcttgctgaagagcctgatgctggccaaggccaaggaatgctgggagcaggagcacgaggagcgcgaggctgagaaggtgcgctacctggcagagcgcatccccacgctgcagacccgtggcctgtccctcagtgccctgcaggacctgtgccgggagctgcacgccaaggtggaggtggtggatgaggagcgatacgacattgaggccaaatgcctccacaacaccagggagattaaggacctgaagctgaaggtgatggacctccgtgggaagttcaagcgcccgcccctgcgtcgagtccgtgtctcggctgacgccatgctccgggccctgctgggctccaagcacaaggtgtccatggatctgcgggccaacctcaagtctgtgaagaaggaagacacagagaag

SEQ ID NO: 195489 - DNA, 633 bp, Homo sapiens
  Payload ID: 18593
  Gene Name: troponin I type 1 (skeletal, slow)
  ENST ID: ENST00000556362
  CDS Start-End: 223-633
cctcttcccccagctgctacttgcccctctgggccttcactgtggccctttgctctccctcattccccctcccagtcccatctctgctcagtccccacacctggtctggctgctcattctttccctttctgcagctcgagtctccccagtctgcagtctacggcgaggcacaggccagcccagctccacgaggactgaacaaggtgctgtctcactgccaccatgccggaagtcgagagaaaacccaagatcactgcctcccgcaaactcttgctgaagagcctgatgctggccaaggccaaggaatgctgggagcaggagcacgaggagcgcgaggctgagaaggtgcgctacctggcagagcgcatccccacgctgcagacccgtggcctgtccctcagtgccctgcaggacctgtgccgggagctgcacgccaaggtggaggtggtggatgaggagcgatacgacattgaggccaaatgcctccacaacaccagggagattaaggacctgaagctgaaggtgatggacctccgtgggaagttcaagcgcccgcccctgcgtcgagtccgtgtctcggctgacgccatgctccgggccctgctgggctccaagcacaaggtgtccatggat

SEQ ID NO: 195490 - DNA, 6142 bp, Homo sapiens
  Payload ID: 18593
  Gene Name: troponin I type 1 (skeletal, slow)
  ENST ID: ENST00000622580
  CDS Start-End: 94-657
ctcggctctgcccctcacagtctgcagtctacggcgaggcacaggccagcccagctccacgaggactgaacaaggtgctgtctcactgccaccatgccggaagtacagagaaaacccaagatcactgcctcccgcaaactcttgctgaagagcctgatgctggccaaggccaaggaatgctgggagcaggagcacgaggagcgcgaggctgagaaggtgcgctacctggcagagcgcatccccacgctgcagacccgtggcctgtccctcagtgccctgcaggacctgtgccgggagctgcacgccaaggtggaggtggtggatgaggagcgatacgacattgaggccaaatgcctccacaacaccagggagattaaggacctgaagctgaaggtgatggacctccgtgggaagttcaagcgcccgcccctgcgtcgagtccgtgtctcggctgacgccatgctccgggccctgctgggctccaagcacaaggtgtccatggatctgcgggccaacctcaagtctgtgaagaaggaagacacagagaaggagcggcctgtggaggtgggtgactggaggaagaacgtggaggccatgtctggcatggaaggccggaagaagatgtttgatgccgccaagtctccgacctcacaatagaggccagcttgctgtgctgcgctctgagctcctgcttcatgcttcttctccaacccagctcactcacctctctgcctgtgtctggagcatcccttcccacctctcccccacttcttccctccagcctgcatgccctcctctggaactgggattaaacagatacccaagaggcaggaaaaacgcgagtgtctgaagacctcaccctggcagggtgggcttctatccacccatgaggcacctggggcttctcagccaccccgtggtgtaacaagtggaggaggaggagggggtgagaacacctttcctccagccctgtgccacactccttctatgtgtgtacagtgtccacaggcatcacaccttcttcattaaaaacccagtttcctggtcatttctgcagctctgactgtgagccctgagaagaaagggaagacttggggcttgggaagagagggctgtgctgggctccagtcaccctgtctgcagtccggagctcgggatctgaagggagggctaaggaattggtggctgcttgccagggtcccctggggccccttctgcccagtccctgtgacgtcacactgcacacactcaccacccaggatgctcagctcaccagagccctgacctccgagaaatgaccccgtcctgcccctgactctggccatcagaagaggcctctccattaagagccgcttctcctgccggctttcatactctccttcctctgcaaacctggattaactctccctgatgtgtgctgggttgagaggtcagggcactttcaatccctcacctagtcctgctgcacagggcaggaggcctcacagaagagatacttgcagttccaggcctggccaccaggtgacgccttccttctctcctgggctctcctgtccctccggcctctgctctccccacgttcacccaccctcctcccaattgtttccccttcacactcctgcactggtcctatcccccaggactgattctttcccggagatggggtggccacttatctgtcctctggatcaggtcctttctccatcccactacctcctgggtccaaagcctggtgagagcatagggccttctggggtggaaggggggtctggggcagcctctcttcccccaacatactcactagagtggctcctgtgaagcagagaccaaagttctgacttttctttttccttttttttttttttttgagatggagtctcgctgtgtcacccaggctggagtgcagtgacgcgatctcgactcactgcaacctccgcctcccaggttcaagcgattctcctgcttcaacctcctgagtagctgggattacaggtgcgtgccaccacaccccgctaatttttgtatttttagtagagacagggtttcaccatgttggtcaggctggtctcgaactcctgacctcgtaatctgcccacctcggcctcccaaagttctgggattacaggtgtgagcgaccacatccggtcaagttctgacttttcagggcagtgggatggtgacttctgagctaagcctgcaagggaagtggctgttcccagacctggggtcccttggcttttcgaccaccctagcactggccctaggaggggctgagttatcagagcagcaacccttctacccaccctactgagtccccattctaccttcgaatcccatgtattatcttccataagtgccagaaattggtacaaagtgcagtgccagctgctccccagggcatggtctggctctctgggctgctgggctgccagcccctttcagaaagcatggcagtgggaaccagcaacttgggctaccttaggggaagcagcactctgcccagggttcttgctataaataggtcagtgggcagagaggcagatgtgtgcaaaaagcacaaccccaatcacacacagaaacccgtaggcacggacacacccagtctcaatgcacgaagttggagaacctgacagggctggtccaggccacagaggatggggttaggcttcatgccttcatgcccaggcagccacagaaacccactcttccccgcctcacagggctcctccggttggcctggatccaaagcgatctccttgtttcacctctttccagctcttccctagagcctggccccaagttccagagtcaaatcccagttttgcagtcaactattaacctggggccctggcagattggggtatccacccagtcatgtaaaggcaggagacctgctctgggcctgactcaaagcaaacacgtgggtgcagaagacccatgggaggaggaggtggggcccactcaacacacctaagccagtggccctctaggaggggcagaagagccaaccagagggttcctggaggtcatcgggttcctccttctgcttccaggcagcaacagacctaattcatctcctgtgaggatggagcaagggcgaatataggcatagacatatctggagcgcaaggattgagaggccctgtggacaaggggaaggagagcttgggggtgggagagggatctatggaaggggctgttgtagccaagaatggggcctgggctgggggcctggcctctggagagccctgattctactccagtcttctctcaccatggagacaacaccagtagagctgggagctggggcctgccactgagtaacagctcacacatgtagcacacttatgcgtcaggcaccagcatgtacaccttaatttatttaactttcacaacaaccctaggagaaaggtacagctactattctcatggtacagtggggaaaactgaggcacagagaggttagggacttttcatgatcacacagctaataagtggtggtcccaggattcaacccaagaagtctgttagaatccatactcttatcgactattttaataacagcatttcaataatagtaatatgtgatgttaaatgctttatctgagttatatcattgcattctcacaaaaatggtacatttgttagctcaaatttacagatgaggaaatggaggcctggagagttcaagtagctcactctaagttacagggtttgctagctgcagactggagactagatctcaggtcactctgccttggggttgcccttttctgagatcagactggccttaacagagcccaactttcttggaaggacacagctgggggtcgagggtcctgcatatgcacctggggagtccccacacacccgcaccaaaggggaaacattcaaaggagatgcaggtgacatacagatgggctaaggtgaggccttcctccaacatggggccctggctgagagtggagggatagggtgctacttgggggatatctattactaatcagcacacaatagctgggtgggcaccccctctctctgcagctggtggagatgggcctggtgctcctctctgcttggtaggaatgaccagggcaggatgccacctgctacactcttgcctgtcccagagcccttgggagaccagctgttgctcccacctttccccacagggtgcccggtccccacggcgcaaggaggccaagctcagctgtgtgtctgagcccactcagcagcaggcatgatcagggcagggcccagcgctaagggctgctggggctaaagtgccttgctgaaggaggggcagagttaaacattagccacaatggccccccgcgaagtgagtcatactccccacaagtctctgggctgggcagccgggggcgggggggttagcttcgttccaggtgggtgaccaagctgcggaagcccaggacagttcgctgggaccagtgctaatggcagcttctgctcctgacccccatcaggtctctttcctcagacatccccaaagcttgtctgcctgtgggtctttcattaaaggtgacgggcaagggttttctcttccttccaagacacacttctaggctggcttgtgggtcccctgagacgaaggctgagcagggtgagcctcgaaaaccccatagcactggcccagagcactgcggtcaatgtccgaaggaccagagagggagggtgacttgctcaaggtcacaaacctaactggagctaggaagtaggtccccagactcccagtctgaggaaattggatgtggacagggctttggtctcctggccagaggcaaacgcccagggatctgaacaggctgcccatctctggcctcaactcagcaccccaactggctccagtgccaaccattggcctctctcactggttggcacaggctgggtgagcctggccctttgccctgggttcaggagagaggtatggctttgcctggcagtcaggggaggtgttccaacctgggagcccctgggggaggagcgtgtgtgtgaacgcttgtgcctgttcatcagaaggggtgagcatggtgtgtatgcgtgggcatgcagaatgcagggtgatgacctgtctgcccgccctgagtgtcacagacacctgtgtgtcccctgtactagtgcctcccagatgctcttctcctgactggctctttgtgacctaaatttcaactgctccaccccacaaggaggaaaccagggccacaaatgtagtgagattttcataaagctaaatgtattcagtggaaacgaccttcctctgatctaaaagcatgcatgcctttgttttattactggagtattaaattagcccttacttatggaataggaggacagtaggtggcaattgttttctaatgctcttacttcacaaaataaaatggtggcagcacaatgtcagtatttatattacacaatattattagtttgtaaaaaccgaaagccagggagcttactgccctggattctttagggcgtgggtcttatcacctcattcatttcttcccttcccctaagagtgccacaagcatggcagttgctcagctgagacacatgaatgggaacagaactgaaatatcaggatgtgacctcgagccagctggttggggctggggatccccctggatctccactctgtcctgtccgagaaaggggaagctgccctatgagtcttttttctgggggattccagaggttgaacgtctgttctgaggctcctcagaacctcgagggaggggacgagagagatgaccccttgcccaaccactggctgaaaaatcttgaaattccctgactttgaccagggaattcccagttgtgctaagccctgcctggtggaatgtccctggaggaagtaaccaggacacgcatacgtttttaatgtacgtataaagaatcgtaaagtgaacacccatctgccaaccactcattttaagaactaggatatggcacatacttttgaagcccttatgcgtccctccccaatcacaaccccttcctctccacaaaggtaaatacaatcctcaattttgtgtttgttattctcttggttctcttcataatgttactacgtatttatgaattcctaatacatcattcagttttggatctttttgtaaacctt

SEQ ID NO: 195491 - DNA, 678 bp, Homo sapiens
  Payload ID: 18594
  Gene Name: troponin I type 2 (skeletal, fast)
  Uniprot ID: P48788
  ENST ID: ENST00000252898
  CDS Start-End: 1-549
atgggagatgaggagaagcggaacagggccatcacggcccgcaggcagcacctgaagagtgtgatgctgcagatagcggccacggagctggagaaggaggagagccgccgtgaggcagagaagcagaactacctggcggagcactgcccgccgctgcatatcccgggctccatgtctgaagtgcaggagctctgcaaacagctgcacgccaagatcgatgcggctgaagaggagaagtacgacatggaggtgagggtgcagaagaccagcaaggagctggaggacatgaaccagaagctatttgatctgcggggcaagttcaagcggcccccactgcggagggtgcgcatgtcggccgatgccatgctcaaggccctgctgggctcgaagcacaaggtgtgcatggacctgagggccaacctgaagcaggtcaagaaggaggacacagagaaggagcgggacctgcgagacgtgggtgactggaggaagaacatcgaggagaagtctggcatggagggccggaagaagatgtttgagtccgagtcctaggccactcgctgcccctacgcctgccccggtgcccggctcccagcagaacatactagggagatgcacccagagcctgccagggagggctggcctcaccaccaccgtcaataaaggatttgaatccccatg

SEQ ID NO: 195492 - DNA, 706 bp, Homo sapiens
  Payload ID: 18594
  Gene Name: troponin I type 2 (skeletal, fast)
  Uniprot ID: P48788
  ENST ID: ENST00000381905
  CDS Start-End: 31-579
ctggcaaagtgtcacacaccacacagcaccatgtcccagtgcaagaagcggaacagggccatcacggcccgcaggcagcacctgaagagtgtgatgctgcagatagcggccacggagctggagaaggaggagagccgccgtgaggcagagaagcagaactacctggcggagcactgcccgccgctgcatatcccgggctccatgtctgaagtgcaggagctctgcaaacagctgcacgccaagatcgatgcggctgaagaggagaagtacgacatggaggtgagggtgcagaagaccagcaaggagctggaggacatgaaccagaagctatttgatctgcggggcaagttcaagcggcccccactgcggagggtgcgcatgtcggccgatgccatgctcaaggccctgctgggctcgaagcacaaggtgtgcatggacctgagggccaacctgaagcaggtcaagaaggaggacacagagaaggagcgggacctgcgagacgtgggtgactggaggaagaacatcgaggagaagtctggcatggagggccggaagaagatgtttgagtccgagtcctaggccactcgctgcccctacgcctgccccggtgcccggctcccagcagaacatactagggagatgcacccagagcctgccagggagggctggcctcaccaccaccgtcaataaaggatttgaatcccca

SEQ ID NO: 195493 - DNA, 745 bp, Homo sapiens
  Payload ID: 18594
  Gene Name: troponin I type 2 (skeletal, fast)
  Uniprot ID: P48788
  ENST ID: ENST00000381906
  CDS Start-End: 70-618
tcttacttctcaccctggggaattccaagacattgtccttgaaggaggctccaagctcaggacctcaggatgggagatgaggagaagcggaacagggccatcacggcccgcaggcagcacctgaagagtgtgatgctgcagatagcggccacggagctggagaaggaggagagccgccgtgaggcagagaagcagaactacctggcggagcactgcccgccgctgcatatcccgggctccatgtctgaagtgcaggagctctgcaaacagctgcacgccaagatcgatgcggctgaagaggagaagtacgacatggaggtgagggtgcagaagaccagcaaggagctggaggacatgaaccagaagctatttgatctgcggggcaagttcaagcggcccccactgcggagggtgcgcatgtcggccgatgccatgctcaaggccctgctgggctcgaagcacaaggtgtgcatggacctgagggccaacctgaagcaggtcaagaaggaggacacagagaaggagcgggacctgcgagacgtgggtgactggaggaagaacatcgaggagaagtctggcatggagggccggaagaagatgtttgagtccgagtcctaggccactcgctgcccctacgcctgccccggtgcccggctcccagcagaacatactagggagatgcacccagagcctgccagggagggctggcctcaccaccaccgtcaataaaggatttgaatcccca

SEQ ID NO: 195494 - DNA, 743 bp, Homo sapiens
  Payload ID: 18594
  Gene Name: troponin I type 2 (skeletal, fast)
  Uniprot ID: P48788
  ENST ID: ENST00000381911
  CDS Start-End: 68-616
gctgccggcctgacctcgctcccagccctgctgcccagattctaggctccaagctcaggacctcaggatgggagatgaggagaagcggaacagggccatcacggcccgcaggcagcacctgaagagtgtgatgctgcagatagcggccacggagctggagaaggaggagagccgccgtgaggcagagaagcagaactacctggcggagcactgcccgccgctgcatatcccgggctccatgtctgaagtgcaggagctctgcaaacagctgcacgccaagatcgatgcggctgaagaggagaagtacgacatggaggtgagggtgcagaagaccagcaaggagctggaggacatgaaccagaagctatttgatctgcggggcaagttcaagcggcccccactgcggagggtgcgcatgtcggccgatgccatgctcaaggccctgctgggctcgaagcacaaggtgtgcatggacctgagggccaacctgaagcaggtcaagaaggaggacacagagaaggagcgggacctgcgagacgtgggtgactggaggaagaacatcgaggagaagtctggcatggagggccggaagaagatgtttgagtccgagtcctaggccactcgctgcccctacgcctgccccggtgcccggctcccagcagaacatactagggagatgcacccagagcctgccagggagggctggcctcaccaccaccgtcaataaaggatttgaatcccca

SEQ ID NO: 195495 - DNA, 699 bp, Homo sapiens
  Payload ID: 18594
  Gene Name: troponin I type 2 (skeletal, fast)
  ENST ID: ENST00000617947
  CDS Start-End: 25-573
aggctccaagctcaggacctcaggatgggagacctgcagaagcggaacagggccatcacggcccgcaggcagcacctgaagagtgtgatgctgcagatagcggccacggagctggagaaggaggagagccgccgtgaggcagagaagcagaactacctggcggagcactgcccgccgctgcatatcccgggctccatgtctgaagtgcaggagctctgcaaacagctgcacgccaagatcgatgcggctgaagaggagaagtacgacatggaggtgagggtgcagaagaccagcaaggagctggaggacatgaaccagaagctatttgatctgcggggcaagttcaagcggcccccactgcggagggtgcgcatgtcggccgatgccatgctcaaggccctgctgggctcgaagcacaaggtgtgcatggacctgagggccaacctgaagcaggtcaagaaggaggacacagagaaggagcgggacctgcgagacgtgggtgactggaggaagaacatcgaggagaagtctggcatggagggccggaagaagatgtttgagtccgagtcctaggccactcgctgcccctacgcctgccccggtgcccggctcccagcagaacatactagggagatgcacccagagcctgccagggagggctggcctcaccaccaccgtcaataaaggatttgaatcccc

SEQ ID NO: 195496 - DNA, 840 bp, Homo sapiens
  Payload ID: 18595
  Gene Name: troponin I type 3 (cardiac)
  Uniprot ID: P19429
  ENST ID: ENST00000344887
  CDS Start-End: 144-776
agtgtcctcggggagtctcaagcagcccggaggagactgacggtccctgggaccctgaaggtcacccgggcggccccctcactgaccctccaaacgcccctgtcctcgccctgcctcctgccattcccggcctgagtctcagcatggcggatgggagcagcgatgcggctagggaacctcgccctgcaccagccccaatcagacgccgctcctccaactaccgcgcttatgccacggagccgcacgccaagaaaaaatctaagatctccgcctcgagaaaattgcagctgaagactctgctgctgcagattgcaaagcaagagctggagcgagaggcggaggagcggcgcggagagaaggggcgcgctctgagcacccgctgccagccgctggagttggccgggctgggcttcgcggagctgcaggacttgtgccgacagctccacgcccgtgtggacaaggtggatgaagagagatacgacatagaggcaaaagtcaccaagaacatcacggagattgcagatctgactcagaagatctttgaccttcgaggcaagtttaagcggcccaccctgcggagagtgaggatctctgcagatgccatgatgcaggcgctgctgggggcccgggctaaggagtccctggacctgcgggcccacctcaagcaggtgaagaaggaggacaccgagaaggaaaaccgggaggtgggagactggcgcaagaacatcgatgcactgagtggaatggagggccgcaagaaaaagtttgagagctgagccttcctgcctactgcccctgccctgaggagggccctgaggaataaagcttctctctgagctg

SEQ ID NO: 195497 - DNA, 286 bp, Homo sapiens
  Payload ID: 18595
  Gene Name: troponin I type 3 (cardiac)
  ENST ID: ENST00000586858
  CDS Start-End: 116-286
gcgtggcctcccgtagactcagggctcaagttggacgtgggcccaaatctggaccggctgggtttgctgggggtgtcttgaggtcccctccaccgtcgtctccgaatccccctccatgatccttccttgctccatctcaccctggcagaaaaaatctaagatctccgcctcgagaaaattgcagctgaagccccgggtgggctgcgcttccctcccacccctctgcagactctgctgctgcagattgcaaagcaagagctggagcgagaggcggaggagcggcgcg

SEQ ID NO: 195498 - DNA, 669 bp, Homo sapiens
  Payload ID: 18595
  Gene Name: troponin I type 3 (cardiac)
  ENST ID: ENST00000588882
  CDS Start-End: 49-606
tgggggtgtcttgaggtcccctccaccgtcgtctccgaatccccctccatgatccttccttgctccatctcaccctggcagaaaaaatctaagatctccgcctcgagaaaattgcagctgaagactctgctgctgcagattgcaaagcaagagctggagcgagaggcggaggagcggcgcggagagaaggggcgcgctctgagcacccgctgccagccgctggagttggccgggctgggcttcgcggagctgcaggacttgtgccgacagctccacgcccgtgtggacaaggtggatgaagagagatacgacatagaggcaaaagtcaccaagaacatcacggagattgcagatctgactcagaagatctttgaccttcgaggcaagtttaagcggcccaccctgcggagagtgaggatctctgcagatgccatgatgcaggcgctgctgggggcccgggctaaggagtccctggacctgcgggcccacctcaagcaggtgaagaaggaggacaccgagaaggaaaaccgggaggtgggagactggcgcaagaacatcgatgcactgagtggaatggagggccgcaagaaaaagtttgagagctgagccttcctgcctactgcccctgccctgaggagggccctgaggaataaagcttctctctgagct

SEQ ID NO: 195499 - DNA, 967 bp, Homo sapiens
  Payload ID: 18596
  Gene Name: troponin T type 1 (skeletal, slow)
  Uniprot ID: P13805
  ENST ID: ENST00000291901
  CDS Start-End: 58-846
agcaaggctcagcctcaagattcacagcatctcagacacagcctaggccgcaccaggatgtcggacaccgaggagcaggaatatgaggaggagcagccggaagaggaggctgcggaggaggaggaggaagcccccgaagagccggagccggtggcagagccagaagaggaacgccccaaaccaagccgccccgtggtgcctcctttgatcccgccaaagatcccagaaggggagcgcgttgacttcgatgacatccaccgcaagcgcatggagaaagacctgctggagctgcagacactcatcgatgtacatttcgagcagcggaagaaggaggaagaggagctggttgccttgaaggagcgcattgagcggcgccggtcagagagagccgagcaacagcgcttcagaactgagaaggaacgcgaacgtcaggctaagctggcggaggagaagatgaggaaggaagaggaagaggccaagaagcgggcagaggatgatgccaagaaaaagaaggtgctgtccaacatgggggcccattttggcggctacctggtcaaggcagaacagaagcgtggtaagcggcagacggggcgggagatgaaggtgcgcatcctctccgagcgtaagaagcctctggacattgactacatgggggaggaacagctccgggagaaagcccaggagctgtcggactggatccaccagctggagtctgagaagttcgacctgatggcgaagctgaaacagcagaaatatgagatcaacgtgctgtacaaccgcatcagccacgcccagaagttccggaagggggcagggaagggccgcgttggaggccgctggaagtgaggatgccgccccggacagtggcacctgggaagcctgggagtgtttgtcccatcggtagcttgaaataaacgctcccctcagacacccgctgggttctctgatgttattatggttgagatgc

SEQ ID NO: 195500 - DNA, 934 bp, Homo sapiens
  Payload ID: 18596
  Gene Name: troponin T type 1 (skeletal, slow)
  Uniprot ID: P13805
  ENST ID: ENST00000356783
  CDS Start-End: 58-813
agcaaggctcagcctcaagattcacagcatctcagacacagcctaggccgcaccaggatgtcggacaccgaggagcaggaatatgaggaggagcagccggaagaggaggctgcggaggaggaggaggaagaagaggaacgccccaaaccaagccgccccgtggtgcctcctttgatcccgccaaagatcccagaaggggagcgcgttgacttcgatgacatccaccgcaagcgcatggagaaagacctgctggagctgcagacactcatcgatgtacatttcgagcagcggaagaaggaggaagaggagctggttgccttgaaggagcgcattgagcggcgccggtcagagagagccgagcaacagcgcttcagaactgagaaggaacgcgaacgtcaggctaagctggcggaggagaagatgaggaaggaagaggaagaggccaagaagcgggcagaggatgatgccaagaaaaagaaggtgctgtccaacatgggggcccattttggcggctacctggtcaaggcagaacagaagcgtggtaagcggcagacggggcgggagatgaaggtgcgcatcctctccgagcgtaagaagcctctggacattgactacatgggggaggaacagctccgggagaaagcccaggagctgtcggactggatccaccagctggagtctgagaagttcgacctgatggcgaagctgaaacagcagaaatatgagatcaacgtgctgtacaaccgcatcagccacgcccagaagttccggaagggggcagggaagggccgcgttggaggccgctggaagtgaggatgccgccccggacagtggcacctgggaagcctgggagtgtttgtcccatcggtagcttgaaataaacgctcccctcagacacccgctgggttctctgatgttattatggttgagatgc

SEQ ID NO: 195501 - DNA, 901 bp, Homo sapiens
  Payload ID: 18596
  Gene Name: troponin T type 1 (skeletal, slow)
  ENST ID: ENST00000536926
  CDS Start-End: 240-818
agcaaggctcagcctcaagattcacagcatctcagacacagcctaggccgcaccaggatgtcggacaccgaggagcaggaatatgaggagtgagtgctgcactgggagaggaggctgcggaggaggaggaggaagaagaggaacgccccaaaccaagccgccccgtggtgcctcctttgatcccgccaaagatcccagaaggggagcgcgttgacttcgatgacatccaccgcaagcgcatggagaaagacctgctggagctgcagacactcatcgatgtacatttcgagcagcggaagaaggaggaagaggagctggttgccttgaaggagcgcattgagcggcgccggtcagagagagccgagcaacagcgcttcagaactgagaaggaacgcgaacgtcaggctaagctggcggaggagaagatgaggaaggaagaggaagaggccaagaagcgggcagaggatgatgccaagaaaaagaaggtgctgtccaacatgggggcccattttggcggctacctggtcaaggcagaacagaagcgtggtaagcggcagacggggcgggagatgaaggtgcgcatcctctccgagcgtaagaagcctctggacattgactacatgggggaggaacagctccgggagaaagcccaggagctgtcggactggatccaccagctggagtctgagaagttcgacctgatggcgaagctgaaacagcagaaatatgagatcaacgtgctgtacaaccgcatcagccacgcccagaagttccggaagggggcagggaagggccgcgttggaggccgctggaagtgaggatgccgccccggacagtggcacctgggaagcctgggagtgtttgtcccatcggtagcttgaaataaacgctcccctcagac

SEQ ID NO: 195502 - DNA, 1065 bp, Homo sapiens
  Payload ID: 18596
  Gene Name: troponin T type 1 (skeletal, slow)
  ENST ID: ENST00000587465
  CDS Start-End: 407-985
gggaggcgaggagtgtggcactttggcggggaaggggcggctcagccctcgggccctcgcccgccctctccgggtctggagcgtctcctcgcgccatccctgcaccgccagggggaacgtgcccatcgcagccgaggccagagggacccccgtccagcagagactggaaccctggtctctggccaccgcccccatccctcccccagctcctaacgccttctcttctgtgcccccatctccagaggaggctgcggaggaggaggaggaagcccccgaagagccggagccggtggcagagccagaagaggaacgccccaaaccaagccgccccgtggtgcctcctttgatcccgccaaagatcccagaaggggagcgcgttgacttcgatgacatccaccgcaagcgcatggagaaagacctgctggagctgcagacactcatcgatgtacatttcgagcagcggaagaaggaggaagaggagctggttgccttgaaggagcgcattgagcggcgccggtcagagagagccgagcaacagcgcttcagaactgagaaggaacgcgaacgtcaggctaagctggcggaggagaagatgaggaaggaagaggaagaggccaagaagcgggcagaggatgatgccaagaaaaagaaggtgctgtccaacatgggggcccattttggcggctacctggtcaaggcagaacagaagcgtggtaagcggcagacggggcgggagatgaaggtgcgcatcctctccgagcgtaagaagcctctggacattgactacatgggggaggaacagctccgggagaaagcccaggagctgtcggactggatccaccagctggagtctgagaagttcgacctgatggcgaagctgaaacagcagaaatatgagatcaacgtgctgtacaaccgcatcagccacgcccagaagttccggaagggggcagggaagggccgcgttggaggccgctggaagtgaggatgccgccccggacagtggcacctgggaagcctgggagtgtttgtcccatcggtagcttgaaataaacgctcccctca

SEQ ID NO: 195503 - DNA, 880 bp, Homo sapiens
  Payload ID: 18596
  Gene Name: troponin T type 1 (skeletal, slow)
  ENST ID: ENST00000587089
  CDS Start-End: 1-203
cggagccggtggcagagccagaagaggaacgccccaaaccaagcccgcctcagctgggaccctccacgttcaggagcctcccggggctggcggctacctcactggacggcacatcccggaggtgggaggtggctcagggaggtcgggccactcatggtctctgtgtttctgtccactcagccgccccgtggtgcctcctttgatcccgccaaagatcccagaaggggagcgcgttgacttcgatgacatccaccgcaagcgcatggagaaagacctgctggagctgcagacactcatcgatgtacatttcgagcagcggaagaaggaggaagaggagctggttgccttgaaggagcgcattgagcggcgccggtcagagagagccgagcaacagcgcttcagaactgagaaggaacgcgaacgtcaggctaagctggcggaggagaagatgaggaaggaagaggaagaggccaagaagcgggcagaggatgatgccaagaaaaagaaggtgctgtccaacatgggggcccattttggcggctacctggtcaaggcagaacagaagcgtggtaagcggcagacggggcgggagatgaaggtgcgcatcctctccgagcgtaagaagcctctggacattgactacatgggggaggaacagctccgggagaaagcccaggagctgtcggactggatccaccagctggagtctgagaagttcgacctgatggcgaagctgaaacagcagaaatatgagatcaacgtgctgtacaaccgcatcagccacgcccagaagttccggaagggggcagggaagggccgcgttggaggccgctggaagtgaggatgccgccccggacagtggcacctgggaagcctggga

SEQ ID NO: 195504 - DNA, 529 bp, Homo sapiens
  Payload ID: 18596
  Gene Name: troponin T type 1 (skeletal, slow)
  ENST ID: ENST00000589745
  CDS Start-End: 1-442
cagaactgagaaggaacgcgaacgtcaggctaagctggcggaggagaagatgaggaaggaagaggaagaggccaagaagcgggcagaggatgatgccaagaaaaagaaggtgctgtccaacatgggggcccattttggcggctacctggtcaaggcagaacagaagcgtggtaagcggcagacggggcgggagatgaaggtgcgcatcctctccgagcgtaagaagcctctggacattgactacatgggggaggaacagctccgggagaaagcccaggagctgtcggactggatccaccagctggagtctgagaagttcgacctgatggcgaagctgaaacagcagaaatatgagatcaacgtgctgtacaaccgcatcagccacgcccagaagttccggaagggggcagggaagggccgcgttggaggccgctggaagtgaggatgccgccccggacagtggcacctgggaagcctgggagtgtttgtcccatcggtagcttgaaataaacgctcccctcagacaccc

SEQ ID NO: 195505 - DNA, 683 bp, Homo sapiens
  Payload ID: 18596
  Gene Name: troponin T type 1 (skeletal, slow)
  ENST ID: ENST00000588426
  CDS Start-End: 83-562
agcaaggctcagcctcaagattcacagcatctcagacacagcctaggccgcaccaggatgtcggacaccgaggagcaggaatatgaggaggagcagccggaagaggaggctgcggaggaggaggaggaagaaggaacgcgaacgtcaggctaagctggcggaggagaagatgaggaaggaagaggaagaggccaagaagcgggcagaggatgatgccaagaaaaagaaggtgctgtccaacatgggggcccattttggcggctacctggtcaaggcagaacagaagcgtggtaagcggcagacggggcgggagatgaaggtgcgcatcctctccgagcgtaagaagcctctggacattgactacatgggggaggaacagctccgggagaaagcccaggagctgtcggactggatccaccagctggagtctgagaagttcgacctgatggcgaagctgaaacagcagaaatatgagatcaacgtgctgtacaaccgcatcagccacgcccagaagttccggaagggggcagggaagggccgcgttggaggccgctggaagtgaggatgccgccccggacagtggcacctgggaagcctgggagtgtttgtcccatcggtagcttgaaataaacgctcccctcagacacccgctgggttctctgatgttattatggttgagatgc

SEQ ID NO: 195506 - DNA, 1163 bp, Homo sapiens
  Payload ID: 18596
  Gene Name: troponin T type 1 (skeletal, slow)
  Uniprot ID: P13805
  ENST ID: ENST00000588981
  CDS Start-End: 206-1042
ctggactctgagtgtggagccaggggcagcagggctgtctctgaactcccaggcttgtgtttgagcaaaggaattctctccccctccctctcccctcggggcgggcccgagcctccagctataaactccccggagcttcagtgccctcagcaaggctcagcctcaagattcacagcatctcagacacagcctaggccgcaccaggatgtcggacaccgaggagcaggaatatgaggaggagcagccggaagaggaggctgcggaggaggaggaggaagcccccgaagagccggagccggtggcagagccagaagaggaacgccccaaaccaagccgccccgtggtgcctcctttgatcccgccaaagatcccagaaggggagcgcgttgacttcgatgacatccaccgcaagcgcatggagaaagacctgctggagctgcagacactcatcgatgtacatttcgagcagcggaagaaggaggaagaggagctggttgccttgaaggagcgcattgagcggcgccggtcagagagagccgagcaacagcgcttcagaactgagaaggaacgcgaacgtcaggctaagctggcggaggagaagatgaggaaggaagaggaagaggccaagaagcgggcagaggatgatgccaagaaaaagaaggtgctgtccaacatgggggcccattttggcggctacctggtcaaggcagaacagaagcgtggtaagcggcagacggggcgggagatgaaggtgcgcatcctctccgagcgtaagaagcctctggacattgactacatgggggaggaacagctccgggcccggtctgcctggctgcctccatcacagccctcctgccctgccagggagaaagcccaggagctgtcggactggatccaccagctggagtctgagaagttcgacctgatggcgaagctgaaacagcagaaatatgagatcaacgtgctgtacaaccgcatcagccacgcccagaagttccggaagggggcagggaagggccgcgttggaggccgctggaagtgaggatgccgccccggacagtggcacctgggaagcctgggagtgtttgtcccatcggtagcttgaaataaacgctcccctcagacacccgctgggttctctgatgttattatggttgagatgc

SEQ ID NO: 195507 - DNA, 489 bp, Homo sapiens
  Payload ID: 18596
  Gene Name: troponin T type 1 (skeletal, slow)
  ENST ID: ENST00000588147
  CDS Start-End: 58-489
agcaaggctcagcctcaagattcacagcatctcagacacagcctaggccgcaccaggatgtcggacaccgaggagcaggaatatgaggaggagcagccggaagaggaggctgcggaggaggaggaggaaggtgaggtcccggactccgcagaagaggaacgccccaaaccaagccgccccgtggtgcctcctttgatcccgccaaagatcccagaaggggagcgcgttgacttcgatgacatccaccgcaagcgcatggagaaagacctgctggagctgcagacactcatcgatgtacatttcgagcagcggaagaaggaggaagaggagctggttgccttgaaggagcgcattgagcggcgccggtcagagagagccgagcaacagcgcttcagaactgagaaggaacgcgaacgtcaggctaagctggcggaggagaagatgaggaaggaagaggaagaggccaagaagcgggcagaggatgatgcc

SEQ ID NO: 195508 - DNA, 1016 bp, Homo sapiens
  Payload ID: 18596
  Gene Name: troponin T type 1 (skeletal, slow)
  Uniprot ID: P13805
  ENST ID: ENST00000587758
  CDS Start-End: 140-895
ctcaagattcacagcatctcagacacagcctaggttcccatggacttgtcataagacaaaagaggacagctgtgctgagggggcagggtctgcagcctcctggctgtgccaggaccacacctaccaaggccgcaccaggatgtcggacaccgaggagcaggaatatgaggaggagcagccggaagaggaggctgcggaggaggaggaggaagaagaggaacgccccaaaccaagccgccccgtggtgcctcctttgatcccgccaaagatcccagaaggggagcgcgttgacttcgatgacatccaccgcaagcgcatggagaaagacctgctggagctgcagacactcatcgatgtacatttcgagcagcggaagaaggaggaagaggagctggttgccttgaaggagcgcattgagcggcgccggtcagagagagccgagcaacagcgcttcagaactgagaaggaacgcgaacgtcaggctaagctggcggaggagaagatgaggaaggaagaggaagaggccaagaagcgggcagaggatgatgccaagaaaaagaaggtgctgtccaacatgggggcccattttggcggctacctggtcaaggcagaacagaagcgtggtaagcggcagacggggcgggagatgaaggtgcgcatcctctccgagcgtaagaagcctctggacattgactacatgggggaggaacagctccgggagaaagcccaggagctgtcggactggatccaccagctggagtctgagaagttcgacctgatggcgaagctgaaacagcagaaatatgagatcaacgtgctgtacaaccgcatcagccacgcccagaagttccggaagggggcagggaagggccgcgttggaggccgctggaagtgaggatgccgccccggacagtggcacctgggaagcctgggagtgtttgtcccatcggtagcttgaaataaacgctcccctcagacacccgctgggttctctgatgttattatggttgagatgc

SEQ ID NO: 195509 - DNA, 721 bp, Homo sapiens
  Payload ID: 18596
  Gene Name: troponin T type 1 (skeletal, slow)
  ENST ID: ENST00000593194
  CDS Start-End: 1-632
caaagatcccagaaggggagcgcgttgacttcgatgacatccaccgcaagcgcatggagaaagacctgctggagctgcagacactcatcgatgtacatttcgagcagcggaagaaggaggaagaggagctggttgccttgaaggagcgcattgagcggcgccggtcagagagagccgagcaacagcgcttcagaactgagaaggaacgcgaacgtcaggctaagctggcggaggagaagatgaggaaggaagaggaagaggccaagaagcgggcagaggatgatgccaagaaaaagaaggtgctgtccaacatgggggcccattttggcggctacctggtcaaggcagaacagaagcgtggtaagcggcagacggggcgggagatgaaggtgcgcatcctctccgagcgtaagaagcctctggacattgactacatgggggaggaacagctccgggagaaagcccaggagctgtcggactggatccaccagctggagtctgagaagttcgacctgatggcgaagctgaaacagcagaaatatgagatcaacgtgctgtacaaccgcatcagccacgcccagaagttccggaagggggcagggaagggccgcgttggaggccgctggaagtgaggatgccgccccggacagtggcacctgggaagcctgggagtgtttgtcccatcggtagcttgaaataaacgctcccctcagacacccgc

SEQ ID NO: 195510 - DNA, 995 bp, Homo sapiens
  Payload ID: 18596
  Gene Name: troponin T type 1 (skeletal, slow)
  ENST ID: ENST00000585321
  CDS Start-End: 367-945
gaggagtgtggcactttggcggggaaggggcggctcagccctcgggccctcgcccgccctctccgggtctggagcgtctcctcgcgccatccctgcaccgccagggggaacgtgcccatcgcagccgaggccagagggacccccgtccagcagagactggaaccctggtctctggccaccgcccccatccctcccccagctcctaacgccttctcttctgtgcccccatctccagaggaggctgcggaggaggaggaggaagaagaggaacgccccaaaccaagccgccccgtggtgcctcctttgatcccgccaaagatcccagaaggggagcgcgttgacttcgatgacatccaccgcaagcgcatggagaaagacctgctggagctgcagacactcatcgatgtacatttcgagcagcggaagaaggaggaagaggagctggttgccttgaaggagcgcattgagcggcgccggtcagagagagccgagcaacagcgcttcagaactgagaaggaacgcgaacgtcaggctaagctggcggaggagaagatgaggaaggaagaggaagaggccaagaagcgggcagaggatgatgccaagaaaaagaaggtgctgtccaacatgggggcccattttggcggctacctggtcaaggcagaacagaagcgtggtaagcggcagacggggcgggagatgaaggtgcgcatcctctccgagcgtaagaagcctctggacattgactacatgggggaggaacagctccgggagaaagcccaggagctgtcggactggatccaccagctggagtctgagaagttcgacctgatggcgaagctgaaacagcagaaatatgagatcaacgtgctgtacaaccgcatcagccacgcccagaagttccggaagggggcagggaagggccgcgttggaggccgctggaagtgaggatgccgccccggacagtggcacctgggaagcctgggagtgtttgtccc

SEQ ID NO: 195511 - DNA, 340 bp, Homo sapiens
  Payload ID: 18596
  Gene Name: troponin T type 1 (skeletal, slow)
  ENST ID: ENST00000586649
  CDS Start-End: 1-313
ggagatgaaggtgcgcatcctctccgagcgtaagaagcctctggacattgactacatgggggaggaacagctccgggagaaagcccaggagctgtcggactggatccaccagctggagtctgagaagttcgacctgatggcgaagctgaaacagcagaaatatgagatcaacgtgctgtacaaccgcatcagccacgcccagaagttactgcgtctcgctctgtcacccaggctggagtgcagtggagtgatctcagctcactgcaacttccatctcccgggttcaagcgattctcctgcctcagccccctgagtagctgggattacagccggaaggggg

SEQ ID NO: 195512 - DNA, 800 bp, Homo sapiens
  Payload ID: 18596
  Gene Name: troponin T type 1 (skeletal, slow)
  ENST ID: ENST00000593046
  CDS Start-End: 190-800
ggccccagctcctcctctctcacacccaggagtccagaccccagctcctcctctctcacacccaggagtccagacccaggagtccaggcccccagcccctcctccctcacacccaggagtctaggtcgccccctccttggggccccaccccactgggcctcttctctctggtccttaggccgcaccaggatgtcggacaccgaggagcaggaatatgaggaggagcagccggaagaggaggctgcggaggaggaggaggaagcccccgaagagccggagccggtggcagagccagaagaggaacgccccaaaccaagccgccccgtggtgcctcctttgatcccgccaaagatcccagaaggggagcgcgttgacttcgatgacatccaccgcaagcgcatggagaaagacctgctggagctgcagacactcatcgatgtacatttcgagcagcggaagaaggaggaagaggagctggttgccttgaaggagcgcattgagcggcgccggtcagagagagccgagcaacagcgcttcagaactgagaaggaacgcgaacgtcaggctaagctggcggaggagaagatgaggaaggaagaggaagaggccaagaagcgggcagaggatgatgccaagaaaaagaaggtgctgtccaacatgggggcccattttggcggctacctggtcaaggcagaacagaagcgtggtaagcggcagacggggcgggagatgaaggtgcgcatcctctccgagcgtaagaagcctctggacattgactacatgggggaggaacagctccg

SEQ ID NO: 195513 - DNA, 604 bp, Homo sapiens
  Payload ID: 18596
  Gene Name: troponin T type 1 (skeletal, slow)
  ENST ID: ENST00000589226
  CDS Start-End: 152-604
ccccagctcctcctctctcacacccaggagtccagacccaggagtccaggcccccagcccctcctccctcacacccaggagtctaggtcgccccctccttggggccccaccccactgggcctcttctctctggtccttaggccgcaccaggatgtcggacaccgaggagcaggaatatgaggaggagcagccggaagaggaggctgcggaggaggaggaggaagaagaggaacgccccaaaccaagccgccccgtggtgcctcctttgatcccgccaaagatcccagaaggggagcgcgttgacttcgatgacatccaccgcaagcgcatggagaaagacctgctggagctgcagacactcatcgatgtacatttcgagcagcggaagaaggaggaagaggagctggttgccttgaaggagcgcattgagcggcgccggtcagagagagccgagcaacagcgcttcagaactgagaaggaacgcgaacgtcaggctaagctggcggaggagaagatgaggaaggaagaggaagaggccaagaagcgggcagaggatgatgccaagaaaaagaaggtgctgtccaacatgggggcccattttggc

SEQ ID NO: 195514 - DNA, 1098 bp, Homo sapiens
  Payload ID: 18597
  Gene Name: troponin T type 2 (cardiac)
  Uniprot ID: P45379
  ENST ID: ENST00000236918
  CDS Start-End: 1-897
atgtctgacatagaagaggtggtggaagagtacgaggaggaggagcaggaagaagcagctgttgaagaagaggaggactggagagaggacgaagacgagcaggaggaggcagcggaagaggatgctgaagcagaggctgagaccgaggagaccagggcagaagaagatgaagaagaagaggaagcaaaggaggctgaagatggcccaatggaggagtccaaaccaaagcccaggtcgttcatgcccaacttggtgcctcccaagatccccgatggagagagagtggactttgatgacatccaccggaagcgcatggagaaggacctgaatgagttgcaggcgctgatcgaggctcactttgagaacaggaagaaagaggaggaggagctcgtttctctcaaagacaggatcgagagacgtcgggcagagcgggccgagcagcagcgcatccggaatgagcgggagaaggagcggcagaaccgcctggctgaagagagggctcgacgagaggaggaggagaacaggaggaaggctgaggatgaggcccggaagaagaaggctttgtccaacatgatgcattttgggggttacatccagaagcaggcccagacagagcggaaaagtgggaagaggcagactgagcgggaaaagaagaagaagattctggctgagaggaggaaggtgctggccattgaccacctgaatgaagatcagctgagggagaaggccaaggagctgtggcagagcatctataacttggaggcagagaagttcgacctgcaggagaagttcaagcagcagaaatatgagatcaatgttctccgaaacaggatcaacgataaccagaaagtctccaagacccgcgggaaggctaaagtcaccgggcgctggaaatagagcctggcctccttcaccaaagatctgctcctcgctcgcacctgcctccggcctgcactcccccagttcccgggccctcctgggcaccccaggcagctcctgtttggaaatggggagctggcctaggtgggagccaccactcctgcctgcccccacacccactccacaccagtaataaaaagccaccacacactgactggc

SEQ ID NO: 195515 - DNA, 969 bp, Homo sapiens
  Payload ID: 18597
  Gene Name: troponin T type 2 (cardiac)
  Uniprot ID: P45379
  ENST ID: ENST00000360372
  CDS Start-End: 1-768
atgtctgacatagaagaggtggtggaagagtacgaggaggaggagcaggaagaagcagctgttgaagaagaggaggactggagagaggacgaagacgagcaggaggaggcagcggaagaggatgctgaagcagaggctgagaccgaggagaccagggcagaagatgaagaagaagaggaagcaaaggaggctgaagatggcccaatggaggagtccaaaccaaagcccaggtcgttcatgcccaacttggtgcctcccaagatccccgatggagagagagtggactttgatgagagacgtcgggcagagcgggccgagcagcagcgcatccggaatgagcgggagaaggagcggcagaaccgcctggctgaagagagggctcgacgagaggaggaggagaacaggaggaaggctgaggatgaggcccggaagaagaaggctttgtccaacatgatgcattttgggggttacatccagaagacagagcggaaaagtgggaagaggcagactgagcgggaaaagaagaagaagattctggctgagaggaggaaggtgctggccattgaccacctgaatgaagatcagctgagggagaaggccaaggagctgtggcagagcatctataacttggaggcagagaagttcgacctgcaggagaagttcaagcagcagaaatatgagatcaatgttctccgaaacaggatcaacgataaccagaaagtctccaagacccgcgggaaggctaaagtcaccgggcgctggaaatagagcctggcctccttcaccaaagatctgctcctcgctcgcacctgcctccggcctgcactcccccagttcccgggccctcctgggcaccccaggcagctcctgtttggaaatggggagctggcctaggtgggagccaccactcctgcctgcccccacacccactccacaccagtaataaaaagccaccacacactgactggc

SEQ ID NO: 195516 - DNA, 1083 bp, Homo sapiens
  Payload ID: 18597
  Gene Name: troponin T type 2 (cardiac)
  ENST ID: ENST00000367315
  CDS Start-End: 13-888
agagcagagaccatgtctgacatagaagaggtggtggaagagtacgaggaggagtatctggagcatgcagaagcagctgttgaagagcaggaggaggcagcggaagaggatgctgaagcagaggctgagaccgaggagaccagggcagaagaagatgaagaagaagaggaagcaaaggaggctgaagatggcccaatggaggagtccaaaccaaagcccaggtcgttcatgcccaacttggtgcctcccaagatccccgatggagagagagtggactttgatgacatccaccggaagcgcatggagaaggacctgaatgagttgcaggcgctgatcgaggctcactttgagaacaggaagaaagaggaggaggagctcgtttctctcaaagacaggatcgagagacgtcgggcagagcgggccgagcagcagcgcatccggaatgagcgggagaaggagcggcagaaccgcctggctgaagagagggctcgacgagaggaggaggagaacaggaggaaggctgaggatgaggcccggaagaagaaggctttgtccaacatgatgcattttgggggttacatccagaagcacaccctccagacagagcggaaaagtgggaagaggcagactgagcgggaaaagaagaagaagattctggctgagaggaggaaggtgctggccattgaccacctgaatgaagatcagctgagggagaaggccaaggagctgtggcagagcatctataacttggaggcagagaagttcgacctgcaggagaagttcaagcagcagaaatatgagatcaatgttctccgaaacaggatcaacgataaccagaaagtctccaagacccgcgggaaggctaaagtcaccgggcgctggaaatagagcctggcctccttcaccaaagatctgctcctcgctcgcacctgcctccggcctgcactcccccagttcccgggccctcctgggcaccccaggcagctcctgtttggaaatggggagctggcctaggtgggagccaccactcctgcctgcccccacacccactccacaccagtaataaaaagccaccacacactg

SEQ ID NO: 195517 - DNA, 1050 bp, Homo sapiens
  Payload ID: 18597
  Gene Name: troponin T type 2 (cardiac)
  ENST ID: ENST00000367317
  CDS Start-End: 1-849
atgtctgacatagaagaggtggtggaagagtacgaggaggaggagcaggaagagcaggaggaggcagcggaagaggatgctgaagcagaggctgagaccgaggagaccagggcagaagaagatgaagaagaagaggaagcaaaggaggctgaagatggcccaatggaggagtccaaaccaaagcccaggtcgttcatgcccaacttggtgcctcccaagatccccgatggagagagagtggactttgatgacatccaccggaagcgcatggagaaggacctgaatgagttgcaggcgctgatcgaggctcactttgagaacaggaagaaagaggaggaggagctcgtttctctcaaagacaggatcgagagacgtcgggcagagcgggccgagcagcagcgcatccggaatgagcgggagaaggagcggcagaaccgcctggctgaagagagggctcgacgagaggaggaggagaacaggaggaaggctgaggatgaggcccggaagaagaaggctttgtccaacatgatgcattttgggggttacatccagaaggcccagacagagcggaaaagtgggaagaggcagactgagcgggaaaagaagaagaagattctggctgagaggaggaaggtgctggccattgaccacctgaatgaagatcagctgagggagaaggccaaggagctgtggcagagcatctataacttggaggcagagaagttcgacctgcaggagaagttcaagcagcagaaatatgagatcaatgttctccgaaacaggatcaacgataaccagaaagtctccaagacccgcgggaaggctaaagtcaccgggcgctggaaatagagcctggcctccttcaccaaagatctgctcctcgctcgcacctgcctccggcctgcactcccccagttcccgggccctcctgggcaccccaggcagctcctgtttggaaatggggagctggcctaggtgggagccaccactcctgcctgcccccacacccactccacaccagtaataaaaagccaccacacactgactggc

SEQ ID NO: 195518 - DNA, 1122 bp, Homo sapiens
  Payload ID: 18597
  Gene Name: troponin T type 2 (cardiac)
  Uniprot ID: P45379
  ENST ID: ENST00000367318
  CDS Start-End: 54-920
cagacgcctccaggatctgtcggcagctgctgttctgagggagagcagagaccatgtctgacatagaagaggtggtggaagagtacgaggaggaggagcaggaagaagcagctgttgaagagcaggaggaggcagcggaagaggatgctgaagcagaggctgagaccgaggagaccagggcagaagaagatgaagaagaagaggaagcaaaggaggctgaagatggcccaatggaggagtccaaaccaaagcccaggtcgttcatgcccaacttggtgcctcccaagatccccgatggagagagagtggactttgatgacatccaccggaagcgcatggagaaggacctgaatgagttgcaggcgctgatcgaggctcactttgagaacaggaagaaagaggaggaggagctcgtttctctcaaagacaggatcgagagacgtcgggcagagcgggccgagcagcagcgcatccggaatgagcgggagaaggagcggcagaaccgcctggctgaagagagggctcgacgagaggaggaggagaacaggaggaaggctgaggatgaggcccggaagaagaaggctttgtccaacatgatgcattttgggggttacatccagaagcaggcccagacagagcggaaaagtgggaagaggcagactgagcgggaaaagaagaagaagattctggctgagaggaggaaggtgctggccattgaccacctgaatgaagatcagctgagggagaaggccaaggagctgtggcagagcatctataacttggaggcagagaagttcgacctgcaggagaagttcaagcagcagaaatatgagatcaatgttctccgaaacaggatcaacgataaccagaaagtctccaagacccgcgggaaggctaaagtcaccgggcgctggaaatagagcctggcctccttcaccaaagatctgctcctcgctcgcacctgcctccggcctgcactcccccagttcccgggccctcctgggcaccccaggcagctcctgtttggaaatggggagctggcctaggtgggagccaccactcctgcctgcccccacacccactccacaccagtaataaaaagccaccacacactgactggca

SEQ ID NO: 195519 - DNA, 1007 bp, Homo sapiens
  Payload ID: 18597
  Gene Name: troponin T type 2 (cardiac)
  Uniprot ID: P45379
  ENST ID: ENST00000367320
  CDS Start-End: 54-821
cagacgcctccaggatctgtcggcagctgctgttctgagggagagcagagaccatgtctgacatagaagaggtggtggaagagtacgaggaggaggagcaggaagaagcagctgttgaagaagaggaggactggagagaggacgaagacgagcaggaggaggcagcggaagaggatgctgaagcagaggctgagaccgaggagaccagggcagaagatgaagaagaagaggaagcaaaggaggctgaagatggcccaatggaggagtccaaaccaaagcccaggtcgttcatgcccaacttggtgcctcccaagatccccgatggagagagagtggactttgatgagagacgtcgggcagagcgggccgagcagcagcgcatccggaatgagcgggagaaggagcggcagaaccgcctggctgaagagagggctcgacgagaggaggaggagaacaggaggaaggctgaggatgaggcccggaagaagaaggctttgtccaacatgatgcattttgggggttacatccagaagacagagcggaaaagtgggaagaggcagactgagcgggaaaagaagaagaagattctggctgagaggaggaaggtgctggccattgaccacctgaatgaagatcagctgagggagaaggccaaggagctgtggcagagcatctataacttggaggcagagaagttcgacctgcaggagaagttcaagcagcagaaatatgagatcaatgttctccgaaacaggatcaacgataaccagaaagtctccaagacccgcgggaaggctaaagtcaccgggcgctggaaatagagcctggcctccttcaccaaagatctgctcctcgctcgcacctgcctccggcctgcactcccccagttcccgggccctcctgggcaccccaggcagctcctgtttggaaatggggagctggcctaggtgggagccaccactcctgcctgcccccacacccactccacaccagtaataaaaagccac

SEQ ID NO: 195520 - DNA, 1132 bp, Homo sapiens
  Payload ID: 18597
  Gene Name: troponin T type 2 (cardiac)
  Uniprot ID: P45379
  ENST ID: ENST00000367322
  CDS Start-End: 73-930
agtccccgctgagactgagcagacgcctccaggatctgtcggcagctgctgttctgagggagagcagagaccatgtctgacatagaagaggtggtggaagagtacgaggaggaggagcaggaagaagcagctgttgaagagcaggaggaggcagcggaagaggatgctgaagcagaggctgagaccgaggagaccagggcagaagaagatgaagaagaagaggaagcaaaggaggctgaagatggcccaatggaggagtccaaaccaaagcccaggtcgttcatgcccaacttggtgcctcccaagatccccgatggagagagagtggactttgatgacatccaccggaagcgcatggagaaggacctgaatgagttgcaggcgctgatcgaggctcactttgagaacaggaagaaagaggaggaggagctcgtttctctcaaagacaggatcgagagacgtcgggcagagcgggccgagcagcagcgcatccggaatgagcgggagaaggagcggcagaaccgcctggctgaagagagggctcgacgagaggaggaggagaacaggaggaaggctgaggatgaggcccggaagaagaaggctttgtccaacatgatgcattttgggggttacatccagaagacagagcggaaaagtgggaagaggcagactgagcgggaaaagaagaagaagattctggctgagaggaggaaggtgctggccattgaccacctgaatgaagatcagctgagggagaaggccaaggagctgtggcagagcatctataacttggaggcagagaagttcgacctgcaggagaagttcaagcagcagaaatatgagatcaatgttctccgaaacaggatcaacgataaccagaaagtctccaagacccgcgggaaggctaaagtcaccgggcgctggaaatagagcctggcctccttcaccaaagatctgctcctcgctcgcacctgcctccggcctgcactcccccagttcccgggccctcctgggcaccccaggcagctcctgtttggaaatggggagctggcctaggtgggagccaccactcctgcctgcccccacacccactccacaccagtaataaaaagccaccacacactgactggca

SEQ ID NO: 195521 - DNA, 1182 bp, Homo sapiens
  Payload ID: 18597
  Gene Name: troponin T type 2 (cardiac)
  ENST ID: ENST00000458432
  CDS Start-End: 301-981
ctccatcctctgcctcacccagtccccgctgagactgagcagacgcctccaggatctgtcggcagctgctgttctgagggagagcagagaccatgtctgacatagaagaggtggtggaagagtacgaggaggagtgagtatgcagaagcagctgttgaagaagaggaggactggagagaggacgaagacgagcaggaggaggcagcggaagaggatgctgaagcagaggctgagaccgaggagaccagggcagaagaagatgaagaagaagaggaagcaaaggaggctgaagatggcccaatggaggagtccaaaccaaagcccaggtcgttcatgcccaacttggtgcctcccaagatccccgatggagagagagtggactttgatgacatccaccggaagcgcatggagaaggacctgaatgagttgcaggcgctgatcgaggctcactttgagaacaggaagaaagaggaggaggagctcgtttctctcaaagacaggatcgagagacgtcgggcagagcgggccgagcagcagcgcatccggaatgagcgggagaaggagcggcagaaccgcctggctgaagagagggctcgacgagaggaggaggagaacaggaggaaggctgaggatgaggcccggaagaagaaggctttgtccaacatgatgcattttgggggttacatccagaagacagagcggaaaagtgggaagaggcagactgagcgggaaaagaagaagaagattctggctgagaggaggaaggtgctggccattgaccacctgaatgaagatcagctgagggagaaggccaaggagctgtggcagagcatctataacttggaggcagagaagttcgacctgcaggagaagttcaagcagcagaaatatgagatcaatgttctccgaaacaggatcaacgataaccagaaagtctccaagacccgcgggaaggctaaagtcaccgggcgctggaaatagagcctggcctccttcaccaaagatctgctcctcgctcgcacctgcctccggcctgcactcccccagttcccgggccctcctgggcaccccaggcagctcctgtttggaaatggggagctggcctaggtgggagccaccactcctgcctgcccccacacccactccacaccagtaataaaaagccaccacacactgactggc

SEQ ID NO: 195522 - DNA, 386 bp, Homo sapiens
  Payload ID: 18597
  Gene Name: troponin T type 2 (cardiac)
  ENST ID: ENST00000422165
  CDS Start-End: 45-386
ccaggatctgtcggcagctgctgttctgagggagagcagagaccatgtctgacatagaagaggtggtggaagagtacgaggaggaggagcaggaagaagaggaggactggagagaggacgaagacgagcaggaggaggcagcggaagaggatgctgaagcagaggctgagaccgaggagaccagggcagaagaagatgaagaagaagaggaagcaaaggaggctgaagatggcccaatggaggagtccaaaccaaagcccaggtcgttcatgcccaacttggtgcctcccaagatccccgatggagagagagtggactttgatgacatccaccggaagcgcatggagaaggacctgaatgagttgcaggcgctgatcgaggctcac

SEQ ID NO: 195523 - DNA, 565 bp, Homo sapiens
  Payload ID: 18597
  Gene Name: troponin T type 2 (cardiac)
  ENST ID: ENST00000455702
  CDS Start-End: 26-565
gctgttctgagggagagcagagaccatgtctgacatagaagaggtggtggaagagtacgaggaggaggagcaggaagaagcagctgttgaagaagaggaggactggagagaggacgaagacgagcaggaggaggcagcggaagaggatgctgaagcagaggctgagaccgaggagaccagggcagaagaagatgaagaagaagaggaagcaaaggaggctgaagatggcccaatggaggagtccaaaccaaagcccaggtcgttcatgcccaacttggtgcctcccaagatccccgatggagagagagtggactttgatgacatccaccggaagcgcatggagaaggacctgaatgagttgcaggcgctgatcgaggctcactttgagaacaggaagaaagaggaggaggagctcgtttctctcaaagacaggatcgagagacgtcgggcagagcgggccgagcagcagcgcatccggaatgagcgggagaaggagcggcagaaccgcctggctgaagagagggctcgacgagaggaggaggagaacaggaggaaggctgaggat

SEQ ID NO: 195524 - DNA, 1084 bp, Homo sapiens
  Payload ID: 18597
  Gene Name: troponin T type 2 (cardiac)
  ENST ID: ENST00000421663
  CDS Start-End: 213-893
gagcagacgcctccaggatctgtcggcagctgctgttctgagggagagcagagaccatgtctgacatagaagaggtggtggaagagtacgaggaggagtgagagcaggaggaggcagcggaagaggatgctgaagcagaggctgagaccgaggagaccagggcagaagaagatgaagaagaagaggaagcaaaggaggctgaagatggcccaatggaggagtccaaaccaaagcccaggtcgttcatgcccaacttggtgcctcccaagatccccgatggagagagagtggactttgatgacatccaccggaagcgcatggagaaggacctgaatgagttgcaggcgctgatcgaggctcactttgagaacaggaagaaagaggaggaggagctcgtttctctcaaagacaggatcgagagacgtcgggcagagcgggccgagcagcagcgcatccggaatgagcgggagaaggagcggcagaaccgcctggctgaagagagggctcgacgagaggaggaggagaacaggaggaaggctgaggatgaggcccggaagaagaaggctttgtccaacatgatgcattttgggggttacatccagaagacagagcggaaaagtgggaagaggcagactgagcgggaaaagaagaagaagattctggctgagaggaggaaggtgctggccattgaccacctgaatgaagatcagctgagggagaaggccaaggagctgtggcagagcatctataacttggaggcagagaagttcgacctgcaggagaagttcaagcagcagaaatatgagatcaatgttctccgaaacaggatcaacgataaccagaaagtctccaagacccgcgggaaggctaaagtcaccgggcgctggaaatagagcctggcctccttcaccaaagatctgctcctcgctcgcacctgcctccggcctgcactcccccagttcccgggccctcctgggcaccccaggcagctcctgtttggaaatggggagctggcctaggtgggagccaccactcctgcctgcccccacacccactccacaccagtaataaaaagccaccacac

SEQ ID NO: 195525 - DNA, 349 bp, Homo sapiens
  Payload ID: 18597
  Gene Name: troponin T type 2 (cardiac)
  ENST ID: ENST00000412633
  CDS Start-End: 57-349
gagcagacgcctccaggatctgtcggcagctgctgttctgagggagagcagagaccatgtctgacatagaagaggtggtggaagagtacgaggaggaggagcaggaagaagcagctgttgaagagcaggaggaggcagcggaagaggatgctgaagcagaggctgagaccgaggagaccagggcagaagatgaagaagaagaggaagcaaaggaggctgaagatggcccaatggaggagtccaaaccaaagcccaggtcgttcatgcccaacttggtgcctcccaagatccccgatggagagagagtggactttgatgacatccaccggaagcgcatggagaaggacct

SEQ ID NO: 195526 - DNA, 870 bp, Homo sapiens
  Payload ID: 18597
  Gene Name: troponin T type 2 (cardiac)
  ENST ID: ENST00000438742
  CDS Start-End: 57-870
gagcagacgcctccaggatctgtcggcagctgctgttctgagggagagcagagaccatgtctgacatagaagaggtggtggaagagtacgaggaggaggagcaggaagagcaggaggaggcagcggaagaggatgctgaagcagaggctgagaccgaggagaccagggcagaagaagatgaagaagaagaggaagcaaaggaggctgaagatggcccaatggaggagtccaaaccaaagcccaggtcgttcatgcccaacttggtgcctcccaagatccccgatggagagagagtggactttgatgacatccaccggaagcgcatggagaaggacctgaatgagttgcaggcgctgatcgaggctcactttgagaacaggaagaaagaggaggaggagctcgtttctctcaaagacaggatcgagagacgtcgggcagagcgggccgagcagcagcgcatccggaatgagcgggagaaggagcggcagaaccgcctggctgaagagagggctcgacgagaggaggaggagaacaggaggaaggctgaggatgaggcccggaagaagaaggctttgtccaacatgatgcattttgggggttacatccagaaggcccagacagagcggaaaagtgggaagaggcagactgagcgggaaaagaagaagaagattctggctgagaggaggaaggtgctggccattgaccacctgaatgaagatcagctgagggagaaggccaaggagctgtggcagagcatctataacttggaggcagagaagttcgacctgcaggagaagttcaagcagcagaaatatgagatcaatgttctccgaaacaggatcaacgataaccagaaagtctccaagaccc

SEQ ID NO: 195527 - DNA, 1330 bp, Homo sapiens
  Payload ID: 18597
  Gene Name: troponin T type 2 (cardiac)
  Uniprot ID: P45379
  ENST ID: ENST00000509001
  CDS Start-End: 288-1154
acattcctccctccgcagggctggctcaccaggccccagcccacatgcctgcttaaagccctctccatcctctgcctcacccagtccccgctgagactgagcagacgcctccaggatctgtcggcagctgctgttctgaggtcacacagctcatgaggggtggaactagattcaccctaggcctcgctgatctctgtacaacgggggccagagctcttctgaggaaggcaggcttccctttgtacctgcactgacttttttctccttttggagggagagcagagaccatgtctgacatagaagaggtggtggaagagtacgaggaggaggagcaggaagaagcagctgttgaagagcaggaggaggcagcggaagaggatgctgaagcagaggctgagaccgaggagaccagggcagaagaagatgaagaagaagaggaagcaaaggaggctgaagatggcccaatggaggagtccaaaccaaagcccaggtcgttcatgcccaacttggtgcctcccaagatccccgatggagagagagtggactttgatgacatccaccggaagcgcatggagaaggacctgaatgagttgcaggcgctgatcgaggctcactttgagaacaggaagaaagaggaggaggagctcgtttctctcaaagacaggatcgagagacgtcgggcagagcgggccgagcagcagcgcatccggaatgagcgggagaaggagcggcagaaccgcctggctgaagagagggctcgacgagaggaggaggagaacaggaggaaggctgaggatgaggcccggaagaagaaggctttgtccaacatgatgcattttgggggttacatccagaagcaggcccagacagagcggaaaagtgggaagaggcagactgagcgggaaaagaagaagaagattctggctgagaggaggaaggtgctggccattgaccacctgaatgaagatcagctgagggagaaggccaaggagctgtggcagagcatctataacttggaggcagagaagttcgacctgcaggagaagttcaagcagcagaaatatgagatcaatgttctccgaaacaggatcaacgataaccagaaagtctccaagacccgcgggaaggctaaagtcaccgggcgctggaaatagagcctggcctccttcaccaaagatctgctcctcgctcgcacctgcctccggcctgcactcccccagttcccgggccctcctgggcaccccaggcagctcctgtttggaaatggggagctggcctaggtgggagccaccactcctgcctgcccccacacccactccacaccagtaat

SEQ ID NO: 195528 - DNA, 1210 bp, Homo sapiens
  Payload ID: 18598
  Gene Name: troponin T type 3 (skeletal, fast)
  Uniprot ID: P45378
  ENST ID: ENST00000278317
  CDS Start-End: 220-996
ttcctatacttggtaaggggcctgcacgggcatagccccccccagcaagactccgcacacaccccggccacccagtcactggccaatgggctcctaggaagatcaaatgtcactataacacgagggtgtgagccgggcgccagtgcctgcagccggtgctgtccacagggagctccagcccttctcacactcgacccgcagaaaccacccaccttcaccatgtctgacgaggaagttgaacaggtggaggagcagtacgaagaagaagaggaagcccaggaggaagaggaagttcaagaagacaccgcagaggaggacgcggaagaggagaaaccgagacccaaactcactgctcctaagatcccagaaggggagaaagtggacttcgatgacatccagaagaagcgtcagaacaaagacctaatggagctccaggccctcatcgacagccactttgaagcccggaagaaggaggaggaggagctggtcgctctcaaagagagaatcgagaagcgccgtgcagagagagcggagcagcagaggattcgtgcagagaaggagagggagcgccagaacagactggcggaggaaaaggccagaagggaggaggaggatgccaagaggagggcagaggacgacctgaagaagaagaaagctctgtcttccatgggagccaactacagcagctacctggccaaggctgaccagaagagaggcaagaagcagacagcccgggaaatgaagaagaagattctggctgagagacgcaagccgctcaacatcgatcaccttggtgaagacaaactgagggacaaggccaaggagctctgggagaccctgcaccagctggagattgacaagttcgagtttggggagaagctgaaacgccagaaatatgacatcaccacgctcaggagccgcattgaccaggcccagaagcacagcaagaaggctgggaccccagccaagggcaaagtcggcgggcgctggaagtagagaggccagaaaggcccctcgaggcagagaccctccgccctcttgcacaccagggccgctcgtgggactccacatcctccagcccccacaatcctgtcaggggctccctgacagtcctgggggtggagaggccatcccggggcgtcccccgcgtctgtgtccttgctgccttcatcccctggggcctgtgaataaagctgcagaacccccttca

SEQ ID NO: 195529 - DNA, 794 bp, Homo sapiens
  Payload ID: 18598
  Gene Name: troponin T type 3 (skeletal, fast)
  Uniprot ID: P45378
  ENST ID: ENST00000344578
  CDS Start-End: 57-794
cacagggagctccagcccttctcacactcgacccgcagaaaccacccaccttcaccatgtctgacgaggaagttgaacaggtggaggagcagtacgaagaagaagaggaagcccaggaggaagaggagaaaccgagacccaaactcactgctcctaagatcccagaaggggagaaagtggacttcgatgacatccagaagaagcgtcagaacaaagacctaatggagctccaggccctcatcgacagccactttgaagcccggaagaaggaggaggaggagctggtcgctctcaaagagagaatcgagaagcgccgtgcagagagagcggagcagcagaggattcgtgcagagaaggagagggagcgccagaacagactggcggaggaaaaggccagaagggaggaggaggatgccaagaggagggcagaggacgacctgaagaagaagaaagctctgtcttccatgggagccaactacagcagctacctggccaaggctgaccagaagagaggcaagaagcagacagcccgggaaatgaagaagaagattctggctgagagacgcaagccgctcaacatcgatcaccttggtgaagacaaactgagggacaaggccaaggagctctgggagaccctgcaccagctggagattgacaagttcgagtttggggagaagctgaaacgccagaaatatgacatcaccacgctcaggagccgcattgaccaggcccagaagcacagcaagaaggctgggaccccagccaagggcaaagtcggcgggcgctggaagtag

SEQ ID NO: 195530 - DNA, 1019 bp, Homo sapiens
  Payload ID: 18598
  Gene Name: troponin T type 3 (skeletal, fast)
  ENST ID: ENST00000381557
  CDS Start-End: 76-810
gcctgcagccggtgctgtccacagggagctccagcccttctcacactcgacccgcagaaaccacccaccttcaccatgtctgacgaggaagttgaacaggtggaggaggaagcccaggaggaagaggaagttcaagaagaggagaaaccgagacccaaactcactgctcctaagatcccagaaggggagaaagtggacttcgatgacatccagaagaagcgtcagaacaaagacctaatggagctccaggccctcatcgacagccactttgaagcccggaagaaggaggaggaggagctggtcgctctcaaagagagaatcgagaagcgccgtgcagagagagcggagcagcagaggattcgtgcagagaaggagagggagcgccagaacagactggcggaggaaaaggccagaagggaggaggaggatgccaagaggagggcagaggacgacctgaagaagaagaaagctctgtcttccatgggagccaactacagcagctacctggccaaggctgaccagaagagaggcaagaagcagacagcccgggaaatgaagaagaagattctggctgagagacgcaagccgctcaacatcgatcaccttggtgaagacaaactgagggacaaggccaaggagctctgggagaccctgcaccagctggagattgacaagttcgagtttggggagaagctgaaacgccagaaatatgacatcaccacgctcaggagccgcattgaccaggcccagaagcacagcaagaaggctgggaccccagccaagggcaaagtcggcgggcgctggaagtagagaggccagaaaggcccctcgaggcagagaccctccgccctcttgcacaccagggccgctcgtgggactccacatcctccagcccccacaatcctgtcaggggctccctgacagtcctgggggtggagaggccatcccggggcgtcccccgcgtctgtgtccttgctgccttcatcccctggggcctgtgaataaagctgcagaacccc

SEQ ID NO: 195531 - DNA, 1246 bp, Homo sapiens
  Payload ID: 18598
  Gene Name: troponin T type 3 (skeletal, fast)
  Uniprot ID: P45378
  ENST ID: ENST00000381558
  CDS Start-End: 280-1032
cagaggatggccctagaggagtctgtggcgtttggggcctgaaccagctgggaggacagcacgaggggctggtgggcagcctgggactgggtcacaccgggggcctggacaacactggctcgtggggctgaggactgaggagagcctggcccagccgtggcagttacaagaggcttaacctgaggggcagcagagtctcaggaagagattctgggataggaaaaagctacccccgttgcctggaagacagctatctgctggaaaccacccaccttcaccatgtctgacgaggaagttgaacaggtggaggagcagtacgaagaagaagaggaagcccaggaggaagaggaagttcaagaagaggagaaaccgagacccaaactcactgctcctaagatcccagaaggggagaaagtggacttcgatgacatccagaagaagcgtcagaacaaagacctaatggagctccaggccctcatcgacagccactttgaagcccggaagaaggaggaggaggagctggtcgctctcaaagagagaatcgagaagcgccgtgcagagagagcggagcagcagaggattcgtgcagagaaggagagggagcgccagaacagactggcggaggaaaaggccagaagggaggaggaggatgccaagaggagggcagaggacgacctgaagaagaagaaagctctgtcttccatgggagccaactacagcagctacctggccaaggctgaccagaagagaggcaagaagcagacagcccgggaaatgaagaagaagattctggctgagagacgcaagccgctcaacatcgatcaccttggtgaagacaaactgagggacaaggccaaggagctctgggagaccctgcaccagctggagattgacaagttcgagtttggggagaagctgaaacgccagaaatatgacatcaccacgctcaggagccgcattgaccaggcccagaagcacagcaagaaggctgggaccccagccaagggcaaagtcggcgggcgctggaagtagagaggccagaaaggcccctcgaggcagagaccctccgccctcttgcacaccagggccgctcgtgggactccacatcctccagcccccacaatcctgtcaggggctccctgacagtcctgggggtggagaggccatcccggggcgtcccccgcgtctgtgtccttgctgccttcatcccctggggcctgtgaataaagctgcagaacccccttca

SEQ ID NO: 195532 - DNA, 844 bp, Homo sapiens
  Payload ID: 18598
  Gene Name: troponin T type 3 (skeletal, fast)
  Uniprot ID: P45378
  ENST ID: ENST00000381563
  CDS Start-End: 59-844
tccacagggagctccagcccttctcacactcgacccgcagaaaccacccaccttcaccatgtctgacgaggaagttgaacaggtggaggagcagtacgaagaagaagaggaagcccaggaggaagctgcagaagtccatgaggaagttcatgaaccagaggaagttcaagaagaggagaaaccgagacccaaactcactgctcctaagatcccagaaggggagaaagtggacttcgatgacatccagaagaagcgtcagaacaaagacctaatggagctccaggccctcatcgacagccactttgaagcccggaagaaggaggaggaggagctggtcgctctcaaagagagaatcgagaagcgccgtgcagagagagcggagcagcagaggattcgtgcagagaaggagagggagcgccagaacagactggcggaggaaaaggccagaagggaggaggaggatgccaagaggagggcagaggacgacctgaagaagaagaaagctctgtcttccatgggagccaactacagcagctacctggccaaggctgaccagaagagaggcaagaagcagacagcccgggaaatgaagaagaagattctggctgagagacgcaagccgctcaacatcgatcaccttggtgaagacaaactgagggacaaggccaaggagctctgggagaccctgcaccagctggagattgacaagttcgagtttggggagaagctgaaacgccagaaatatgacatcaccacgctcaggagccgcattgaccaggcccagaagcacagcaagaaggctgggaccccagccaagggcaaagtcggcgggcgctggaagtag

SEQ ID NO: 195533 - DNA, 1042 bp, Homo sapiens
  Payload ID: 18598
  Gene Name: troponin T type 3 (skeletal, fast)
  Uniprot ID: P45378
  ENST ID: ENST00000381579
  CDS Start-End: 76-828
gcctgcagccggtgctgtccacagggagctccagcccttctcacactcgacccgcagaaaccacccaccttcaccatgtctgacgaggaagttgaacaggtggaggagcagtacgaagaagaagaggaagcccaggaggaagaggaagttcaagaagaggagaaaccgagacccaaactcactgctcctaagatcccagaaggggagaaagtggacttcgatgacatccagaagaagcgtcagaacaaagacctaatggagctccaggccctcatcgacagccactttgaagcccggaagaaggaggaggaggagctggtcgctctcaaagagagaatcgagaagcgccgtgcagagagagcggagcagcagaggattcgtgcagagaaggagagggagcgccagaacagactggcggaggaaaaggccagaagggaggaggaggatgccaagaggagggcagaggacgacctgaagaagaagaaagctctgtcttccatgggagccaactacagcagctacctggccaaggctgaccagaagagaggcaagaagcagacagcccgggaaatgaagaagaagattctggctgagagacgcaagccgctcaacatcgatcaccttggtgaagacaaactgagggacaaggccaaggagctctgggagaccctgcaccagctggagattgacaagttcgagtttggggagaagctgaaacgccagaaatatgacatcatgaatgtccgggccagagtgcagatgctggccaagttcagcaagaaggctgggaccccagccaagggcaaagtcggcgggcgctggaagtagagaggccagaaaggcccctcgaggcagagaccctccgccctcttgcacaccagggccgctcgtgggactccacatcctccagcccccacaatcctgtcaggggctccctgacagtcctgggggtggagaggccatcccggggcgtcccccgcgtctgtgtccttgctgccttcatcccctggggcctgtgaataaagctgcagaacccccttca

SEQ ID NO: 195534 - DNA, 1060 bp, Homo sapiens
  Payload ID: 18598
  Gene Name: troponin T type 3 (skeletal, fast)
  Uniprot ID: P45378
  ENST ID: ENST00000381589
  CDS Start-End: 76-846
gcctgcagccggtgctgtccacagggagctccagcccttctcacactcgacccgcagaaaccacccaccttcaccatgtctgacgaggaagttgaacaggtggaggagcagtacgaagaagaagaggaagcccaggaggaagctgcagaagtccatgaggaagttcatgaaccagaggagaaaccgagacccaaactcactgctcctaagatcccagaaggggagaaagtggacttcgatgacatccagaagaagcgtcagaacaaagacctaatggagctccaggccctcatcgacagccactttgaagcccggaagaaggaggaggaggagctggtcgctctcaaagagagaatcgagaagcgccgtgcagagagagcggagcagcagaggattcgtgcagagaaggagagggagcgccagaacagactggcggaggaaaaggccagaagggaggaggaggatgccaagaggagggcagaggacgacctgaagaagaagaaagctctgtcttccatgggagccaactacagcagctacctggccaaggctgaccagaagagaggcaagaagcagacagcccgggaaatgaagaagaagattctggctgagagacgcaagccgctcaacatcgatcaccttggtgaagacaaactgagggacaaggccaaggagctctgggagaccctgcaccagctggagattgacaagttcgagtttggggagaagctgaaacgccagaaatatgacatcaccacgctcaggagccgcattgaccaggcccagaagcacagcaagaaggctgggaccccagccaagggcaaagtcggcgggcgctggaagtagagaggccagaaaggcccctcgaggcagagaccctccgccctcttgcacaccagggccgctcgtgggactccacatcctccagcccccacaatcctgtcaggggctccctgacagtcctgggggtggagaggccatcccggggcgtcccccgcgtctgtgtccttgctgccttcatcccctggggcctgtgaataaagctgcagaacccccttca

SEQ ID NO: 195535 - DNA, 818 bp, Homo sapiens
  Payload ID: 18598
  Gene Name: troponin T type 3 (skeletal, fast)
  Uniprot ID: P45378
  ENST ID: ENST00000397301
  CDS Start-End: 9-818
ccttcaccatgtctgacgaggaagttgaacaggtggaggagcagtacgaagaagaagaggaagcccaggaggaagctgcagaagtccatgaggaagttcatgaaccagaggaagttcaagaagacaccgcagaggaggacgcggaagaggagaaaccgagacccaaactcactgctcctaagatcccagaaggggagaaagtggacttcgatgacatccagaagaagcgtcagaacaaagacctaatggagctccaggccctcatcgacagccactttgaagcccggaagaaggaggaggaggagctggtcgctctcaaagagagaatcgagaagcgccgtgcagagagagcggagcagcagaggattcgtgcagagaaggagagggagcgccagaacagactggcggaggaaaaggccagaagggaggaggaggatgccaagaggagggcagaggacgacctgaagaagaagaaagctctgtcttccatgggagccaactacagcagctacctggccaaggctgaccagaagagaggcaagaagcagacagcccgggaaatgaagaagaagattctggctgagagacgcaagccgctcaacatcgatcaccttggtgaagacaaactgagggacaaggccaaggagctctgggagaccctgcaccagctggagattgacaagttcgagtttggggagaagctgaaacgccagaaatatgacatcaccacgctcaggagccgcattgaccaggcccagaagcacagcaagaaggctgggaccccagccaagggcaaagtcggcgggcgctggaagtag

SEQ ID NO: 195536 - DNA, 720 bp, Homo sapiens
  Payload ID: 18598
  Gene Name: troponin T type 3 (skeletal, fast)
  ENST ID: ENST00000397304
  CDS Start-End: 1-720
atgtctgacgaggaagttgaacaggtggaggaggaagcccaggaggaagaggagaaaccgagacccaaactcactgctcctaagatcccagaaggggagaaagtggacttcgatgacatccagaagaagcgtcagaacaaagacctaatggagctccaggccctcatcgacagccactttgaagcccggaagaaggaggaggaggagctggtcgctctcaaagagagaatcgagaagcgccgtgcagagagagcggagcagcagaggattcgtgcagagaaggagagggagcgccagaacagactggcggaggaaaaggccagaagggaggaggaggatgccaagaggagggcagaggacgacctgaagaagaagaaagctctgtcttccatgggagccaactacagcagctacctggccaaggctgaccagaagagaggcaagaagcagacagcccgggaaatgaagaagaagattctggctgagagacgcaagccgctcaacatcgatcaccttggtgaagacaaactgagggacaaggccaaggagctctgggagaccctgcaccagctggagattgacaagttcgagtttggggagaagctgaaacgccagaaatatgacatcaccacgctcaggagccgcattgaccaggcccagaagcacagcaagaaggctgggaccccagccaagggcaaagtcggcgggcgctggaagtag

SEQ ID NO: 195537 - DNA, 720 bp, Homo sapiens
  Payload ID: 18598
  Gene Name: troponin T type 3 (skeletal, fast)
  ENST ID: ENST00000446240
  CDS Start-End: 1-720
atgtctgacgaggaagttgaacaggtggaggaggaagcccaggaggaagaggagaaaccgagacccaaactcactgctcctaagatcccagaaggggagaaagtggacttcgatgacatccagaagaagcgtcagaacaaagacctaatggagctccaggccctcatcgacagccactttgaagcccggaagaaggaggaggaggagctggtcgctctcaaagagagaatcgagaagcgccgtgcagagagagcggagcagcagaggattcgtgcagagaaggagagggagcgccagaacagactggcggaggaaaaggccagaagggaggaggaggatgccaagaggagggcagaggacgacctgaagaagaagaaagctctgtcttccatgggagccaactacagcagctacctggccaaggctgaccagaagagaggcaagaagcagacagcccgggaaatgaagaagaagattctggctgagagacgcaagccgctcaacatcgatcaccttggtgaagacaaactgagggacaaggccaaggagctctgggagaccctgcaccagctggagattgacaagttcgagtttggggagaagctgaaacgccagaaatatgacatcatgaatgtccgggccagagtgcagatgctggccaagttcagcaagaaggctgggaccccagccaagggcaaagtcggcgggcgctggaagtag

SEQ ID NO: 195538 - DNA, 699 bp, Homo sapiens
  Payload ID: 18598
  Gene Name: troponin T type 3 (skeletal, fast)
  ENST ID: ENST00000453458
  CDS Start-End: 76-699
gcctgcagccggtgctgtccacagggagctccagcccttctcacactcgacccgcagaaaccacccaccttcaccatgtctgacgaggaagttgaacaggtggaggagcagtacgaagaagaagaggagaaaccgagacccaaactcactgctcctaagatcccagaaggggagaaagtggacttcgatgacatccagaagaagcgtcagaacaaagacctaatggagctccaggccctcatcgacagccactttgaagcccggaagaaggaggaggaggagctggtcgctctcaaagagagaatcgagaagcgccgtgcagagagagcggagcagcagaggattcgtgcagagaaggagagggagcgccagaacagactggcggaggaaaaggccagaagggaggaggaggatgccaagaggagggcagaggacgacctgaagaagaagaaagctctgtcttccatgggagccaactacagcagctacctggccaaggctgaccagaagagaggcaagaagcagacagcccgggaaatgaagaagaagattctggctgagagacgcaagccgctcaacatcgatcaccttggtgaagacaaactgagggacaaggccaaggagctctgggagaccctgcaccagctggagattgacaagttcgagtttggggagaagctgaaacgccagaaatatgac

SEQ ID NO: 195539 - DNA, 1791 bp, Homo sapiens
  Payload ID: 18599
  Gene Name: TROVE domain family, member 2
  Uniprot ID: P10155
  ENST ID: ENST00000367441
  CDS Start-End: 40-1656
attttgcctttttgttaggtttcctaaagacaaaaaaaaatggaggaatctgtaaaccaaatgcagccactgaatgagaagcagatagccaattctcaggatggatatgtatggcaagtcactgacatgaatcgactacaccggttcttatgtttcggttctgaaggtgggacttattatatcaaagaacagaagttgggccttgaaaatgctgaagctttaattagattgattgaagatggcagaggatgtgaagtgatacaagaaataaagtcatttagtcaagaaggcagaaccacaaagcaagagcctatgctctttgcacttgccatttgttcccagtgctccgacataagcacaaaacaagcagcatttaaagctgtttctgaagtttgtcgcattcctacccatctctttacttttatccagtttaagaaagatctgaaggaaagcatgaaatgtggcatgtggggtcgtgccctccggaaggctatagcggactggtacaatgagaaaggtggcatggcccttgctctggcagttacaaaatataaacagagaaatggctggtctcacaaagatctattaagattgtcacatcttaaaccttccagtgaaggacttgcaattgtgaccaaatatattacaaagggctggaaagaagttcatgaattgtataaagaaaaagcactctctgtggagactgaaaaattattaaagtatctggaggctgtagagaaagtgaagcgcacaagagatgagctagaagtcattcatctaatagaagaacatagattagttagagaacatcttttaacaaatcacttaaagtctaaagaggtatggaaggctttgttacaagaaatgccgcttactgcattactaaggaatctaggaaagatgactgctaattcagtacttgaaccaggaaattcagaagtatctttagtatgtgaaaaactgtgtaatgaaaaactattaaaaaaggctcgtatacatccatttcatattttgatcgcattagaaacttacaagacaggtcatggtctcagagggaaactgaagtggcgccctgatgaagaaattttgaaagcattggatgctgctttttataaaacatttaagacagttgaaccaactggaaaacgtttcttactagctgttgatgtcagtgcttctatgaaccaaagagttttgggtagtatactcaacgctagtacagttgctgcagcaatgtgcatggttgtcacacgaacagaaaaagattcttatgtagttgctttttccgatgaaatggtaccatgtccagtgactacagatatgaccttacaacaggttttaatggctatgagtcagatcccagcaggtggaactgattgctctcttccaatgatctgggctcagaagacaaacacacctgctgatgtcttcattgtattcactgataatgagacctttgctggaggtgtccatcctgctattgctctgagggagtatcgaaagaaaatggatattccagctaaattgattgtttgtggaatgacatcaaatggtttcaccattgcagacccagatgatagaggcatgttggatatgtgcggctttgatactggagctctggatgtaattcgaaatttcacattagatatgatttaaccataagcagcagcacgatccagagatccattgccatcagtgatctcactaaaaatatacagctacttcccagctaatctccacccaatgaatgatgatggtatagtatgtgcataatggaaagttaccttactg

SEQ ID NO: 195540 - DNA, 1909 bp, Homo sapiens
  Payload ID: 18599
  Gene Name: TROVE domain family, member 2
  Uniprot ID: P10155
  ENST ID: ENST00000367443
  CDS Start-End: 188-1744
cacaggccgacgtcgagagggcctgctttactcctcctctttctcctccttctcccgcggcttctgcgcggagaggcgtcgcccgggatctgggttttggaagaaggatctttgtgggaagacagggtgaatttatcacagaggaataacgagggagaggagaaaggtttcctaaagacaaaaaaaaatggaggaatctgtaaaccaaatgcagccactgaatgagaagcagatagccaattctcaggatggatatgtatggcaagtcactgacatgaatcgactacaccggttcttatgtttcggttctgaaggtgggacttattatatcaaagaacagaagttgggccttgaaaatgctgaagctttaattagattgattgaagatggcagaggatgtgaagtgatacaagaaataaagtcatttagtcaagaaggcagaaccacaaagcaagagcctatgctctttgcacttgccatttgttcccagtgctccgacataagcacaaaacaagcagcatttaaagctgtttctgaagtttgtcgcattcctacccatctctttacttttatccagtttaagaaagatctgaaggaaagcatgaaatgtggcatgtggggtcgtgccctccggaaggctatagcggactggtacaatgagaaaggtggcatggcccttgctctggcagttacaaaatataaacagagaaatggctggtctcacaaagatctattaagattgtcacatcttaaaccttccagtgaaggacttgcaattgtgaccaaatatattacaaagggctggaaagaagttcatgaattgtataaagaaaaagcactctctgtggagactgaaaaattattaaagtatctggaggctgtagagaaagtgaagcgcacaagagatgagctagaagtcattcatctaatagaagaacatagattagttagagaacatcttttaacaaatcacttaaagtctaaagaggtatggaaggctttgttacaagaaatgccgcttactgcattactaaggaatctaggaaagatgactgctaattcagtacttgaaccaggaaattcagaagtatctttagtatgtgaaaaactgtgtaatgaaaaactattaaaaaaggctcgtatacatccatttcatattttgatcgcattagaaacttacaagacaggtcatggtctcagagggaaactgaagtggcgccctgatgaagaaattttgaaagcattggatgctgctttttataaaacatttaagacagttgaaccaactggaaaacgtttcttactagctgttgatgtcagtgcttctatgaaccaaagagttttgggtagtatactcaacgctagtacagttgctgcagcaatgtgcatggttgtcacacgaacagaaaaagattcttatgtagttgctttttccgatgaaatggtaccatgtccagtgactacagatatgaccttacaacaggttttaatggctatgagtcagatcccagcaggtggaactgattgctctcttccaatgatctgggctcagaagacaaacacacctgctgatgtcttcattgtattcactgataatgagacctttgctggaggtgtccatcctgctattgctctgagggagtatcgaaagaaaatggatattccagctaaattgattgtttgtggaatgacatcaaatggtttcaccattgcagacccagatgatagagacactgtaaaatagttttgctttgttgaataatacgtgtgtacctaaaagagccttgcaaaataccctactaaataaatcattttagacatggagtgcaggtggacactgtgtgaactgtttttggtcagttattgtagaaattgatagatgtaccaaataaactctatgcacattaaa

SEQ ID NO: 195541 - DNA, 1857 bp, Homo sapiens
  Payload ID: 18599
  Gene Name: TROVE domain family, member 2
  Uniprot ID: P10155
  ENST ID: ENST00000367444
  CDS Start-End: 188-1765
cacaggccgacgtcgagagggcctgctttactcctcctctttctcctccttctcccgcggcttctgcgcggagaggcgtcgcccgggatctgggttttggaagaaggatctttgtgggaagacagggtgaatttatcacagaggaataacgagggagaggagaaaggtttcctaaagacaaaaaaaaatggaggaatctgtaaaccaaatgcagccactgaatgagaagcagatagccaattctcaggatggatatgtatggcaagtcactgacatgaatcgactacaccggttcttatgtttcggttctgaaggtgggacttattatatcaaagaacagaagttgggccttgaaaatgctgaagctttaattagattgattgaagatggcagaggatgtgaagtgatacaagaaataaagtcatttagtcaagaaggcagaaccacaaagcaagagcctatgctctttgcacttgccatttgttcccagtgctccgacataagcacaaaacaagcagcatttaaagctgtttctgaagtttgtcgcattcctacccatctctttacttttatccagtttaagaaagatctgaaggaaagcatgaaatgtggcatgtggggtcgtgccctccggaaggctatagcggactggtacaatgagaaaggtggcatggcccttgctctggcagttacaaaatataaacagagaaatggctggtctcacaaagatctattaagattgtcacatcttaaaccttccagtgaaggacttgcaattgtgaccaaatatattacaaagggctggaaagaagttcatgaattgtataaagaaaaagcactctctgtggagactgaaaaattattaaagtatctggaggctgtagagaaagtgaagcgcacaagagatgagctagaagtcattcatctaatagaagaacatagattagttagagaacatcttttaacaaatcacttaaagtctaaagaggtatggaaggctttgttacaagaaatgccgcttactgcattactaaggaatctaggaaagatgactgctaattcagtacttgaaccaggaaattcagaagtatctttagtatgtgaaaaactgtgtaatgaaaaactattaaaaaaggctcgtatacatccatttcatattttgatcgcattagaaacttacaagacaggtcatggtctcagagggaaactgaagtggcgccctgatgaagaaattttgaaagcattggatgctgctttttataaaacatttaagacagttgaaccaactggaaaacgtttcttactagctgttgatgtcagtgcttctatgaaccaaagagttttgggtagtatactcaacgctagtacagttgctgcagcaatgtgcatggttgtcacacgaacagaaaaagattcttatgtagttgctttttccgatgaaatggtaccatgtccagtgactacagatatgaccttacaacaggttttaatggctatgagtcagatcccagcaggtggaactgattgctctcttccaatgatctgggctcagaagacaaacacacctgctgatgtcttcattgtattcactgataatgagacctttgctggaggtgtccatcctgctattgctctgagggagtatcgaaagaaaatggatattccagctaaattgattgtttgtggaatgacatcaaatggtttcaccattgcagacccagatgatagagccttgcaaaataccctactaaataaatcattttagacatggagtgcaggtggacactgtgtgaactgtttttggtcagttattgtagaaattgatagatgtaccaaataaactctatgcacattaaa

SEQ ID NO: 195542 - DNA, 1898 bp, Homo sapiens
  Payload ID: 18599
  Gene Name: TROVE domain family, member 2
  Uniprot ID: P10155
  ENST ID: ENST00000367445
  CDS Start-End: 188-1792
cacaggccgacgtcgagagggcctgctttactcctcctctttctcctccttctcccgcggcttctgcgcggagaggcgtcgcccgggatctgggttttggaagaaggatctttgtgggaagacagggtgaatttatcacagaggaataacgagggagaggagaaaggtttcctaaagacaaaaaaaaatggaggaatctgtaaaccaaatgcagccactgaatgagaagcagatagccaattctcaggatggatatgtatggcaagtcactgacatgaatcgactacaccggttcttatgtttcggttctgaaggtgggacttattatatcaaagaacagaagttgggccttgaaaatgctgaagctttaattagattgattgaagatggcagaggatgtgaagtgatacaagaaataaagtcatttagtcaagaaggcagaaccacaaagcaagagcctatgctctttgcacttgccatttgttcccagtgctccgacataagcacaaaacaagcagcatttaaagctgtttctgaagtttgtcgcattcctacccatctctttacttttatccagtttaagaaagatctgaaggaaagcatgaaatgtggcatgtggggtcgtgccctccggaaggctatagcggactggtacaatgagaaaggtggcatggcccttgctctggcagttacaaaatataaacagagaaatggctggtctcacaaagatctattaagattgtcacatcttaaaccttccagtgaaggacttgcaattgtgaccaaatatattacaaagggctggaaagaagttcatgaattgtataaagaaaaagcactctctgtggagactgaaaaattattaaagtatctggaggctgtagagaaagtgaagcgcacaagagatgagctagaagtcattcatctaatagaagaacatagattagttagagaacatcttttaacaaatcacttaaagtctaaagaggtatggaaggctttgttacaagaaatgccgcttactgcattactaaggaatctaggaaagatgactgctaattcagtacttgaaccaggaaattcagaagtatctttagtatgtgaaaaactgtgtaatgaaaaactattaaaaaaggctcgtatacatccatttcatattttgatcgcattagaaacttacaagacaggtcatggtctcagagggaaactgaagtggcgccctgatgaagaaattttgaaagcattggatgctgctttttataaaacatttaagacagttgaaccaactggaaaacgtttcttactagctgttgatgtcagtgcttctatgaaccaaagagttttgggtagtatactcaacgctagtacagttgctgcagcaatgtgcatggttgtcacacgaacagaaaaagattcttatgtagttgctttttccgatgaaatggtaccatgtccagtgactacagatatgaccttacaacaggttttaatggctatgagtcagatcccagcaggtggaactgattgctctcttccaatgatctgggctcagaagacaaacacacctgctgatgtcttcattgtattcactgataatgagacctttgctggaggtgtccatcctgctattgctctgagggagtatcgaaagaaaatggatattccagctaaattgattgtttgtggaatgacatcaaatggtttcaccattgcagacccagatgatagaggcatgttggatatgtgcggctttgatactggagctctggatccttgcaaaataccctactaaataaatcattttagacatggagtgcaggtggacactgtgtgaactgtttttggtcagttattgtagaaattgatagatgtaccaaataaactctatgcacattaaa

SEQ ID NO: 195543 - DNA, 3081 bp, Homo sapiens
  Payload ID: 18599
  Gene Name: TROVE domain family, member 2
  Uniprot ID: P10155
  ENST ID: ENST00000367446
  CDS Start-End: 211-1827
tcctgcttgtcggcatcgctccccacaggccgacgtcgagagggcctgctttactcctcctctttctcctccttctcccgcggcttctgcgcggagaggcgtcgcccgggatctgggttttggaagaaggatctttgtgggaagacagggtgaatttatcacagaggaataacgagggagaggagaaaggtttcctaaagacaaaaaaaaatggaggaatctgtaaaccaaatgcagccactgaatgagaagcagatagccaattctcaggatggatatgtatggcaagtcactgacatgaatcgactacaccggttcttatgtttcggttctgaaggtgggacttattatatcaaagaacagaagttgggccttgaaaatgctgaagctttaattagattgattgaagatggcagaggatgtgaagtgatacaagaaataaagtcatttagtcaagaaggcagaaccacaaagcaagagcctatgctctttgcacttgccatttgttcccagtgctccgacataagcacaaaacaagcagcatttaaagctgtttctgaagtttgtcgcattcctacccatctctttacttttatccagtttaagaaagatctgaaggaaagcatgaaatgtggcatgtggggtcgtgccctccggaaggctatagcggactggtacaatgagaaaggtggcatggcccttgctctggcagttacaaaatataaacagagaaatggctggtctcacaaagatctattaagattgtcacatcttaaaccttccagtgaaggacttgcaattgtgaccaaatatattacaaagggctggaaagaagttcatgaattgtataaagaaaaagcactctctgtggagactgaaaaattattaaagtatctggaggctgtagagaaagtgaagcgcacaagagatgagctagaagtcattcatctaatagaagaacatagattagttagagaacatcttttaacaaatcacttaaagtctaaagaggtatggaaggctttgttacaagaaatgccgcttactgcattactaaggaatctaggaaagatgactgctaattcagtacttgaaccaggaaattcagaagtatctttagtatgtgaaaaactgtgtaatgaaaaactattaaaaaaggctcgtatacatccatttcatattttgatcgcattagaaacttacaagacaggtcatggtctcagagggaaactgaagtggcgccctgatgaagaaattttgaaagcattggatgctgctttttataaaacatttaagacagttgaaccaactggaaaacgtttcttactagctgttgatgtcagtgcttctatgaaccaaagagttttgggtagtatactcaacgctagtacagttgctgcagcaatgtgcatggttgtcacacgaacagaaaaagattcttatgtagttgctttttccgatgaaatggtaccatgtccagtgactacagatatgaccttacaacaggttttaatggctatgagtcagatcccagcaggtggaactgattgctctcttccaatgatctgggctcagaagacaaacacacctgctgatgtcttcattgtattcactgataatgagacctttgctggaggtgtccatcctgctattgctctgagggagtatcgaaagaaaatggatattccagctaaattgattgtttgtggaatgacatcaaatggtttcaccattgcagacccagatgatagaggcatgttggatatgtgcggctttgatactggagctctggatgtaattcgaaatttcacattagatatgatttaaccataagcagcagcacgatccagagatccattgccatcagtgatctcactaaaaatatacagctacttcccagctaatctccacccaatgaatgatgatggtatagtatgtgcataatggaaagttaccttactgaaaaaaaaaaaagaaggaaaaataagatgggcccaaaggtctatctactaaactagctcttggggaaatagcttcaggatactgtagtttcctctatctaatagagaactttttgttaacagacactgtaaaatagttttgctttgttgaataatacgtgtgtacctaaaagaggtaagagcaaaaagtgtaattccacatcatgttacttgagaagtgcttaacgttttcttaaatgttttcattgggaaaggacagctttgataatgtccaaatactctgaaatgcactagaccatataactgtgatgaaatatgaaactcatctgtaaacttttataccaagggggtaaaaaaaaaaactaaggcatttgattaaattatgaatgagttttacaaattcctttcagagttttactaagatcacacaaataacagctttcttattcagtgaaaaagatattttatttctgatgttttatttgcacttgtggaatatgttaccattaatcagaaacatcatggcaacccctaagaatagactaagtttgtgttggctgagggattctatttggtttgcttttttttttttgctttgttatattttattgctacaaggggtgtgacttgataatgatttcctctgaattataataacatagccagatgtagtctcacactgtttttcatactcttaagtgtaaataatataaaatgtttcaagcgcttaactccccctcattcacaaagtataacaattaaaatctcaactataaccagtttagctttttccttacttttaaaataaaattttttacttttaactatttttttagttaatatttttaaaagtatacatgtcaatggcctctttgtccattattcattttgtggcaaaatattcttctttgatagtgtaaacaaataataaagcaatctaggtcctttaggtttgaaaggcaatttttgagtagcatattaccagctagccagtcactaggaatttttttcagtattatttgtatgtattaaacttttcattacactaaagtgcattattttattgagcaagtatccttcattgtgaggtttaacattaaagcaatctgttgaaatgcca

SEQ ID NO: 195544 - DNA, 2143 bp, Homo sapiens
  Payload ID: 18599
  Gene Name: TROVE domain family, member 2
  Uniprot ID: P10155
  ENST ID: ENST00000400968
  CDS Start-End: 377-1993
gactgagcgcgggaggacgctctagccaccctagagacatcgaaactcttcccaggccttgcagcacccgtagcggattcggaagggctggggcctgagaagaaagggcggtgattcacagcgccgaggaggcaacatccgggatcctcgcccctctggggcggaggcggggcaaaagaagaggggcaggactcgttcccgggaaccgaacctggaatccccggcggcagtggggctgttgctgttgctgtggctgtcgctgcccgtcaggctgccttcttttgtcgtttcccagcgctgcgcaggacttctcctggcggcgctgcggatccagggggtcggctgccaggtacaggtttcctaaagacaaaaaaaaatggaggaatctgtaaaccaaatgcagccactgaatgagaagcagatagccaattctcaggatggatatgtatggcaagtcactgacatgaatcgactacaccggttcttatgtttcggttctgaaggtgggacttattatatcaaagaacagaagttgggccttgaaaatgctgaagctttaattagattgattgaagatggcagaggatgtgaagtgatacaagaaataaagtcatttagtcaagaaggcagaaccacaaagcaagagcctatgctctttgcacttgccatttgttcccagtgctccgacataagcacaaaacaagcagcatttaaagctgtttctgaagtttgtcgcattcctacccatctctttacttttatccagtttaagaaagatctgaaggaaagcatgaaatgtggcatgtggggtcgtgccctccggaaggctatagcggactggtacaatgagaaaggtggcatggcccttgctctggcagttacaaaatataaacagagaaatggctggtctcacaaagatctattaagattgtcacatcttaaaccttccagtgaaggacttgcaattgtgaccaaatatattacaaagggctggaaagaagttcatgaattgtataaagaaaaagcactctctgtggagactgaaaaattattaaagtatctggaggctgtagagaaagtgaagcgcacaagagatgagctagaagtcattcatctaatagaagaacatagattagttagagaacatcttttaacaaatcacttaaagtctaaagaggtatggaaggctttgttacaagaaatgccgcttactgcattactaaggaatctaggaaagatgactgctaattcagtacttgaaccaggaaattcagaagtatctttagtatgtgaaaaactgtgtaatgaaaaactattaaaaaaggctcgtatacatccatttcatattttgatcgcattagaaacttacaagacaggtcatggtctcagagggaaactgaagtggcgccctgatgaagaaattttgaaagcattggatgctgctttttataaaacatttaagacagttgaaccaactggaaaacgtttcttactagctgttgatgtcagtgcttctatgaaccaaagagttttgggtagtatactcaacgctagtacagttgctgcagcaatgtgcatggttgtcacacgaacagaaaaagattcttatgtagttgctttttccgatgaaatggtaccatgtccagtgactacagatatgaccttacaacaggttttaatggctatgagtcagatcccagcaggtggaactgattgctctcttccaatgatctgggctcagaagacaaacacacctgctgatgtcttcattgtattcactgataatgagacctttgctggaggtgtccatcctgctattgctctgagggagtatcgaaagaaaatggatattccagctaaattgattgtttgtggaatgacatcaaatggtttcaccattgcagacccagatgatagaggcatgttggatatgtgcggctttgatactggagctctggatgtaattcgaaatttcacattagatatgatttaaccataagcagcagcacgatccagagatccattgccatcagtgatctcactaaaaatatacagctacttcccagctaatctccacccaatgaatgatgatggtatagtatgtgcataatggaaagttaccttactgaaaaaaaaaaaagaa

SEQ ID NO: 195545 - DNA, 377 bp, Homo sapiens
  Payload ID: 18599
  Gene Name: TROVE domain family, member 2
  ENST ID: ENST00000415442
  CDS Start-End: 180-377
cccgggaaccgaacctggaatccccggcggcagtggggctgttgctgttgctgtggctgtcgctgcccgtcaggctgccttcttttgtcgtttcccagcgctgcgcaggacttctcctggcggcgctgcggatccagggggtcggctgccaggtacaggtttcctaaagacaaaaaaaaatggaggaatctgtaaaccaaatgcagccactgaatgagaagcagatagccaattctcaggatggatatgtatggcaagtcactgacatgaatcgactacaccggttcttatgtttcggttctgaaggacttgcaattgtgaccaaatatattacaaagggctggaaagaagttcatgaattgtataaagaaaaagca

SEQ ID NO: 195546 - DNA, 581 bp, Homo sapiens
  Payload ID: 18599
  Gene Name: TROVE domain family, member 2
  ENST ID: ENST00000512587
  CDS Start-End: 1-581
gctttaattagattgattgaagatggcagaggatgtgaagtgatacaagaaataaagtcatttagtcaagaaggcagaaccacaaagcaagagcctatgctctttgcacttgccatttgttcccagtgctccgacataagcacaaaacaagcagcatttaaagctgtttctgaagtttgtcgcattcctacccatctctttacttttatccagtttaagaaagatctgaaggaaagcatgaaatgtggcatgtggggtcgtgccctccggaaggctatagcggactggtacaatgagaaaggtggcatggcccttgctctggcagttacaaaatataaacagagaaatggctggtctcacaaagatctattaagattgtcacatcttaaaccttccagtgaagtgaaacttgaaaagacagccactcagaagggtgggttcacatttcagttctgtggacttaagccaagacttgcaattgtgaccaaatatattacaaagggctggaaagaagttcatgaattgtataaagaaaaagcactctctgtggagactgaaaaattattaaagtatctggaggc

SEQ ID NO: 195547 - DNA, 613 bp, Homo sapiens
  Payload ID: 18599
  Gene Name: TROVE domain family, member 2
  ENST ID: ENST00000506303
  CDS Start-End: 489-613
gttgctgttgctgtggctgtcgctgcccgtcaggctgccttcttttgtcgtttcccagcgctgcgcaggacttctcctggcggcgctgcggatccagggggtcggctgccaggtacaggggttgaggctgggcaaacgccgcgaaactatcgctcttccccgtcccgcttccgcgcctgtccaccctgggtaacggaaccagcatcgcggtagggacatcctcgctaggcccggccggaccattcctcagggtgggccctttccgaagccgggaccgctcctgcttgtcggcatcgctccccacaggccgacgtcgagagggcctgctttactcctcctctttctcctccttctcccgcggcttctgcgcggagaggcgtcgcccgggatctgggttttggaagaaggatctttgtgggaagacagggtgaatttatcacagaggaataacgagggagaggagaaaggtttcctaaagacaaaaaaaaatggaggaatctgtaaaccaaatgcagccactgaatgagaagcagatagccaattctcaggatggatatgtatggcaagtcactgacatgaatcgactacaccggttcttatgtttcggttctga

SEQ ID NO: 195548 - DNA, 7848 bp, Homo sapiens
  Payload ID: 18599
  Gene Name: TROVE domain family, member 2
  ENST ID: ENST00000432079
  CDS Start-End: 569-1360
agagacatcgaaactcttcccaggccttgcagcacccgtagcggattcggaagggctggggcctgagaagaaagggcggtgattcacagcgccgaggaggcaacatccgggatcctcgcccctctggggcggaggcggggcaaaagaagaggggcaggactcgttcccgggaaccgaacctggaatccccggcggcagtggggctgttgctgttgctgtggctgtcgctgcccgtcaggctgccttcttttgtcgtttcccagcgctgcgcaggacttctcctggcggcgctgcggatccagggggtcggctgccaggtacaggacttgcaattgtgaccaaatatattacaaagggctggaaagaagttcatgaattgtataaagaaaaagcactctctgtggagactgaaaaattattaaagtatctggaggctgtagagaaagtgaagcgcacaagagatgagctagaagtcattcatctaatagaagaacatagattagttagagaacatcttttaacaaatcacttaaagtctaaagaggtatggaaggctttgttacaagaaatgccgcttactgcattactaaggaatctaggaaagatgactgctaattcagtacttgaaccaggaaattcagaagtatctttagtatgtgaaaaactgtgtaatgaaaaactattaaaaaaggctcgtatacatccatttcatattttgatcgcattagaaacttacaagacaggtcatggtctcagagggaaactgaagtggcgccctgatgaagaaattttgaaagcattggatgctgctttttataaaacatttaagacagttgaaccaactggaaaacgtttcttactagctgttgatgtcagtgcttctatgaaccaaagagttttgggtagtatactcaacgctagtacagttgctgcagcaatgtgcatggttgtcacacgaacagaaaaagattcttatgtagttgctttttccgatgaaatggtaccatgtccagtgactacagatatgaccttacaacaggttttaatggctatgagtcagatcccagcaggtggaactgattgctctcttccaatgatctgggctcagaagacaaacacacctgctgatgtcttcattgtattcactgataatgagacctttgctggaggtgtccatcctgctattgctctgagggagtatcgaaagaaaatggatattccagctaaattgattgtttgtggaatgacatcaaatggtttcaccattgcagacccagatgatagaggcatgttggatatgtgcggctttgatactggagctctggatgtaattcgaaatttcacattagatatgatttaaccataagcagcagcacgatccagagatccattgccatcagtgatctcactaaaaatatacagctacttcccagctaatctccacccaatgaatgatgatggtatagtatgtgcataatggaaagttaccttactgaaaaaaaaaaaagaaggaaaaataagatgggcccaaaggtctatctactaaactagctcttggggaaatagcttcaggatactgtagtttcctctatctaatagagaactttttgttaacagacactgtaaaatagttttgctttgttgaataatacgtgtgtacctaaaagaggtaagagcaaaaagtgtaattccacatcatgttacttgagaagtgcttaacgttttcttaaatgttttcattgggaaaggacagctttgataatgtccaaatactctgaaatgcactagaccatataactgtgatgaaatatgaaactcatctgtaaacttttataccaagggggtaaaaaaaaaaactaaggcatttgattaaattatgaatgagttttacaaattcctttcagagttttactaagatcacacaaataacagctttcttattcagtgaaaaagatattttatttctgatgttttatttgcacttgtggaatatgttaccattaatcagaaacatcatggcaacccctaagaatagactaagtttgtgttggctgagggattctatttggtttgcttttttttttttgctttgttatattttattgctacaaggggtgtgacttgataatgatttcctctgaattataataacatagccagatgtagtctcacactgtttttcatactcttaagtgtaaataatataaaatgtttcaagcgcttaactccccctcattcacaaagtataacaattaaaatctcaactataaccagtttagctttttccttacttttaaaataaaattttttacttttaactatttttttagttaatatttttaaaagtatacatgtcaatggcctctttgtccattattcattttgtggcaaaatattcttctttgatagtgtaaacaaataataaagcaatctaggtcctttaggtttgaaaggcaatttttgagtagcatattaccagctagccagtcactaggaatttttttcagtattatttgtatgtattaaacttttcattacactaaagtgcattattttattgagcaagtatccttcattgtgaggtttaacattaaagcaatctgttgaaatgccattatctttgctcataattttattatggccgtctaaggtagcttacacataaaacctgtttgcgtatctgttgttctctaaatattaattgaagatttactgaggatttgtaaggtccttctcgctgttatgtgaaaagtcaaactgtagttaatgtaaattatagccttttaggtgcttgggggttagagggtttatgttttttgggaaagggggactttagtagtctgaggatttctgtacatattttcttctgttttatgtgaaatttgggctctgggaataagaaaatattcctttcaaatttatttgacatattaatgctggttttgatatgtacccattccttcaaggcaactggtatcagtttttaagtgtgatttacctgagatatttttgttcagcaaagctcatagcaccctcacccccactccagacatgcattgcttctgatgttgttcacgtttttaaccctgtcaagcattgaactgaatatattagctacttttgacacattaaaatattacgttcagattgaatttaaagtttaaagaaactaatagaattacgtaatagttattgaattgtttaagtaaacccaagatcttaaaaattataacatgatcattttattcctaatagaaatgttaaatagaatatagtacaaaagtgcattaccttcagttgtgtactatttccataatacttttagacaaatatatctataagttaatattaaatccatcaaggatacaagattggatggatatgacctttctgaagtatttaggtaggtctaattaaatggactagggtaacatttaagaaagaaaggataagtaggagaagctaccacagaaggtaacttttcaaatcatggcatatttgagctggaagaaaccttagaaacctaaaagctaattttttaaatttttgttagagagctgaggtccaagacagagtgtgattttgaagtactataacctagaaatcttggtctcttcattcctgtgccagaatttatttccccacaacatgggaatacatggtctcagaagagtagaggataaaataaaattatttaagacttttaccttattgagttattaggaaataatgtatatacgattgctttaggagtagaaaaatagaatgggaacatgtataatcttgtaattcataggaatcctcaagcacaattaacctgtgttgctatatatatctacatatatagagaaaaaacaaaaactttacctcattatgaataaaatgtactgaagtgataagttttttatttcctgagttacttttaggattactgttaaattaatatttgggaaaatactgcttttaaaaacaatcctgcaagaataaacaaactttatttcctaggtagtatgtaaatagttccaggatatagttgtaattagtaaaacaaaaactaatcttataatcccaccctttattagttgaaagttcttggaaattccatttattaatacttatattatttagtaatctatcttatgagagtgttagtgaggcaagatgctagtgaatggaatttagtgttaccctttgacacctcctttgctttatctaacttactgtgtgactgtagacaaccagtttaacctaagtgatttgattatttttatccttaaaaagtaacatatctgtgcttggatcatagaagaatcagtgatttaatatttgtataaaaattgaaactgggaagagggcttgcaatacaagttagaattctttttttttttggttaaaaacattcttgttaataagatacgtatttcaaaagataaaatgttttagaaaaatagctcactcaataggcctaacagtgttttaaaacattcctgttcagagtagaaaaatttagaagaaaaattttcacagctaaagtattacccaaaaagtcactattctctactgaagagggagaaaaaatatactccaagatcttcttggacagacctagaaaaacaagcttatactctgaggaaatgctgttaacaaacttttttttttgagacaggctatccctctgtcacccaggctggagtggcatgatcacagctcactgcagccttgacctcccaagttcaagtgatcttcccaagtagccaggaacactggtgtgcactgcactaccacgcctgctttttttttttttttttttttttttttttttaagagacaacgtctcactgtgttgcccaggctggtgtcaaactcctgggctcaagggatcttcctgccttggcctcccgaagtgctggaattagaggcatgagccactgcacccagccagcaaacattctcttaatcttttaaagtaaccagtaaatctacaaatagtaaagtactattttcatcagggattttttttttcttattttctagattttacagaaacaatgtgaaattattttggaaagataaggtaggattcttgaataaatctgaaggtctcacaattaagtgagaaacacctttaaaagcatagtaaagctacacctaaataactaaagcctaaatcattgtaatgttttgttggacttactttaacttgacctgttgtagccacaaataacaaatttcttggtaactgatgctattacagtaggtaatcaaaaatgaaaaattctagtcttatatactgcaggtttggggtgattgttaaggcactatcccctctggagaaatgtcatatggcatcagtgtaaacatgcacaagaaagaatttgtaaaaaaaaatgacaggttaatcaatgaaattagttgtatttactgtttggattttatttagtgtttccttgatgtctgtttcctcatctcttatttgttggaagattacttttctacctcttttttttcttttaaaattcctttcttacatttctgttgtttctttttctagtccttctctatctggataataaaatgaatgacaggaaagtcacccacatagaggtttgggatgaaccttttgcagattgctttttgtttcatacaagtataagatcatattttctttttcaacttagtaataggcaggcttcttggaacaataagtagattgatacactcctccccaaatcaaattatattgtatatcttttatattagatgtttgcagaaattctgtggcctttaagatcagttattcagcctttgtaattatgttatctagctatgttgaaaagataagtgcttactatataagcactcttagaaaaataattaactgattactctttcagaaaatagcaggtgtctcaatgctttttttccataattataaagaccattgtcaaaatctttggtttactaaatatttcactgagcatatatagagatacgttgcttgtggcataaaaagtcttgtagataacttactcacatttggcttttttttaattggtgcattttttaatttgcttttttgaaaattatgaagttaaaatttaattctaaggtagtatttttcatgtataaaactaataatgtagttaagcatactgtttgaataaaattataataaatggcacaattccttaaaccctgaaaataccaagttatattggaaaatagtggaaagaaaaaactagtggagaacatcttagaaaattctattgtggaaattacgatgattattttcagtgagaatgaatttatatatacaacaaaaatatacaaaagctaaccttctcatcctaaaaagatttttccctttgcttctgttttatttagccctgccatgcaccacattaattttatgaacataaatgatatttaacttttctttttttttttttttttgagacagagtctcactccgtcaccaggctggagtgcggtggcgcgatctcagctcactgcaacctccatttcccaggttcaagcaattctcctgcctcagcctcccaagtagctgggattacaggcacgcgccaccacgcccacctaatttttgtatttttagtagagacggggtttcaccatgttggtcaggctggcctcgatctcgtgacctcgtgatctgtccgcctcggccttccaaagtgctaggattacaggcgtgagccaccgcacctggccaacttttcatcttaagttgtttaaatttatgcacttttagatatcagaatatatgcttgaacaaaggaaatagtaaattagctatatgtctgctggtttcacttcgatgtggatatggatatgtggataaagacagtaaatgaaattaaaaccctgctgttttaaatatcattaccagatataattgagggaatattatatcaacaaacatattgaaacttggctttatttgtaacgtaaactatatataatccatacgtagccaaattagatttaaaatatacaattaatgaatagtactcaaagtgtttttgttgcactgttactctgaatatggactctctatatctggtatggcgtgactgggcataacttctgtaatgtatttcagttatatgtttttccttttattgccagcttctgataatgaaattttccaaagggatgagatataagaatcatcttttataaaaaccagtggggagtggggtattataatctagttctaaactgtccatttgctttatataaaggctttgatttcaataactgaccatttgatgaatatttaaattacacagaataatgtctacatagaataaacttaagtattcaagagccttaaagtgaaaaaatgaaccttttgactgccttaaaatactacttgctctgtaattcaggcatactagttactttccttggggtctgtttaaataatgccttaatagtgttctaatgtttctgaaatacagaactcaaagggtcttttagagcttttaattttacatagtgaatggaaatttaagtattacattttaaaacctgattgtacattggtaatttaaacatccaataacaggaaaatctagatacagtgatgtgttatacatacatgactgttaacatcagtaatattttatgatagtttaaggttttttattgttttctataacaagttatccaacaggttggactttgtaacatgatatccaaggaccaagttgcatatttaacatcgaatgaaaatgtagttgtacagttccaaaaataattaattttttaagggaatttttcaagacaaaaggcaaatattttgtttcaaacctacaagcaaat

SEQ ID NO: 195549 - DNA, 3343 bp, Homo sapiens
  Payload ID: 18600
  Gene Name: TRPM8 channel-associated factor 1
  Uniprot ID: Q9Y4C2
  ENST ID: ENST00000355951
  CDS Start-End: 115-2874
ctgggcggagaagctgcttcctcctgggaacaaccgcctcccgctcctagcaggttgctactgccccgaacccgcgctgcagggaacagcggggcaaacaaaaccaatagagccatggcgactccctctgctgccttcgaggcccttatgaatggtgtgacaagctgggatgtacccgaagatgctgttccatgtgaactgcttcttattggagaggcttcatttcctgtgatggtgaatgacatgggccaggtcctcattgctgcctcctcctatggccgtggccgcctggtggtcgtgtcccatgaggactacttggtggaagcccagctcacgccctttctcctgaacgcagtggggtggctttgctcttcccctggggctcccattggtgtacacccatccctggcacctttggccaaaatcctcgagggctctggagtggatgcaaaggttgagccagaagtgaaagactccctgggggtttactgtattgatgcctacaatgaaaccatgacagaaaagctggtcaagttcatgaaatgtggtggcggcttgctcataggaggacaagcctgggattgggccaaccagggggaggatgaaagggttctgttcacgttccctgggaacctcgtgaccagtgtggctggcatttactttactgacaacaaaggggacacgagtttctttaaagtctccaagaagatgcccaagatcccagtgttggttagttgtgaagatgacctctccgacgacagagaagagcttctgcatgggatttcagagctggacatcagcaactcggattgtttcccatcccagctgctagtgcatggggctttagcctttcctctagggttagattcctaccatggctgtgttatagcggctgcccgctatggccggggccgggtggttgtgactggccataaggtattattcactgttggtaaactgggcccctttctgctcaatgctgtccgctggctggatgggggccgcagaggcaaggttgtggtgcagacagagctgagaaccctgagtggcctcctcgcagtggggggcatagacaccagcatcgagcccaatctgaccagtgatgcaagtgtctactgctttgaacccgtgagtgaagtgggggtcaaggaactgcaggagtttgtagcagagggtggcgggctatttgttggagcccaagcctggtggtgggccttcaagaaccccggagtgtcccctttggctcgattcccaggaaacctcctcctcaacccctttggcatcagcattacaagccaaagcctcaatccagggccctttcgtactcctaaagcagggataaggacctatcacttccgctccaccttggccgagttccaggttataatgggcaggaagagaggaaatgtggaaaagggctggttggcaaagctgggaccagatggtgcagctttcctgcagattcccgcagaagagatccctgcctacatgtctgtgcatcgactcctgaggaagctgctaagtcgatatcggcttccagtagcaacccgagagaaccctgttatcaatgactgctgcagaggtgctatgctttccctggccacagggctggcccactctggaagcgacctctctctgttagtcccagaaattgaagatatgtacagcagcccctatctgcgcccctcagaatctcctatcaccgtcgaggtcaactgcaccaatccaggcaccagatattgctggatgagtactgggctctacatacctggaaggcaaattatagaagtctcactgcctgaagctgctgcctctgccgacctgaagatacagattggctgccacacagatgacctgaccagggccagcaagcttttccgaggcccactcgtaattaaccggtgctgcttggacaaacccacaaaatcgatcacgtgcctctggggtggactcctctatataattgtgcctcagaacagcaaactgggttctgtgcctgtcaccgtgaagggggctgtgcatgctccatactacaagctgggggagaccaccctggaggagtggaagaggcgtatccaggagaatccagggccctggggagagctggccacggacaacatcattctgaccgtgccgaccgcaaatcttcgtactctggagaaccctgagccgctgctccgcctctgggatgaggtgatgcaggctgtggcgcgactgggagctgagcccttccctttgcgcctgcctcagaggattgttgccgacgtgcagatctcagtgggctggatgcatgcagggtaccccatcatgtgccatctggagtcagtgcaggagctcatcaacgagaagctcatcagaaccaaggggctgtggggccccgtccatgagctgggccgcaaccagcagcggcaggagtgggagttcccaccacacaccaccgaggccacctgcaacctgtggtgtgtgtatgtgcatgagacggtcttgggcattcctcgaagccgtgccaatattgctctgtggcccccagttcgggagaagagagtcagaatctacctgagcaagggtcccaatgtgaaaaactggaatgcatggaccgcactggaaacgtatttacagctccaggaagcctttggttgggagccattcatccgtctcttcaccgagtacaggaaccagaccaacttgcccacagaaaatgttgacaaaatgaatctgtgggtcaagatgttctcccaccaagtgcagaagaacctggctccgttctttgaggcctgggcctggcccatccagaaggaagtggctaccagcctggcctatctgcctgaatggaaggaaaatattatgaaattgtacctcctcacacagatgtaaggagtgcccatcgaggtggcaggccccactgaaattgaagtcaagaaatgcaaaaaggaactgacacatctcagcaaagaaaactgaagggatttggttataagtggagaggatctcagcatatttctggaagatagaaagtggatgaagcatgataatgaaagagtgaagaacctttcagataaaatgtaagctgatctgaacaacataaccccaaagagacttgcgcacctgaaaagcttgtctactgaagaattactccagttgtaagattgagccctctcctactctcccccaactcttatgcacagaacacaggcagtctccactattgataccagttaaaaatttcttgttattgttgctgttgttgtttgtataaaggaattgaacaggctgcttgcagagagataagagttggtgctccagaaaaaaatttctcttctagtggaaataagtgcccctaccc

SEQ ID NO: 195550 - DNA, 634 bp, Homo sapiens
  Payload ID: 18600
  Gene Name: TRPM8 channel-associated factor 1
  ENST ID: ENST00000491908
  CDS Start-End: 185-634
gactcccgtggaaacccctcctctcctccagctccagcctcctccccgctcccaaatcccggctcggtcgcccagtcactggtacagggaagcctcttccctgtgcattcctctctgcgccaggctctgcccgctcccacctgcccccgtggaaatcgcagggtgacctgaaaccaatagagccatggcgactccctctgctgccttcgaggcccttatgaatggtgtgacaagctgggatgtacccgaagatgctgttccatgtgaactgcttcttattggagaggcttcatttcctgtgatggtgaatgacatgggccaggtcctcattgctgcctcctcctatggccgtggccgcctggtggtcgtgtcccatgaggactacttggtggaagcccagctcacgccctttctcctgaacgcagtggggtggctttgctcttcccctggggctcccattggtgtacacccatccctggcacctttggccaaaatcctcgagggctctggagtggatgcaaaggttgagccagaagtgaaagactccctgggggtttactgtattgatgcctacaatgaaaccatgacagaaaagctggtcaagttcatgaaatgtggtggcggcttgctcata

SEQ ID NO: 195551 - DNA, 577 bp, Homo sapiens
  Payload ID: 18600
  Gene Name: TRPM8 channel-associated factor 1
  ENST ID: ENST00000485416
  CDS Start-End: 353-577
aaccgtctgcactgcagcccacctccccccacacgcctcctcctagccacttcactaccaatttgcaaattcccaaggcgtctgccccagcgccttcccacatctctgtggaagactccccactccaaagtagcctggtgtggaaattgctggacgaaaggactggctttgggcctgggaggaaagaagagagtggagccccgccagactccaagctgagtgctgacagcctctgggagtttagaacatcccttctcacacactgtgcatttgatagaatactccctgaggcacgcagatcaacagctggggggtaggcagcgcccacatttaaaaagaaaccaatagagccatggcgactccctctgctgccttcgaggcccttatgaatggtgtgacaagctgggatgtacccgaagatgctgttccatgtgaactgcttcttattggagaggcttcatttcctgtgatggtgaatgacatgggccaggtcctcattgctgcctcctcctatggccgtggccgcctggtggtcgtgtcccatgaggactacttggtggaagcccagctcacgccc

SEQ ID NO: 195552 - DNA, 5733 bp, Homo sapiens
  Payload ID: 18600
  Gene Name: TRPM8 channel-associated factor 1
  Uniprot ID: Q9Y4C2
  ENST ID: ENST00000479870
  CDS Start-End: 210-2975
gtagtttcgagcccgctgccctttgcctcctgggcggagaagctgcttcctcctgggaacaaccgcctcccgctcctagcaggttgctactgccccgaacccgcgctgcagggaacagcggggcaaacagtgagtggggttcagcgtagactctggaccaggagaggcccgcggtgaccgaggcctgggccccggaaaccaatagagccatggcgactccctctgctgccttcgaggcccttatgaatggtgtgacaagctgggatgtacccgaagatgctgttccatgtgaactgcttcttattggagaggcttcatttcctgtgatggtgaatgacatgggccaggtcctcattgctgcctcctcctatggccgtggccgcctggtggtcgtgtcccatgaggactacttggtggaagcccagctcacgccctttctcctgaacgcagtggggtggctttgctcttcccctggggctcccattggtgtacacccatccctggcacctttggccaaaatcctcgagggctctggagtggatgcaaaggttgagccagaagtgaaagactccctgggggtttactgtattgatgcctacaatgaaaccatgacagaaaagctggtcaagttcatgaaatgtggtggcggcttgctcataggaggacaagcctgggattgggccaaccagggggaggatgaaagggttctgttcacgttccctgggaacctcgtgaccagtgtggctggcatttactttactgacaacaaaggggacacgagtttctttaaagtctccaagaagatgcccaagatcccagtgttggttagttgtgaagatgacctctccgacgacagagaagagcttctgcatgggatttcagagctggacatcagcaactcggattgtttcccatcccagctgctagtgcatggggctttagcctttcctctagggttagattcctaccatggctgtgttatagcggctgcccgctatggccggggccgggtggttgtgactggccataaggtattattcactgttggtaaactgggcccctttctgctcaatgctgtccgctggctggatgggggccgcagaggcaaggttgtggtgcagacagagctgagaaccctgagtggcctcctcgcagtggggggcatagacaccagcatcgagcccaatctgaccagtgatgcaagtgtctactgctttgaacccgtgagtgaagtgggggtcaaggaactgcaggagtttgtagcagagggtggcgggctatttgttggagcccaagcctggtggtgggccttcaagaaccccggagtgtcccctttggctcgattcccaggaaacctcctcctcaacccctttggcatcagcattacaagccaaagcctcaatccagggccctttcgtactcctaaagcagggataaggacctatcacttccgctccaccttggccgagttccaggttataatgggcaggaagagaggaaatgtggaaaagggctggttggcaaagctgggaccagatggtgcagctttcctgcagattcccgcagaagagatccctgcctacatgtctgtgcatcgactcctgaggaagctgctaagtcgatatcggcttccagtagcaacccgagagaaccctgttatcaatgactgctgcagaggtgctatgctttccctggccacagggctggcccactctggaagcgacctctctctgttagtcccagaaattgaagatatgtacagcagcccctatctgcgcccctcagaatctcctatcaccgtcgaggtcaactgcaccaatccaggcaccagatattgctggatgagtactgggctctacatacctggaaggcaaattatagaagtctcactgcctgaagctgctgcctctgccgacctgaagatacagattggctgccacacagatgacctgaccagggccagcaagcttttccgaggcccactcgtaattaaccggtgctgcttggacaaacccacaaaatcgatcacgtgcctctggggtggactcctctatataattgtgcctcagaacagcaaactgggttctgtgcctgtcaccgtgaagggggctgtgcatgctccatactacaagctgggggagaccaccctggaggagtggaagaggcgtatccaggagaatccagggccctggggagagctggccacggacaacatcattctgaccgtgccgaccgcaaatcttcgtactctggagaaccctgagccgctgctccgcctctgggatgaggtgatgcaggctgtggcgcgactgggagctgagcccttccctttgcgcctgcctcagaggattgttgccgacgtgcagatctcagtgggctggatgcatgcagggtaccccatcatgtgccatctggagtcagtgcaggagctcatcaacgagaagctcatcagaaccaaggggctgtggggccccgtccatgagctgggccgcaaccagcagcggcaggagtgggagttcccaccacacaccaccgaggccacctgcaacctgtggtgtgtgtatgtgcatgagacggtcttgggcattcctcgaagccgtgccaatattgctctgtggcccccagttcgggagaagagagtcagaatctacctgagcaagggtcccaatgtgaaaaactggaatgcatggaccgcactggaaacgtatttacagctccaggaagcctttggttgggagccattcatccgtctcttcaccgagtacaggaaccagaccaacttgcccacagaaaatgttgacaaaatgaatctgtgggtcaagatgttctcccaccaagtgcagaagaacctggctccgttctttgaggcctgggcctggcccatccagaaggaagtggctaccagcctggcctatctgcctgaatggaaggaaaatattatgaaattgtacctcctcacacagatgccccactgaaattgaagtcaagaaatgcaaaaaggaactgacacatctcagcaaagaaaactgaagggatttggttataagtggagaggatctcagcatatttctggaagatagaaagtggatgaagcatgataatgaaagagtgaagaacctttcagataaaatgtaagctgatctgaacaacataaccccaaagagacttgcgcacctgaaaagcttgtctactgaagaattactccagttgtaagattgagccctctcctactctcccccaactcttatgcacagaacacaggcagtctccactattgataccagttaaaaatttcttgttattgttgctgttgttgtttgtataaaggaattgaacaggctgcttgcagagagataagagttggtgctccagaaaaaaatttctcttctagtggaaataagtgcccctacccccagccggtcagctaattctctactgacagctgagacctcctactcaagtgcctgttgccttcaggtatagaagaggtttcctgaagaaacagacctaactgtacaacagcagaggaaacccatgccaactgttatacaagttaacagttatgttgatttttaaatgggaatggtgagttagaaattcccagacatgggcgatggggagggaagaggaataagaaaagtcacgaggtagaattaggggccttgaaaatatgacaaactctgagggaaacaaagacaatgtggaaagaataacttaattttaattccatctccagagagatttgaggtgtatttaagatgaaaaacaggatactacaaagaaacggaaaactcaggagttcgagaccagcctaggcaagatggcaacatcccgtctctacaaaataatttttaaaaattagccaagcatggtggcatgtgcctgtggtcctagctacttgggaggctgaagtgggaagatcacttgagcccaggagttcaaggcttcagtgagccatgatggtgccactgcactccagcctgggggacagagtgagaccctgtctcttaaaaagcaagaaaagaaagagaagactgagaataagaagatctctttgaaaataaaataagactgctaaaagtatttggtatacagtctggaaaataaagttgagggaatctctccagataaagagcaaaaagaaatagatagaaaaatataaagaaagaaaaaagacatagacaatcaatatgtaatgttaggagttcctggaagagagaacagagacagtgtaggtgaagaaataaaaagaaaaagaattgaagaacagagcaagctaagtctccagattgagagggcccaatacaatctacatctagacacaatattgtaaaattttggaatattaaggatagaaggaagatattaaagtggccagggagaaaacaaatgaggtcatcacgattagctcaacacaaaaatggatgagaaatagactgctaacagatttgtcatcagcaacactgaatgccagaagtcaatggatcaacatcttcagagcttaaggaaaatttttgtacctagaatttcatagtaaggcagactgtcaagaagaacatcaaagtgaagacattttctgtcaggcaaattttcagaaagtctcctttgcacccttactgaggaagtatcttgaggaaattctccagcaaaatgaggatgaaaaccaggaaagaagaagaaatgggatccataaaacagtggaccttacttaggatgtctcattctagagtgacagccaaaagggtatctcaccctagagtgacagctatccagcagactaatttcagatgagagcatactgtctcgggctttctgggaagaatgtgcattcagtgccatagatagtatcattgaagagctgggatgcttgagaagattatttagtcaagaaaaaagaaagacaaatcaacaatatgtcaaaaaattcaggtccaattatagagcaaaataaaatgaggcatgattttgagttattcatgaagaataagaagaggcttgataggtacatttccttttctatggcacaggcatgatgatattgggtgtgtagggaagaaaatatcctagcttatactaggctcccagtaagaagtatttaaatagccaaaataatgtggatatcatttattagtattcaatgttcagatcagcctattaacaaagtgtgaaaggtttcattttttattcagaactgaagttgaaagtaattaatgctgacaaagggaaagaaagcagaaagagattgagaattagaggaagagaagtggaatcaaaggtagagatacttatatattcaaagtggggatgaaaagatcttcagttaatggaacaagaactagaggattagtgtattgttcaaagctataaaatcaaaccaatagatgtattaaaaagtgatgtaactatcagacatttggagagagatggacaaaggaaagtggcgatagtgtaagttaaatccttatcttttgtaatggggaattattaaagatgttgtaaagtcagtaagtcaagaaattattgctcaaacatattatttaaagttagaaagttaccagacgatctaaaataaatattgttaaaagcattacctctagggaatgggatttagatttaaaaagggtgggatgggaaactgtgtttttcattttaagtccttctgtactatttaattttttaccttgtgcatgtattactttgaaaaaatttttaataaacccaaataaaaatctt

SEQ ID NO: 195553 - DNA, 576 bp, Homo sapiens
  Payload ID: 18600
  Gene Name: TRPM8 channel-associated factor 1
  ENST ID: ENST00000478172
  CDS Start-End: 140-576
accccccacccccgcagtctccgcctaagactttccaagtcctgtagtttcgagcccgctgccctttgcctcctgggcggagaagctgcttcctcctgggaacaaccgcctcccgctcctagcagaaaccaatagagccatggcgactccctctgctgccttcgaggcccttatgaatggtgtgacaagctgggatgtacccgaagatgctgttccatgtgaactgcttcttattggagaggcttcatttcctgtgatggtgaatgacatgggccaggtcctcattgctgcctcctcctatggccgtggccgcctggtggtcgtgtcccatgaggactacttggtggaagcccagctcacgccctttctcctgaacgcagtggggtggctttgctcttcccctggggctcccattggtgtacacccatccctggcacctttggccaaaatcctcgagggctctggagtggatgcaaaggttgagccagaagtgaaagactccctgggggtttactgtattgatgcctacaatgaaaccatgacagaaaagctggtcaagttcatgaaatgtggtgg

SEQ ID NO: 195554 - DNA, 840 bp, Homo sapiens
  Payload ID: 18600
  Gene Name: TRPM8 channel-associated factor 1
  ENST ID: ENST00000460532
  CDS Start-End: 340-840
ctcctccagctccagcctcctccccgctcccaaatcccggctcggtcgcccagtcactggtacagggaagcctcttccctgtgcattcctctctgcgccaggctctgcccgctcccacctgcccccgtggaaatcgcagggtgacctgactggctttgggcctgggaggaaagaagagagtggagccccgccagactccaagctgagtgctgacagcctctgggagtttagaacatcccttctcacacactgtgcatttgatagaatactccctgaggcacgcagatcaacagctggggggtaggcagcgcccacatttaaaaagaaaccaatagagccatggcgactccctctgctgccttcgaggcccttatgaatggtgtgacaagctgggatgtacccgaagatgctgttccatgtgaactgcttcttattggagaggcttcatttcctgtgatggtgaatgacatgggccaggtcctcattgctgcctcctcctatggccgtggccgcctggtggtcgtgtcccatgaggactacttggtggaagcccagctcacgccctttctcctgaacgcagtggggtggctttgctcttcccctggggctcccattggtgtacacccatccctggcacctttggccaaaatcctcgagggctctggagtggatgcaaaggttgagccagaagtgaaagactccctgggggtttactgtattgatgcctacaatgaaaccatgacagaaaagctggtcaagttcatgaaatgtggtggcggcttgctcataggaggacaagcctgggattgggccaaccagggggaggatgaaagggttctg

SEQ ID NO: 195555 - DNA, 2958 bp, Homo sapiens
  Payload ID: 18601
  Gene Name: TRPM8 channel-associated factor 2
  Uniprot ID: A6NFQ2
  ENST ID: ENST00000357344
  CDS Start-End: 70-2607
tccggatctctctcggctgcttttttccactggtaacttctgaggctgagatcagcagctgatagaaccatggcgaccattgctgctgctgcgtttgaggccctcatggatggagtgacatgctgggatgtccccagaggccccatccccagtgaactccttcttattggagaagccgccttccccgtgatggtgaatgacaagggccaggtgctcattgctgcctcctcctacggccgaggccgcctcgtggttgtgtcccatgagggctacctgtcgcatactggcttggctccatttctcctcaatgcagtgagctggctctgtccctgtcctggggctcccgtgggagtgcatccatccctggcacctctagtaaacatcctacaggatgctgggcttgaggcacaggtcaagccagaaccaggagagcccctaggggtttactgtatcaatgcctacaatgacaccttgactgcaacgctgatccagtttgtgaaacatggagggggcttgttaatcgggggccaggcctggtactgggccagccagcacggccctgacaaggtgctctccaggttccctgggaacaaggtgacaagtgtagctggagtgtacttcactgacacctatggggacagagaccggttcaaggtctctaagaaggtgcccaagatcccactccatgtcaggtatggggaggatgtcaggcaggaccagcagcagctcctggaggggatctcagagctggacatcaggacagggggagtcccctcacagctgcttgtacatggagccctggccttccctctggggctggatgcctcactcaactgcttcctggcggctgctcactatggccggggccgggtggtcctggctgcccacgagtgcctgctctgtgctcccaagatggggcccttcttgctcaatgcggtgcgctggctggccagaggccagacaggcaaagttggggtgaacacaaatctaaaagatctgtgtcctctcctatcggagcatggcctgcaatgcagcctggagccccatctgaacagcgacttgtgtgtctactgctgcaaggcgtacagtgacaaggaggctaagcagctgcaggagtttgtggctgagggtggggggctgctgattgggggccaggcctggtggtgggcctcccagaaccctggccactgccccttggctggcttccctggtaacatcatcctcaactgctttggcctcagcatcctgcctcagactctcaaagcaggctgcttccccgttcccacccctgagatgagaagctaccacttccgcaaggcgctctctcaattccaggctatactgaaccacgagaatgggaacttggaaaagagctgtctggcaaagttgagagttgatggtgcagccttcctacagattcctgcggagggggtccctgcttacatatccctgcacaggctcctgaggaagatgctacgagggtctggcctcccagctgtgagccgggaaaatccagttgccagtgactcctatgaggctgcggtgctctccctggccactgggctggctcactctggaactgactgctcccagctggcccaggggcttggcacctggacctgctcctccagtttgtacccctcaaaacaccccatcaccgtggagatcaatggaatcaacccaggcaacaatgattgctgggtgagtaccgggctctacctcctggaaggacaaaatgcagaagtctcactgtctgaagctgctgcctctgctggcctgagggtacagataggctgccacaccgatgaccttaccaaggccaggaagctatctcgagcccccgtggtgactcaccaatgctggatggacaggactgagcggtcagtctcctgcctctggggcggcctcctctacgtcatcgtgcccaagggcagccaactaggccctgtgcctgtcactatcaggggagctgtgcctgccccatactacaagctgggtaagacatcgctggaggagtggaagaggcagatgcaggagaacctggctccctggggagagctggccacggacaacatcatcctgacagtgccaaccacaaaccttcaggccctgaaggaccccgagcctgtgctccgcctctgggatgagatgatgcaggctgtggccaggctggcggctgagcccttccctttccgccgtcctgagaggattgtggctgatgtgcagatctcagctggctggatgcattcaggataccccatcatgtgccacctggagtctgtgaaggagatcatcaatgagatggacatgaggagcaggggtgtgtggggccccatccatgagctgggccacaaccaacagcggcatggatgggagttccccccacacactactgaggccacctgtaacctttggtcagtctacgtgcatgaaacagtcctggggatccccagggctcaggcccacgaggctctgagccctccagagcgagagaggagaatcaaggcccacctgggaaagggagcccccctgtgtgactggaatgtatggacagccctggaaacatatctacaggtactgagcagaaattctgggagaaggggatgaccagacccctcagtcatgtagcgacctggatcccagtagccctccacctccttcgccactccaccagcctggacctccacctcccctggaaatgagagggactgggccgcagggtggtgcttcttgggttatacccctctaaggcagagagaatggcacctgtctcactcaccttctgattttgcaatgtaagaggaaatgaaaaatattatgaaaaaaatagaaatatagcatattattcaagggcagaaactctgttagacattcctgcagctgaatcacagctcttgccctcattggttttgttcttggtctcctaataagtgttccataaatggtcattgctttgtt

SEQ ID NO: 195556 - DNA, 2906 bp, Homo sapiens
  Payload ID: 18601
  Gene Name: TRPM8 channel-associated factor 2
  Uniprot ID: A6NFQ2
  ENST ID: ENST00000411935
  CDS Start-End: 128-2575
agtaattgagtgagagagttctggtgtgtagacaacggtggctttggaagcaagccagcctgggtttagtaaaaattaaagaaataggaaagaaatacaaaagttttcttttaagaaatgcctttttatgaaaatatttcaaaaggaattcaagtttattttgaaaaaatgcacaccaatacagaaatatagagaggaaaatggcaactcatcctcctcaccacaccaccagctccagtctcatgcctctggaccaaggtatggggaggatgtcaggcaggaccagcagcagctcctggaggggatctcagagctggacatcaggacagggggagtcccctcacagctgcttgtacatggagccctggccttccctctggggctggatgcctcactcaactgcttcctggcggctgctcactatggccggggccgggtggtcctggctgcccacgagtgcctgctctgtgctcccaagatggggcccttcttgctcaatgcggtgcgctggctggccagaggccagacaggcaaagttggggtgaacacaaatctaaaagatctgtgtcctctcctatcggagcatggcctgcaatgcagcctggagccccatctgaacagcgacttgtgtgtctactgctgcaaggcgtacagtgacaaggaggctaagcagctgcaggagtttgtggctgagggtggggggctgctgattgggggccaggcctggtggtgggcctcccagaaccctggccactgccccttggctggcttccctggtaacatcatcctcaactgctttggcctcagcatcctgcctcagactctcaaagcaggctgcttccccgttcccacccctgagatgagaagctaccacttccgcaaggcgctctctcaattccaggctatactgaaccacgagaatgggaacttggaaaagagctgtctggcaaagttgagagttgatggtgcagccttcctacagattcctgcggagggggtccctgcttacatatccctgcacaggctcctgaggaagatgctacgagggtctggcctcccagctgtgagccgggaaaatccagttgccagtgactcctatgaggctgcggtgctctccctggccactgggctggctcactctggaactgactgctcccagctggcccaggggcttggcacctggacctgctcctccagtttgtacccctcaaaacaccccatcaccgtggagatcaatggaatcaacccagagtctcactctgtcatccaggttggaatgcagtggcgcgatctcagctcatgcaacctccacctcctgggtttaagcaattcttctctctcagcctcctgtgttgctgggactacaggcacacgccaccatgcctggctaatttttgtatttttagtagagagggagtttcaccgtaaaggcaacaatgattgctgggtgagtaccgggctctacctcctggaaggacaaaatgcagaagtctcactgtctgaagctgctgcctctgctggcctgagggtacagataggctgccacaccgatgaccttaccaaggccaggaagctatctcgagcccccgtggtgactcaccaatgctggatggacaggactgagcggtcagtctcctgcctctggggcggcctcctctacgtcatcgtgcccaagggcagccaactaggccctgtgcctgtcactatcaggggagctgtgcctgccccatactacaagctgggtaagacatcgctggaggagtggaagaggcagatgcaggagaacctggctccctggggagagctggccacggacaacatcatcctgacagtgccaaccacaaaccttcaggccctgaaggaccccgagcctgtgctccgcctctgggatgagatgatgcaggctgtggccaggctggcggctgagcccttccctttccgccgtcctgagaggattgtggctgatgtgcagatctcagctggctggatgcattcaggataccccatcatgtgccacctggagtctgtgaaggagatcatcaatgagatggacatgaggagcaggggtgtgtggggccccatccatgagctgggccacaaccaacagcggcatggatgggagttccccccacacactactgaggccacctgtaacctttggtcagtctacgtgcatgaaacagtcctggggatccccagggctcaggcccacgaggctctgagccctccagagcgagagaggagaatcaaggcccacctgggaaagggagcccccctgtgtgactggaatgtatggacagccctggaaacatatctacagctccaagaggccttcgggtgggagccattcacccagctctttgctgagtaccagaccctctctcacctccccaaagacaacactggcaggatgaatctatgggtgaagaagttctctgaaaaagtgaagaagaatctggttcccttctttgaggcctggggctggcctatccagaaggaggtggctgacagcctggcctccctaccagagtggcaggaaaaccccatgcaagtgtacctccgtgccaggaagtaaaggatgccccacaaggcgggagagaaaaggcagggtcacgccatcaactccaccatggggctttggccgtgtgctcagtatctggagcctgaatcccgcttccaagcctgaccactagatggtggccacggtcataagaaaaaatggaacccctttctgtaaaaggtgccttgtgcttctttttattgtttttctgcctacgctattgctttccccaagagactcacttcacctcttagtcttccagagaggatctttcatcctgccatcctgaggcttctatttttgaccaatagctctaaagaccacgggttcccataacaacctgata

SEQ ID NO: 195557 - DNA, 5568 bp, Homo sapiens
  Payload ID: 18601
  Gene Name: TRPM8 channel-associated factor 2
  Uniprot ID: A6NFQ2
  ENST ID: ENST00000441159
  CDS Start-End: 67-2826
ggatctctctcggctgcttttttccactggtaacttctgaggctgagatcagcagctgatagaaccatggcgaccattgctgctgctgcgtttgaggccctcatggatggagtgacatgctgggatgtccccagaggccccatccccagtgaactccttcttattggagaagccgccttccccgtgatggtgaatgacaagggccaggtgctcattgctgcctcctcctacggccgaggccgcctcgtggttgtgtcccatgagggctacctgtcgcatactggcttggctccatttctcctcaatgcagtgagctggctctgtccctgtcctggggctcccgtgggagtgcatccatccctggcacctctagtaaacatcctacaggatgctgggcttgaggcacaggtcaagccagaaccaggagagcccctaggggtttactgtatcaatgcctacaatgacaccttgactgcaacgctgatccagtttgtgaaacatggagggggcttgttaatcgggggccaggcctggtactgggccagccagcacggccctgacaaggtgctctccaggttccctgggaacaaggtgacaagtgtagctggagtgtacttcactgacacctatggggacagagaccggttcaaggtctctaagaaggtgcccaagatcccactccatgtcaggtatggggaggatgtcaggcaggaccagcagcagctcctggaggggatctcagagctggacatcaggacagggggagtcccctcacagctgcttgtacatggagccctggccttccctctggggctggatgcctcactcaactgcttcctggcggctgctcactatggccggggccgggtggtcctggctgcccacgagtgcctgctctgtgctcccaagatggggcccttcttgctcaatgcggtgcgctggctggccagaggccagacaggcaaagttggggtgaacacaaatctaaaagatctgtgtcctctcctatcggagcatggcctgcaatgcagcctggagccccatctgaacagcgacttgtgtgtctactgctgcaaggcgtacagtgacaaggaggctaagcagctgcaggagtttgtggctgagggtggggggctgctgattgggggccaggcctggtggtgggcctcccagaaccctggccactgccccttggctggcttccctggtaacatcatcctcaactgctttggcctcagcatcctgcctcagactctcaaagcaggctgcttccccgttcccacccctgagatgagaagctaccacttccgcaaggcgctctctcaattccaggctatactgaaccacgagaatgggaacttggaaaagagctgtctggcaaagttgagagttgatggtgcagccttcctacagattcctgcggagggggtccctgcttacatatccctgcacaggctcctgaggaagatgctacgagggtctggcctcccagctgtgagccgggaaaatccagttgccagtgactcctatgaggctgcggtgctctccctggccactgggctggctcactctggaactgactgctcccagctggcccaggggcttggcacctggacctgctcctccagtttgtacccctcaaaacaccccatcaccgtggagatcaatggaatcaacccaggcaacaatgattgctgggtgagtaccgggctctacctcctggaaggacaaaatgcagaagtctcactgtctgaagctgctgcctctgctggcctgagggtacagataggctgccacaccgatgaccttaccaaggccaggaagctatctcgagcccccgtggtgactcaccaatgctggatggacaggactgagcggtcagtctcctgcctctggggcggcctcctctacgtcatcgtgcccaagggcagccaactaggccctgtgcctgtcactatcaggggagctgtgcctgccccatactacaagctgggtaagacatcgctggaggagtggaagaggcagatgcaggagaacctggctccctggggagagctggccacggacaacatcatcctgacagtgccaaccacaaaccttcaggccctgaaggaccccgagcctgtgctccgcctctgggatgagatgatgcaggctgtggccaggctggcggctgagcccttccctttccgccgtcctgagaggattgtggctgatgtgcagatctcagctggctggatgcattcaggataccccatcatgtgccacctggagtctgtgaaggagatcatcaatgagatggacatgaggagcaggggtgtgtggggccccatccatgagctgggccacaaccaacagcggcatggatgggagttccccccacacactactgaggccacctgtaacctttggtcagtctacgtgcatgaaacagtcctggggatccccagggctcaggcccacgaggctctgagccctccagagcgagagaggagaatcaaggcccacctgggaaagggagcccccctgtgtgactggaatgtatggacagccctggaaacatatctacagctccaagaggccttcgggtgggagccattcacccagctctttgctgagtaccagaccctctctcacctccccaaagacaacactggcaggatgaatctatgggtgaagaagttctctgaaaaagtgaagaagaatctggttcccttctttgaggcctggggctggcctatccagaaggaggtggctgacagcctggcctccctaccagagtggcaggaaaaccccatgcaagtgtacctccgtgccaggaagtaaaggatgccccacaaggcgggagagaaaaggcagggtcacgccatcaactccaccatggggctttggccgtgtgctcagtatctggagcctgaatcccgcttccaagcctgaccactagatggtggccacggtcataagaaaaaatggaacccctttctgtaaaaggtgccttgtgcttctttttattgtttttctgcctacgctattgctttccccaagagactcacttcacctcttagtcttccagagaggatctttcatcctgccatcctgaggcttctatttttgaccaatagctctaaagaccacgggttcccataacaacctgatatccctttctcatccctgccatccctgaataaggcttctaatttattatgctttaacaagttttcaaatagcaagcgagacacgctggaatagtggagagagccccaaaccagctttggttctatggaaaatcactccacctctctgtgtttctgtcttcacatccatgacatgaggatacaaatcttttcctcacaaagctgttgtttgatttctcctggtcccatagtggactgttaacggtgtccagtctagcgtgcacatcctgggtgctgaatctcacttcagtgttgacccccttggggttagcattcagtccttgtatatttagagaatgtcaatgttttcccagacatggtatcaataatggtagttgtcagcagtatcttagccctttctacattttttctcccacttctggaaggattcttgggtataacctaacccaaagaaaagtggcatgtgctgaaactgagtgtcacagagctgtgaggttgggtctttgggattagcttcattttccagggtttgccctttgcccttcaaccaaaggacaaagtcatgttaacagctgctactaagtctatatgcccattcgttcataccacaaaacaggcatctgactcctctggtcaccatggaatcaaggcactgtcaagtggtggggggtccacaggcacagtgggcttcactctggaacaggattactgggtgcagcggatgtaatcctcacttaatcaacccacaccccagcatcccctgagctttctcttaatctcattctagcccatcttgactcttcggttagagggagttctcattggagatttgtctctgggattaatgagtgtatgcctagctactttctccagtttacttttagaccatattgttgtttgttttgaatatcattccttaggctatgttgagagtagagtggcttcccattaggagaactaatttagggcatgtcttttgctgaatcccgtcagcatatttaacaaattcccaattctagataatttccttttatttctctagtaccctttgccaggggctctacacatcaaaggtgttcatgaagtatttgtcaaaggaaagaacagtaatgacacctaacacataatgagtgattagtatgttccaggcattgcgtgagctatttactgtgagtgatttaatgttatcttcccagcagacctctgaggtaggtactagtatgatccccatttcgtacatgaggaaactgacactaagggacataaaataagttttttgaagtcacaaagtgaataaaaggaagaaccagggtttaattgaagcccatagcaatgaaaacattgtggaacttattcttcatgaatggtttacaatttaaacaaaatgtcacctagaaaatagatgaaaatatgttcaaccaggtctggatttttccaatgtttactactgaattttcattcaataacaagtttaacttccaaaaaggtgttggtatctgattttctgcctgcctcagaatgtgatttgtctgcctttgggtcatccagccttgggtagagaaggaatttgaactcaggaaattcaactccagaactgatgttcttttttttttttcatttaagttctgggatacatgtgcagaacgtgcaggtttgttacataggtatacatgtgccatggtggtttgctgcacctatcaatccatcatctagattttaagctctgcatgcattagatatttgtcctaatgctctccctcccattgcccccaacctcccgacaggccccagtgtgatgtttccctccctgtgtccatttgttctcatttttcatctcccacttatgagtgagaacatgtgttgtttggttttctgttcctgtgttagtttgctgagaattatggcttccagcttcatccatgtccctgcaaaggacatgaactcattctttttcatggctgcatggtattcaatggtatatatgccatattttctttatccagtctatcattggtgggcatttgggttggttccaagtctttgctattgtaaataatgctgcaataaaagtatgtgtgcatgtgtctttatagtagaatggtttatagtcctttgggtgtatatccagtaatgggattgctgggtcaaatggtatttctggttctagatctttgaggaatcatcacattgtcttccacaatggttgaactaatttacactcccaacaacagtgtaaaagcattcctgtttctccacagcctcaccaacatctgttgtttcctgactttttaatgatcgccattctaactggcatgagatggtaccccattgtggttttgatttacatttccctaatgaccagtaatgatgagctttttttcatgtttattggccacataaatgtcttcttttg

SEQ ID NO: 195558 - DNA, 2976 bp, Homo sapiens
  Payload ID: 18601
  Gene Name: TRPM8 channel-associated factor 2
  Uniprot ID: A6NFQ2
  ENST ID: ENST00000444908
  CDS Start-End: 86-2623
cctccgacccgtcccccgcgcgccactgcagagcctgtccgtcagtccctaggtatccgcactgctcagggcagctgatagaaccatggcgaccattgctgctgctgcgtttgaggccctcatggatggagtgacatgctgggatgtccccagaggccccatccccagtgaactccttcttattggagaagccgccttccccgtgatggtgaatgacaagggccaggtgctcattgctgcctcctcctacggccgaggccgcctcgtggttgtgtcccatgagggctacctgtcgcatactggcttggctccatttctcctcaatgcagtgagctggctctgtccctgtcctggggctcccgtgggagtgcatccatccctggcacctctagtaaacatcctacaggatgctgggcttgaggcacaggtcaagccagaaccaggagagcccctaggggtttactgtatcaatgcctacaatgacaccttgactgcaacgctgatccagtttgtgaaacatggagggggcttgttaatcgggggccaggcctggtactgggccagccagcacggccctgacaaggtgctctccaggttccctgggaacaaggtgacaagtgtagctggagtgtacttcactgacacctatggggacagagaccggttcaaggtctctaagaaggtgcccaagatcccactccatgtcaggtatggggaggatgtcaggcaggaccagcagcagctcctggaggggatctcagagctggacatcaggacagggggagtcccctcacagctgcttgtacatggagccctggccttccctctggggctggatgcctcactcaactgcttcctggcggctgctcactatggccggggccgggtggtcctggctgcccacgagtgcctgctctgtgctcccaagatggggcccttcttgctcaatgcggtgcgctggctggccagaggccagacaggcaaagttggggtgaacacaaatctaaaagatctgtgtcctctcctatcggagcatggcctgcaatgcagcctggagccccatctgaacagcgacttgtgtgtctactgctgcaaggcgtacagtgacaaggaggctaagcagctgcaggagtttgtggctgagggtggggggctgctgattgggggccaggcctggtggtgggcctcccagaaccctggccactgccccttggctggcttccctggtaacatcatcctcaactgctttggcctcagcatcctgcctcagactctcaaagcaggctgcttccccgttcccacccctgagatgagaagctaccacttccgcaaggcgctctctcaattccaggctatactgaaccacgagaatgggaacttggaaaagagctgtctggcaaagttgagagttgatggtgcagccttcctacagattcctgcggagggggtccctgcttacatatccctgcacaggctcctgaggaagatgctacgagggtctggcctcccagctgtgagccgggaaaatccagttgccagtgactcctatgaggctgcggtgctctccctggccactgggctggctcactctggaactgactgctcccagctggcccaggggcttggcacctggacctgctcctccagtttgtacccctcaaaacaccccatcaccgtggagatcaatggaatcaacccaggcaacaatgattgctgggtgagtaccgggctctacctcctggaaggacaaaatgcagaagtctcactgtctgaagctgctgcctctgctggcctgagggtacagataggctgccacaccgatgaccttaccaaggccaggaagctatctcgagcccccgtggtgactcaccaatgctggatggacaggactgagcggtcagtctcctgcctctggggcggcctcctctacgtcatcgtgcccaagggcagccaactaggccctgtgcctgtcactatcaggggagctgtgcctgccccatactacaagctgggtaagacatcgctggaggagtggaagaggcagatgcaggagaacctggctccctggggagagctggccacggacaacatcatcctgacagtgccaaccacaaaccttcaggccctgaaggaccccgagcctgtgctccgcctctgggatgagatgatgcaggctgtggccaggctggcggctgagcccttccctttccgccgtcctgagaggattgtggctgatgtgcagatctcagctggctggatgcattcaggataccccatcatgtgccacctggagtctgtgaaggagatcatcaatgagatggacatgaggagcaggggtgtgtggggccccatccatgagctgggccacaaccaacagcggcatggatgggagttccccccacacactactgaggccacctgtaacctttggtcagtctacgtgcatgaaacagtcctggggatccccagggctcaggcccacgaggctctgagccctccagagcgagagaggagaatcaaggcccacctgggaaagggagcccccctgtgtgactggaatgtatggacagccctggaaacatatctacaggtactgagcagaaattctgggagaaggggatgaccagacccctcagtcatgtagcgacctggatcccagtagccctccacctccttcgccactccaccagcctggacctccacctcccctggaaatgagagggactgggccgcagggtggtgcttcttgggttatacccctctaaggcagagagaatggcacctgtctcactcaccttctgattttgcaatgtaagaggaaatgaaaaatattatgaaaaaaatagaaatatagcatattattcaagggcagaaactctgttagacattcctgcagctgaatcacagctcttgccctcattggttttgttcttggtctcctaataagtgttccataaatggtcattgctttgttta

SEQ ID NO: 195559 - DNA, 2332 bp, Homo sapiens
  Payload ID: 18601
  Gene Name: TRPM8 channel-associated factor 2
  ENST ID: ENST00000518791
  CDS Start-End: 1-1981
gacccgtcccccgcgcgccactgcagagcctgtccgtcagtccctaggtatccgcactgctcaggggtatggggaggatgtcaggcaggaccagcagcagctcctggaggggatctcagagctggacatcaggacagggggagtcccctcacagctgcttgtacatggagccctggccttccctctggggctggatgcctcactcaactgcttcctggcggctgctcactatggccggggccgggtggtcctggctgcccacgagtgcctgctctgtgctcccaagatggggcccttcttgctcaatgcggtgcgctggctggccagaggccagacaggcaaagttggggtgaacacaaatctaaaagatctgtgtcctctcctatcggagcatggcctgcaatgcagcctggagccccatctgaacagcgacttgtgtgtctactgctgcaaggcgtacagtgacaaggaggctaagcagctgcaggagtttgtggctgagggtggggggctgctgattgggggccaggcctggtggtgggcctcccagaaccctggccactgccccttggctggcttccctggtaacatcatcctcaactgctttggcctcagcatcctgcctcagactctcaaagcaggctgcttccccgttcccacccctgagatgagaagctaccacttccgcaaggcgctctctcaattccaggctatactgaaccacgagaatgggaacttggaaaagagctgtctggcaaagttgagagttgatggtgcagccttcctacagattcctgcggagggggtccctgcttacatatccctgcacaggctcctgaggaagatgctacgagggtctggcctcccagctgtgagccgggaaaatccagttgccagtgactcctatgaggctgcggtgctctccctggccactgggctggctcactctggaactgactgctcccagctggcccaggggcttggcacctggacctgctcctccagtttgtacccctcaaaacaccccatcaccgtggagatcaatggaatcaacccaggcaacaatgattgctgggtgagtaccgggctctacctcctggaaggacaaaatgcagaagtctcactgtctgaagctgctgcctctgctggcctgagggtacagataggctgccacaccgatgaccttaccaaggccaggaagctatctcgagcccccgtggtgactcaccaatgctggatggacaggactgagcggtcagtctcctgcctctggggcggcctcctctacgtcatcgtgcccaagggcagccaactaggccctgtgcctgtcactatcaggggagctgtgcctgccccatactacaagctgggtaagacatcgctggaggagtggaagaggcagatgcaggagaacctggctccctggggagagctggccacggacaacatcatcctgacagtgccaaccacaaaccttcaggccctgaaggaccccgagcctgtgctccgcctctgggatgagatgatgcaggctgtggccaggctggcggctgagcccttccctttccgccgtcctgagaggattgtggctgatgtgcagatctcagctggctggatgcattcaggataccccatcatgtgccacctggagtctgtgaaggagatcatcaatgagatggacatgaggagcaggggtgtgtggggccccatccatgagctgggccacaaccaacagcggcatggatgggagttccccccacacactactgaggccacctgtaacctttggtcagtctacgtgcatgaaacagtcctggggatccccagggctcaggcccacgaggctctgagccctccagagcgagagaggagaatcaaggcccacctgggaaagggagcccccctgtgtgactggaatgtatggacagccctggaaacatatctacaggtactgagcagaaattctgggagaaggggatgaccagacccctcagtcatgtagcgacctggatcccagtagccctccacctccttcgccactccaccagcctggacctccacctcccctggaaatgagagggactgggccgcagggtggtgcttcttgggttatacccctctaaggcagagagaatggcacctgtctcactcaccttctgattttgcaatgtaagaggaaatgaaaaatattatgaaaaaaatagaaatatagcatattattcaagggcagaaactctgttagacattcctgcagctgaatcacagctcttgccctcattggttttgttcttggtctcctaataagtgttccataaatggtcattgctttgtt

SEQ ID NO: 195560 - DNA, 2448 bp, Homo sapiens
  Payload ID: 18601
  Gene Name: TRPM8 channel-associated factor 2
  Uniprot ID: A6NFQ2
  ENST ID: ENST00000425618
  CDS Start-End: 1-2448
atgaaaatatttcaaaaggaattcaagtttattttgaaaaaatgcacaccaatacagaaatatagagaggaaaatggcaactcatcctcctcaccacaccaccagctccagtctcatgcctctggaccaaggtatggggaggatgtcaggcaggaccagcagcagctcctggaggggatctcagagctggacatcaggacagggggagtcccctcacagctgcttgtacatggagccctggccttccctctggggctggatgcctcactcaactgcttcctggcggctgctcactatggccggggccgggtggtcctggctgcccacgagtgcctgctctgtgctcccaagatggggcccttcttgctcaatgcggtgcgctggctggccagaggccagacaggcaaagttggggtgaacacaaatctaaaagatctgtgtcctctcctatcggagcatggcctgcaatgcagcctggagccccatctgaacagcgacttgtgtgtctactgctgcaaggcgtacagtgacaaggaggctaagcagctgcaggagtttgtggctgagggtggggggctgctgattgggggccaggcctggtggtgggcctcccagaaccctggccactgccccttggctggcttccctggtaacatcatcctcaactgctttggcctcagcatcctgcctcagactctcaaagcaggctgcttccccgttcccacccctgagatgagaagctaccacttccgcaaggcgctctctcaattccaggctatactgaaccacgagaatgggaacttggaaaagagctgtctggcaaagttgagagttgatggtgcagccttcctacagattcctgcggagggggtccctgcttacatatccctgcacaggctcctgaggaagatgctacgagggtctggcctcccagctgtgagccgggaaaatccagttgccagtgactcctatgaggctgcggtgctctccctggccactgggctggctcactctggaactgactgctcccagctggcccaggggcttggcacctggacctgctcctccagtttgtacccctcaaaacaccccatcaccgtggagatcaatggaatcaacccagagtctcactctgtcatccaggttggaatgcagtggcgcgatctcagctcatgcaacctccacctcctgggtttaagcaattcttctctctcagcctcctgtgttgctgggactacaggcacacgccaccatgcctggctaatttttgtatttttagtagagagggagtttcaccgtaaaggcaacaatgattgctgggtgagtaccgggctctacctcctggaaggacaaaatgcagaagtctcactgtctgaagctgctgcctctgctggcctgagggtacagataggctgccacaccgatgaccttaccaaggccaggaagctatctcgagcccccgtggtgactcaccaatgctggatggacaggactgagcggtcagtctcctgcctctggggcggcctcctctacgtcatcgtgcccaagggcagccaactaggccctgtgcctgtcactatcaggggagctgtgcctgccccatactacaagctgggtaagacatcgctggaggagtggaagaggcagatgcaggagaacctggctccctggggagagctggccacggacaacatcatcctgacagtgccaaccacaaaccttcaggccctgaaggaccccgagcctgtgctccgcctctgggatgagatgatgcaggctgtggccaggctggcggctgagcccttccctttccgccgtcctgagaggattgtggctgatgtgcagatctcagctggctggatgcattcaggataccccatcatgtgccacctggagtctgtgaaggagatcatcaatgagatggacatgaggagcaggggtgtgtggggccccatccatgagctgggccacaaccaacagcggcatggatgggagttccccccacacactactgaggccacctgtaacctttggtcagtctacgtgcatgaaacagtcctggggatccccagggctcaggcccacgaggctctgagccctccagagcgagagaggagaatcaaggcccacctgggaaagggagcccccctgtgtgactggaatgtatggacagccctggaaacatatctacagctccaagaggccttcgggtgggagccattcacccagctctttgctgagtaccagaccctctctcacctccccaaagacaacactggcaggatgaatctatgggtgaagaagttctctgaaaaagtgaagaagaatctggttcccttctttgaggcctggggctggcctatccagaaggaggtggctgacagcctggcctccctaccagagtggcaggaaaaccccatgcaagtgtacctccgtgccaggaagtaa

SEQ ID NO: 195561 - DNA, 3408 bp, Homo sapiens
  Payload ID: 18602
  Gene Name: TruB pseudouridine (psi) synthase family member 1
  Uniprot ID: Q8WWH5
  ENST ID: ENST00000298746
  CDS Start-End: 62-1111
gcactcttgttgcatcatcagcgtgcacctccacgatgaaacaggtctgggctacaaaagtatggccgcttctgaggcggcggtggtgtcttcgccgtctttgaaaacagacacatcccctgtccttgaaactgcaggaacggtcgcagcaatggctgcgaccccgtcagcaagggctgcagccgcggtggttgcggccgcggccaggaccggatccgaagccagggtctccaaggccgctttggctaccaagctgctgtccttgagcggcgtgttcgccgtgcacaagcccaaagggcccacttcagccgagctgctgaatcggttgaaggagaagctgctggcagaagctggaatgccttctccagaatggaccaagaggaaaaagcagactttgaaaattgggcatggagggactctagacagcgcagcccgaggagttctggttgttggaattggaagcggaacaaaaatgttgaccagtatgttgtcagggtccaagagatatactgccattggagaactggggaaagctactgatacactagattctacggggagggtaacagaagaaaaaccttacgataaaataacacaagaagatattgaaggcattctacagaaatttactggaaatataatgcaagtgccccccctctattctgcattaaagaaagatggacaaagactttcgactttgatgaagagaggtgaagtcgtagaagcaaaacctgccaggccagtgactgtatacagtatctcccttcaaaaattccagccaccatttttcacattagatgttgaatgtggaggaggtttttatatcagaagcttggtcagtgacattggaaaagaactatcttcctgtgccaatgtgctagagctgacccgaaccaaacagggaccatttacgctagaagaacatgcccttcctgaagacaaatggacaattgatgacattgcacagtctcttgagcattgctcatctcttttcccagcagagttggcacttaaaaaatcaaaacctgagtctaatgaacaggttttgagctgtgaatatataactctaaatgagccaaagagagaagatgatgtaattaagacgtgttgagattggcctgggaatatcatcattttctagttgacatttgaatcctgtgtgcagatgcagaatgacaagctgcattcaaaagacaaacaatatgtcttttttttttttgcatgaagaaaaatgtctatcatttacagtttcaatagcacataatttattttctatgcattataaatggccttgcagttggctcagttgtttgttgtgttgtgaaatgttttaggattttttgtattgtgaaaatatgaatatgattggattcagaaaaattaactttctgaatttgatctgtcttcagtcttgtgaaaaagttgaacaaatttcctaatcaaagaaaaaagtatgagctccatgtttctttagtttcacaaaaatgaccataatttagtgttatttttactttatttaggcttcctggtggcttcattttattgaaattctttaaattgtttaaagtggccattattgatctctttcttctgttttggagagtttattattaaaaacatttctttgataaaatggccatcatctagtaatacctgtgtttgtttagatcttggaaatgaataagctttgataatatttgtaaatgaaccaaattattactgctaccactaacaggttgtaaatagaagactaatacttaattaaagtcaccttcctaccattagagcagaagacagctcctatagttttgtattttggcagctatgagatattttcatggtaatgtcaacatggtcaagcactttgtaccaagttattaagtaacataatttttaaaatttaaagaatgtgtcttcaactaaaaactttattctttagcatttatttatatttctctgtagggtgttccctgtgacattgtctctttagtttgctctttcaagagatacttacagatgttgagatggctgccctgcatttccagctaatctcttctgctctaaatatttaaaaacagttcttctcaaacattttcattcagatagctttctgaaagttccctatccctctttaccataattttttaaatgtagccacattgtaatagtaaacttcatatataatgagtgcttcatatttttgttatgggaaagcaatatattatgcagccagtctgtagaaacattcagatccctcttcctttactcaaatacagtttcaaaaggaagactcatgagaaatttcataaaatacaagtttttagatgtttatgctttgcctttctttttaaaggtgttttcctgctttgtagtctctaactctgaaatttaaaatatgtaaactaaagtggttttatttgtgcttaacccaatttaaactcaatgtaaaatgttatatatgcatcagtacagcattttcaacatattggcaacatattttaaatgaaaacactaaaacaattcttagtatgagacaaaactgtaaggaaaaagagtgttaataccatgatgcattaacataaaatatcaaacacacaaagtcataaaatgaaaatttacagttttacctgttcatatctagtgccccacagtgtgtgtcaaccaaaggtggcagtggctacatctgcctgttggactggtacaggttacaatatgtcctcttccattgcaaattaaagtccaaatagagaaatacttaggttttagaacacatcagaggtatttctgctgtatttttcaccttaaaaattgacacagagtttactaatagaggagtagagattgttgaccatttttaaaaaacgatagccactctttttcttttatgtttaaaactgaagttttgccaaatgggaaaattactgttacctctaccatcttaatgtagtaactttagaatttaaatttttatattactattttcctttttgttgttcacatagtcttaaggcacctatacttttaaattgactttttcatttgatattatctatatgtatgtagttgtgataatgattattttaattatattactttatactcttaatttatttagagtatttctctattgctgaatacttaagtagttttaaattttattatgataaattcctgggagggggattatttagtgaaataatatgaagaactttatgacttatgtttgccttattgcattcccaaagagttgtaacattttacagtgttaccatttgagtaggggttttatatgttgttgctaatttagtaaacataggagagaaatcaaagtttttctgatttgcttttatgtgatttatctgtatactttgttcatttatataaataaatgtcttaatggtttctata

SEQ ID NO: 195562 - DNA, 5719 bp, Homo sapiens
  Payload ID: 18603
  Gene Name: TruB pseudouridine (psi) synthase family member 2
  Uniprot ID: O95900
  ENST ID: ENST00000372890
  CDS Start-End: 335-1330
cggcctttcgaggggaaacatcgcttcacgggcagaaggcatgtaggccaagtaggcgaaggaaacgcacgcgaactgtctaccgtctacgtccaccgatccaagactctcgccatgtcacctcgccccagaaagtgtctgcaaaggacacgcaaccacgctcactcagcgccgggccctatttccttctccacagccggttttccccgaagactataaaatgcgaacctcttccggctgtggaacatggcggcgcccgtggaaaggaccacatttgggggcggggcctggcggtacttccgtccaggtccagcgggtgctgtgatcttcaagtatggggtctgctggcttgtcgcggctgcatgggcttttcgcggtctataagcccccggggctaaaatggaagcacctgcgggatacagtggagctacaacttctgaagggtctcaatgccaggaagcctcccgctcctaaacagcgtgttcgcttcttgctgggccccatggaaggcagcgaagagaaggagctgaccctcacagccaccagcgtaccctctttcatcaaccatccactggtatgtggaccagcattcgcccatctcaaggttggcgtgggacatcggttggatgcccaggcttctggagtacttgtgctcggcgtgggacatggatgcaggctcctcaccgatatgtacaatgctcatcttaccaaggattacacagtgcgtggcctcctgggcaaagctacagatgacttccgtgaggacgggaggctggtagagaagacaacctatgaccacgtgaccagagagaagctggaccgcattctggccgttatccaaggctcccatcagaaggccctggtgatgtactccaacctcgacctgaagacccaggaggcctatgagatggccgtgagaggcctgatccggcccatgaacaagtccccgatgctgataactggcatccgatgcctctactttgcacctccggaattcctcttagaggtgcagtgcatgcatgagacgcagaaagagctgcggaagttggttcatgaaatcggcctggaactaaagaccactgctgtctgcacccaagtgcggcgcacgcgcgacggcttcttcacgctagacagtgccctcctgaggacccagtgggacctaaccaacatccaggatgctatccgggctgctacccctcaggtagctgcagagctggagaagagcttgagcccggggctggacaccaagcagctccccagtccgggatggtcctgggactcccagggcccgagctctaccttggggctggagaggggtgcggggcagtgaatgcccaggcagctcctggggcagtggatggataaatagaagaactgctatgagctggacctgatagctgtgcagaaagtgagagcaggggcaccttttctacgtaagacacaaaactcaagctgtaacagaaaggtcaatggacttgacccaactgagaaggaaaaacttctgtatggaggaaaagacagtaaacatgacagactgatagaaagtattggcagaccaggcgtggtggcgggcacttgtaatcccagctactcccaaggctgaggcaggagaattgcttgagcccaggagtttaaggttgtagtgcgctagacggcgcctgtgaatagccactgcactctagtctggggaacatatgagacccctgccatctcaaaaaaaaaaaaattctcaataaactatgtgcccacgaaaattaaaaattaaaaaaaattgtaagtatttgcagtgtcattaaccaaggactaatatccatagtatacagagagcccttagaaagcaataagaagacaacgacaaaattaggcaaatgagatgaagtgtgtatcagaagaaatccaaatggctagtaagccagaaatgacactcaacctctttaatactggaagacacagatgaaaatgagatgatttttgttgtttttctgttgttgcccaggctggagtgcagtggcgccatctttgctcactgcagcctccgcctcccaggttcaagtgattctcctgcctcagcctcccaagtagctggggtcacaggcgcccgccaccacacctggctaattttttgtatccgagatgaggtttcaccatgttggcctggctcagcctcccaaagtgctgggattacaggcgtgagccaccgcacctggccgggacctcagtcttttctcttaaaggtcttcagtttattgaatgagctccgcccacaattgtggtggataatcagcgtgactcaaagtctacccattgactgattgaaatgttaatcatttttttgtttttgtttttgtttttgagacttgctttgtggcccaggctggagtgcagtggtgcgatctaggctcactgcaacctccgcttcccaggttcacgccattctcctgcctcagcctcccgagtagctgggactacaggtgcccaccaccacgcccagctaatttttttgtatttttagtagagacggtgttgcaccgtgttagccaggatggtctcaatctcctgacctcgtgatccgcctggcttggcctcccaaagtactgggattacagccgtgagccaccacacccggcctgttttggttttttttttttctgagacggagtctcactccgtcatccaggttggagtgcagtggcacaatctcagctcactgcaacctctgcctcccaggttcaagcgattctcctgcctcagcttctcaagtagctgggattacagatgtgtaccaccatgcctggctaatttttgtatttttagtagagacagggtttcaccatgttggccaggctggtctggaactcctgacctcaggtgatccgcccacctcagcctcccagagcgctgggattatgccaacctctgcctcccaaagcactgggatggcaggcatgagccaccacacccggcctgtttttgttttttagacagggtcttgctctgtcacccaggctggagtgcagtgatgcaaacatgactcactgcagctttgtcctctcaggcttaaccatcttcccacctcagcttccagaatagctgggactgcaggcgtgcacacagtatctggctaatttatttattttattttatttttgagacagggcctcgcactgtcgcccaggctagagtgcagtggcgcggtttcaactcattgcagcctcgaccctcctgggtcaagcgattcttcctgccttagtctccagagttgctgggattaccggtgtgcaccaccaagcctggctaatttttgtatttttagtagagacagggtttcactatgttggccaggctggtctggaactcctgacctgaggtgatccgcctacctcggccttccaaagtactgggaatataggcatgagccactgtttccggcctgttttttttagacagagtcttgctctgtcacccaggctggagtgcaatggtgcaaacatgactcactgcaccgtcatcctcccaggctcaaccatcttcccacctcaccctccagaatagctgggactacaggcgtgcaccacgatgcctggctaaatatttttttccagctaattttattatttttttttgagatggagtcttgctctgtcacccaggctggagtgcaatggcacaatcttggctcactgcaacctccgcctcccagggtcaagtgattctcctgcctcagccacccaagtagctgggattataggcgttcaccaccacgcccagctaacttttgtatttttagtagagacggggtttcaccatgttggacatgctggtctcaaagtcctgacctcaggtgatctgcccgcttcagcctcccaaagtgctgggattacaggcgtgagccaccatacctggcccacctgagatcaggagttcaagaccagcctggccaacatagtgaaaccctgtctctactaaaaatacaaaaattagccagctatggtgacgcacttctgtaatcctagctacttgggaggctgaggcacaagaatcgctgaagcccaggaggtggagattgccattagctgagattgtgcccctgcactccagtctggacgagagagtgagactctgtctcagaaaagaaaaaaaaaaaggctgggcacggtggctcacgcctgtaatcccagcactttgggaggccagggtgggcggatcacgaggtcaggagttcaagaccagcctgaccaacatggtgaaacctgtctctactaaaaatacaaaattagccgggcgtgcttgcacgtgcctgtagtcctggctacccgggaggctgatgcagaataactggaactcgggaggcggagcttgcagtgagtggagattgcgccactgcactccagcctaggtgacagagtgagactctgtctcaaaaaaaaaaaaaaaagagaaaaatcagaacaaaatcagcaatatttagacaagcagaatccaatgaaatggtgaggaaagctgggtgggagtggagggtatcagcaaaactcagttctttggaaaaattaggtaacttgaacgtagggcacatgggctgtcacaccaccccatttagagcccttattggcatagagatgataaaagtggactctgtgatggcctctcatgatctcaggatagcaggataggggaactctgagtcatggccaaaataattggtcaatgtacagcctcagacagctgggaataccaccccaaatcacttggataaggagatgttttccttatcctgtgtctttaactctgagacggatggagttgaacaatcaacgattgttaaaaatgtaccaaatgtgtaagcatcatgaggtgtttaagctgagcttttaaattaaaattctgctgggtgtggcggctcatgcctgtaatcccagcactttgcgatccccacacaggaggattgcttgagcccagaagtttgagaccagcctgggcaacacaaggagaccctgtctctacaaaaaacaaacaaacaaacaaaaaagccgggggtgttggtgtgtgcctgtagtcccagctactagggaggctgagatgggaggatcgcttgaacctagcaagtcaaggcggcagtaaatggagatctgtactccagcctgggcaacagagcgagaccctatgtcagaaaaaaagaaaaagccacccagcaggctgagcgtggtggctcacgcctgtaatccctgcactttgggaagccaaagcaggtgaatcacttgaggtcaggagttcgagaccagcctggccaatatggtgaaaccctgtctctaccaaaaatacaaaaattagccgggcatggtggcgcttgtctgtagtccagctacagctactccagatctgggctgaggtgggagaatcatttgaacccaggaggtggaggttgcagtgagctgaaatcacacgactgtactctagcctgggtgacagggtgagaccctatctcaaaacaaacaaacaaaaaccccaccagcaaccttgctgacaaatccacaggcccccacgtctgccaattgcctgcctgtatgaactgggcacctgggggaggggcgtggcccccaggctactcatcttggctttcacagccaaagggcctgggtggaacctcagcttactgtgtttactgactgggtaatgtggcctctgaagctgtcacctatctataaaatggggattaaaacga

SEQ ID NO: 195563 - DNA, 3644 bp, Homo sapiens
  Payload ID: 18604
  Gene Name: trypsin domain containing 1
  Uniprot ID: Q2T9J0
  ENST ID: ENST00000287078
  CDS Start-End: 1-1701
atgagaaggcagtgggggtctgccatgagggcggccgagcaggcgggctgcatggtgagcgcctcccgggccggacagcccgaggcgggcccgtggagctgcagcggggtaatcctgagccgtagcccgggcctggtgctttgccacgggggcatcttcgtccccttcctgcgagctggcagcgaagtcctgaccgcggccggcgccgtcttcctgcctggcgacagttgcagggacgacctgcgcctgcacgtgcagtgggccccaacggccgcgggtcccgggggcggcgcggagcggggccgcccagggctgtgcacgccccagtgcgcgagcctcgagcccggcccacctgccccgtcccgcgggcgtcccctgcagccccggcttcctgctgagctgctgctgctgctgagctgcccggccttctgggcccacttcgcgcgcctcttcggggacgaggcagcggaacagtggcgcttctcgagcgcggcgcgggatgacgaagtgtcggaggacgaggaggcggatcaactgagagcgctgggctggtttgcgctgctgggcgtgcggctaggccaggaggaggtggaggaggagcgcgggccagccatggcggtgtcgcctctcggggccgtgcccaagggtgcgccattgctggtctgcggctcccctttcggcgccttctgccccgacatctttctcaacacgctgagctgcggggtgctcagcaacgtggccggcccactgctgcttaccgacgcacgctgcctgcccggcaccgagggcggcggcgtgttcaccgcgcggcccgcgggggcgctggtggcgctggtggtggcgccgctctgttggaaggccggcgaatgggtgggcttcacgctgctctgcgccgccgccccccttttccgcgccgcccgcgacgcgcttcaccgcctgccgcacagcaccgctgccctggccgcccttctgccgccagaggtgggcgtcccgtggggtctgcccctccgagactccgggcccctgtgggcagccgcggcagtgttggtggagtgcggcaccgtatggggctccggagtggctgtggcaccccgccttgtagtgacctgtcggcacgtgtcccctcgggaagcagccagggtcctggtgcgctccaccacccccaagagtgtggccatctggggccgtgtggtatttgccactcaggagacatgtccctatgacatagcagtggtgagcctggaggaggacctggatgatgtccccatccctgtgcccgctgagcacttccatgaaggcgaggctgtgagtgtggtgggctttggcgtctttggccagtcttgcgggccctcggtgacctcaggcatcctttcggctgtggtgcaggtgaatggcacgcccgtaatgctgcagaccacgtgtgctgtgcacagcggctccagtgggggacccctcttctccaaccactcaggaaacctccttggcataatcaccagcaacacccgggacaataatacgggggccacctacccccacctgaacttcagcattcccatcacggtgctccagccggccctgcagcagtacagccagacccaagacctaggtggcctccgtgagctggaccgcgctgctgagccagtcagggtggtgtggcggttgcagcggcccctggcagaggccccgcggagcaagctctgaggctgtgttaccacctttggaaagaagagtgacctttttctgctgtaggaagtgatgttgaggtgacggtggcctcaggattcagggcccagcccctgcaggggcccaggctgcctctcatctccacccactgactgcagactgggctttgggctctggggcaaacttctcttcagccccatggatccttaacctggcagcccgttttggggtgctttcttgagcccccagttctctgtcccctagcactagactcagctgtattgtttttccttctggggagcccactccaactgcacagaagttctgggcctgacaggtagattccagctggaaggcaggcccgtgcctggttttgcgtctgttcccctgagggccatcgtcatcctggagcttcaatggggccttggctcctgtctgcctctcagtcagagtcagggctgacaaaggactcagcttccttagcatctcagcagaaaccttgctctgaagaccagagacagaagggacagaaacaggagtgcctcctgctgtgccaggcccatgggcagtgcaggcagatccctgaaggtcagcactcctgggtcttcatatgccaacaggggcgctcttgacactgtgccttcattttccagcccacagcctgggtctcagggatcttgaggggtagaacatgtctggttggggcttgggaataaacatgatctattgaaaaacctctgtatttatatatcaaattgtttctttttttcaggagttgaactgggaataggcaagtaccaggcaaagaaacacaccctttccttttttttttttttttttctttagagctgtggtcttgctctctcacccaggctggagtgcagtgttgcgatcacagctcactgcagcctcaaactcctgggctccaggagacctcctgcctcagcctcctgaatagctgggactacagtcgcgcaccaccacgcctggctaattttttatttttgtagaaatggggtattgctttgttgcccgtgctggcttcagccttctggtttcaagcagtcctcctgcctcagcttcccaaagtgctgggattacaggtgtgagccactgtgcccaacccagaaatacaccctttctgtgctgttttctcagcagggtgtgagctcacgggatacggtcctgccagactggccctcatagctggtcatgtgccagtcagagctgggtggggcttgcaggtcccggaaggtggtggtcttgacctggcagcagatgcttaaagaatgcctaaggtgggtggcagttggggagttcaagggtgaatgaggccagggcagcccccaggagctgaggccaactctttgagtcaggactgtgccgtgtgcccagggccttgcatgtgtgggccctcgagtgatttctactggcaggctgaaagccctgtgaggggcggctgtgggcggaggccacgcaggaagagtgcttaggagtaacttgtttctaacacctgtgtgctgagtgccaatgctgggtgtggtgttatgatatatattggttttcatccagcattcctgactcgtaactctcatagtccttgttccagtctttgttagaatactgggtatgttagggcttgggacaggcctctgacctctgggtatcctttcactaatgttcgcccacctttttcacagtgggtcctaaagaccttcccatgagagggtctcaatcctaggggaaggaatgttgatgtcatgaaccttccataaaaacccaagaggacagggttcagagagcttctggatagctgaacacctggcacttcctggagtgtggcgtgcccagggagggcacggaagctctgcactccttccccttccctcattccttgctctatgtgcatctcttcatctgtatcctttgcgatatcctttataataaaccggtaaacataa

SEQ ID NO: 195564 - DNA, 3397 bp, Homo sapiens
  Payload ID: 18604
  Gene Name: trypsin domain containing 1
  Uniprot ID: Q2T9J0
  ENST ID: ENST00000335494
  CDS Start-End: 71-1267
ccgggtaggggtcctcgctcgctagcttgctgtttctcggagaagctcccgagtgtccggcctagaggccatgagaaggcagtgggggtctgccatgagggcggccgagcaggcgggctgcatggtgagcgcctcccgggccggacagcccgaggcgggcccgtggagctgcagcggggtaatcctgagccgtagcccgggcctggtgctttgccacgggggcatcttcgtccccttcctgcgagctggcagcgaagtcctgaccgcggccggcgccgtcttcctgcctggcgacagttgcagggacgacctgcgcctgcacgtgcagtgggccccaacggccgcgggtcccgggggcggcgcggagcggggccgcccagggctgtgcacgccccagtgcgcgagcctcgagcccggcccacctgccccgtcccgcgggcgtcccctgcagccccggcttcctgctgagctgctgctgctgctgagctgcccggccttctgggcccacttcgcgcgcctcttcggggacgaggcagcggaacagtggcgcttctcgagcgcggcgcgggatgacgaagtgtcggaggacgaggaggcggatcaactgagagcgctgggctggtttgcgctgctgggcgtgcggctaggccaggaggaggtggaggaggagcgcgggccagccatggcggtgtcgcctctcggggccgtgcccaagggtgcgccattgctggtctgcggctcccctttcggcgccttctgccccgacatctttctcaacacgctgagctgcggggtgctcagcaacgtggccggcccactgctgcttaccgacgcacgctgcctgcccggcaccgagggcggcggcgtgttcaccgcgcggcccgcgggggcgctggtggcgctggtggtggcgccgctctgttggaaggccggcgaatgggtgggcttcacgctgctctgcgccgccgccccccttttccgcgccgcccgcgacgcgcttcaccgcctgccgcacagcaccgctgccctggccgcccttctgccgccagaggtgggcgtcccgtggggtctgcccctccgagactccgggcccctgtgggcagccgcggcagtgttggtggagtgcggcaccgtatggggctccggagtggctgtggcaccccgccttgtagtgacctgtcggcacgtgtcccctcgggaagcagccagggtcctggtgcgctccaccacccccaagcataatcaccagcaacacccgggacaataatacgggggccacctacccccacctgaacttcagcattcccatcacggtgctccagccggccctgcagcagtacagccagacccaagacctaggtggcctccgtgagctggaccgcgctgctgagccagtcagggtggtgtggcggttgcagcggcccctggcagaggccccgcggagcaagctctgaggctgtgttaccacctttggaaagaagagtgacctttttctgctgtaggaagtgatgttgaggtgacggtggcctcaggattcagggcccagcccctgcaggggcccaggctgcctctcatctccacccactgactgcagactgggctttgggctctggggcaaacttctcttcagccccatggatccttaacctggcagcccgttttggggtgctttcttgagcccccagttctctgtcccctagcactagactcagctgtattgtttttccttctggggagcccactccaactgcacagaagttctgggcctgacaggtagattccagctggaaggcaggcccgtgcctggttttgcgtctgttcccctgagggccatcgtcatcctggagcttcaatggggccttggctcctgtctgcctctcagtcagagtcagggctgacaaaggactcagcttccttagcatctcagcagaaaccttgctctgaagaccagagacagaagggacagaaacaggagtgcctcctgctgtgccaggcccatgggcagtgcaggcagatccctgaaggtcagcactcctgggtcttcatatgccaacaggggcgctcttgacactgtgccttcattttccagcccacagcctgggtctcagggatcttgaggggtagaacatgtctggttggggcttgggaataaacatgatctattgaaaaacctctgtatttatatatcaaattgtttctttttttcaggagttgaactgggaataggcaagtaccaggcaaagaaacacaccctttccttttttttttttttttttctttagagctgtggtcttgctctctcacccaggctggagtgcagtgttgcgatcacagctcactgcagcctcaaactcctgggctccaggagacctcctgcctcagcctcctgaatagctgggactacagtcgcgcaccaccacgcctggctaattttttatttttgtagaaatggggtattgctttgttgcccgtgctggcttcagccttctggtttcaagcagtcctcctgcctcagcttcccaaagtgctgggattacaggtgtgagccactgtgcccaacccagaaatacaccctttctgtgctgttttctcagcagggtgtgagctcacgggatacggtcctgccagactggccctcatagctggtcatgtgccagtcagagctgggtggggcttgcaggtcccggaaggtggtggtcttgacctggcagcagatgcttaaagaatgcctaaggtgggtggcagttggggagttcaagggtgaatgaggccagggcagcccccaggagctgaggccaactctttgagtcaggactgtgccgtgtgcccagggccttgcatgtgtgggccctcgagtgatttctactggcaggctgaaagccctgtgaggggcggctgtgggcggaggccacgcaggaagagtgcttaggagtaacttgtttctaacacctgtgtgctgagtgccaatgctgggtgtggtgttatgatatatattggttttcatccagcattcctgactcgtaactctcatagtccttgttccagtctttgttagaatactgggtatgttagggcttgggacaggcctctgacctctgggtatcctttcactaatgttcgcccacctttttcacagtgggtcctaaagaccttcccatgagagggtctcaatcctaggggaaggaatgttgatgtcatgaaccttccataaaaacccaagaggacagggttcagagagcttctggatagctgaacacctggcacttcctggagtgtggcgtgcccagggagggcacggaagctctgcactccttccccttccctcattccttgctctatgtgcatctcttcatctgtatcctttgcgatatcctttataataaaccggtaaacataa

SEQ ID NO: 195565 - DNA, 1175 bp, Homo sapiens
  Payload ID: 18605
  Gene Name: tryptase alpha/beta 1
  Uniprot ID: Q15661
  ENST ID: ENST00000338844
  CDS Start-End: 34-861
cccactgggtagaaggaacagggagcggccaggatgctgaatctgctgctgctggcgctgcccgtcctggcgagccgcgcctacgcggcccctgccccaggccaggccctgcagcgagtgggcatcgtcgggggtcaggaggcccccaggagcaagtggccctggcaggtgagcctgagagtccacggcccatactggatgcacttctgcgggggctccctcatccacccccagtgggtgctgaccgcagcgcactgcgtgggaccggacgtcaaggatctggccgccctcagggtgcaactgcgggagcagcacctctactaccaggaccagctgctgccggtcagcaggatcatcgtgcacccacagttctacaccgcccagatcggagcggacatcgccctgctggagctggaggagccggtgaacgtctccagccacgtccacacggtcaccctgccccctgcctcagagaccttccccccggggatgccgtgctgggtcactggctggggcgatgtggacaatgatgagcgcctcccaccgccatttcctctgaagcaggtgaaggtccccataatggaaaaccacatttgtgacgcaaaataccaccttggcgcctacacgggagacgacgtccgcatcgtccgtgacgacatgctgtgtgccgggaacacccggagggactcatgccagggcgactccggagggcccctggtgtgcaaggtgaatggcacctggctgcaggcgggcgtggtcagctggggcgagggctgtgcccagcccaaccggcctggcatctacacccgtgtcacctactacttggactggatccaccactatgtccccaaaaagccgtgagtcaggcctgggttggccacctgggtcactggaggaccaacccctgctgtccaaaacaccactgcttcctacccaggtggcgactgccccccacaccttccctgccccgtcctgagtgccccttcctgtcctaagccccctgctctcttctgagccccttcccctgtcctgaggacccttccctatcctgagcccccttccctgtcctaagcctgacgcctgcaccgggccctccagccctcccctgcccagatagctggtggtgggcgctaatcctcctgagtgctggacctcattaaagtgcatggaaatca

SEQ ID NO: 195566 - DNA, 1357 bp, Homo sapiens
  Payload ID: 18605
  Gene Name: tryptase alpha/beta 1
  ENST ID: ENST00000461509
  CDS Start-End: 195-1043
ccagggtaagtccccactctcagagaccctgacatcagcgtcacctggagcagagtggcccagcctcagactcagagcaccaagacccaggcccgcaggcctggacccaccccggtccccccgtcccagctccattcttcaccccacaatctgtagcccccagccctgccctgtgaggcccggccaggcccacgatgctcctccttgctccccagatgctgaatctgctgctgctggcgctgcccgtcctggcgagccgcgcctacgcggcccctgccccaggccaggccctgcagcgagtgggcatcgtcgggggtcaggaggcccccaggagcaagtggccctggcaggtgagcctgagagtccacggcccatactggatgcacttctgcgggggctccctcatccacccccagtgggtgctgaccgcagcgcactgcgtgggaccggacgtcaaggatctggccgccctcagggtgcaactgcgggagcagcacctctactaccaggaccagctgctgccggtcagcaggatcatcgtgcacccacagttctacaccgcccagatcggagcggacatcgccctgctggagctggaggagccggtgaacgtctccagccacgtccacacggtcaccctgccccctgcctcagagaccttccccccggggatgccgtgctgggtcactggctggggcgatgtggacaatgatgagcgcctcccaccgccatttcctctgaagcaggtgaaggtccccataatggaaaaccacatttgtgacgcaaaataccaccttggcgcctacacgggagacgacgtccgcatcgtccgtgacgacatgctgtgtgccgggaacacccggagggactcatgccagggcgactccggagggcccctggtgtgcaaggtgaatggcacctggctgcaggcgggcgtggtcagctggggcgagggctgtgcccagcccaaccggcctggcatctacacccgtgtcacctactacttggactggatccaccactatgtccccaaaaagccgtgagtcaggcctgggttggccacctgggtcactggaggaccaacccctgctgtccaaaacaccactgcttcctacccaggtggcgactgccccccacaccttccctgccccgtcctgagtgccccttcctgtcctaagccccctgctctcttctgagccccttcccctgtcctgaggacccttccctatcctgagcccccttccctgtcctaagcctgacgcctgcaccgggccctccagccctcccctgcccagatagctggtggtgggcgctaatcctcctgagtgctggacctcattaaagtgcatggaaatca

SEQ ID NO: 195567 - DNA, 918 bp, Homo sapiens
  Payload ID: 18605
  Gene Name: tryptase alpha/beta 1
  ENST ID: ENST00000561736
  CDS Start-End: 1-642
tactggatgcacttctgcgggggctccctcatccacccccagtgggtgctgaccgcagcgcactgcgtgggaccggtgcaactgcgggagcagcacctctactaccaggaccagctgctgccggtcagcaggatcatcgtgcacccacagttctacaccgcccagatcggagcggacatcgccctgctggagctggaggagccggtgaacgtctccagccacgtccacacggtcaccctgccccctgcctcagagaccttccccccggggatgccgtgctgggtcactggctggggcgatgtggacaatgatgagcgcctcccaccgccatttcctctgaagcaggtgaaggtccccataatggaaaaccacatttgtgacgcaaaataccaccttggcgcctacacgggagacgacgtccgcatcgtccgtgacgacatgctgtgtgccgggaacacccggagggactcatgccagggcgactccggagggcccctggtgtgcaaggtgaatggcacctggctgcaggcgggcgtggtcagctggggcgagggctgtgcccagcccaaccggcctggcatctacacccgtgtcacctactacttggactggatccaccactatgtccccaaaaagccgtgagtcaggcctgggttggccacctgggtcactggaggaccaacccctgctgtccaaaacaccactgcttcctacccaggtggcgactgccccccacaccttccctgccccgtcctgagtgccccttcctgtcctaagccccctgctctcttctgagccccttcccctgtcctgaggacccttccctatcctgagcccccttccctgtcctaagcctgacgcctgcaccgggccctccagccctcccctgcccagatagctggtggtgggcgctaatcc

SEQ ID NO: 195568 - DNA, 1352 bp, Homo sapiens
  Payload ID: 18606
  Gene Name: tryptase beta 2 (gene/pseudogene)
  ENST ID: ENST00000612142
  CDS Start-End: 191-1039
ggtaagtccccactctcagagaccctgacatcagcgtcacctggagcagagtggcccagcctcagactcagagcaccaagacccaggcctgcaggcctggacccaccccggtccccccgtcccagctccattcttcaccccacaatctgtagcccccagccctgccctgtgaggcccggccaggcccacgatgctcctccttgctccccagatgctgaatctgctgctgctggcgctgcccgtcctggcgagccgcgcctacgcggcccctgccccaggccaggccctgcagcgagtgggcatcgttgggggtcaggaggcccccaggagcaagtggccctggcaggtgagcctgagagtccgcgaccgatactggatgcacttctgcgggggctccctcatccacccccagtgggtgctgaccgcagcgcactgcgtgggaccggacgtcaaggatctggccgccctcagggtgcaactgcgggagcagcacctctactaccaggaccagctgctgccggtcagcaggatcatcgtgcacccacagttctacaccgcccagatcggagcggacatcgccctgctggagctggaggagccggtgaacgtctccagccacgtccacacggtcaccctgccccctgcctcagagaccttccccccggggatgccgtgctgggtcactggctggggcgatgtggacaatgatgagcgcctcccaccgccatttcctctgaagcaggtgaaggtccccataatggaaaaccacatttgtgacgcaaaataccaccttggcgcctacacgggagacgacgtccgcatcgtccgtgacgacatgctgtgtgccgggaacacccggagggactcatgccagggcgactccggagggcccctggtgtgcaaggtgaatggcacctggctgcaggcgggcgtggtcagctggggcgagggctgtgcccagcccaaccggcctggcatctacacccgtgtcacctactacttggactggatccaccactatgtccccaaaaagccgtgagtcaggcctggggtgtccacctgggtcactggagagccagcccctcctgttcaaaacaccactgcttcctacccaggtggcgactgccccccacaccttccctgccccgtcctgagtgccccttcctgtcctaagccccctgctctcttctgagccccttcccctgtcctgaggacccttccccatcctgagcccccttccctgtcctaagcctgacgcctgcaccgggccctccggccctcccctgcccaggcagctggtggtgggcgctaatcctcctgagtgctggacctcattaaagtgcatggaaatc

SEQ ID NO: 195569 - DNA, 1165 bp, Homo sapiens
  Payload ID: 18606
  Gene Name: tryptase beta 2 (gene/pseudogene)
  Uniprot ID: P20231
  ENST ID: ENST00000606293
  CDS Start-End: 24-851
agaaggaacagggagcggccaggatgctgaatctgctgctgctggcgctgcccgtcctggcgagccgcgcctacgcggcccctgccccaggccaggccctgcagcgagtgggcatcgttgggggtcaggaggcccccaggagcaagtggccctggcaggtgagcctgagagtccgcgaccgatactggatgcacttctgcgggggctccctcatccacccccagtgggtgctgaccgcagcgcactgcgtgggaccggacgtcaaggatctggccgccctcagggtgcaactgcgggagcagcacctctactaccaggaccagctgctgccggtcagcaggatcatcgtgcacccacagttctacaccgcccagatcggagcggacatcgccctgctggagctggaggagccggtgaacgtctccagccacgtccacacggtcaccctgccccctgcctcagagaccttccccccggggatgccgtgctgggtcactggctggggcgatgtggacaatgatgagcgcctcccaccgccatttcctctgaagcaggtgaaggtccccataatggaaaaccacatttgtgacgcaaaataccaccttggcgcctacacgggagacgacgtccgcatcgtccgtgacgacatgctgtgtgccgggaacacccggagggactcatgccagggcgactccggagggcccctggtgtgcaaggtgaatggcacctggctgcaggcgggcgtggtcagctggggcgagggctgtgcccagcccaaccggcctggcatctacacccgtgtcacctactacttggactggatccaccactatgtccccaaaaagccgtgagtcaggcctggggtgtccacctgggtcactggagagccagcccctcctgttcaaaacaccactgcttcctacccaggtggcgactgccccccacaccttccctgccccgtcctgagtgccccttcctgtcctaagccccctgctctcttctgagccccttcccctgtcctgaggacccttccccatcctgagcccccttccctgtcctaagcctgacgcctgcaccgggccctccggccctcccctgcccaggcagctggtggtgggcgctaatcctcctgagtgctggacctcattaaagtgcatggaaatca

SEQ ID NO: 195570 - DNA, 1210 bp, Homo sapiens
  Payload ID: 18606
  Gene Name: tryptase beta 2 (gene/pseudogene)
  ENST ID: ENST00000611196
  CDS Start-End: 24-902
agaaggaacagggagcggccaggatgctgaatctgctgctgctggcgctgcccgtcctggcgagccgcgcctacgcggcccctgccccaggccaggccctgcagcgagtgggcatcgttgggggtcaggaggcccccaggagcaagtggccctggcaggtgagcctgagagtccgcgaccgatactggatgcacttctgcgggggctccctcatccacccccagtgggtgctgaccgcagcgcactgcgtgggaccggacgtcaaggatctggccgccctcagggtgcaactgcgggagcagcacctctactaccaggaccagctgctgccggtcagcaggatcatcgtgcacccacagttctacaccgcccagatcggagcggacatcgccctgctggagctggaggagccggtgaacgtctccagccacgtccacacggtcaccctgccccctgcctcagagaccttccccccggggatgccgtgctgggtcactggctggggcgatgtggacaatgatgagcgcctcccaccgccatttcctctgaagcaggtgaaggtccccataatggaaaaccacatttgtgacgcaaaataccaccttggcgcctacacgggagacgacgtccgcatcgtccgtgacgacatgctgtgtgccgggaacacccggagggactcatgccagggcgactccggagggcccctggtgtgcaaggtgaatggcacctggctgcaggcgggcgtggtcagctggggcgagggctgtgcccagcccaaccggcctggcatctacacccgtgtcacctactacttggactggatccaccactatgtccccaaaaagccagatggggtttcgccatgttggccagtctggtctcgaactcctgacctcaagtgatccgcccgcctcggcctcccaaagtgctgggatgacaggcgtgagccaccgcacccggcctgagtttgacattttcaaattcattttgaggtctttctctacatcaatagatgcagagatgtgcatttagtctcccgaatctctgcaaatgacctctgtcctcacaaggggtggactcaactcccagtgccctctccagccccacgtgacctctgcctctgcagcccctgaaggcccatccctcggctcctgttctgcaggcccagcgtcttgttaatgaagatggacctggaactcgggcccttctt

SEQ ID NO: 195571 - DNA, 1499 bp, Homo sapiens
  Payload ID: 18607
  Gene Name: tryptase delta 1
  Uniprot ID: Q9BZJ3
  ENST ID: ENST00000211076
  CDS Start-End: 149-877
ggagcagagtggcccagcctcagactcagagcaccaagacccaggcccgcaggcctggacccaccccggtccccccgtcccagctccattcttcaccccacaatctgtagcccccagccctgccctgtgaggcccggccaggcccacgatgctcctccttgctccccagatgctgagcctgctgctgctggcgctgcccgtcctggcgagcccggcctacgtggcccctgccccaggccaggccctgcagcaaacgggcattgttggggggcaggaggcccccaggagcaagtggccctggcaggtgagcctgagagtccgcggcccatactggatgcacttctgcgggggctccctcatccacccccagtgggtgctaaccgcggcgcactgcgtggaaccggacatcaaggatctggccgccctcagggtgcaactgcgggagcagcacctctactaccaggaccagctgctgccggtcagcaggatcatcgtgcacccacagttctacatcatccagaccggggcggacatcgccctgctggagctggaggagcccgtgaacatctccagccacatccacacggtcacgctgccccctgcctcggagaccttccccccggggatgccgtgctgggtcactggctggggcgacgtggacaataatgtgcacctgccgccgccatacccgctgaaggaggtggaagtccccgtagtggaaaaccacctttgcaacgcggaatatcacaccggcctccatacgggccacagctttcaaatcgtccgcgatgacatgctgtgtgcggggagcgaaaatcacgactcctgccagggtgactctggagggcccctggtctgcaaggtgaatggcacctaactgcaggcgggcgtggtcagctgggaggagagctgtgcccagcccaaccggcctggcatctacacccgtgtcacctactacttggactggatccaccactatgtccccaagaagccctgagccaggcctggggtgtccacccgggtcactggagggccagcccctcctgtccaaaccaccactgcttcctacccaggtggtgactgccccccacaccttcccccatcctgagtcccctctcccatcctgagccctgtcccctgtcctgagccccctcccctttcttgatcccctcccccatcctgagcccctcccccaccctgagccccttcccctttcttgagccccctcccccaccctgagccccctcccctttcttgagtccctcctccatcctgagccccctcccctttcttgagtccctcctccatcctgagccccctcccctttcttgagcccctcctccatcctgagccccctcctccatcctgccccctcctccatcctgagcctcctccccaaccctgaatccgcccctcccggcccctccggccctcccctgcccaggcagctggtggtggacgcccatcctctctagtgctgactctcattaaagtgcatg

SEQ ID NO: 195572 - DNA, 896 bp, Homo sapiens
  Payload ID: 18607
  Gene Name: tryptase delta 1
  ENST ID: ENST00000397534
  CDS Start-End: 34-741
cccgctgggtagaaggaacagggagtggccaggatgctgagcctgctgctgctggcgctgcccgtcctggcgagcccggcctacgtggcccctgccccaggccaggccctgcagcaaacgggcattgttggggggcaggaggcccccaggagcaagtggccctggcaggtgagcctgagagtccgcggcccatactggatgcacttctgcgggggctccctcatccacccccagtgggtgctaaccgcggcgcactgcgtggaaccggacatcaaggatctggccgccctcagggtgcaactgcgggagcagcacctctactaccaggaccagctgctgccggtcagcaggatcatcgtgcacccacagttctacatcatccagaccggggcggacatcgccctgctggagctggaggagcccgtgaacatctccagccacatccacacggtcacgctgccccctgcctcggagaccttccccccggggatgccgtgctgggtcactggctggggcgacgtggacaataatgtgcacctgccgccgccatacccgctgaaggaggtggaagtccccgtagtggaaaaccacctttgcaacgcggaatatcacaccggcctccatacgggccacagctttcaaatcgtccgcgatgacatgctgtgtgcggggagcgaaaatcacgactcctgccagggtgactctggagggcccctggtctgcaaggtgaatggcacctaactgcaggcgggcgtggtcagctgggaggagagctgtgcccagcccaaccggcctggcatctacacccgtgtcacctactacttggactggatccaccactatgtccccaagaagccctgagccaggcctggggtgtccacccgggtcactggagg

SEQ ID NO: 195573 - DNA, 1108 bp, Homo sapiens
  Payload ID: 18608
  Gene Name: tryptase gamma 1
  Uniprot ID: Q9NRR2
  ENST ID: ENST00000234798
  CDS Start-End: 6-971
acaccatggcccttggggcctgtggcctcctgctgctcctggctgtgcccggtgtgtccctcaggactttgcagccagggtgtggccggccgcaggtttcggatgcaggcggccggatcgtggggggtcacgctgccccggccggcgcatggccatggcaggccagcctccgcctgcggagggtgcacgtgtgcggcgggtcactgctcagcccccagtgggtgctcacagctgcccactgcttctccgggtccctgaactcatccgactaccaggtgcacctgggggaactggagatcactctgtctccccacttctccaccgtgaggcagatcatcctgcactccagcccctcaggacagccggggaccagcggggacatcgccctggtggagctcagtgtccccgtgaccctctccagccggatcctgcccgtctgcctcccggaggcctcagatgacttctgccctgggatccggtgctgggtgaccggctggggctatacgcgggagggagagcctctgccacccccgtacagcctgcgggaggtgaaagtctccgtggtggacacagagacctgccgccgggactatcccggccccgggggcagcatccttcagcccgacatgctgtgtgcccggggccccggggatgcctgccaggacgactccggggggcctctggtctgccaggtgaacggtgcctgggtgcaggctggcactgtgagctggggtgagggctgcggccgccccaacaggccgggagtctacactcgtgtccctgcctacgtgaactggatccgccgccacatcacagcatcagggggctcagagtctgggtaccccaggctccccctcctggctggcttcttcctccccggcctcttccttctgctagtctcctgtgtcctgctggccaagtgcctgctgcacccatctgcggatggtactcccttccccgcccctgactgatggcaggaatccaagtgcatttcttaaataagttactatttattccgctccgccccctccctctcccttgagaagctgagtcttctgcatcagattattgcaacatttaacctgaatttaaaagcacacgaaacaaa

SEQ ID NO: 195574 - DNA, 665 bp, Homo sapiens
  Payload ID: 18609
  Gene Name: tryptophan 2,3-dioxygenase
  ENST ID: ENST00000506072
  CDS Start-End: 470-665
ccatctgctgactcaacttgctagtatcgggcagcagccaggaccacagctcctccagctcctttgtgaccttttccttcagcttcttcaaatactgggttagacacctgcctggaatatagtgagtgttaggataaagtaaacatagaccagaggaagaagtcaaatacgcatttgcctcagatatacttttaaaaaactccccgtagaaggcagcgaagaagacaaatcacaaactggtgtgaatagagccagcaaaggaggtcttatctatgggaactacctgcatttggaaaaagttttgaatgcacaagaactgcaaagtgaaacaaaaggaaataaaatccatgatgaacatctttttatcataactcatcaagcttatgaactctggtttaagcaaatcctctgggagttggattctgttcgagagatctttcagaatggccatgtcagagatgaaaggaacatgcttaaggttgtttctcggatgcaccgagtgtcagtgatcctgaaactgctggtgcagcagttttccattctggagacgatgacagccttggacttcaatgacttcagagagtacttatctccagcatcaggcttccagagtttgcaattccgactattagaaaacaagataggtgttcttcagaacatgagag

SEQ ID NO: 195575 - DNA, 557 bp, Homo sapiens
  Payload ID: 18609
  Gene Name: tryptophan 2,3-dioxygenase
  ENST ID: ENST00000507590
  CDS Start-End: 410-557
gactcaacttgctagtatcgggcagcagccaggaccacagctcctccagctcctttgtgaccttttccttcagcttcttcaaatactgggttagacacctgcctggaatatagtgagtgttagatatacttttaaaaaactccccgtagaaggcagcgaagaagacaaatcacaaactggtgtgaatagagccagcaaaggaggtcttatctatgggaactacctgcatttggaaaaagttttgaatgcacaagaactgcaaagtgaaacaaaaggaaataaaatccatgatgaacatctttttatcataactcatcaagcttatgaactctggtttaagcaaatcctctgggagttggattctgttcgagagatctttcagaatggccatgtcagagatgaaaggaacatgcttaaggttgtttctcggatgcaccgagtgtcagtgatcctgaaactgctggtgcagcagttttccattctggagacgatgacagccttggacttcaatgacttcagagagtacttatctccagcatcaggcttccagagtttgc

SEQ ID NO: 195576 - DNA, 1701 bp, Homo sapiens
  Payload ID: 18609
  Gene Name: tryptophan 2,3-dioxygenase
  Uniprot ID: P48775
  ENST ID: ENST00000536354
  CDS Start-End: 65-1285
aaggtcaatgatagcatctgcctagagtcaaacctccgtgcttctcagacagtgccttttcaccatgagtgggtgcccatttttaggaaacaactttggatatacttttaaaaaactccccgtagaaggcagcgaagaagacaaatcacaaactggtgtgaatagagccagcaaaggaggtcttatctatgggaactacctgcatttggaaaaagttttgaatgcacaagaactgcaaagtgaaacaaaaggaaataaaatccatgatgaacatctttttatcataactcatcaagcttatgaactctggtttaagcaaatcctctgggagttggattctgttcgagagatctttcagaatggccatgtcagagatgaaaggaacatgcttaaggttgtttctcggatgcaccgagtgtcagtgatcctgaaactgctggtgcagcagttttccattctggagacgatgacagccttggacttcaatgacttcagagagtacttatctccagcatcaggcttccagagtttgcaattccgactattagaaaacaagataggtgttcttcagaacatgagagtcccttataacagaagacattatcgtgataacttcaaaggagaagaaaatgaactgctacttaaatctgagcaggaaaagacacttctggaattagtggaggcatggctggaaagaactccaggtttagagccacatggatttaacttctggggaaagcttgaaaaaaatatcaccagaggcctggaagaggaattcataaggattcaggctaaagaagagtctgaagaaaaagaggaacaggtggctgaatttcagaagcaaaaagaggtgctactgtccttatttgatgagaaacgtcatgaacatctccttagtaaaggtgaaagacggctgtcatacagagcacttcagggagcattgatgatatatttttacagggaagagcctaggttccaggtgccttttcagttgctgacttctcttatggacatagattcactgatgaccaaatggagatataaccatgtgtgcatggtgcacagaatgctgggcagcaaagctggcaccggtggttcctcaggctatcactacctgcgatcaactgtgagtgataggtacaaggtatttgtagatttatttaatctttcaacatacctgattccccgacactggataccgaagatgaacccaaccattcacaaatttctatatacagcagaatactgtgatagctcctacttcagcagtgatgaatcagattaaaatcgtctgcaaaatctatgaagaatactggtttcacagcctattttttattttctatggattttcataaatacagtttgaatatatgtatgcatatattgttcagcaccacgatgctctgatttaattctagaaacaatttgattacctcttgtttgtgacaagactaagcattaagatgagaaagaatacatttaaatagtaacattgtacatagggtgttttcctattaaaaattcagtttcccctgagacttaatgtaaccacttaatgtaatcactatctcattgtttcatctttataaacttgtaaacttcatctatttcaaatattttatgcagtacattatattattctgtacaaaggctttcaaacaaaatttttaaaataataaagtattaatctttctccctgta

SEQ ID NO: 195577 - DNA, 1701 bp, Homo sapiens; identical to SEQ ID NO: 195576
  Payload ID: 18609
  Gene Name: tryptophan 2,3-dioxygenase
  Uniprot ID: P48775
  ENST ID: ENST00000573403
  CDS Start-End: 65-1285

SEQ ID NO: 195578 - DNA, 557 bp, Homo sapiens; identical to SEQ ID NO: 195575
  Payload ID: 18609
  Gene Name: tryptophan 2,3-dioxygenase
  ENST ID: ENST00000573644
  CDS Start-End: 410-557

SEQ ID NO: 195579 - DNA, 665 bp, Homo sapiens; identical to SEQ ID NO: 195574
  Payload ID: 18609
  Gene Name: tryptophan 2,3-dioxygenase
  ENST ID: ENST00000574434
  CDS Start-End: 470-665

SEQ ID NO: 195580 - DNA, 5325 bp, Homo sapiens
  Payload ID: 18610
  Gene Name: tryptophan hydroxylase 1
  Uniprot ID: P17752
  ENST ID: ENST00000250018
  CDS Start-End: 564-1898
aattctcctggctagcagttatccatctagtgcatatgtatctagagctggccaggcctttagtttacaaaataaatagaaagccttgtccccactctggaggagcttgctgccttgttagaaggtgagatatgttcgaatagaacatttggggaaaccatttgagacctggtataatgaagtgctaagattgtgggcaaggtggggaggaggtaggccttcctgactagtttaggctacaatagttgggaagactgcaagaagccagcaggcttcagtcatgccctaaaagagcgattggtttagaaaaaaaacaaaagggaactactaacatgtattctattctaggcaggtgtcaggcaaagttgtatcttattttggtctcactagattcttgcaaagcttatctgcatatccaggttttataaaaggttaagaaactgaagctcctagaagtaaatgagcccttagttatcaaatattgtctgcattgtgcaacttcttttttagcccgtagtctttgttttcatactttagttttagagaattactccaaattcatcatgattgaagacaataaggagaacaaagaccattccttagaaaggggaagagcaagtctcattttttccttaaagaatgaagttggaggacttataaaagccctgaaaatctttcaggagaagcatgtgaatctgttacatatcgagtcccgaaaatcaaaaagaagaaactcagaatttgagatttttgttgactgtgacatcaacagagaacaattgaatgatatttttcatctgctgaagtctcataccaatgttctctctgtgaatctaccagataattttactttgaaggaagatggtatggaaactgttccttggtttccaaagaagatttctgacctggaccattgtgccaacagagttctgatgtatggatctgaactagatgcagaccatcctggcttcaaagacaatgtctaccgtaaacgtcgaaagtattttgcggacttggctatgaactataaacatggagaccccattccaaaggttgaattcactgaagaggagattaagacctggggaaccgtattccaagagctcaacaaactctacccaacccatgcttgcagagagtatctcaaaaacttacctttgctttctaaatattgtggatatcgggaggataatatcccacaattggaagatgtctccaactttttaaaagagcgtacaggtttttccatccgtcctgtggctggttacttatcaccaagagatttcttatcaggtttagcctttcgagtttttcactgcactcaatatgtgagacacagttcagatcccttctataccccagagccagatacctgccatgaactcttaggtcatgtcccgcttttggctgaacctagttttgcccaattctcccaagaaattggcttggcttctcttggcgcttcagaggaggctgttcaaaaactggcaacgtgctactttttcactgtggagtttggtctatgtaaacaagatggacagctaagagtctttggtgctggcttactttcttctatcagtgaactcaaacatgcactttctggacatgccaaagtaaagccctttgatcccaagattacctgcaaacaggaatgtcttatcacaacttttcaagatgtctactttgtatctgaaagttttgaagatgcaaaggagaagatgagagaatttaccaaaacaattaagcgtccatttggagtgaagtataatccatatacacggagtattcagatcctgaaagacaccaagagcataaccagtgccatgaatgagctgcagcatgatctcgatgttgtcagtgatgcccttgctaaggtcagcaggaagccgagtatctaacagtagccagtcatccaggaacatttgagcatcaattcggaggtctgggccatctcttgctttccttgaacacctgatcctggagggacagcatcttctggccaaacaatattatcgaattccactacttaaggaatcactagtctttgaaaatttgtacctggatattctatttaccacttatttttttgtttagttttatttctttttttttttggtagcagctttaatgagacaatttatataccatacaagccactgaccacccatttttaatagagaagttgtttgacccaatagatagatctaatctcagcctaactctattttccccaatcctccttgagtaaaatgaccctttaggatcgcttagaataacttgaggagtattatggcgctgactcatattgttacctaagatccccttatttctaaagtatctgttacttattgctgaatttgtgccaagctcaatcacattcacactaaaatttaacaggagaccctgctgtctttgttgctagcatgagcaaaagtatagaggcctttgcacatggaggatacctagtaaagagcaagtagtctagtttcaagtgtagtatcttgtagggaaatgggagtagctaagcctggaaaggttgaatggggcataatcattaagactaggctaaaaattcgagactttattttttaggcattagggagccccttcccaagtgactatcttccttgaaactttgttttctttcaatgacatcacacgatactggttttattctggactatctatcctactcatgggtccaagggaaacttagtagagatgcgacttgcatggggctgtactcagacatgtggtcctaggtattataatgggattgtccccagattaacaggaagcattgttatcaaaggaagagttcaaactgagatagataagagaagcacaaagtaaaagatagaaaaaacagtgctgagtactttatttctaaggtataaggtgaggccataaacagaaaggtatgcaatgagagtagaggctgcagaaaaggggaggaaatagaatgtcagaaaggtcaagaagagtggtttaggactgagactgtaagtaatgtaaggattgccaaggaatggtttttatgcagagtcagctgtgtagcacagggagtaagcagtcctgttataaatgggtgaagctgaactccaaaatacaaacttatgtctctttaatttgcccctttcctccctctagtcactaaatgaagatgttcttcaagtttctgtctttgcacttctactctttttgccatctcttcatggggaatgtcacccagatacatgacttcagttcttattttgaatgactcctctatttgcagttataaccctgacatctttcttgaatttttttgccccttaattccaacgaactcctggatgtctatgtagatgtctcataatttaggccaatgctgtacaacttcatgtggcatcatccacatagaatgaataggggttgttcaatatgacagccctgccaagcatctcaaattgaacaggtctataaaggaactcagaatcacttgaatatcacagtccatcagcttcctttcccagtaatttaatttccattaatggtatattaaacatcgtattttcaatcatttttaggtttagtcagctacttaaaaataggctttttcttcacataaataaattgtataccatttaatgtgttttatttcaacagactaatagatcttttaacacttcttagtcctcaaaataaattattaaaaactttgtatttcatgtcatattatataaggaaatagaattttgaagaataattcatgctgttttaaatttttacattgtacattttaatagctaatcaactcttaagtatacatttgatggtaaatagatgctagctaatctagaatcatttgaaatattgattatctgatttatagtttggttgcaaggaaatctactgtaagcaaatcataatagatagcaaatcttagaacatgtagaaaaaaagaaattaaaaaaagcaaatcttagaacatgtagaaaaaggaaattaaaaaatagatagcaaataacacaaattatgcatactatatgtggttattttcatacaactttgataacggtgaagaatcatacttattgaattttaaaatgatgatgtttaaaatcactctatgactaaagcacatgagaataaatgttaaaggcacagccttataatccacaacttcagaacaatggaatttttttttttttttttttttttttttttttttttttttttttgagacggagtcttgctctgtcgcccaggctggagtgcagtggtgcgatcttggctcactgcaagctccacctcccaggttcacggcattctcctgcctctgtctcctgagtagctgggactacaggcgcccgccaccacgtccggctcattttttgtatttttagtagagacaaggtttcaccgtgttagccaggatggtttcaatctcctgacattgtgatctgcccacctcggcctcccaaagtgctgggattacaggcgtgagccactgcacccggccaaacattggaaatttttaatgatggatttcagttcttctcacctctgggtatttgtaatatttggtaaatcaggagtcctgagagtcttagaattttcatgcattttaaatatatgtcttcaaagcacctaggaatatgtaaatagttacccaaatgtgagaacagaattgaactaaaagcttcgtttataatttttttttttttttgagacagagtctcactctgttgcccaggctggagcgcagttgcgtgatttcagctcgctgcaacctgggactgcaggcgtgcttcaccatgccccgctaatttttgtttttttagtagagatggggtttcgccatgttggccaggctggtctcgaacttctgaccgcaggtgatccatccgcctcggcctcccaaagtgctgggattacaagcatgagccaccatgcccagccggttaataattcttaatcagtaaatcattattcaaagacatagttaatatcttcatgacttcttaaggatgctcaaaagctggtcttcagaatacctacatttctttatctacatattctgtcatttggagttatacaagtagtaatgacacaccaaaatgtaaataattattgttagcttttaagttggcttccaaattcaaaaaagaaaaaaatcctgaattctctaaaggaacatatgatagagtccatatgttaattcataggaagtgtttaaggtactatggtctattttggtctaatctttgttttactatgtaatatatatttatgatttacaagtttgttattcagtgggataataaatgaacacaaaattta

SEQ ID NO: 195581 - DNA, 1138 bp, Homo sapiens
  Payload ID: 18610
  Gene Name: tryptophan hydroxylase 1
  ENST ID: ENST00000417164
  CDS Start-End: 1-621
atgattgaagacaataaggagaacaaagaccattccttagaaaggggaagagcaagtctcattttttccttaaagaatgaagttggaggacttataaaagccctgaaaatctttcaggagaagcatgtgaatctgttacatatcgagtcccgaaaatcaaaaagaagaaactcagaatttgagatttttgttgactgtgacatcaacagagaacaattgaatgatatttttcatctgctgaagtctcataccaatgttctctctgtgaatctaccagataattttactttgaaggaagatggtatggaaactgttccttggtttccaaagaagatttctgacctggaccattgtgccaacagagttctgatgtatggatctgaactagatgcagaccatcctggcttcaaagacaatgtctaccgtaaacgtcgaaagtattttgcggacttggctatgaactataaacaagcgtacaggtttttccatccgtcctgtggctggttacttatcaccaagagatttcttatcaggtttagcctttcgagtttttcactgcactcaatatgtgagacacagttcagatcccttctataccccagagccagatacctgccatgaactcttaggtcatgtcccgcttttggctgaacctagttttgcccaattctcccaagaaattggcttggcttctcttggcgcttcagaggaggctgttcaaaaactggcaacgtgctactttttcactgtggagtttggtctatgtaaacaagatggacagctaagagtctttggtgctggcttactttcttctatcagtgaactcaaacatgcactttctggacatgccaaagtaaagccctttgatcccaagattacctgcaaacaggaatgtcttatcacaacttttcaagatgtctactttgtatctgaaagttttgaagatgcaaaggagaagatgagagaatttaccaaaacaattaagcgtccatttggagtgaagtataatccatatacacggagtattcagatcctgaaagacaccaagagcataaccagtgccatgaatgagctgcagcatgatctcgatgttgtcagtgatgcccttgctaaggtcagcaggaagccgagtatctaa

SEQ ID NO: 195582 - DNA, 556 bp, Homo sapiens
  Payload ID: 18610
  Gene Name: tryptophan hydroxylase 1
  ENST ID: ENST00000528338
  CDS Start-End: 60-556
gacaacgtcgcccatactctgtgtttgataagaaaagtcaatctttgagtggtaattgaatggttttagagaattactccaaattcatcatgattgaagacaataaggagaacaaagaccattccttagaaaggggaagagcaagtctcattttttccttaaagaatgaagttggaggacttataaaagccctgaaaatctttcaggagaagcatgtgaatctgttacatatcgagtcccgaaaatcaaaaagaagaaactcagaatttgagatttttgttgactgtgacatcaacagagaacaattgaatgatatttttcatctgctgaagtctcataccaatgttctctctgtgaatctaccagataattttactttgaaggaagatggtatggaaactgttccttggtttccaaagaagatttctgacctggaccattgtgccaacagagttctgatgtatggatctgaactagatgcagaccatcctggcttcaaagacaatgtctaccgtaaacgtcgaaagtattttgcggacttggctatgaactataa

SEQ ID NO: 195583 - DNA, 2360 bp, Homo sapiens
  Payload ID: 18611
  Gene Name: tryptophan hydroxylase 2
  Uniprot ID: Q8IWU9
  ENST ID: ENST00000333850
  CDS Start-End: 142-1614
cattgctcttcagcaccagggttctggacagcgccccaagcaggcagctgatcgcacgccccttcctctcaatctccgccagcgctgctactgcccctctagtaccccctgctgcagagaaagaatattacaccgggatccatgcagccagcaatgatgatgttttccagtaaatactgggcacggagagggttttccctggattcagcagtgcccgaagagcatcagctacttggcagctcaacactaaataaacctaactctggcaaaaatgacgacaaaggcaacaagggaagcagcaaacgtgaagctgctaccgaaagtggcaagacagcagttgttttctccttgaagaatgaagttggtggattggtaaaagcactgaggctctttcaggaaaaacgtgtcaacatggttcatattgaatccaggaaatctcggcgaagaagttctgaggttgaaatctttgtggactgtgagtgtgggaaaacagaattcaatgagctcattcagttgctgaaatttcaaaccactattgtgacgctgaatcctccagagaacatttggacagaggaagaagagctagaggatgtgccctggttccctcggaagatctctgagttagacaaatgctctcacagagttctcatgtatggttctgagcttgatgctgaccacccaggatttaaggacaatgtctatcgacagagaagaaagtattttgtggatgtggccatgggttataaatatggtcagcccattcccagggtggagtatactgaagaagaaactaaaacttggggtgttgtattccgggagctctccaaactctatcccactcatgcttgccgagagtatttgaaaaacttccctctgctgactaaatactgtggctacagagaggacaatgtgcctcaactcgaagatgtctccatgtttctgaaagaaaggtctggcttcacggtgaggccggtggctggatacctgagcccacgagactttctggcaggactggcctacagagtgttccactgtacccagtacatccggcatggctcagatcccctctacaccccagaaccagacacatgccatgaactcttgggacatgttccactacttgcggatcctaagtttgctcagttttcacaagaaataggtctggcgtctctgggagcatcagatgaagatgttcagaaactagccacgtgctatttcttcacaatcgagtttggcctttgcaagcaagaagggcaactgcgggcatatggagcaggactcctttcctccattggagaattaaagcacgccctttctgacaaggcatgtgtgaaagcctttgacccaaagacaacttgcttacaggaatgccttatcaccaccttccaggaagcctactttgtttcagaaagttttgaagaagccaaagaaaagatgagggactttgcaaagtcaattacccgtcccttctcagtatacttcaatccctacacacagagtattgaaattctgaaagacaccagaagtattgaaaatgtggtgcaggaccttcgcagcgacttgaatacagtgtgtgatgctttaaacaaaatgaaccaatatctggggatttgatgcctggaactatgttgttgccagcatgatctttttggggcttagcagcagttcagtcaatgtcatataacgcaaataaccttctgtgtcatggcttggctaataagcatgcaattccatatatctataccatcttgtaactcactgtgttagtatataaagcaccataagaaatccaatggcagataaccactcattgtatgaaataacgtattatgtttaaacatcttaaaaagatttgacattcctgcttagtgtccttaaccaaactgcatctagttaaaatttgtaacaaatagccctcttatgagtctcatttatgcccttttctttttcagatctaagcctttcctctgtgttcattagataaaatgaaaaaaagcagtgaagctgtttccattttcaatagtatcagtgttttcacgcattatttgagataaacccagaattgtaggaaacttcccatcacaataacaaaggttcaatattctatttcaaaaattgttgaggtaacacagcagttggaatgatttttaggttgagtatttacacaatgcaagaaaacacctttttacaaatggaattatgtaggttgcgttgaccttgtagaacctgagttatgacaagcttcctgaagtattttggaagatagtacttccggaaaggacattaggaaagactaaacagtggacaatcaatcttgggactatgaattttatgctggaataaagtaaattatcatgttc

SEQ ID NO: 195584 - DNA, 1616 bp, Homo sapiens
  Payload ID: 18612
  Gene Name: tryptophan rich basic protein
  Uniprot ID: O00258
  ENST ID: ENST00000333781
  CDS Start-End: 142-666
cgcgagggcgacgcagttcgcaggcgcgtcggcgcgcctgttctggggcgcttggcttcaccgcgcaggcgcggtcgccgctgttgttgtggtccccatggagctgccgtagcggacccagcacagccaggagcgtccgggatgagctcagccgcggccgaccactgggcgtggttgctggtgctcagcttcgtgtttggatgcaatgttcttaggatcctcctcccgtccttctcatccttcatgtccagggtgctgcagaaggacgcggagcaggagtcacagatgagagcggagatccaggacatgaagcaggagctctccacagtcaacatgatggacgagtttgccagatatgccaggctggaaagaaagatcaacaagatgacggataagctcaaaacccatgtgaaagctcggacagctcaattagccaagataaaatgggtgataagtgtcgctttctacgtattgcaggctgccctgatgatctcactcatttggaagtattattctgtccctgtggctgtcgtgccgagtaaatggataacccctctagaccgcctggtagcctttcctactagagtagcaggtggtgttggaattacctgttggattttagtctgtaacaaagttgtcgctattgtgcttcatccgttcagctgaacaggaggatggatacagccgcgaggctaaaaaacggatttcctcttcctagcttaaaatctgatttacactgttttgttttttaagaaacaaaagtgcatagtttagattttttttttgttgaatatgtttgttcttggactttatgagagagtcttataagaatcacgattttctacacctgtcattgagccaagaaagtccagtttatgacacgtatgtactagtgaacaccgtcctcgatctgtacgaaatgtgaaatgtttagggacatctccatgctgtcacttgtgatttgccctcttatgtattttggtcatattgccaactggaaagtcaaaattttctaacaactttaagtaagttctttgaagacttagtgctgtttttaatccagtttagaaagtaacttaattttaataccactactaaaaattcgaaaatttcttctttaatcacattcaatatggttaaaagaacaacactaattgacattgcgtgggctttttctccctttgtttaaaatgtcatttgttgagcaagagttgtatagtattatctacttacttgaggctgttaatttttcattacagtgttttgtaaatgtatccacgagaccatgatgcattgttttgtgctcaacttgtgttttgtatttaaagcattttgaatgaagtgtattttataagcatttaatatttatgctctttagaatggaacacagaaaacaaaccttataagtcctgattaatctgaaccaataacctgtgtggcctacaaagtataattctattaaatgttccttaaaacacttttttctaattaaaatctttgcaaatgcttgtgtaacttcctgccttacagctacttgtttgctgtgagccacccgcaactgacaagtggctgttaactgagtcaccatatcccagtaaagctgaattttctcacta

SEQ ID NO: 195585 - DNA, 1464 bp, Homo sapiens
  Payload ID: 18612
  Gene Name: tryptophan rich basic protein
  Uniprot ID: O00258
  ENST ID: ENST00000380708
  CDS Start-End: 92-514
atgcgcagacaccctcaggcgactggcgggtcgcggcttccaagctctaaatggagagttgtccctactgtgcggcaggcggaggagacctatgtccagggtgctgcagaaggacgcggagcaggagtcacagatgagagcggagatccaggacatgaagcaggagctctccacagtcaacatgatggacgagtttgccagatatgccaggctggaaagaaagatcaacaagatgacggataagctcaaaacccatgtgaaagctcggacagctcaattagccaagataaaatgggtgataagtgtcgctttctacgtattgcaggctgccctgatgatctcactcatttggaagtattattctgtccctgtggctgtcgtgccgagtaaatggataacccctctagaccgcctggtagcctttcctactagagtagcaggtggtgttggaattacctgttggattttagtctgtaacaaagttgtcgctattgtgcttcatccgttcagctgaacaggaggatggatacagccgcgaggctaaaaaacggatttcctcttcctagcttaaaatctgatttacactgttttgttttttaagaaacaaaagtgcatagtttagattttttttttgttgaatatgtttgttcttggactttatgagagagtcttataagaatcacgattttctacacctgtcattgagccaagaaagtccagtttatgacacgtatgtactagtgaacaccgtcctcgatctgtacgaaatgtgaaatgtttagggacatctccatgctgtcacttgtgatttgccctcttatgtattttggtcatattgccaactggaaagtcaaaattttctaacaactttaagtaagttctttgaagacttagtgctgtttttaatccagtttagaaagtaacttaattttaataccactactaaaaattcgaaaatttcttctttaatcacattcaatatggttaaaagaacaacactaattgacattgcgtgggctttttctccctttgtttaaaatgtcatttgttgagcaagagttgtatagtattatctacttacttgaggctgttaatttttcattacagtgttttgtaaatgtatccacgagaccatgatgcattgttttgtgctcaacttgtgttttgtatttaaagcattttgaatgaagtgtattttataagcatttaatatttatgctctttagaatggaacacagaaaacaaaccttataagtcctgattaatctgaaccaataacctgtgtggcctacaaagtataattctattaaatgttccttaaaacacttttttctaattaaaatctttgcaaatgcttgtgtaacttcctgccttacagctacttgtttgctgtgagccacccgcaactgacaagtggctgttaactgagtcaccatatcccagtaaagctgaattttctcacta

SEQ ID NO: 195586 - DNA, 768 bp, Homo sapiens
  Payload ID: 18612
  Gene Name: tryptophan rich basic protein
  ENST ID: ENST00000380713
  CDS Start-End: 420-768
gggcttacgggccgagtgccctttgagattcaactttttctaaattatccttcactttctgctgtaaagagtggccacctcctttttcctctaggggactgaagcgagaggaggatattgcagggtttgcctctgtggtcatcttcttagagagcaccccctccgcccccacacccttttcctcagagccgttgcttagtgagtccctgccatggaccaggcttgggaatggtccccaagtattagtttaggaggacgactctctgcttcacaggacctaccccagaatcctgtgactcagaagcgcgcttgtgaagtgcgcatgtgcgggcagggcctccagtggggctctcgtgggggcagcagccaaggactggggctggtggcctggagagctgcccgcttctccgcccttgccgatgtccagggtgctgcagaaggacgcggagcaggagtcacagatgagagcggagatccaggacatgaagcaggagctctccacagtcaacatgatggacgagtttgccagatatgccaggctggaaagaaagatcaacaagatgacggataagctcaaaacccatgtgaaagctcggacagctcaattagccaagataaaatgggtgataagtgtcgctttctacgtattgcaggctgccctgatgatctcactcatttggaagtattattctgtccctgtggctgtcgtgccgagtaaatggataacccctctagaccgcctggtagcctttcctactagagtagcag

SEQ ID NO: 195587 - DNA, 699 bp, Homo sapiens
  Payload ID: 18612
  Gene Name: tryptophan rich basic protein
  Uniprot ID: O00258
  ENST ID: ENST00000398753
  CDS Start-End: 100-522
ggatcctcctcccgtccttctcatccttcgtaagtggctgcctggcctcccaagggccggtggggatgccgccccagtcccccggcgggtctggcgtagatgtccagggtgctgcagaaggacgcggagcaggagtcacagatgagagcggagatccaggacatgaagcaggagctctccacagtcaacatgatggacgagtttgccagatatgccaggctggaaagaaagatcaacaagatgacggataagctcaaaacccatgtgaaagctcggacagctcaattagccaagataaaatgggtgataagtgtcgctttctacgtattgcaggctgccctgatgatctcactcatttggaagtattattctgtccctgtggctgtcgtgccgagtaaatggataacccctctagaccgcctggtagcctttcctactagagtagcaggtggtgttggaattacctgttggattttagtctgtaacaaagttgtcgctattgtgcttcatccgttcagctgaacaggaggatggatacagccgcgaggctaaaaaacggatttcctcttcctagcttaaaatctgatttacactgttttgttttttaagaaacaaaagtgcatagtttagattttttttttgttgaatatgtttgttcttggactttatgagagagtcttataagaatcacgattttct

SEQ ID NO: 195588 - DNA, 541 bp, Homo sapiens
  Payload ID: 18612
  Gene Name: tryptophan rich basic protein
  ENST ID: ENST00000442773
  CDS Start-End: 436-541
gtaagtggctgcctggcctcccaagggccggtggggatgccgccccagtcccccggcgggtctggcgtaggtacaggggtctcaactgggcgactgaaggccgtagtagcgtcttggttggtccgtaagcttttttgagatagttgttagcgtctaaaaggtacgacgctttaccccaaaatcagactttctgggttctagggggttgggagaaacaccgggcaaccctggactcttctggctgtgggtggcggcggcgaacctcacactgggagttcctagtgccccgctgtcagcctcgtttccgttaatcctggttcctagaggcattcgagcagccctcggccagggtttcccagaggcctggcgggcgaagtcagctgttccaggtcccggagagatggatcctcgcgtccaggagcccacattcttgggatgtccagggtgctgcagaaggacgcggagcaggagtcacagatgagagcggagatccaggacatgaagcaggagctctccacagtcaacatgatggacgagtttg

SEQ ID NO: 195589 - DNA, 707 bp, Homo sapiens
  Payload ID: 18612
  Gene Name: tryptophan rich basic protein
  ENST ID: ENST00000415847
  CDS Start-End: 1-245
ggacagctcaattagccaagataaaatgggtgataagtgtcgctttctacgtattgcaggctgccctgatgatctcactcatttggaagtattattctgtccctgtggctgtcgtgccgagtaaatggataacccctctagaccgcctggtagcctttcctactagagtagcaggtgacgatggcttaatagaatttaccacagttactttagagtctccgaaagcatggctggtggaggcctgactgggaggcaggggatgcgactccttactttgcaaaggctcctctgagccttttgcaacaccaggacttgattggtcagttttcaagacatagcctgatccaaagagttcttccatgagactgcttttcttatctctgaaagttgtatccttcacttttattctggaagacttaccaaatgagggctcatacccactgtcagaatgctctagctccatttcctctctgttactgagatgcttgcctgtactatgactgtacctcatgttgccggcattggctggcccccctgaagcaggaagcccatgatgcaggttttcagttgcttctgtgaatgagtaatgtcttctttgtctgagggggcctttcgtgtagggagcagtgcctttgccaagtgtgtcatccacaccatttctctgcatgcttcttttaaacttttctcttactagaacatcttcttga

SEQ ID NO: 195590 - DNA, 366 bp, Homo sapiens
  Payload ID: 18612
  Gene Name: tryptophan rich basic protein
  ENST ID: ENST00000478273
  CDS Start-End: 1-46
caggcaaggaaatttgaggttgttgcatctggaagtaaacatgtagctacttcttctaataaaacagaggctgctttaaataatttctattaatagccttttctgaacaatcacagagaaagtcttctgaataatcatactgagaacttaaacttccacaggagcactgagatctgctataatcaacactcttattggaagcattactgttccgtgaaaaatcgcctgtgcctgggcttctcttgcatgctgcagacctcctattgttttctaatgccacgccgaagaaatgctcatctatatttgtttttgttagatcagccaaagacatagcaaacaacctaataaaagaaaagtaaaacctaa

SEQ ID NO: 195591 - DNA, 1416 bp, Homo sapiens
  Payload ID: 18612
  Gene Name: tryptophan rich basic protein
  ENST ID: ENST00000466787
  CDS Start-End: 66-275
cgggtcgcggcttccaagctctaaatggagagttgtccctactgtgcggcaggcggaggagacctatgtccagggtgctgcagaaggacgcggagcaggagtcacagatgagagcggagatccaggacatgaagcaggagctctccacagtcaacatgatggacgagtttgccagatatgccaggctggaaagaaagatcaacaagatgacggataagctcaaaacccatggtactgtgtcccttgcagcctggaggcttcatgagagcggatgaatagagaagtctgtatgtgaagattagtagaatacatactttgcttcttggatgttctgaatattgatggaaacttaagttatctggaggaaactcagtaataagtattactttcctcttatttgctggtgaacctttgctttctaagcacagaaatatctaagatcctctcagattttcctcagagccaactctttaaaattttaagctaactcttaaaaattgtaggttttcatttttaaattcatcacttttctgagagaagcccagaaaaaaagtctcacagtggattcccagaggcttttgttccactctctagaaaaatgcccagcagtgtcctcttctgagtgtcacctcccgggtccagtgtcctgtgatgaagagcgctttctcagggcagcccgtgtgctgagggaccccggtcacagtgtgtgcacagtcagagagctgtctctgtggctaggaaaacagacagaggggcctgtccaggcccaggacaagctggactcccaccaggggttcgtgtactgtgcacactgggaaataaggaggaaaatttagtcctgttgtgaaagctcggacagctcaattagccaagataaaatgggtgataagtgtcgctttctacgtattgcaggctgccctgatgatctcactcatttggaagtattattctgtccctgtggctgtcgtgccgagtaaatggataacccctctagaccgcctggtagcctttcctactagagtagcaggtggtgttggaattacctgttggattttagtctgtaacaaagttgtcgctattgtgcttcatccgttcagctgaacaggaggatggatacagccgcgaggctaaaaaacggatttcctcttcctagcttaaaatctgatttacactgttttgttttttaagaaacaaaagtgcatagtttagattttttttttgttgaatatgtttgttcttggactttatgagagagtcttataagaatcacgattttctacacctgtcattgagccaagaaagtccagtttatgacacgtatgtactagtgaacaccgtcctcgatctgtacgaaatgtgaaatgtttagggacatctccatgctgtcacttgtgatttgccctcttatgtattttg

SEQ ID NO: 195592 - DNA, 1392 bp, Homo sapiens
  Payload ID: 18612
  Gene Name: tryptophan rich basic protein
  ENST ID: ENST00000623703
  CDS Start-End: 32-550
agcggacccagcacagccaggagcgtccgggatgagctcagccgcggccgaccactgggcgtggttgctggtgctcagcttcgtgtttggatgcaatgttcttaggatcctcctcccgtccttctcatccttcatgtccagggtgctgcagaaggacgcggagcaggagtcacagatgagagcggagatccaggacatgaagcaggagctctccacagtcaacatgatggacgagtttgccagatatgccaggctggaaagaaagatcaacaagatgacggataagctcaaaacccatgtgaaagctcggacagctcaattagccaagataaaatgggtgataagtgtcgctttctacgtattgcaggctgccctgatgatctcactcatttggaagtattattctgtccctgtggctgtcgtgccgagtaaatggataacccctctagaccgcctggtagcctttcctactagagtagcagtattctccagcagtatttggacttccaaatgtttctcttcccctgataaatctatattagaaaaataggcaatttagtgctgtttaaaatgaatggatctctatttcaagatggcatgtctagtacacttacgtgcaccgcctcacaagcacactgaaatgacagaaaaggacactatgaattaggacaatggactgaaaaataagcagaaaatttaaacacaccagtgaccacagtgcaactgcaactgacgatcagtttccaccaaactgcaacagagagagtggctttgccgtctgggccagctgaggactctccttggaacccaaagaagcagtttgtttccacctactcccaagagctgaagattataagccagaagcaaacaaaggcaggcaaggaaatttgaggttgttgcatctggaagtaaacatgtagctacttcttctaataaaacagagttctatcttttgatttggtctggacacctggaggtcagcaaccgagagcaggaaggaggcacagcaacaacagaacaacaacaagaggctgcgacaggggcggcgtgggtcaaaaggaagcaacctggaggacggtcctccttgcggcttggagcagagcttcaggttgggcaccacgacagagctgggccagaagtctaacacagcctgtttggaacacaacccgggatacttgtgtggttgggttcagtcagtcaagggaaacaagaagctaacccgtggctgggagtgttcatgcaatgctcgtggaatactcagcgcaaagcctgcccgcaagcacaaagggtatcaaggaagagttaaatgggaagttgggtcatggtgtggaatcatattaaggtcagcattgatggcttccggaacttagatagaaagcagtgtcttaatgc

SEQ ID NO: 195593 - DNA, 2800 bp, Homo sapiens
  Payload ID: 18613
  Gene Name: tryptophanyl tRNA synthetase 2, mitochondrial
  Uniprot ID: Q9UGM6
  ENST ID: ENST00000235521
  CDS Start-End: 28-1110
aaacaagacggctccgcccttctcaagatggcgctgcactcaatgcggaaagcgcgtgagcgctggagcttcatccgggcacttcataagggatccgcagctgctcccgctctccagaaagacagcaagaagcgagtattttccggcattcaacctacaggaatcctccacctgggcaattacctgggagccattgagagctgggtgaggttacaggatgaatatgactctgtattatacagcattgttgacctccactccattactgtcccccaagacccagctgtccttcggcagagcatcctggacatgactgctgttcttcttgcctgtggcataaacccggaaaaaagcatccttttccaacaatctcaggtgtctgaacacacacaattaagttggatcctttcctgcatggtcagactacctcgattacaacatttacatcagtggaaggcaaagactaccaagcagaagcacgatggcacggtgggcctgctcacatacccagtactccaggcagccgacattctgttgtacaagtccacacacgttcctgttggggaggatcaagtccagcacatggaactagttcaggatctagcacaaggtttcaacaagaagtatggggagttctttccagtgcccgagtccattctcacatccatgaagaaggtaaaatccctacgtgatccttctgccaaaatgtcgaaatcagaccctgacaaactggccaccgtccgaataacagacagcccagaggagatagtgcagaaattccgcaaggctgtgacagacttcacctcggaggtcacctatgacccggctggccgcgctggcgtgtccaacatagtggcggtgcatgccgcggtgacggggctctccgtggaggaagtggtgcgccgcagcgcgggcatgaacactgctcgctacaagctggccgtggcagatgctgtgattgagaagtttgccccaattaagcgtgaaattgaaaaactgaagctggacaaggaccatttagagaaggttttacaaattggatcagcaaaagccaaagaattagcatacactgtgtgccaggaggtgaagaaattggtgggttttctataggaagtttcaacgaatcacagcaaggcttttgtgccttgcactccatgcattctgataacggcagctttcctaaaaagaaaaagttatagttttgggacatttaatttggtatagctgattattggctttatttgatgaatattgctttgtagctttgaaatacgacagtgttccaaatcccatcaacaaaatgctgtgaacaacaacaacaaaaaataaatcaagaaggcatagctgtctgaatccccaattattgaggcacactccttggcctgcagaaatgtgattgaagtaaggagtaatttgggaaatggagtatcatttgtgcttctctctggagtacttactgtaacagatgcacacgttatctacttcaacccttttataaagcaatatatagaggtcttagatgtataatccttgagatgccatttgatcagatgccaatttgtattcagagctcataaaaacaagtccattcttatagtttgtttgtcactgagacggtgcctgatttaatatatttaagctgcttaacttgttttccaagagataacaccaactgttccagcaataatttgttttttaattcagagatatgggatatgatcttctaaggaggttgcattattttgacctgatttatttattgtacaagagcccaagtccctgaattatattcttaataagtgctttcttgcattcatttcagtttagtctcaccaaccccctatgaattaggagaattattgtcattttacacatgaggaaagtgaggctgagagaatccaattagcttgtacgatatcactccataagagaagcaaatctgagagtaaaacccttaccccttattcttaagaatagtgcttgtttattcagtacaaaaaaaatgctgaaaggcagcgttttttagactctaaacattctgattttgaaggtgggtgttggaacgactgatgatgttttttatatcatcaattcagccaatggatgcgaacttaaaatctggattcacagaaccgtggtcacatttccccatcaaaatccccaaggcgggtcccaagttctctcctctacgctcattgcagaaatactttgaaataggttctgccagtctacaatagcagtgaagactgacaaatcagatattcccaatgactgacagcttctcatcttgcctctacctcagttaagtaatgtcaccctgaaacctagcttttctgcacttccatttctgacacctgaaaatgaaaatgataatcctaacttatacaccaagacctgttagcaagatcgattttgtaacagaaattgcttataagttttttatcagtaaggaccatgatcaccatttgtacatacataactaggttgttgagcaaagcatttttgctcatgtttcttaaggaagtagagtagtccttgtgtcagaacacatgttaatccacaaaacgccccatcccagattccaaattaaaacatcgtttttaggattcttggagctagcctggatcatgggtaaaggaaacattttgccttttgtatcttatactggaatgggatgtctgtaagtcctagaacctctttgagcatatttcttacaagcctctgttttttcccctttaaaggaaactttgaaaggattgtgaatactggaaaatgacaaaactaaaggtagatctatcaa

SEQ ID NO: 195594 - DNA, 2811 bp, Homo sapiens
  Payload ID: 18613
  Gene Name: tryptophanyl tRNA synthetase 2, mitochondrial
  Uniprot ID: Q9UGM6
  ENST ID: ENST00000369426
  CDS Start-End: 5-667
caagatggcgctgcactcaatgcggaaagcgcgtgagcgctggagcttcatccgggcacttcataagggatccgcagctgctcccgctctccagaaagacagcaagaagcgagtattttccggcattcaacctacaggaatcctccacctgggcaattacctgggagccattgagagctgggtgaggttacaggatgaatatgactctgtattatacagcattgttgacctccactccattactgtcccccaagacccagctgtccttcggcagagcatcctggacatgactgctgttcttcttgcctgtggcataaacccggaaaaaagcatccttttccaacaatctcaggtgtctgaacacacacaattaagttggatcctttcctgcatggtcagactacctcgattacaacatttacatcagtggaaggcaaagactaccaagcagaagcacgatggcacggtgggcctgctcacatacccagtactccaggcagccgacattctgttgtacaagtccacacacgttcctgttggggaggatcaagtccagcacatggaactagttcaggatctagcacaaggtttcaacaagaagtatggggagttctttccagtgcccgagtccattctcagtatgtgtgtgttggtgtttttaacctagcatccatgaagaaggtaaaatccctacgtgatccttctgccaaaatgtcgaaatcagaccctgacaaactggccaccgtccgaataacagacagcccagaggagatagtgcagaaattccgcaaggctgtgacagacttcacctcggaggtcacctatgacccggctggccgcgctggcgtgtccaacatagtggcggtgcatgccgcggtgacggggctctccgtggaggaagtggtgcgccgcagcgcgggcatgaacactgctcgctacaagctggccgtggcagatgctgtgattgagaagtttgccccaattaagcgtgaaattgaaaaactgaagctggacaaggaccatttagagaaggttttacaaattggatcagcaaaagccaaagaattagcatacactgtgtgccaggaggtgaagaaattggtgggttttctataggaagtttcaacgaatcacagcaaggcttttgtgccttgcactccatgcattctgataacggcagctttcctaaaaagaaaaagttatagttttgggacatttaatttggtatagctgattattggctttatttgatgaatattgctttgtagctttgaaatacgacagtgttccaaatcccatcaacaaaatgctgtgaacaacaacaacaaaaaataaatcaagaaggcatagctgtctgaatccccaattattgaggcacactccttggcctgcagaaatgtgattgaagtaaggagtaatttgggaaatggagtatcatttgtgcttctctctggagtacttactgtaacagatgcacacgttatctacttcaacccttttataaagcaatatatagaggtcttagatgtataatccttgagatgccatttgatcagatgccaatttgtattcagagctcataaaaacaagtccattcttatagtttgtttgtcactgagacggtgcctgatttaatatatttaagctgcttaacttgttttccaagagataacaccaactgttccagcaataatttgttttttaattcagagatatgggatatgatcttctaaggaggttgcattattttgacctgatttatttattgtacaagagcccaagtccctgaattatattcttaataagtgctttcttgcattcatttcagtttagtctcaccaaccccctatgaattaggagaattattgtcattttacacatgaggaaagtgaggctgagagaatccaattagcttgtacgatatcactccataagagaagcaaatctgagagtaaaacccttaccccttattcttaagaatagtgcttgtttattcagtacaaaaaaaatgctgaaaggcagcgttttttagactctaaacattctgattttgaaggtgggtgttggaacgactgatgatgttttttatatcatcaattcagccaatggatgcgaacttaaaatctggattcacagaaccgtggtcacatttccccatcaaaatccccaaggcgggtcccaagttctctcctctacgctcattgcagaaatactttgaaataggttctgccagtctacaatagcagtgaagactgacaaatcagatattcccaatgactgacagcttctcatcttgcctctacctcagttaagtaatgtcaccctgaaacctagcttttctgcacttccatttctgacacctgaaaatgaaaatgataatcctaacttatacaccaagacctgttagcaagatcgattttgtaacagaaattgcttataagttttttatcagtaaggaccatgatcaccatttgtacatacataactaggttgttgagcaaagcatttttgctcatgtttcttaaggaagtagagtagtccttgtgtcagaacacatgttaatccacaaaacgccccatcccagattccaaattaaaacatcgtttttaggattcttggagctagcctggatcatgggtaaaggaaacattttgccttttgtatcttatactggaatgggatgtctgtaagtcctagaacctctttgagcatatttcttacaagcctctgttttttcccctttaaaggaaactttgaaaggattgtgaatactggaaaatgacaaaactaaaggtagatctatcaagccaa

SEQ ID NO: 195595 - DNA, 2690 bp, Homo sapiens
  Payload ID: 18614
  Gene Name: tryptophanyl-tRNA synthetase
  Uniprot ID: P23381
  ENST ID: ENST00000344102
  CDS Start-End: 351-1643
caatgaccagctaatggctcgattctcaagagggtttcattggtctcaacctggccccccaggcaacccacccctgattggacagtctcatcaagaaggttggtcaagagctcaagtgtttctgagaatctgggtgatttataagaaacccttagctgaatgcagggtggggagaacgaaagacaaaagcatcttttttcagaagggaaactgaaagaaagaggggaagagtattaaagaccatttctggctgggcagggcactctcagcagctcaactgcccagcgtgaccagtggccacctctgcagtgtcttccacaacctgggatgaaattgattctgcagtaaagatgttggtgtcattaaaaatgagctacaaagctgccgcgggggaggattacaaggctgactgtcctccagggaacccagcacctaccagtaatcatggcccagatgccacagaagctgaagaggattttgtggacccatggacagtacagacaagcagtgcaaaaggcatagactacgataagctcattgttcggtttggaagtagtaaaattgacaaagagctaataaaccgaatagagagagccaccggccaaagaccacaccacttcctgcgcagaggcatcttcttctcacacagagatatgaatcaggttcttgatgcctatgaaaataagaagccattttatctgtacacgggccggggcccctcttctgaagcaatgcatgtaggtcacctcattccatttattttcacaaagtggctccaggatgtatttaacgtgcccttggtcatccagatgacggatgacgagaagtatctgtggaaggacctgaccctggaccaggcctatagctatgctgtggagaatgccaaggacatcatcgcctgtggctttgacatcaacaagactttcatattctctgacctggactacatggggatgagctcaggtttctacaaaaatgtggtgaagattcaaaagcatgttaccttcaaccaagtgaaaggcattttcggcttcactgacagcgactgcattgggaagatcagttttcctgccatccaggctgctccctccttcagcaactcattcccacagatcttccgagacaggacggatatccagtgccttatcccatgtgccattgaccaggatccttactttagaatgacaagggacgtcgcccccaggatcggctatcctaaaccagccctgctgcactccaccttcttcccagccctgcagggcgcccagaccaaaatgagtgccagcgaccccaactcctccatcttcctcaccgacacggccaagcagatcaaaaccaaggtcaataagcatgcgttttctggagggagagacaccatcgaggagcacaggcagtttgggggcaactgtgatgtggacgtgtctttcatgtacctgaccttcttcctcgaggacgacgacaagctcgagcagatcaggaaggattacaccagcggagccatgctcaccggtgagctcaagaaggcactcatagaggttctgcagcccttgatcgcagagcaccaggcccggcgcaaggaggtcacggatgagatagtgaaagagttcatgactccccggaagctgtccttcgactttcagtagcactcgttttacatatgcttataaaagaagtgatgtatcagtaatgtatcaataatcccagcccagtcaaagcaccgccacctgtaggcttctgtctcatggtaattactgggcctggcctctgtaagcctgtgtatgttatcaatactgtttcttcctgtgagttccattatttctatctcttatgggcaaagcattgtgggtaattggtgctggctaacattgcatggtcggatagagaagtccagctgtgagtctctccccaaagcagccccacagtggagcctttggctggaagtccatgggccaccctgttcttgtccatggaggactccgagggttccaagtatactcttaagacccactctgtttaaaaatatatattctatgtatgcgtatatggaattgaaatgtcattattgtaacctagaaagtgctttgaaatattgatgtggggaggtttattgagcacaagatgtatttcagcccatgccccctcccaaaaagaaattgataagtaaaagcttcgttatacatttgactaagaaatcacccagctttaaagctgcttttaacaatgaagattgaacagagttcagcaattttgattaaattaagacttgggggtgaaactttccagtttactgaactccagaccatgcatgtagtccactccagaaatcatgctcgcttcccttggcacaccagtgttctcctgccaaatgaccctagaccctctgtcctgcagagtcagggtggcttttcccctgactgtgtccgatgccaaggagtcctggcctccgcagatgcttcattttgacccttggctgcagtggaagtcagcacagagcagtgccctggctgtgtccctggacgggtggacttagctagggagaaagtcgaggcagcagccctcgaggccctcacagatgtctaggcaggcctcatttcatcacgcagcatgtgcaggcctggaagagcaaagccaaatctcagggaagtccttggttgatgtatctgggtctcctctggagcactctgccctcc

SEQ ID NO: 195596 - DNA, 3092 bp, Homo sapiens
  Payload ID: 18614
  Gene Name: tryptophanyl-tRNA synthetase
  Uniprot ID: P23381
  ENST ID: ENST00000355338
  CDS Start-End: 620-2035
tgtcaagccctatgctgggtctggtgtgggtggaaatcaaacacaaaacacagatccccccggaggccccagagcgatgaaagcaacaaacaagatacgaccagagatgggttttgaaggatgaataggagttagctgagctgtcaatagtaagaagtaaggttggtccaaggcacagcgctttctgaaggaacaggaagtgaaaggaaggcgagcggctatgagagaccgcgttaagcggcacggggcgctttaggcgctgcccagtcccggcccctccagcccggggcccgccgctcaccacacgcaccggaagcgctcggttctcccggaggcagaccggccagcacactaccatccagtcacgttccgacgcgacgccgcggccgccagccaatcagtggcggcctctgccccgcccccgcgcgaacagccaatgacggcgccgtcgggccggaagttgttccgtccggacggcgtttccacggacgcccaggagacagccggttgctgagccgggagcgctgactggcccggctgggcaggtcttgactcgtctgctgaacaaatcctctgacctcaggccggctgtgaacgtagttcctgagagatagcaaacatgcccaacagtgagcccgcatctctgctggagctgttcaacagcatcgccacacaaggggagctcgtaaggtccctcaaagcgggaaatgcgtcaaaggatgaaattgattctgcagtaaagatgttggtgtcattaaaaatgagctacaaagctgccgcgggggaggattacaaggctgactgtcctccagggaacccagcacctaccagtaatcatggcccagatgccacagaagctgaagaggattttgtggacccatggacagtacagacaagcagtgcaaaaggcatagactacgataagctcattgttcggtttggaagtagtaaaattgacaaagagctaataaaccgaatagagagagccaccggccaaagaccacaccacttcctgcgcagaggcatcttcttctcacacagagatatgaatcaggttcttgatgcctatgaaaataagaagccattttatctgtacacgggccggggcccctcttctgaagcaatgcatgtaggtcacctcattccatttattttcacaaagtggctccaggatgtatttaacgtgcccttggtcatccagatgacggatgacgagaagtatctgtggaaggacctgaccctggaccaggcctatagctatgctgtggagaatgccaaggacatcatcgcctgtggctttgacatcaacaagactttcatattctctgacctggactacatggggatgagctcaggtttctacaaaaatgtggtgaagattcaaaagcatgttaccttcaaccaagtgaaaggcattttcggcttcactgacagcgactgcattgggaagatcagttttcctgccatccaggctgctccctccttcagcaactcattcccacagatcttccgagacaggacggatatccagtgccttatcccatgtgccattgaccaggatccttactttagaatgacaagggacgtcgcccccaggatcggctatcctaaaccagccctgctgcactccaccttcttcccagccctgcagggcgcccagaccaaaatgagtgccagcgaccccaactcctccatcttcctcaccgacacggccaagcagatcaaaaccaaggtcaataagcatgcgttttctggagggagagacaccatcgaggagcacaggcagtttgggggcaactgtgatgtggacgtgtctttcatgtacctgaccttcttcctcgaggacgacgacaagctcgagcagatcaggaaggattacaccagcggagccatgctcaccggtgagctcaagaaggcactcatagaggttctgcagcccttgatcgcagagcaccaggcccggcgcaaggaggtcacggatgagatagtgaaagagttcatgactccccggaagctgtccttcgactttcagtagcactcgttttacatatgcttataaaagaagtgatgtatcagtaatgtatcaataatcccagcccagtcaaagcaccgccacctgtaggcttctgtctcatggtaattactgggcctggcctctgtaagcctgtgtatgttatcaatactgtttcttcctgtgagttccattatttctatctcttatgggcaaagcattgtgggtaattggtgctggctaacattgcatggtcggatagagaagtccagctgtgagtctctccccaaagcagccccacagtggagcctttggctggaagtccatgggccaccctgttcttgtccatggaggactccgagggttccaagtatactcttaagacccactctgtttaaaaatatatattctatgtatgcgtatatggaattgaaatgtcattattgtaacctagaaagtgctttgaaatattgatgtggggaggtttattgagcacaagatgtatttcagcccatgccccctcccaaaaagaaattgataagtaaaagcttcgttatacatttgactaagaaatcacccagctttaaagctgcttttaacaatgaagattgaacagagttcagcaattttgattaaattaagacttgggggtgaaactttccagtttactgaactccagaccatgcatgtagtccactccagaaatcatgctcgcttcccttggcacaccagtgttctcctgccaaatgaccctagaccctctgtcctgcagagtcagggtggcttttcccctgactgtgtccgatgccaaggagtcctggcctccgcagatgcttcattttgacccttggctgcagtggaagtcagcacagagcagtgccctggctgtgtccctggacgggtggacttagctagggagaaagtcgaggcagcagccctcgaggccctcacagatgtctaggcaggcctcatttcatcacgcagcatgtgcaggcctggaagagcaaagccaaatctcagggaagtccttggttgatgtatctgggtctcctctggagcactctgccctcctgtcacccag

SEQ ID NO: 195597 - DNA, 2466 bp, Homo sapiens
  Payload ID: 18614
  Gene Name: tryptophanyl-tRNA synthetase
  Uniprot ID: P23381
  ENST ID: ENST00000358655
  CDS Start-End: 101-1393
cggacggcgtttccacggacgcccaggagacagccggttgctgagccgggagcgctgactggcccggctgggcagggatgaaattgattctgcagtaaagatgttggtgtcattaaaaatgagctacaaagctgccgcgggggaggattacaaggctgactgtcctccagggaacccagcacctaccagtaatcatggcccagatgccacagaagctgaagaggattttgtggacccatggacagtacagacaagcagtgcaaaaggcatagactacgataagctcattgttcggtttggaagtagtaaaattgacaaagagctaataaaccgaatagagagagccaccggccaaagaccacaccacttcctgcgcagaggcatcttcttctcacacagagatatgaatcaggttcttgatgcctatgaaaataagaagccattttatctgtacacgggccggggcccctcttctgaagcaatgcatgtaggtcacctcattccatttattttcacaaagtggctccaggatgtatttaacgtgcccttggtcatccagatgacggatgacgagaagtatctgtggaaggacctgaccctggaccaggcctatagctatgctgtggagaatgccaaggacatcatcgcctgtggctttgacatcaacaagactttcatattctctgacctggactacatggggatgagctcaggtttctacaaaaatgtggtgaagattcaaaagcatgttaccttcaaccaagtgaaaggcattttcggcttcactgacagcgactgcattgggaagatcagttttcctgccatccaggctgctccctccttcagcaactcattcccacagatcttccgagacaggacggatatccagtgccttatcccatgtgccattgaccaggatccttactttagaatgacaagggacgtcgcccccaggatcggctatcctaaaccagccctgctgcactccaccttcttcccagccctgcagggcgcccagaccaaaatgagtgccagcgaccccaactcctccatcttcctcaccgacacggccaagcagatcaaaaccaaggtcaataagcatgcgttttctggagggagagacaccatcgaggagcacaggcagtttgggggcaactgtgatgtggacgtgtctttcatgtacctgaccttcttcctcgaggacgacgacaagctcgagcagatcaggaaggattacaccagcggagccatgctcaccggtgagctcaagaaggcactcatagaggttctgcagcccttgatcgcagagcaccaggcccggcgcaaggaggtcacggatgagatagtgaaagagttcatgactccccggaagctgtccttcgactttcagtagcactcgttttacatatgcttataaaagaagtgatgtatcagtaatgtatcaataatcccagcccagtcaaagcaccgccacctgtaggcttctgtctcatggtaattactgggcctggcctctgtaagcctgtgtatgttatcaatactgtttcttcctgtgagttccattatttctatctcttatgggcaaagcattgtgggtaattggtgctggctaacattgcatggtcggatagagaagtccagctgtgagtctctccccaaagcagccccacagtggagcctttggctggaagtccatgggccaccctgttcttgtccatggaggactccgagggttccaagtatactcttaagacccactctgtttaaaaatatatattctatgtatgcgtatatggaattgaaatgtcattattgtaacctagaaagtgctttgaaatattgatgtggggaggtttattgagcacaagatgtatttcagcccatgccccctcccaaaaagaaattgataagtaaaagcttcgttatacatttgactaagaaatcacccagctttaaagctgcttttaacaatgaagattgaacagagttcagcaattttgattaaattaagacttgggggtgaaactttccagtttactgaactccagaccatgcatgtagtccactccagaaatcatgctcgcttcccttggcacaccagtgttctcctgccaaatgaccctagaccctctgtcctgcagagtcagggtggcttttcccctgactgtgtccgatgccaaggagtcctggcctccgcagatgcttcattttgacccttggctgcagtggaagtcagcacagagcagtgccctggctgtgtccctggacgggtggacttagctagggagaaagtcgaggcagcagccctcgaggccctcacagatgtctaggcaggcctcatttcatcacgcagcatgtgcaggcctggaagagcaaagccaaatctcagggaagtccttggttgatgtatctgggtctcctctggagcactctgccctcctgtcacccagtagagtaaataaactt

SEQ ID NO: 195598 - DNA, 2938 bp, Homo sapiens
  Payload ID: 18614
  Gene Name: tryptophanyl-tRNA synthetase
  Uniprot ID: P23381
  ENST ID: ENST00000392882
  CDS Start-End: 436-1851
atttggaggccagcggggggtgaggggtggctgatgcaatgaccagctaatggctcgattctcaagagggtttcattggtctcaacctggccccccaggcaacccacccctgattggacagtctcatcaagaaggttggtcaagagctcaagtgtttctgagaatctgggtgatttataagaaacccttagctgaatgcagggtggggagaacgaaagacaaaagcatcttttttcagaagggaaactgaaagaaagaggggaagagtattaaagaccatttctggctgggcagggcactctcagcagctcaactgcccagcgtgaccagtggccacctctgcagtgtcttccacaacctggtcttgactcgtctgctgaacaaatcctctgacctcaggccggctgtgaacgtagttcctgagagatagcaaacatgcccaacagtgagcccgcatctctgctggagctgttcaacagcatcgccacacaaggggagctcgtaaggtccctcaaagcgggaaatgcgtcaaaggatgaaattgattctgcagtaaagatgttggtgtcattaaaaatgagctacaaagctgccgcgggggaggattacaaggctgactgtcctccagggaacccagcacctaccagtaatcatggcccagatgccacagaagctgaagaggattttgtggacccatggacagtacagacaagcagtgcaaaaggcatagactacgataagctcattgttcggtttggaagtagtaaaattgacaaagagctaataaaccgaatagagagagccaccggccaaagaccacaccacttcctgcgcagaggcatcttcttctcacacagagatatgaatcaggttcttgatgcctatgaaaataagaagccattttatctgtacacgggccggggcccctcttctgaagcaatgcatgtaggtcacctcattccatttattttcacaaagtggctccaggatgtatttaacgtgcccttggtcatccagatgacggatgacgagaagtatctgtggaaggacctgaccctggaccaggcctatagctatgctgtggagaatgccaaggacatcatcgcctgtggctttgacatcaacaagactttcatattctctgacctggactacatggggatgagctcaggtttctacaaaaatgtggtgaagattcaaaagcatgttaccttcaaccaagtgaaaggcattttcggcttcactgacagcgactgcattgggaagatcagttttcctgccatccaggctgctccctccttcagcaactcattcccacagatcttccgagacaggacggatatccagtgccttatcccatgtgccattgaccaggatccttactttagaatgacaagggacgtcgcccccaggatcggctatcctaaaccagccctgctgcactccaccttcttcccagccctgcagggcgcccagaccaaaatgagtgccagcgaccccaactcctccatcttcctcaccgacacggccaagcagatcaaaaccaaggtcaataagcatgcgttttctggagggagagacaccatcgaggagcacaggcagtttgggggcaactgtgatgtggacgtgtctttcatgtacctgaccttcttcctcgaggacgacgacaagctcgagcagatcaggaaggattacaccagcggagccatgctcaccggtgagctcaagaaggcactcatagaggttctgcagcccttgatcgcagagcaccaggcccggcgcaaggaggtcacggatgagatagtgaaagagttcatgactccccggaagctgtccttcgactttcagtagcactcgttttacatatgcttataaaagaagtgatgtatcagtaatgtatcaataatcccagcccagtcaaagcaccgccacctgtaggcttctgtctcatggtaattactgggcctggcctctgtaagcctgtgtatgttatcaatactgtttcttcctgtgagttccattatttctatctcttatgggcaaagcattgtgggtaattggtgctggctaacattgcatggtcggatagagaagtccagctgtgagtctctccccaaagcagccccacagtggagcctttggctggaagtccatgggccaccctgttcttgtccatggaggactccgagggttccaagtatactcttaagacccactctgtttaaaaatatatattctatgtatgcgtatatggaattgaaatgtcattattgtaacctagaaagtgctttgaaatattgatgtggggaggtttattgagcacaagatgtatttcagcccatgccccctcccaaaaagaaattgataagtaaaagcttcgttatacatttgactaagaaatcacccagctttaaagctgcttttaacaatgaagattgaacagagttcagcaattttgattaaattaagacttgggggtgaaactttccagtttactgaactccagaccatgcatgtagtccactccagaaatcatgctcgcttcccttggcacaccagtgttctcctgccaaatgaccctagaccctctgtcctgcagagtcagggtggcttttcccctgactgtgtccgatgccaaggagtcctggcctccgcagatgcttcattttgacccttggctgcagtggaagtcagcacagagcagtgccctggctgtgtccctggacgggtggacttagctagggagaaagtcgaggcagcagccctcgaggccctcacagatgtctaggcaggcctcatttcatcacgcagcatgtgcaggcctggaagagcaaagccaaatctcagggaagtccttggttgatgtatctgggtctcctctggagcactctgccctcctgtcacccagtagagtaaataaacttccttggctcctgct

SEQ ID NO: 195599 - DNA, 640 bp, Homo sapiens
  Payload ID: 18614
  Gene Name: tryptophanyl-tRNA synthetase
  ENST ID: ENST00000556698
  CDS Start-End: 183-640
actctcagcagctcaactgcccagcgtgaccagtggccacctctgcagtgtcttccacaacctggacaatggtccttaaccttttggcatctcagcctcctttcgaaagtcttgactcgtctgctgaacaaatcctctgacctcaggccggctgtgaacgtagttcctgagagatagcaaacatgcccaacagtgagcccgcatctctgctggagctgttcaacagcatcgccacacaaggggagctcgtaaggtccctcaaagcgggaaatgcgtcaaaggatgaaattgattctgcagtaaagatgttggtgtcattaaaaatgagctacaaagctgccgcgggggaggattacaaggctgactgtcctccagggaacccagcacctaccagtaatcatggcccagatgccacagaagctgaagaggattttgtggacccatggacagtacagacaagcagtgcaaaaggcatagactacgataagctcattgttcggtttggaagtagtaaaattgacaaagagctaataaaccgaatagagagagccaccggccaaagaccacaccacttcctgcgcagaggcatcttcttctcacacagagatatgaatcaggttcttgatgcctatgaaaataa

SEQ ID NO: 195600 - DNA, 848 bp, Homo sapiens
  Payload ID: 18614
  Gene Name: tryptophanyl-tRNA synthetase
  ENST ID: ENST00000557722
  CDS Start-End: 211-848
aggagacagccggttgctgagccgggagcgctgactggcccggctgggcaggatgttcctgaactccaagttgaaaaacctctgaagttcaactcaattctgaaagtcaacaaagaaataaaggaggatgtcaatagtcttgactcgtctgctgaacaaatcctctgacctcaggccggctgtgaacgtagttcctgagagatagcaaacatgcccaacagtgagcccgcatctctgctggagctgttcaacagcatcgccacacaaggggagctcgtaaggtccctcaaagcgggaaatgcgtcaaaggatgaaattgattctgcagtaaagatgttggtgtcattaaaaatgagctacaaagctgccgcgggggaggattacaaggctgactgtcctccagggaacccagcacctaccagtaatcatggcccagatgccacagaagctgaagaggattttgtggacccatggacagtacagacaagcagtgcaaaaggcatagactacgataagctcattgttcggtttggaagtagtaaaattgacaaagagctaataaaccgaatagagagagccaccggccaaagaccacaccacttcctgcgcagaggcatcttcttctcacacagagatatgaatcaggttcttgatgcctatgaaaataagaagccattttatctgtacacgggccggggcccctcttctgaagcaatgcatgtaggtcacctcattccatttattttcacaaagtggctccaggatgtatttaacgtgcccttggtcatccagatgacggatgacgagaagtatctgtggaaggacctgaccctggaccaggcctatag

SEQ ID NO: 195601 - DNA, 538 bp, Homo sapiens
  Payload ID: 18614
  Gene Name: tryptophanyl-tRNA synthetase
  ENST ID: ENST00000554820
  CDS Start-End: 281-538
gtgatttataagaaacccttagctgaatgcagggtggggagaacgaaagacaaaagcatcttttttcagaagggaaactgaaagaaagaggggaagagtattaaagaccatttctggctgggcagggcactctcagcagctcaactgcccagcgtgaccagtggccacctctgcagtgtcttccacaacctggcctcctttcgaaagtcttgactcgtctgctgaacaaatcctctgacctcaggccggctgtgaacgtagttcctgagagatagcaaacatgcccaacagtgagcccgcatctctgctggagctgttcaacagcatcgccacacaaggggagctcgtaaggtccctcaaagcgggaaatgcgtcaaaggatgaaattgattctgcagtaaagatgttggtgtcattaaaaatgagctacaaagctgccgcgggggaggattacaaggctgactgtcctccagggaacccagcacctaccagtaatcatggcccagatgccacagaagctgaagaggattttgtggac

SEQ ID NO: 195602 - DNA, 658 bp, Homo sapiens
  Payload ID: 18614
  Gene Name: tryptophanyl-tRNA synthetase
  ENST ID: ENST00000555031
  CDS Start-End: 494-658
ggctcgattctcaagagggtttcattggtctcaacctggccccccaggcaacccacccctgattggacagtctcatcaagaaggttggtcaagagctcaagtgtttctgagaatctgggtgatttataagaaacccttagctgaatgcagggtggggagaacgaaagacaaaagcatcttttttcagaagggaaactgaaagaaagaggggaagagtattaaagaccatttctggctgggcagggcactctcagcagctcaactgcccagcgtgaccagtggccacctctgcagtgtcttccacaacctgggtgaatctacttctcttaacaaagtctcaatgtcctatttgcaatttatgtggtaaacactgaagacaatggtccttaaccttttggcatctcagcctcctttcgaaagtcttgactcgtctgctgaacaaatcctctgacctcaggccggctgtgaacgtagttcctgagagatagcaaacatgcccaacagtgagcccgcatctctgctggagctgttcaacagcatcgccacacaaggggagctcgtaaggtccctcaaagcgggaaatgcgtcaaaggatgaaattgattctgcagtaaagatgttggtgtcattaaaaatgagctacaaagctgccgcgggg

SEQ ID NO: 195603 - DNA, 677 bp, Homo sapiens
  Payload ID: 18614
  Gene Name: tryptophanyl-tRNA synthetase
  ENST ID: ENST00000555410
  CDS Start-End: 147-677
ggcagggcactctcagcagctcaactgcccagcgtgaccagtggccacctctgcagtgtcttccacaacctggtcttgactcgtctgctgaacaaatcctctgacctcaggccggctgtgaacgtagttcctgagagatagcaaacatgcccaacagtgagcccgcatctctgctggagctgttcaacagcatcgccacacaaggggagctcgtaaggtccctcaaagcgggaaatgcgtcaaaggctgagtctcactctgtcgcccaggctggagtgcactggcacagtcttggctcactacaacctctgcctcctgagttcgagcgattctcctgccctggcctcgatgaaattgattctgcagtaaagatgttggtgtcattaaaaatgagctacaaagctgccgcgggggaggattacaaggctgactgtcctccagggaacccagcacctaccagtaatcatggcccagatgccacagaagctgaagaggattttgtggacccatggacagtacagacaagcagtgcaaaaggcatagactacgataagctcattgttcggtttggaagtagtaaaattgacaaagagctaataaaccgaatagagagagccaccggccaaagaccacaccacttcctgcgcagaggcatcttcttctcacacagagatatg

SEQ ID NO: 195604 - DNA, 560 bp, Homo sapiens
  Payload ID: 18614
  Gene Name: tryptophanyl-tRNA synthetase
  ENST ID: ENST00000554605
  CDS Start-End: 357-560
gagacagccggttgctgagccgggagcgctgactggcccggctgggcaggaagggaaactgaaagaaagaggggaagagtattaaagaccatttctggctgggcagggcactctcagcagctcaactgcccagcgtgaccagtggccacctctgcagtgtcttccacaacctgggtgaatctacttctcttaacaaagtctcaatgtcctatttgcaatttatgtggtaaacactgaagacaatggtccttaaccttttggcatctcagcctcctttcgaaagtcttgactcgtctgctgaacaaatcctctgacctcaggccggctgtgaacgtagttcctgagagatagcaaacatgcccaacagtgagcccgcatctctgctggagctgttcaacagcatcgccacacaaggggagctcgtaaggtccctcaaagcgggaaatgcgtcaaaggatgaaattgattctgcagtaaagatgttggtgtcattaaaaatgagctacaaagctgccgcgggggaggattacaaggctgactgtcctccagggaacccagca

SEQ ID NO: 195605 - DNA, 564 bp, Homo sapiens
  Payload ID: 18614
  Gene Name: tryptophanyl-tRNA synthetase
  ENST ID: ENST00000556209
  CDS Start-End: 354-564
agcgctgactggcccggctgggcaggaagggaaactgaaagaaagaggggaagagtattaaagaccatttctggctgggcagggcactctcagcagctcaactgcccagcgtgaccagtggccacctctgcagtgtcttccacaacctggagtgtactatttgttaaacaggtgaatctacttctcttaacaaagtctcaatgtcctatttgcaatttatgtggtaaacactgaagacaatggtccttaaccttttggcatctcagcctcctttcgaaagtcttgactcgtctgctgaacaaatcctctgacctcaggccggctgtgaacgtagttcctgagagatagcaaacatgcccaacagtgagcccgcatctctgctggagctgttcaacagcatcgccacacaaggggagctcgtaaggtccctcaaagcgggaaatgcgtcaaaggatgaaattgattctgcagtaaagatgttggtgtcattaaaaatgagctacaaagctgccgcgggggaggattacaaggctgactgtcctccagggaacccagcacctacca

SEQ ID NO: 195606 - DNA, 847 bp, Homo sapiens
  Payload ID: 18614
  Gene Name: tryptophanyl-tRNA synthetase
  ENST ID: ENST00000556504
  CDS Start-End: 177-847
ggagcgctgactggcccggctgggcaggaagggaaactgaaagaaagaggggaagagtattaaagaccatttctggctgggcagggcactctcagcagctcaactgcccagcgtgaccagtggccacctctgcagtgtcttccacaacctgggatgaaattgattctgcagtaaagatgttggtgtcattaaaaatgagctacaaagctgccgcgggggaggattacaaggctgactgtcctccagggaacccagcacctaccagtaatcatggcccagatgccacagaagctgaagaggattttgtggacccatggacagtacagacaagcagtgcaaaaggcatagactacgataagctcattgttcggtttggaagtagtaaaattgacaaagagctaataaaccgaatagagagagccaccggccaaagaccacaccacttcctgcgcagaggcatcttcttctcacacagagatatgaatcaggttcttgatgcctatgaaaataagaagccattttatctgtacacgggccggggcccctcttctgaagcaatgcatgtaggtcacctcattccatttattttcacaaagtggctccaggatgtatttaacgtgcccttggtcatccagatgacggatgacgagaagtatctgtggaaggacctgaccctggaccaggcctatagctatgctgtggagaatgccaaggacatcatcgcctgtggctttgacatcaacaagactttcatattctctgacctggactacatggggatgagctcaggtttctacaaaaatgtggtgaagattcaaaagcatgttaccttcaaccaagtgaaagg

SEQ ID NO: 195607 - DNA, 707 bp, Homo sapiens
  Payload ID: 18614
  Gene Name: tryptophanyl-tRNA synthetase
  ENST ID: ENST00000553524
  CDS Start-End: 258-707
ggacggcgtttccacggacgcccaggagacagccggttgctgagccgggagcgctgactggcccggctgggcagggtgaatctacttctcttaacaaagtctcaatgtcctatttgcaatttatgtggtaaacactgaagacaatggtccttaaccttttggcatctcagcctcctttcgaaagtcttgactcgtctgctgaacaaatcctctgacctcaggccggctgtgaacgtagttcctgagagatagcaaacatgcccaacagtgagcccgcatctctgctggagctgttcaacagcatcgccacacaaggggagctcgtaaggtccctcaaagcgggaaatgcgtcaaaggatgaaattgattctgcagtaaagatgttggtgtcattaaaaatgagctacaaagctgccgcgggggaggattacaaggctgactgtcctccagggaacccagcacctaccagtaatcatggcccagatgccacagaagctgaagaggattttgtggacccatggacagtacagacaagcagtgcaaaaggcatagactacgataagctcattgttcggtttggaagtagtaaaattgacaaagagctaataaaccgaatagagagagccaccggccaaagaccacaccacttcctgcgcagaggcatcttcttctcacacagagatatgaatcaggttcttgatgcctat

SEQ ID NO: 195608 - DNA, 517 bp, Homo sapiens
  Payload ID: 18614
  Gene Name: tryptophanyl-tRNA synthetase
  ENST ID: ENST00000556295
  CDS Start-End: 344-517
taagaaacccttagctgaatgcagggtggggagaacgaaagacaaaagcatcttttttcagaagggaaactgaaagaaagaggggaagagtattaaagaccatttctggctgggcagggcactctcagcagctcaactgcccagcgtgaccagtggccacctctgcagtgtcttccacaacctggatgttcctgaactccaagttgaaaaacctctgaagttcaactcaattctgaaagtcaacaaagaaataaaggaggatgtcaatagtcttgactcgtctgctgaacaaatcctctgacctcaggccggctgtgaacgtagttcctgagagatagcaaacatgcccaacagtgagcccgcatctctgctggagctgttcaacagcatcgccacacaaggggagctcgtaaggtccctcaaagcgggaaatgcgtcaaaggatgaaattgattctgcagtaaagatgttggtgtcattaaaaatgagctacaaagctgccgcgggggaggattac

SEQ ID NO: 195609 - DNA, 584 bp, Homo sapiens
  Payload ID: 18614
  Gene Name: tryptophanyl-tRNA synthetase
  ENST ID: ENST00000556660
  CDS Start-End: 241-584
aatgtctttgccttttaagataatgttcatgctgttatttggcggggaaagcaatctttcttttagtgtttaaaaaaaatggaacatgatgggtcccaaaaggtgtcaagaaatccttgctctaaagaagtcattttcttgtcctctgggaacttgccagtccaaagtcttgactcgtctgctgaacaaatcctctgacctcaggccggctgtgaacgtagttcctgagagatagcaaacatgcccaacagtgagcccgcatctctgctggagctgttcaacagcatcgccacacaaggggagctcgtaaggtccctcaaagcgggaaatgcgtcaaaggatgaaattgattctgcagtaaagatgttggtgtcattaaaaatgagctacaaagctgccgcgggggaggattacaaggctgactgtcctccagggaacccagcacctaccagtaatcatggcccagatgccacagaagctgaagaggattttgtggacccatggacagtacagacaagcagtgcaaaaggcatagactacgataagctcattgttcggtttggaagtagtaaaattgacaaaga

SEQ ID NO: 195610 - DNA, 2080 bp, Homo sapiens
  Payload ID: 18614
  Gene Name: tryptophanyl-tRNA synthetase
  Uniprot ID: P23381
  ENST ID: ENST00000557135
  CDS Start-End: 269-1684
actctcagcagctcaactgcccagcgtgaccagtggccacctctgcagtgtcttccacaacctggagtgtactatttgttaaacaggtgaatctacttctcttaacaaagtctcaatgtcctatttgcaatttatgtggtaaacactgaagacaatggtccttaaccttttggcatctcagcctcctttcgaaagtcttgactcgtctgctgaacaaatcctctgacctcaggccggctgtgaacgtagttcctgagagatagcaaacatgcccaacagtgagcccgcatctctgctggagctgttcaacagcatcgccacacaaggggagctcgtaaggtccctcaaagcgggaaatgcgtcaaaggatgaaattgattctgcagtaaagatgttggtgtcattaaaaatgagctacaaagctgccgcgggggaggattacaaggctgactgtcctccagggaacccagcacctaccagtaatcatggcccagatgccacagaagctgaagaggattttgtggacccatggacagtacagacaagcagtgcaaaaggcatagactacgataagctcattgttcggtttggaagtagtaaaattgacaaagagctaataaaccgaatagagagagccaccggccaaagaccacaccacttcctgcgcagaggcatcttcttctcacacagagatatgaatcaggttcttgatgcctatgaaaataagaagccattttatctgtacacgggccggggcccctcttctgaagcaatgcatgtaggtcacctcattccatttattttcacaaagtggctccaggatgtatttaacgtgcccttggtcatccagatgacggatgacgagaagtatctgtggaaggacctgaccctggaccaggcctatagctatgctgtggagaatgccaaggacatcatcgcctgtggctttgacatcaacaagactttcatattctctgacctggactacatggggatgagctcaggtttctacaaaaatgtggtgaagattcaaaagcatgttaccttcaaccaagtgaaaggcattttcggcttcactgacagcgactgcattgggaagatcagttttcctgccatccaggctgctccctccttcagcaactcattcccacagatcttccgagacaggacggatatccagtgccttatcccatgtgccattgaccaggatccttactttagaatgacaagggacgtcgcccccaggatcggctatcctaaaccagccctgctgcactccaccttcttcccagccctgcagggcgcccagaccaaaatgagtgccagcgaccccaactcctccatcttcctcaccgacacggccaagcagatcaaaaccaaggtcaataagcatgcgttttctggagggagagacaccatcgaggagcacaggcagtttgggggcaactgtgatgtggacgtgtctttcatgtacctgaccttcttcctcgaggacgacgacaagctcgagcagatcaggaaggattacaccagcggagccatgctcaccggtgagctcaagaaggcactcatagaggttctgcagcccttgatcgcagagcaccaggcccggcgcaaggaggtcacggatgagatagtgaaagagttcatgactccccggaagctgtccttcgactttcagtagcactcgttttacatatgcttataaaagaagtgatgtatcagtaatgtatcaataatcccagcccagtcaaagcaccgccacctgtaggcttctgtctcatggtaattactgggcctggcctctgtaagcctgtgtatgttatcaatactgtttcttcctgtgagttccattatttctatctcttatgggcaaagcattgtgggtaattggtgctggctaacattgcatggtcggatagagaagtccagctgtgagtctctccccaaagcagccccacagtggagcctttggctggaagtccatgggccaccctgttcttgtccatggaggactccgagggttccaagtatactcttaagacccactctgtttaaaaatatatattctatgtatgcg

SEQ ID NO: 195611 - DNA, 562 bp, Homo sapiens
  Payload ID: 18614
  Gene Name: tryptophanyl-tRNA synthetase
  ENST ID: ENST00000554772
  CDS Start-End: 190-562
gacagccggttgctgagccgggagcgctgactggcccggctgggcaggggcactctcagcagctcaactgcccagcgtgaccagtggccacctctgcagtgtcttccacaacctggtcttgactcgtctgctgaacaaatcctctgacctcaggccggctgtgaacgtagttcctgagagatagcaaacatgcccaacagtgagcccgcatctctgctggagctgttcaacagcatcgccacacaaggggagctcgtaaggtccctcaaagcgggaaatgcgtcaaaggatgaaattgattctgcagtaaagatgttggtgtcattaaaaatgagctacaaagctgccgcgggggaggattacaaggctgactgtcctccagggaacccagcacctaccagtaatcatggcccagatgccacagaagctgaagaggattttgtggacccatggacagtacagacaagcagtgcaaaaggcatagactacgataagctcattgttcggtttggaagtagtaaaattgacaaagagctaataaaccgaatagagagagccaccg

SEQ ID NO: 195612 - DNA, 801 bp, Homo sapiens
  Payload ID: 18614
  Gene Name: tryptophanyl-tRNA synthetase
  ENST ID: ENST00000553395
  CDS Start-End: 122-801
aatgaccagctaatggctcgattctcaagagggtttcattggtctcaacctggccccccaggcaacccacccctgattggacagtctcatcaagaaggatgaaattgattctgcagtaaagatgttggtgtcattaaaaatgagctacaaagctgccgcgggggaggattacaaggctgactgtcctccagggaacccagcacctaccagtaatcatggcccagatgccacagaagctgaagaggattttgtggacccatggacagtacagacaagcagtgcaaaaggcatagactacgataagctcattgttcggtttggaagtagtaaaattgacaaagagctaataaaccgaatagagagagccaccggccaaagaccacaccacttcctgcgcagaggcatcttcttctcacacagagatatgaatcaggttcttgatgcctatgaaaataagaagccattttatctgtacacgggccggggcccctcttctgaagcaatgcatgtaggtcacctcattccatttattttcacaaagtggctccaggatgtatttaacgtgcccttggtcatccagatgacggatgacgagaagtatctgtggaaggacctgaccctggaccaggcctatagctatgctgtggagaatgccaaggacatcatcgcctgtggctttgacatcaacaagactttcatattctctgacctggactacatggggatgagctcaggtttctacaaaaatgtggtgaagattcaaaagcatgttaccttcaaccaagtgaaaggcattttcgg

SEQ ID NO: 195613 - DNA, 547 bp, Homo sapiens
  Payload ID: 18614
  Gene Name: tryptophanyl-tRNA synthetase
  ENST ID: ENST00000556338
  CDS Start-End: 127-547
gatgcaatgaccagctaatggctcgattctcaagagggtttcattggtctcaacctggccccccaggcaacccacccctgattggacagtctcatcaagaaggatgaaattgattctgcagtaaagatgttggtgtcattaaaaatgagctacaaagctgccgcgggggaggattacaaggctgactgtcctccagggaacccagcacctaccagtaatcatggcccagatgccacagaagctgaagaggattttgtggacccatggacagtacagacaagcagtgcaaaaggcatagactacgataagctcattgttcggtttggaagtagtaaaattgacaaagagctaataaaccgaatagagagagccaccggccaaagaccacaccacttcctgcgcagaggcatcttcttctcacacagagatatgaatcaggttcttgatgcctatgaaaataagaagccattttatctgtacacgggccggggcccctcttctgaagcaatgcatgtaggtcacctcattccatttattttcacaaagt

SEQ ID NO: 195614 - DNA, 821 bp, Homo sapiens
  Payload ID: 18614
  Gene Name: tryptophanyl-tRNA synthetase
  ENST ID: ENST00000557297
  CDS Start-End: 359-821
aactgcccagcgtgaccagtggccacctctgcagtgtcttccacaacctggagtgtactatttgttaaacaggtgaatctacttctcttaacaaagtctcaatgtcctatttgcaatttatgtggtaaacactgaagacaatggtccttaaccttttggcatctcagcctcctttcgaaagtcttgactcgtctgctgaacaaatcctctgacctcaggccggctgtgaacgtagttcctgagagatagcaaacatgcccaacagtgagcccgcatctctgctggagctgttcaacagcatcgccacacaaggggagctcgtaaggtccctcaaagcgggaaatgcgtcaaagtaaagatgttggtgtcattaaaaatgagctacaaagctgccgcgggggaggattacaaggctgactgtcctccagggaacccagcacctaccagtaatcatggcccagatgccacagaagctgaagaggattttgtggacccatggacagtacagacaagcagtgcaaaaggcatagactacgataagctcattgttcggtttggaagtagtaaaattgacaaagagctaataaaccgaatagagagagccaccggccaaagaccacaccacttcctgcgcagaggcatcttcttctcacacagagatatgaatcaggttcttgatgcctatgaaaataagaagccattttatctgtacacgggccggggcccctcttctgaagcaatgcatgtaggtcacctcattccatttattttcacaaagtggctccaggatgtatttaacgtgcccttggtcatccagatga

SEQ ID NO: 195615 - DNA, 567 bp, Homo sapiens
  Payload ID: 18614
  Gene Name: tryptophanyl-tRNA synthetase
  ENST ID: ENST00000556783
  CDS Start-End: 120-230
cagccggttgctgagccgggagcgctgactggcccggctgggcaggtcttgactcgtctgctgaacaaatcctctgacctcaggccggctgtgaacgtagttcctgagagatagcaaacatgcccaacagtgagcccgcatctctgctggagctgttcaacagcatcgccacacaaggggagctcgtaaggtccctcaaagcgggaaatgcgtcaaaggggaaactgtgacactcccttggccgaggggagagggattctcaataactgcttcttgaagagacttcaaccagcgctcctgttttcataacccgctttcctgcccccactcctgatgaaattgattctgcagtaaagatgttggtgtcattaaaaatgagctacaaagctgccgcgggggaggattacaaggctgactgtcctccagggaacccagcacctaccagtaatcatggcccagatgccacagaagctgaagaggattttgtggacccatggacagtacagacaagcagtgcaaaaggcatagactacgataagctcattgttcggtttggaagtagtaaaa

SEQ ID NO: 195616 - DNA, 591 bp, Homo sapiens
  Payload ID: 18614
  Gene Name: tryptophanyl-tRNA synthetase
  ENST ID: ENST00000553545
  CDS Start-End: 301-591
aatgaccagctaatggctcgattctcaagagggtttcattggtctcaacctggccccccaggcaacccacccctgattggacagtctcatcaagaagagtgtactatttgttaaacaggtgaatctacttctcttaacaaagtctcaatgtcctatttgcaatttatgtggtaaacactgaagacaatggtccttaaccttttggcatctcagcctcctttcgaaagtcttgactcgtctgctgaacaaatcctctgacctcaggccggctgtgaacgtagttcctgagagatagcaaacatgcccaacagtgagcccgcatctctgctggagctgttcaacagcatcgccacacaaggggagctcgtaaggtccctcaaagcgggaaatgcgtcaaaggatgaaattgattctgcagtaaagatgttggtgtcattaaaaatgagctacaaagctgccgcgggggaggattacaaggctgactgtcctccagggaacccagcacctaccagtaatcatggcccagatgccacagaagctgaagaggattttgtggacccatggacagtacagacaagcagtgcaaaaggc

SEQ ID NO: 195617 - DNA, 553 bp, Homo sapiens
  Payload ID: 18614
  Gene Name: tryptophanyl-tRNA synthetase
  ENST ID: ENST00000556695
  CDS Start-End: 378-553
agaaattaatgtctttgccttttaagataatgttcatgctgttatttggcggggaaagcaatctttcttttagtgtttaaaaaaaatggaacatgatgggtcccaaaaggtgtcaagaaatccttgctctaaagaagtcattttcttgtcctctgggaacttgccagtccaaagagtgtactatttgttaaacaggtgaatctacttctcttaacaaagtctcaatgtcctatttgcaatttatgtggtaaacactgaagacaatggtccttaaccttttggcatctcagcctcctttcgaaagtcttgactcgtctgctgaacaaatcctctgacctcaggccggctgtgaacgtagttcctgagagatagcaaacatgcccaacagtgagcccgcatctctgctggagctgttcaacagcatcgccacacaaggggagctcgtaaggtccctcaaagcgggaaatgcgtcaaaggatgaaattgattctgcagtaaagatgttggtgtcattaaaaatgagctacaaagctgccgcgggggaggattacaa

SEQ ID NO: 195618 - DNA, 2508 bp, Homo sapiens
  Payload ID: 18614
  Gene Name: tryptophanyl-tRNA synthetase
  Uniprot ID: P23381
  ENST ID: ENST00000556645
  CDS Start-End: 834-2126
ggggagtaaggccggggcggagtgaggaaacaagggagggagtgatggagggacgctggcgcggcgcccagtggcctggccctcccgggagtatccttagagcccggcttgctgcccgccgcgttctggcactgtgaggcgcggagcctgccaccgacccctcgcccctttcctctgagcgccgccgacccaccccgtctccctttcccactggcacccttcatcgtctccgcctgttcgcttttcccgaggagagaggcccccatttttatttagcgcctgccatgtgccagaggctttgcgtagtgttgcacttagtcccctcaacggtaatgttagcaggcttctccatgcccattccacagatgaggaaaccgaaggggaagcagaaaagtaatgcgacccttgcccaaggtttcgaataagtccaagctgggattgaaacccaggcgtctgtgaccccagaactcctgatctttccactgcactgtgccgcctcggtgaacagatgcggggaatttacagtttctctttccaccgcccacgactacacaaaatcagtcacactgacgctgagggtggggaacgggaagagggtggggaggttatttggaggccagcggggggtgaggggtggctgatgcaatgaccagctaatggctcgattctcaagagggtttcattggtctcaacctggccccccaggcaacccacccctgattggacagtctcatcaagaagggcactctcagcagctcaactgcccagcgtgaccagtggccacctctgcagtgtcttccacaacctgggatgaaattgattctgcagtaaagatgttggtgtcattaaaaatgagctacaaagctgccgcgggggaggattacaaggctgactgtcctccagggaacccagcacctaccagtaatcatggcccagatgccacagaagctgaagaggattttgtggacccatggacagtacagacaagcagtgcaaaaggcatagactacgataagctcattgttcggtttggaagtagtaaaattgacaaagagctaataaaccgaatagagagagccaccggccaaagaccacaccacttcctgcgcagaggcatcttcttctcacacagagatatgaatcaggttcttgatgcctatgaaaataagaagccattttatctgtacacgggccggggcccctcttctgaagcaatgcatgtaggtcacctcattccatttattttcacaaagtggctccaggatgtatttaacgtgcccttggtcatccagatgacggatgacgagaagtatctgtggaaggacctgaccctggaccaggcctatagctatgctgtggagaatgccaaggacatcatcgcctgtggctttgacatcaacaagactttcatattctctgacctggactacatggggatgagctcaggtttctacaaaaatgtggtgaagattcaaaagcatgttaccttcaaccaagtgaaaggcattttcggcttcactgacagcgactgcattgggaagatcagttttcctgccatccaggctgctccctccttcagcaactcattcccacagatcttccgagacaggacggatatccagtgccttatcccatgtgccattgaccaggatccttactttagaatgacaagggacgtcgcccccaggatcggctatcctaaaccagccctgctgcactccaccttcttcccagccctgcagggcgcccagaccaaaatgagtgccagcgaccccaactcctccatcttcctcaccgacacggccaagcagatcaaaaccaaggtcaataagcatgcgttttctggagggagagacaccatcgaggagcacaggcagtttgggggcaactgtgatgtggacgtgtctttcatgtacctgaccttcttcctcgaggacgacgacaagctcgagcagatcaggaaggattacaccagcggagccatgctcaccggtgagctcaagaaggcactcatagaggttctgcagcccttgatcgcagagcaccaggcccggcgcaaggaggtcacggatgagatagtgaaagagttcatgactccccggaagctgtccttcgactttcagtagcactcgttttacatatgcttataaaagaagtgatgtatcagtaatgtatcaataatcccagcccagtcaaagcaccgccacctgtaggcttctgtctcatggtaattactgggcctggcctctgtaagcctgtgtatgttatcaatactgtttcttcctgtgagttccattatttctatctcttatgggcaaagcattgtgggtaattggtgctggctaacattgcatggtcggatagagaagtccagctgtgagtctctccccaaagcagccccacagtggagcctttggctggaagtccatgggccaccctgttcttgtccatggaggactccgagggttccaagtatactcttaagacccactctgtttaaaaatatat

SEQ ID NO: 195619 - DNA, 719 bp, Homo sapiens
  Payload ID: 18614
  Gene Name: tryptophanyl-tRNA synthetase
  ENST ID: ENST00000554601
  CDS Start-End: 1-557
acaaaaatgtggtgaagattcaaaagcatgttaccttcaaccaagtgaaaggcattttcggcttcactgacagcgactgcattgggaagatcagttttcctgccatccaggctgctccctccttcagcaactcattcccacagatcttccgagacaggacggatatccagtgccttatcccatgtgccattgaccaggatccttactttagaatgacaagggacgtcgcccccaggatcggctatcctaaaccagccctgctgcactccaccttcttcccagccctgcagggcgcccagaccaaaatgagtgccagcgaccccaactcctccatcttcctcaccgacacggccaagcagatcaaaaccaaggtgagcagtggcccaggcagagggcagccagcgggatcagaaacatgccctggggggcacacgcacacacacaccactgcgcagtgctttgggcctcagccacccagccaccgtagcaatgctgaactccaggattgccaactttgctccctgcagaactcaaggcagcctgtccttcccacatgaatcaggtgaatttgttttgtgtcctttcatttaggtaaaattttgaattttttttctttttttccttttctgcttttcttatcagcactgttctgcaggcaaagtcatggcaatttccttaaagttataattagtgtggatgttattaaataatggaaaaga

SEQ ID NO: 195620 - DNA, 563 bp, Homo sapiens
  Payload ID: 18614
  Gene Name: tryptophanyl-tRNA synthetase
  ENST ID: ENST00000554509
  CDS Start-End: 248-563
actctcagcagctcaactgcccagcgtgaccagtggccacctctgcagtgtcttccacaacctgggtgaatctacttctcttaacaaagtctcaatgtcctatttgcaatttatgtggtaaacactgaagacaatggtccttaaccttttggcatctcagcctcctttcgaaagtcttgactcgtctgctgaacaaatcctctgacctcaggccggctgtgaacgtagttcctgagagatagcaaacatgcccaacagtgagcccgcatctctgctggagctgttcaacagcatcgccacacaaggggagctcgtaaggtccctcaaagcgggaaatgcgtcaaaggctgagtctcactctgtcgcccaggctggagtgcactggcacagtcttggctcactacaacctctgcctcctgagttcgagcgattctcctgccctggcctcgatgaaattgattctgcagtaaagatgttggtgtcattaaaaatgagctacaaagctgccgcgggggaggattacaaggctgactgtcctccagggaacccagcacctaccagta

SEQ ID NO: 195621 - DNA, 560 bp, Homo sapiens
  Payload ID: 18614
  Gene Name: tryptophanyl-tRNA synthetase
  ENST ID: ENST00000553769
  CDS Start-End: 248-560
gagacagccggttgctgagccgggagcgctgactggcccggctgggcaggaagggaaactgaaagaaagaggggaagagtattaaagaccatttctggctgggcagggcactctcagcagctcaactgcccagcgtgaccagtggccacctctgcagtgtcttccacaacctggtcttgactcgtctgctgaacaaatcctctgacctcaggccggctgtgaacgtagttcctgagagatagcaaacatgcccaacagtgagcccgcatctctgctggagctgttcaacagcatcgccacacaaggggagctcgtaaggtccctcaaagcgggaaatgcgtcaaaggatgaaattgattctgcagtaaagatgttggtgtcattaaaaatgagctacaaagctgccgcgggggaggattacaaggctgactgtcctccagggaacccagcacctaccagtaatcatggcccagatgccacagaagctgaagaggattttgtggacccatggacagtacagacaagcagtgcaaaaggcatagactacgataagctcattg

SEQ ID NO: 195622 - DNA, 577 bp, Homo sapiens
  Payload ID: 18614
  Gene Name: tryptophanyl-tRNA synthetase
  ENST ID: ENST00000557347
  CDS Start-End: 267-389
gtgatttataagaaacccttagctgaatgcagggtggggagaacgaaagacaaaagcatcttttttcagaagggaaactgaaagaaagaggggaagagtattaaagaccatttctggctgggcagggcactctcagcagctcaactgcccagcgtgaccagtggccacctctgcagtgtcttccacaacctggtcttgactcgtctgctgaacaaatcctctgacctcaggccggctgtgaacgtagttcctgagagatagcaaacatgcccaacagtgagcccgcatctctgctggagctgttcaacagcatcgccacacaaggggagctcgtaaggtccctcaaagcgggaaatgcgtcaaagttggggtctttcaggtggaaatgaagcattcgtaccttcacaaccacttcccgtccaggcagtctccccatctgtattgcagttgtagttaggatgaaattgattctgcagtaaagatgttggtgtcattaaaaatgagctacaaagctgccgcgggggaggattacaaggctgactgtcctccagggaacccagcacctaccagtaatcat

SEQ ID NO: 195623 - DNA, 410 bp, Homo sapiens
  Payload ID: 18614
  Gene Name: tryptophanyl-tRNA synthetase
  ENST ID: ENST00000555813
  CDS Start-End: 221-410
ctcagcagctcaactgcccagcgtgaccagtggccacctctgcagtgtcttccacaacctggtctcaatgtcctatttgcaatttatgtggtaaacactgaagacaatggtccttaaccttttggcatctcagcctcctttcgaaagtcttgactcgtctgctgaacaaatcctctgacctcaggccggctgtgaacgtagttcctgagagatagcaaacatgcccaacagtgagcccgcatctctgctggagctgttcaacagcatcgccacacaaggggagctcgtaaggtccctcaaagcgggaaatgcgtcaaaggatgaaattgattctgcagtaaagatgttggtgtcattaaaaatgagctacaaagctgccgcgggggaggattacaaggctgactgtcctc

SEQ ID NO: 195624 - DNA, 572 bp, Homo sapiens
  Payload ID: 18614
  Gene Name: tryptophanyl-tRNA synthetase
  ENST ID: ENST00000553581
  CDS Start-End: 496-572
agacagccggttgctgagccgggagcgctgactggcccggctgggcagggcaacccacccctgattggacagtctcatcaagaaggttggtcaagagctcaagtgtttctgagaatctgggtgatttataagaaacccttagctgaatgcagggtggggagaacgaaagacaaaagcatcttttttcagaagggaaactgaaagaaagaggggaagagtattaaagaccatttctggctgggcagggcactctcagcagctcaactgcccagcgtgaccagtggccacctctgcagtgtcttccacaacctgggtgaatctacttctcttaacaaagtctcaatgtcctatttgcaatttatgtggtaaacactgaagacaatggtccttaaccttttggcatctcagcctcctttcgaaagtcttgactcgtctgctgaacaaatcctctgacctcaggccggctgtgaacgtagttcctgagagatagcaaacatgcccaacagtgagcccgcatctctgctggagctgttcaacagcatcgccacacaaggggagctcgtaaggtccct

SEQ ID NO: 195625 - DNA, 530 bp, Homo sapiens
  Payload ID: 18614
  Gene Name: tryptophanyl-tRNA synthetase
  ENST ID: ENST00000553934
  CDS Start-End: 432-530
gatgcggggaatttacagtttctctttccaccgcccacgactacacaaaatcagtcacactgacgctgagggtggggaacgggaagagggtggggaggttatttggaggccagcggggggtgaggggtggctgatgcaatgaccagctaatggctcgattctcaagagggtttcattggtctcaacctggccccccaggcaacccacccctgattggacagtctcatcaagaagaagggaaactgaaagaaagaggggaagagtattaaagaccatttctggctgggcagggcactctcagcagctcaactgcccagcgtgaccagtggccacctctgcagtgtcttccacaacctggtcttgactcgtctgctgaacaaatcctctgacctcaggccggctgtgaacgtagttcctgagagatagcaaacatgcccaacagtgagcccgcatctctgctggagctgttcaacagcatcgccacacaaggggagctcgtaaggtccctcaaagcgggaaatgcgtcaaag

SEQ ID NO: 195626 - DNA, 528 bp, Homo sapiens
  Payload ID: 18614
  Gene Name: tryptophanyl-tRNA synthetase
  ENST ID: ENST00000556435
  CDS Start-End: 68-528
ccggttgctgagccgggagcgctgactggcccggctgggcagggatgaaattgattctgcagtaaagatgttggtgtcattaaaaatgagctacaaagctgccgcgggggaggattacaaggctgactgtcctccagggaacccagcacctaccagtaatcatggcccagatgccacagaagctgaagaggattttgtggacccatggacagtacagacaagcagtgcaaaaggcatagactacgataagctcattgttcggtttggaagtagtaaaattgacaaagagctaataaaccgaatagagagagccaccggccaaagaccacaccacttcctgcgcagaggcatcttcttctcacacagagatatgaatcaggttcttgatgcctatgaaaataagaagccattttatctgtacacgggccggggcccctcttctgaagcaatgcatgtaggtcacctcattccatttattttcacaaagtggctccaggatgtatttaacgtgcccttggtcatccagat

SEQ ID NO: 195627 - DNA, 568 bp, Homo sapiens
  Payload ID: 18614
  Gene Name: tryptophanyl-tRNA synthetase
  ENST ID: ENST00000553413
  CDS Start-End: 247-568
aggagacagccggttgctgagccgggagcgctgactggcccggctgggcaggggaaactgaaagaaagaggggaagagtattaaagaccatttctggctgggcagggcactctcagcagctcaactgcccagcgtgaccagtggccacctctgcagtgtcttccacaacctggtcttgactcgtctgctgaacaaatcctctgacctcaggccggctgtgaacgtagttcctgagagatagcaaacatgcccaacagtgagcccgcatctctgctggagctgttcaacagcatcgccacacaaggggagctcgtaaggtccctcaaagcgggaaatgcgtcaaaggatgaaattgattctgcagtaaagatgttggtgtcattaaaaatgagctacaaagctgccgcgggggaggattacaaggctgactgtcctccagggaacccagcacctaccagtaatcatggcccagatgccacagaagctgaagaggattttgtggacccatggacagtacagacaagcagtgcaaaaggcatagactacgataagctcattgttcggtttg

SEQ ID NO: 195628 - DNA, 123 bp, Homo sapiens
  Payload ID: 18614
  Gene Name: tryptophanyl-tRNA synthetase
  ENST ID: ENST00000627608
  CDS Start-End: 1-123
atgcccaacagtgagcccgcatctctgctggagctgttcaacagcatcgccacacaaggggagctcgtaaggtccctcaaagcgggaaatgcgtcaaagttggggtctttcaggtggaaatga

SEQ ID NO: 195629 - DNA, 1218 bp, Homo sapiens
  Payload ID: 18615
  Gene Name: Ts translation elongation factor, mitochondrial
  Uniprot ID: P43897
  ENST ID: ENST00000323833
  CDS Start-End: 27-1067
ggagggtgtttatcgcggctagagagatgtcgctgctgcggtcgctgcgcgtgtttctggtcgcgcggaccgggagctacccggctgggtctcttctgcgtcagtcgccccagccaaggcacacattttatgctgggccccgtctgtctgcctcggcctccagcaaggagctcctcatgaagctgcggcggaaaacaggctactcctttgtaaattgcaagaaagctctggagacttgtggcggggacctcaaacaggcagagatctggctccacaaggaggcccagaaggagggctggagcaaagctgccaagctccaagggaggaagaccaaagaaggcctgattgggctgttgcaggaaggaaacacaactgtattagtagaggtaaactgtgagacagattttgtttctagaaatttaaaatttcaactgttggtccagcaagtagcccttggaaccatgatgcattgtcagaccctaaaggatcaaccctctgcatacagtaaagtgcagtggctcacgcctgtaaacctagcactttgggaggctgaagcaggtggatcacttgagggtttcttgaattcctctgagctttctggacttccagctgggcctgacagagaaggctcactcaaggatcagttggctttagcaattggaaaactgggagaaaacatgattcttaaacgagctgcatgggtgaaggtgccatctgggttctacgttggctcttatgtccacggagcaatgcagagtccctcacttcacaagctggtgctggggaagtatggggccctggtcatctgtgagacgtctgaacagaaaacaaaccttgaagacgttggccgccgccttgggcagcatgtggtgggcatggcccccctctctgttggctccctggacgatgagcctgggggagaggcagagactaagatgctgtcccagccgtatttgctggatccctccattaccttggggcagtatgtgcagcctcagggggtgtcggtagtagactttgtgcggtttgaatgtggagaaggtgaagaggcagcagaaactgaataggttccagagacttttggcccaggaggaatatttacttttagctctggacatcattacaaaaaggaatatttcccaaacctcttcagaccgagaatgcatgggtaaaattattaaatagttgtataataaaaataattttttccttgtttgc

SEQ ID NO: 195630 - DNA, 2192 bp, Homo sapiens
  Payload ID: 18615
  Gene Name: Ts translation elongation factor, mitochondrial
  Uniprot ID: P43897
  ENST ID: ENST00000454289
  CDS Start-End: 214-1191
attttacctggggtgggaggtggggggtaattcccgtatgaaatgtgtcgtctcaagaaatcaagtagaggcgaggactgtgttcctccggccagcaggtggcaccatactcgtttggtgcgttccgctggagaattctggcccttccgccgcgccgtaggtttgttgcctcaccagtgcgcccgccggagggtgtttatcgcggctagagagatgtcgctgctgcggtcgctgcgcgtgtttctggtcgcgcggaccgggagctacccggctgggtctcttctgcgtcagtcgccccagccaaggcacacattttatgctgggccccgtctgtctgcctcggcctccagcaaggagctcctcatgaagctgcggcggaaaacaggctactcctttgtaaattgcaagaaagctctggagacttgtggcggggacctcaaacaggcagagatctggctccacaaggaggcccagaaggagggctggagcaaagctgccaagctccaagggaggaagaccaaagaaggcctgattgggctgttgcaggaaggaaacacaactgtattagtagaggtaaactgtgagacagattttgtttctagaaatttaaaatttcaactgttggtccagcaagtagcccttggaaccatgatgcattgtcagaccctaaaggatcaaccctctgcatacagtaaaggtttcttgaattcctctgagctttctggacttccagctgggcctgacagagaaggctcactcaaggatcagttggctttagcaattggaaaactgggagaaaacatgattcttaaacgagctgcatgggtgaaggtgccatctgggttctacgttggctcttatgtccacggagcaatgcagagtccctcacttcacaagctggtgctggggaagtatggggccctggtcatctgtgagacgtctgaacagaaaacaaaccttgaagacgttggccgccgccttgggcagcatgtggtgggcatggcccccctctctgttggctccctggacgatgagcctgggggagaggcagagactaagatgctgtcccagccgtatttgctggatccctccattaccttggggcagtatgtgcagcctcagggggtgtcggtagtagactttgtgcggtttgaatgtggagaaggtgaagaggcagcagaaactgaataggttccagagacttttggcccaggaggaatatttacttttagctctggacatcattacaaaaaggaatatttcccaaacctcttcagaccgagaatgcatgggtaaaattattaaatagttgtataataaaaataattttttccttgtttgcgtaatactggatttagcttttctgtgcctttcaaaaacaacaggtgggccttattgacgtgatagtgtcgtggagaacaggcatcaacaatactgctgctcccttcaacatagatttattatggtatttctgaaatttctaacttatatgttctgtcttacaccttttatgacatagaactcttttgttctgtttttgctttgcgacactgtgaaccgtgcttctgcctcggaacctccctagttatattacttgtgccacatggatttctttaggattattgattcaaacctagagttgtctggaaaatgtgggttctcttctttgtgattgtctgtagtatgctttgaaggtgctctgcagtggtagacacactggttctggcctcatttaatgaaattaataacacatgcccctatttctcttttggatgatgtgtgggtgggtgggtactgaggtttcctggccagctgtaaggcagattttgacattcttgtgccagaaacagaaattagagtagtccagttacccagagagctcacttaacattgcctctttacttccccagtactgaaacatttcttcaagtataacataaaattaccgtaacaagcagacccagaatactgaaaataactccatttgttcattataggtatctttatttgaaaagtgaaaaatgctttgacacattacagatctgggtatttggattttgcctatggagtgcatatatgatttcaatgatttacaggctaaatagattttagaaataatcatcttaaaattgaaaacaaaggtaggtcctggtataatattaaacataaagttattaaacattttaagcatt

SEQ ID NO: 195631 - DNA, 689 bp, Homo sapiens
  Payload ID: 18615
  Gene Name: Ts translation elongation factor, mitochondrial
  ENST ID: ENST00000457189
  CDS Start-End: 184-689
cgctgcgcgtgtttctggtcgcgcggaccgggagctacccggtgagaagtcctggtgctggtaccgacctgctgtccctgcagctctcctgctgggtctcttctgcgtcagtcgccccagccaaggcacacattttatgctgggccccgtctgtctgcctcggcctccagcaaggagctcctcatgaagctgcggcggaaaacaggctactcctttgtaaattgcaagaaagctctggagacttgtggcggggacctcaaacaggcagagatctggctccacaaggaggcccagaaggagggctggagcaaagctgccaagctccaagggaggaagaccaaagaaggcctgattgggctgttgcaggaaggaaacacaactgtattagtagaggtaaactgtgagacagattttgtttctagaaatttaaaatttcaactgttggtccagcaagtagcccttggaaccatgatgcattgtcagaccctaaaggatcaaccctctgcatacagtaaaggtttcttgaattcctctgagctttctggacttccagctgggcctgacagagaaggctcactcaaggatcagttggctttagcaattggaaaactgggagaaaacatgattcttaaacgagctgcatgggtgaaggtgccatctgggttctacgttggctcttatgtccacgg

SEQ ID NO: 195632 - DNA, 589 bp, Homo sapiens
  Payload ID: 18615
  Gene Name: Ts translation elongation factor, mitochondrial
  ENST ID: ENST00000434359
  CDS Start-End: 169-589
tgtcgctgctgcggtcgctgcgcgtgtttctggtcgcgcggaccgggagctacccggtgagaagtcctggtgctggctgggtctcttctgcgtcagtcgccccagccaaggcacacattttatgctgggccccgtctgtctgcctcggcctccagcaaggagctcctcatgaagctgcggcggaaaacaggctactcctttgtaaattgcaagaaagctctggagacttgtggcggggacctcaaacaggcagagatctggctccacaaggaggcccagaaggagggctggagcaaagctgccaagctccaagggaggaagaccaaagaaggcctgattgggctgttgcaggaaggaaacacaactgtattagtagaggtaaactgtgagacagattttgtttctagaaatttaaaatttcaactgttggtccagcaagtagcccttggaaccatgatgcattgtcagaccctaaaggatcaaccctctgcatacagtaaaggtttcttgaattcctctgagctttctggacttccagctgggcctgacagagaaggctcactcaaggatcagttggctttagcaattg

SEQ ID NO: 195633 - DNA, 558 bp, Homo sapiens
  Payload ID: 18615
  Gene Name: Ts translation elongation factor, mitochondrial
  ENST ID: ENST00000417094
  CDS Start-End: 22-291
gtgtttatcgcggctagagagatgtcgctgctgcggtcgctgcgcgtgtttctggtcgcgcggaccgggagctacccggctgggtctcttctgcgtcagtcgccccagccaaggcacacattttatgctgggccccgtctgtctgcctcggcctccagcaaggagctcctcatgaagctgcggcggaaaacaggctactcctttgtaaattgcaagaaagctctggagacttgtggcggggacctcaaacagacggagtcttgctctgtggcccaggccggcgtgcaatgagttgtgtagtttttgcctgtacggtcatgcgtctcttaataggaagatacattctgagaaatggcgtcgttaggagattttggcttatgcacatcatagagtacctacacaaacctagatggtatattgtactacaacctgggctatatggaattgccagctgctcctaggctacaaaccgttacaaaatgttactggactgaatactgtaggcagttgtaacacagtggcagagatctggctccacaaggaggcccagaaggaggg

SEQ ID NO: 195634 - DNA, 651 bp, Homo sapiens
  Payload ID: 18615
  Gene Name: Ts translation elongation factor, mitochondrial
  Uniprot ID: P43897
  ENST ID: ENST00000543727
  CDS Start-End: 4-651
gagatgtcgctgctgcggtcgctgcgcgtgtttctggtcgcgcggaccgggagctacccggctgggtctcttctgcgtcagtcgccccagccaaggcacacattttatgctgggccccgtctgtctgcctcggcctccagcaaggagctcctcatgaagctgcggcggaaaacaggctactcctttgtaaattgcaagaaagctctggagacttgtggcggggacctcaaacaggcagagatctggctccacaaggaggcccagaaggagggctggagcaaagctgccaagctccaagggaggaagaccaaagaaggcctgattgggctgttgcaggaaggaaacacaactgtattagtagaggtaaactgtgagacagattttgtttctagaaatttaaaatttcaactgttggtccagcaagtagcccttggaaccatgatgcattgtcagaccctaaaggatcaaccctctgcatacagtaaaggtttcttgaattcctctgagctttctggacttccagctgggcctgacagagaaggctcactcaaggatcagttggctttagcaattggtctgcctttccaaattggagctgtctctgaacttcagcttcctgaatccaacttcttgcagaacacctcctcttga

SEQ ID NO: 195635 - DNA, 1935 bp, Homo sapiens
  Payload ID: 18615
  Gene Name: Ts translation elongation factor, mitochondrial
  Uniprot ID: P43897
  ENST ID: ENST00000540550
  CDS Start-End: 42-545
accagtgcgcccgccggagggtgtttatcgcggctagagagatgtcgctgctgcggtcgctgcgcgtgtttctggtcgcgcggaccgggagctacccggctgggtctcttctgcgtcagtcgccccagccaaggcacacattttatgctgggccccgtctgtctgcctcggcctccagcaaggagctcctcatgaagctgcggcggaaaacaggctactcctttgtaaattgcaagaaagctctggagacttgtggcggggacctcaaacaggcagagatctggctccacaaggaggcccagaaggagggctggagcaaagctgccaagctccaagggaggaagaccaaagaaggcctgattgggctgttgcaggaaggaaacacaactgtattagtagaggtaaactgtgagacagattttgtttctagaaatttaaaatttcaactgttggtccagcaagtagcccttggaaccatgatgcattgtcagaccctaaaggatcaaccctctgcatacagtaaagaaaactgggagaaaacatgattcttaaacgagctgcatgggtgaaggtgccatctgggttctacgttggctcttatgtccacggagcaatgcagagtccctcacttcacaagctggtgctggggaagtatggggccctggtcatctgtgagacgtctgaacagaaaacaaaccttgaagacgttggccgccgccttgggcagcatgtggtgggcatggcccccctctctgttggctccctggacgatgagcctgggggagaggcagagactaagatgctgtcccagccgtatttgctggatccctccattaccttggggcagtatgtgcagcctcagggggtgtcggtagtagactttgtgcggtttgaatgtggagaaggtgaagaggcagcagaaactgaataggttccagagacttttggcccaggaggaatatttacttttagctctggacatcattacaaaaaggaatatttcccaaacctcttcagaccgagaatgcatgggtaaaattattaaatagttgtataataaaaataattttttccttgtttgcgtaatactggatttagcttttctgtgcctttcaaaaacaacaggtgggccttattgacgtgatagtgtcgtggagaacaggcatcaacaatactgctgctcccttcaacatagatttattatggtatttctgaaatttctaacttatatgttctgtcttacaccttttatgacatagaactcttttgttctgtttttgctttgcgacactgtgaaccgtgcttctgcctcggaacctccctagttatattacttgtgccacatggatttctttaggattattgattcaaacctagagttgtctggaaaatgtgggttctcttctttgtgattgtctgtagtatgctttgaaggtgctctgcagtggtagacacactggttctggcctcatttaatgaaattaataacacatgcccctatttctcttttggatgatgtgtgggtgggtgggtactgaggtttcctggccagctgtaaggcagattttgacattcttgtgccagaaacagaaattagagtagtccagttacccagagagctcacttaacattgcctctttacttccccagtactgaaacatttcttcaagtataacataaaattaccgtaacaagcagacccagaatactgaaaataactccatttgttcattataggtatctttatttgaaaagtgaaaaatgctttgacacattacagatctgggtatttggattttgcctatggagtgcatatatgatttcaatgatttacaggctaaatagattttagaaataatcatcttaaaattgaaaacaaaggtaggtcctggtataatattaaacataaagttattaaacattttaagcattgtt

SEQ ID NO: 195636 - DNA, 897 bp, Homo sapiens
  Payload ID: 18615
  Gene Name: Ts translation elongation factor, mitochondrial
  ENST ID: ENST00000550559
  CDS Start-End: 16-708
atcgcggctagagagatgtcgctgctgcggtcgctgcgcgtgtttctggtcgcgcggaccgggagctacccggctgggtctcttctgcgtcagtcgccccagccaaggcacacattttatgctgggccccgtctgtctgcctcggcctccagcaaggagctcctcatgaagctgcggcggaaaacaggctactcctttgtaaattgcaagaaagctctggagacttgtggcggggacctcaaacaggcagagatctggctccacaaggaggcccagaaggagggctggagcaaagctgccaagctccaagggaggaagaccaaagaaggcctgattgggctgttgcaggaaggaaacacaactgtattagtagaggtaaactgtgagacagattttgtttctagaaatttaaaatttcaactgttggtccagcaagtagcccttggaaccatgatgcattgtcagaccctaaaggatcaaccctctgcatacagtaaaggtttcttgaattcctctgagctttctggacttccagctgggcctgacagagaaggctcactcaaggatcagttggctttagcaattgggtcccaggctaggaaccagcctgtgaagatgggaggctcaaacccctgcttaatgatcaggattggtgtgtcgggatctcggccgctggggtctgcctttccaaattggagctgtctctgaacttcagcttcctgaatccaacttcttgcagaacacctcctcttgactgctctaagcaccttaaaaataacaccttcaggatgtagctcttctttactaaacttgtatctgagtctccacttttgataggtggtatctatctagtcacctaaggcagaagcctgagagtttcctagaaaccccccatat

SEQ ID NO: 195637 - DNA, 794 bp, Homo sapiens
  Payload ID: 18615
  Gene Name: Ts translation elongation factor, mitochondrial
  ENST ID: ENST00000548851
  CDS Start-End: 16-618
atcgcggctagagagatgtcgctgctgcggtcgctgcgcgtgtttctggtcgcgcggaccgggagctacccggctgggtctcttctgcgtcagtcgccccagccaaggcacacattttatgctgggccccgtctgtctgcctcggcctccagcaaggagctcctcatgaagctgcggcggaaaacaggctactcctttgtaaattgcaagaaagctctggagacttgtggcggggacctcaaacaggcagagatctggctccacaaggaggcccagaaggagggctggagcaaagctgccaagctccaagggaggaagaccaaagaaggcctgattgggctgttgcaggaaggaaacacaactgtattagtagaggtaaactgtgagacagattttgtttctagaaatttaaaatttcaactgttggtccagcaagtagcccttggaaccatgatgcattgtcagaccctaaaggatcaaccctctgcatacagtaaaggtttcttgaattcctctgagctttctggacttccagctgggcctgacagagaaggctcactcaaggatcagttggctttagcaattgtgctgaggactcatcacatttgcatgatttgaatcgtgagatgaactgggccatcctgttcaggagcatcccatcatggctcggtctttgcaaggctgagcaatgatttgaatatatcttccaggtgagatattgatagcacatttgaggatgtgcctttcactaccctgaaaactctacagactcacaagactcttaaagaagactc

SEQ ID NO: 195638 - DNA, 3135 bp, Homo sapiens
  Payload ID: 18616
  Gene Name: TSC22 domain family, member 1
  Uniprot ID: Q15714
  ENST ID: ENST00000261489
  CDS Start-End: 218-652
tggagcccggctgcggatctgggaagcgcctcttcacggcactgggatccgcatctgcctgggatcatcaagccctagaagctgggtttctttaaattagggctgccgttttctgtttctccctgggctgcggaaagccagaagattttatctagcttatacaaggctgctggtgttccctctttttttccacgagggtgtttttggctgcaattgcatgaaatcccaatggtgtagaccagtggcgatggatctaggagtttaccaactgagacatttttcaatttctttcttgtcatccttgctggggactgaaaacgcttctgtgagacttgataatagctcctctggtgcaagtgtggtagctattgacaacaaaatcgagcaagctatggatctagtgaaaagccatttgatgtatgcggtcagagaagaagtggaggtcctcaaagagcaaatcaaagaactaatagagaaaaattcccagctggagcaggagaacaatctgctgaagacactggccagtcctgagcagcttgcccagtttcaggcccagctgcagactggctccccccctgccaccacccagccacagggcaccacacagccccccgcccagccagcatcgcagggctcaggaccaaccgcatagctgcctatgcccccgcagaactggctgctgcgtgtgaactgaacagacggagaagatgtgctagggagaatctgcctccacagtcacccatttcattgctcgctgcgaaagagacgtgagactgacatatgccattatctcttttccagtattaaacactcatatgcttatggcttggagaaatttcttagttgggtgaattaaaggttaatccgagaattagcatggatataccgggacctcatgcagcttggcagatatctgagaaatggtttaattcatgctcaggagctgtgtgcctttccatcccttccggctccctacccctcacttccaagggttctctctcctgcttgcgcttagtgtcctacatggggttgtgaagcgatggagctcctcactggactcgcctctctcctctcctccccccaggaggaacttgaaaggagggtaaaaagactaaaatgagggggaacagagttcactgtacaaatttgacaactgtcaccaaaattcataaaaaacaatagtactgtgcctctttcttctcaaacaatggatgacacaaaactatgagagtgacaaaatggtgacaggtagctgggacctaggctatcttaccatgaaggttgttttgcttattgtatatttgtgtatgtagtgtaactattttgtacaatagaggactgtaactactatttaggttgtacagattgaaatttagttgtttcattggctgtctgaggaggtgtggacttttatatatagatctacataaaaactgctacatgacaaaaaccacacctaaagaaattttaagaatttggcacagttactcactttgtgtaatctgaaatctagctgctgaatacgctgaagtaaatccttgttcactgaagtctttcaattgagctggttgaatactttgaaaaatgctcagttctaactaatgaaatggatttcccagtaggggtttctgcatatcacctgtatagtagttatatgcatatgtttctgtgcatgttctctacacaattgtaaggtgtcactgtatttaactgttgcacttgtcaactttcaataaagcatataaatgttgataaacaagtgtttttcatatgaccctgttaacataatggcagtcatttccacaactgtttccaggtaaagttaacaatttgactagtaaaatcctgaagggcagtggaatgattggaaaagtaggggcgtgatttgactgcatgaagtaaaaggaaattgacacattgagttgttcagcaggtaagagaagagacagtggaggagtccagctcaattctaactactgtgtgacttggacaggttgcttcactcctggacggatgtaggggtttgaaagagatgatctcttacattcccctttggctttaaaattctaggagtccttgaaaatcttaattttttactgaactgagaggaagaaggagccttattctgtgtataattggaataagcagatctaggatcaaaagacggaagttggagaagctgatttccactttaagaaccctgtcaccctgggttgggatgtttctcctagtgtaggatgagtttctagctcctgggataattcgttttgtctaagcaaaagatgatttgaggtgggaccagatgagcaaggatgtccttgcagttgattctgcatgactataaaacaggccaaaattaaaaccacgaaggaatcctgaggcagattggcccctggcacctgaggagtgagcctgagggatcccactctgcagtaggagtaacgtgagcgagcaagtgaatggggtgggtttaccggctctgtaatctatcaacctagggcctcagcagtggccccctgcccagtaggaattggaccaatcccaagttctaaggcttgtcttaagtccttgcagaacaaggacaaactttctgaatcattcatttctctcatctagagctggtgggagattgagaggtgaatgggacatccaagatccctaaaaagaattgttcgatagcgtgcatgtgttataaagtggtgacacgggcatcctgttgaaatgatggatggctcactgccataggctgatagcagttgtcataaagatattttgggggaatttgaaaaggacgtaaagaaaaatctttcatattggcttgttggttatataacttcaaatttaataaaggaatacttacgtagtaattacatttccttgaaaaaactatagtgaatagaaatccctagccatttcattttttatgtttttaatgaagatctttaaaataccataggtggtaatcgtggaaaatttgaaaaatctcatgtcagtgtattaagatggtggagaagtttttttctccattatttaatggaactttgggtctttttattaaaaatgtgagactcatgaaattttggcagctgaatatttgtgaaataagaatgaattattaaaagatgtctttccata

SEQ ID NO: 195639 - DNA, 4820 bp, Homo sapiens
  Payload ID: 18616
  Gene Name: TSC22 domain family, member 1
  Uniprot ID: Q15714
  ENST ID: ENST00000458659
  CDS Start-End: 492-3713
ccgggggtggcgaggggaaggcgacatttgcttggcgctgcctccgtgcagagcggccgggagggctttgcagcggccgccgacgcggcgggaggagggggctgaggcggcttcggagttggccggagaaggtgggcatttctcgcttttcctccccttcctgcgctctccccctccctcctgccccgcaccccacgtgaagcagaatataaaggggggtgtgaggctagaggggaaagtgaatggcgaaggactgaagggatccccccttcgggtccccggccgccctgttcaccctcgttcatcctcctttccgaagctcgctctcgaaggcaggagcgaccggcgcctttggctgaggaggaggagaaggaggaatcgcgccaggcggagcgtcaggtcccgttttcctctccggcgtctccaatacaaagattacggtgcagaaggaaattgcactcgtctcctccgcgcccccggtacccaacacaatgcaccagccgcctgagtccaccgccgcggccgccgccgctgcagacattagcgctaggaagatggcgcacccggcaatgttccctcgaaggggcagcggtagtggcagcgcctctgctctcaatgcagcaggtaccggcgtcggtagtaatgccacatcttccgaggattttccgcctccgtcgctgcttcagccgccgccccctgcagcatcttctacgtcgggaccacagcctccgcctccacaaagcctgaacctcctttcgcaggctcagctgcaggcacagcctcttgcgccaggcggaactcaaatgaaaaagaaaagtggcttccagataactagcgttactcctgctcagatctccgctagtatcagctctaacaacagtatagcagaggacactgagagctatgatgatctggatgaatctcacacggaagatctctcttcttcggagatccttgatgtgtcactttccagggctactgacttaggggagcccgaacgcagctcctcagaagagaccctaaataacttccaggaagccgagacacctggggcagtctctcccaaccagccccaccttcctcagcctcatttgcctcaccttccacaacagaatgttgtgatcaatgggaatgctcatccacaccacctccatcaccaccatcagattcatcatgggcaccacctccaacatggtcaccaccatccatctcatgttgctgtggccagtgcatccattactggtgggccaccctcaagcccagtatctagaaaactctctacaactggaagctctgacagtatcacaccagttgcaccaacttctgctgtatcatccagtggttcacctgcatctgtaatgactaatatgcgtgctccaagtactacaggtggaataggtataaattctgttactggcactagtacagtaaataatgttaacattactgctgtgggtagttttaatcctaatgtgacaagcagcatgcttggtaatgttaatataagtacaagcaatattcctagtgctgctggtgtgagtgttgggcctggagttaccagtggtgttaatgtgaatatcttgagtggcatgggcaatggtactatttcttcctctgctgctgttagcagtgttcctaatgcagctgcagggatgactgggggatcggtttcaagtcagcagcaacaaccaacagttaacacttcgaggttcagagttgtgaagttagattctagttctgagccctttaaaaaaggtagatggacttgcactgagttctatgaaaaagaaaatgctgtacctgctacagaaggtgtgctgataaataaagtggtggagactgtaaagcaaaatccgatagaagtgacttctgaaagggagagcactagtgggagttcagtgagcagtagtgtcagcacactgagtcactatacagagagtgtgggaagtggagagatgggagcccctactgtggtggtgcagcagcagcagcagcaacaacaacaacaacagcaacaaccagctctccaaggtgtgaccctccaacagatggattttggtagcactggtccacagagtattccagcagttagtataccacagagtatttctcagtcacagatctcacaagtacaattacagtctcaagaactgagctatcagcaaaagcaaggtcttcagccagtacctctgcaagccactatgagtgctgcaactggtatccagccatcgcctgtaaatgtggttggtgtaacttcagctttaggtcagcagccttccatttccagtttggctcaaccccagctaccatattctcaggcggctcctccagtgcaaactccccttccaggggcaccaccaccccaacagttacagtatggacaacagcaaccaatggtttctacacagatggccccaggccatgtcaaatcagtgactcaaaatcctgcttcagagtatgtacaacagcagccaattcttcaaacagcaatgtcctccggacagcccagttctgcaggagtaggagcaggaacaacagtgattcctgtggctcagccacagggtatccagctgccagtgcagcccacagcagtcccagcacaacctgcaggggcatctgtccagcctgttggccaggctccggcagcagtgtctgctgtacctactggcagtcagattgcaaatattggtcagcaagcaaacatacctactgcagtgcagcagccctctacccaggttccaccttcagttattcagcagggtgctcctccatcttcgcaagtggttccacctgctcaaactgggattattcatcagggagttcaaactagtgctccaagccttcctcaacaattggttattgcatcccaaagttccttgttaactgtgcctccccagccacaaggagtagaaccagtagctcaaggaattgtttcacagcagttgcctgcagttagttctttgccctctgctagtagtatttctgttacaagtcaggttagttcaactggtccttctggaatgccttctgccccaacaaacttggttccaccacaaaatatagcacaaacccctgctacccaaaatggtaatttggttcaaagtgttagtcaacctcccttgatagcaactaatacaaatttgcctttggcacaacagataccactaagttctacccagttctccgcacaatcattagctcaggcaattggaagccaaattgaagatgccaggcgtgcagcggagccctccttagttggcttacctcagactatcagtggtgacagtgggggaatgtcagcagtttcagatgggagtagcagcagcctagcagcctctgcttctcttttcccgttgaaggtgctaccgctgacgacacccctggtggatggcgaggatgagagctcctctggtgcaagtgtggtagctattgacaacaaaatcgagcaagctatggatctagtgaaaagccatttgatgtatgcggtcagagaagaagtggaggtcctcaaagagcaaatcaaagaactaatagagaaaaattcccagctggagcaggagaacaatctgctgaagacactggccagtcctgagcagcttgcccagtttcaggcccagctgcagactggctccccccctgccaccacccagccacagggcaccacacagccccccgcccagccagcatcgcagggctcaggaccaaccgcatagctgcctatgcccccgcagaactggctgctgcgtgtgaactgaacagacggagaagatgtgctagggagaatctgcctccacagtcacccatttcattgctcgctgcgaaagagacgtgagactgacatatgccattatctcttttccagtattaaacactcatatgcttatggcttggagaaatttcttagttgggtgaattaaaggttaatccgagaattagcatggatataccgggacctcatgcagcttggcagatatctgagaaatggtttaattcatgctcaggagctgtgtgcctttccatcccttccggctccctacccctcacttccaagggttctctctcctgcttgcgcttagtgtcctacatggggttgtgaagcgatggagctcctcactggactcgcctctctcctctcctccccccaggaggaacttgaaaggagggtaaaaagactaaaatgagggggaacagagttcactgtacaaatttgacaactgtcaccaaaattcataaaaaacaatagtactgtgcctctttcttctcaaacaatggatgacacaaaactatgagagtgacaaaatggtgacaggtagctgggacctaggctatcttaccatgaaggttgttttgcttattgtatatttgtgtatgtagtgtaactattttgtacaatagaggactgtaactactatttaggttgtacagattgaaatttagttgtttcattggctgtctgaggaggtgtggacttttatatatagatctacataaaaactgctacatgacaaaaaccacacctaaagaaattttaagaatttggcacagttactcactttgtgtaatctgaaatctagctgctgaatacgctgaagtaaatccttgttcactgaagtctttcaattgagctggttgaatactttgaaaaatgctcagttctaactaatgaaatggatttcccagtaggggtttctgcatatcacctgtatagtagttatatgcatatgtttctgtgcatgttctctacacaattgtaaggtgtcactgtatttaactgttgcacttgtcaactttcaataaagcatataaatgttgataaacaa

SEQ ID NO: 195640 - DNA, 1093 bp, Homo sapiens
  Payload ID: 18616
  Gene Name: TSC22 domain family, member 1
  ENST ID: ENST00000486464
  CDS Start-End: 1-448
ggttccaccacaaaatatagcacaaacccctgctacccaaaatggtaatttggttcaaagtgttagtcaacctcccttgatagcaactaatacaaatttgcctttggcacaacagataccactaagttctacccagttctccgcacaatcattagctcaggcaattggaagccaaattgaagatgccaggcgtgcagcggagccctccttagttggcttacctcagactatcagtggtgacagtgggggaatgtcagcagtttcagatgggagtagcagcagcctagcagcctctgcttctcttttcccgttgaaggtgctaccgctgacgacacccctggtggatggcgaggatgagagctctctatttcagtgcttctctcctaccagaggtgcaaggagtgatcctagaaccacagatacagccaagaccacggagagcttttgacgtcaggggtccactttctccactgaacccttggagacagaatatccagcttctggagagagtgggaaaggataataaacaaatttctttcaactggtaaaacatcatacttcttcagcaaaaggaattcttctagcagagccttcatggatgatatctgtcacacatgccagcacctgcagtttggaaggcagtggtgaatggatccatgcaatatgtctagaagacacaaggatgagccagccacctgatcttgtcatttataaacttttaagaattactctggtttacttttggtctgaaaatggaaaggcccaaataatgaaataatcttttcagattggaattttacatggccatgaaaatatttctttctattcagaagactgaaatagaggaagcttgagagactcctttcttttaaaagcggctctctgtatctgtttcatttaaaacatttgtgggattgaaaatcaccttaatgaagtaggcaaacatttttttaagtagtagaggaagtccagaaaacttaatgaaatggttttttttgttgcctgacactgaaagtaactagtaaataaagggtgaacttcttaattattcgaaaactgcttttaatattaggatatactcttttagctcatc

SEQ ID NO: 195641 - DNA, 690 bp, Homo sapiens
  Payload ID: 18616
  Gene Name: TSC22 domain family, member 1
  ENST ID: ENST00000493016
  CDS Start-End: 264-690
cgctgcaccagcccgtctggccaccaacgccgcggagaaaggagccgccgccgcctgcggccctctcccgcccggtcgcgggagcagcgggctcgctctcgaaggcaggagcgaccggcgcctttggctgaggaggaggagaaggaggaatcgcgccaggcggagcgtcaggtcccgttttcctctccggcgtctccaatacaaagattacggtgcagaaggaaattgcactcgtctcctccgcgcccccggtacccaacacaatgcaccagccgcctgagtccaccgccgcggccgccgccgctgcagacattagcgctaggaagatggcgcacccggcaatgttccctcgaaggggcagcggtagtggcagcgcctctgctctcaatgcagcaggtaccggcgtcggtagtaatgccacatcttccgaggattttccgcctccgtcgctgcttcagccgccgccccctgcagcatcttctacgtcgggaccacagcctccgcctccacaaagcctgaacctcctttcgcaggctcagctgcaggcacagcctcttgcgccaggcggaactcaaatgaaaaagaaaagtggcttccagataactagcgttactcctgctcagatctccgctagtatcagctctaacaacagtatagcagaggacactgagagctatgatgatctggatg

SEQ ID NO: 195642 - DNA, 349 bp, Homo sapiens
  Payload ID: 18616
  Gene Name: TSC22 domain family, member 1
  ENST ID: ENST00000472477
  CDS Start-End: 225-349
aagcttttcctatagtctagtgataatcctgcttaccgctgccggtaagaactagataattgaaatcaagacactcgaagtcttacagtggtgggactgggcatgcccagtagctcagacggttcgggttacaaataggaagctttcgccgttaagcagccgcgggacacagctccggggaccggggtctgactcccttaaacggtgtttttggctgcaattgcatgaaatcccaatggtgtagaccagtggcgatggatctaggagtttaccaactgagacatttttcaatttctttcttgtcatccttgctggggactgaaaacgcttctgtgagacttgataatag

SEQ ID NO: 195643 - DNA, 4026 bp, Homo sapiens
  Payload ID: 18616
  Gene Name: TSC22 domain family, member 1
  Uniprot ID: Q15714
  ENST ID: ENST00000501704
  CDS Start-End: 492-2204
ccgggggtggcgaggggaaggcgacatttgcttggcgctgcctccgtgcagagcggccgggagggctttgcagcggccgccgacgcggcgggaggagggggctgaggcggcttcggagttggccggagaaggtgggcatttctcgcttttcctccccttcctgcgctctccccctccctcctgccccgcaccccacgtgaagcagaatataaaggggggtgtgaggctagaggggaaagtgaatggcgaaggactgaagggatccccccttcgggtccccggccgccctgttcaccctcgttcatcctcctttccgaagctcgctctcgaaggcaggagcgaccggcgcctttggctgaggaggaggagaaggaggaatcgcgccaggcggagcgtcaggtcccgttttcctctccggcgtctccaatacaaagattacggtgcagaaggaaattgcactcgtctcctccgcgcccccggtacccaacacaatgcaccagccgcctgagtccaccgccgcggccgccgccgctgcagacattagcgctaggaagatggcgcacccggcaatgttccctcgaaggggcagcggtagtggcagcgcctctgctctcaatgcagcaggtaccggcgtcggtagtaatgccacatcttccgaggattttccgcctccgtcgctgcttcagccgccgccccctgcagcatcttctacgtcgggaccacagcctccgcctccacaaagcctgaacctcctttcgcaggctcagctgcaggcacagcctcttgcgccaggcggaactcaaatgaaaaagaaaagtggcttccagataactagcgttactcctgctcagatctccgctagtatcagctctaacaacagtatagcagaggacactgagagctatgatgatctggatgaatctcacacggaagatctctcttcttcggagatccttgatgtgtcactttccagggctactgacttaggggagcccgaacgcagctcctcagaagagaccctaaataacttccaggaagccgagacacctggggcagtctctcccaaccagccccaccttcctcagcctcatttgcctcaccttccacaacagaatgttgtgatcaatgggaatgctcatccacaccacctccatcaccaccatcagattcatcatgggcaccacctccaacatggtcaccaccatccatctcatgttgctgtggccagtgcatccattactggtgggccaccctcaagcccagtatctagaaaactctctacaactggaagctctgacagtatcacaccagttgcaccaacttctgctgtatcatccagtggttcacctgcatctgtaatgactaatatgcgtgctccaagtactacaggtggaataggtataaattctgttactggcactagtacagtaaataatgttaacattactgctgtgggtagttttaatcctaatgtgacaagcagcatgcttggtaatgttaatataagtacaagcaatattcctagtgctgctggtgtgagtgttgggcctggagttaccagtggtgttaatgtgaatatcttgagtggcatgggcaatggtactatttcttcctctgctgctgttagcagtgttcctaatgcagctgcagggatgactgggggatcggtttcaagtcagcagcaacaaccaacagttaacacttcgaggttcagagttgtgaagttagattctagttctgagccctttaaaaaaggtagatggacttgcactgagttctatgaaaaagaaaatgctgtacctgctacagaaggtgtgctgataaataaagtggtggagactgtaaagcaaaatccgatagaagtgacttctgaaagggagagcactagtgggagttcagtgagcagtagtgtcagcacactgagtcactatacagagagtgtgggaagtggagagatgggagcccctactgtggtggtgcagcagcagcagcagcaacaacaacaacaacagcaacaaccagctctccaaggtgtgaccctccaacagatggattttggtagcactggtccacagagtattccagcagttagtataccacagagtatttctcagtcacagatctcacaagtacaattacagtctcaagaactgagctatcttaccatgaaggttgttttgcttattgtatatttgtgtatgtagtgtaactattttgtacaatagaggactgtaactactatttaggttgtacagattgaaatttagttgtttcattggctgtctgaggaggtgtggacttttatatatagatctacataaaaactgctacatgacaaaaaccacacctaaagaaattttaagaatttggcacagttactcactttgtgtaatctgaaatctagctgctgaatacgctgaagtaaatccttgttcactgaagtctttcaattgagctggttgaatactttgaaaaatgctcagttctaactaatgaaatggatttcccagtaggggtttctgcatatcacctgtatagtagttatatgcatatgtttctgtgcatgttctctacacaattgtaaggtgtcactgtatttaactgttgcacttgtcaactttcaataaagcatataaatgttgataaacaagtgtttttcatatgaccctgttaacataatggcagtcatttccacaactgtttccaggtaaagttaacaatttgactagtaaaatcctgaagggcagtggaatgattggaaaagtaggggcgtgatttgactgcatgaagtaaaaggaaattgacacattgagttgttcagcaggtaagagaagagacagtggaggagtccagctcaattctaactactgtgtgacttggacaggttgcttcactcctggacggatgtaggggtttgaaagagatgatctcttacattcccctttggctttaaaattctaggagtccttgaaaatcttaattttttactgaactgagaggaagaaggagccttattctgtgtataattggaataagcagatctaggatcaaaagacggaagttggagaagctgatttccactttaagaaccctgtcaccctgggttgggatgtttctcctagtgtaggatgagtttctagctcctgggataattcgttttgtctaagcaaaagatgatttgaggtgggaccagatgagcaaggatgtccttgcagttgattctgcatgactataaaacaggccaaaattaaaaccacgaaggaatcctgaggcagattggcccctggcacctgaggagtgagcctgagggatcccactctgcagtaggagtaacgtgagcgagcaagtgaatggggtgggtttaccggctctgtaatctatcaacctagggcctcagcagtggccccctgcccagtaggaattggaccaatcccaagttctaaggcttgtcttaagtccttgcagaacaaggacaaactttctgaatcattcatttctctcatctagagctggtgggagattgagaggtgaatgggacatccaagatccctaaaaagaattgttcgatagcgtgcatgtgttataaagtggtgacacgggcatcctgttgaaatgatggatggctcactgccataggctgatagcagttgtcataaagatattttgggggaatttgaaaaggacgtaaagaaaaatctttcatattggcttgttggttatataacttcaaatttaataaaggaatacttacgtagtaattacatttccttgaaaaaactatagtgaatagaaatccctagccatttcattttttatgtttttaatgaagatctttaaaataccataggtggtaatcgtggaaaatttgaaaaatctcatgtcagtgtattaagatggtggagaagtttttttctccattatttaatggaactttgggtctttttattaaaaatgtgagactcatgaaattttggcagctgaatatttgtgaaataagaatgaattattaaaagatgtctttccata

SEQ ID NO: 195644 - DNA, 2877 bp, Homo sapiens
  Payload ID: 18616
  Gene Name: TSC22 domain family, member 1
  ENST ID: ENST00000611198
  CDS Start-End: 134-394
gggcctgggtgggaagagaggcccaagaaagccaccatagtctgtagcgtgaagcttttcctatagtctagtgataatcctgctctcctctggtgcaagtgtggtagctattgacaacaaaatcgagcaagctatggatctagtgaaaagccatttgatgtatgcggtcagagaagaagtggaggtcctcaaagagcaaatcaaagaactaatagagaaaaattcccagctggagcaggagaacaatctgctgaagacactggccagtcctgagcagcttgcccagtttcaggcccagctgcagactggctccccccctgccaccacccagccacagggcaccacacagccccccgcccagccagcatcgcagggctcaggaccaaccgcatagctgcctatgcccccgcagaactggctgctgcgtgtgaactgaacagacggagaagatgtgctagggagaatctgcctccacagtcacccatttcattgctcgctgcgaaagagacgtgagactgacatatgccattatctcttttccagtattaaacactcatatgcttatggcttggagaaatttcttagttgggtgaattaaaggttaatccgagaattagcatggatataccgggacctcatgcagcttggcagatatctgagaaatggtttaattcatgctcaggagctgtgtgcctttccatcccttccggctccctacccctcacttccaagggttctctctcctgcttgcgcttagtgtcctacatggggttgtgaagcgatggagctcctcactggactcgcctctctcctctcctccccccaggaggaacttgaaaggagggtaaaaagactaaaatgagggggaacagagttcactgtacaaatttgacaactgtcaccaaaattcataaaaaacaatagtactgtgcctctttcttctcaaacaatggatgacacaaaactatgagagtgacaaaatggtgacaggtagctgggacctaggctatcttaccatgaaggttgttttgcttattgtatatttgtgtatgtagtgtaactattttgtacaatagaggactgtaactactatttaggttgtacagattgaaatttagttgtttcattggctgtctgaggaggtgtggacttttatatatagatctacataaaaactgctacatgacaaaaaccacacctaaagaaattttaagaatttggcacagttactcactttgtgtaatctgaaatctagctgctgaatacgctgaagtaaatccttgttcactgaagtctttcaattgagctggttgaatactttgaaaaatgctcagttctaactaatgaaatggatttcccagtaggggtttctgcatatcacctgtatagtagttatatgcatatgtttctgtgcatgttctctacacaattgtaaggtgtcactgtatttaactgttgcacttgtcaactttcaataaagcatataaatgttgataaacaagtgtttttcatatgaccctgttaacataatggcagtcatttccacaactgtttccaggtaaagttaacaatttgactagtaaaatcctgaagggcagtggaatgattggaaaagtaggggcgtgatttgactgcatgaagtaaaaggaaattgacacattgagttgttcagcaggtaagagaagagacagtggaggagtccagctcaattctaactactgtgtgacttggacaggttgcttcactcctggacggatgtaggggtttgaaagagatgatctcttacattcccctttggctttaaaattctaggagtccttgaaaatcttaattttttactgaactgagaggaagaaggagccttattctgtgtataattggaataagcagatctaggatcaaaagacggaagttggagaagctgatttccactttaagaaccctgtcaccctgggttgggatgtttctcctagtgtaggatgagtttctagctcctgggataattcgttttgtctaagcaaaagatgatttgaggtgggaccagatgagcaaggatgtccttgcagttgattctgcatgactataaaacaggccaaaattaaaaccacgaaggaatcctgaggcagattggcccctggcacctgaggagtgagcctgagggatcccactctgcagtaggagtaacgtgagcgagcaagtgaatggggtgggtttaccggctctgtaatctatcaacctagggcctcagcagtggccccctgcccagtaggaattggaccaatcccaagttctaaggcttgtcttaagtccttgcagaacaaggacaaactttctgaatcattcatttctctcatctagagctggtgggagattgagaggtgaatgggacatccaagatccctaaaaagaattgttcgatagcgtgcatgtgttataaagtggtgacacgggcatcctgttgaaatgatggatggctcactgccataggctgatagcagttgtcataaagatattttgggggaatttgaaaaggacgtaaagaaaaatctttcatattggcttgttggttatataacttcaaatttaataaaggaatacttacgtagtaattacatttccttgaaaaaactatagtgaatagaaatccctagccatttcattttttatgtttttaatgaagatctttaaaataccataggtggtaatcgtggaaaatttgaaaaatctcatgtcagtgtattaagatggtggagaagtttttttctccattatttaatggaactttgggtctttttattaaaaatgtgagactcatgaaattttggcagctgaatatttgtgaaataagaatgaattattaaaagatgtctttccata

SEQ ID NO: 195645 - DNA, 2872 bp, Homo sapiens
  Payload ID: 18616
  Gene Name: TSC22 domain family, member 1
  ENST ID: ENST00000622051
  CDS Start-End: 129-389
cgggttacaaataggaagctttcgccgttaagcagccgcgggacacagctccggggaccggggtctgactcccttaaacctcctctggtgcaagtgtggtagctattgacaacaaaatcgagcaagctatggatctagtgaaaagccatttgatgtatgcggtcagagaagaagtggaggtcctcaaagagcaaatcaaagaactaatagagaaaaattcccagctggagcaggagaacaatctgctgaagacactggccagtcctgagcagcttgcccagtttcaggcccagctgcagactggctccccccctgccaccacccagccacagggcaccacacagccccccgcccagccagcatcgcagggctcaggaccaaccgcatagctgcctatgcccccgcagaactggctgctgcgtgtgaactgaacagacggagaagatgtgctagggagaatctgcctccacagtcacccatttcattgctcgctgcgaaagagacgtgagactgacatatgccattatctcttttccagtattaaacactcatatgcttatggcttggagaaatttcttagttgggtgaattaaaggttaatccgagaattagcatggatataccgggacctcatgcagcttggcagatatctgagaaatggtttaattcatgctcaggagctgtgtgcctttccatcccttccggctccctacccctcacttccaagggttctctctcctgcttgcgcttagtgtcctacatggggttgtgaagcgatggagctcctcactggactcgcctctctcctctcctccccccaggaggaacttgaaaggagggtaaaaagactaaaatgagggggaacagagttcactgtacaaatttgacaactgtcaccaaaattcataaaaaacaatagtactgtgcctctttcttctcaaacaatggatgacacaaaactatgagagtgacaaaatggtgacaggtagctgggacctaggctatcttaccatgaaggttgttttgcttattgtatatttgtgtatgtagtgtaactattttgtacaatagaggactgtaactactatttaggttgtacagattgaaatttagttgtttcattggctgtctgaggaggtgtggacttttatatatagatctacataaaaactgctacatgacaaaaaccacacctaaagaaattttaagaatttggcacagttactcactttgtgtaatctgaaatctagctgctgaatacgctgaagtaaatccttgttcactgaagtctttcaattgagctggttgaatactttgaaaaatgctcagttctaactaatgaaatggatttcccagtaggggtttctgcatatcacctgtatagtagttatatgcatatgtttctgtgcatgttctctacacaattgtaaggtgtcactgtatttaactgttgcacttgtcaactttcaataaagcatataaatgttgataaacaagtgtttttcatatgaccctgttaacataatggcagtcatttccacaactgtttccaggtaaagttaacaatttgactagtaaaatcctgaagggcagtggaatgattggaaaagtaggggcgtgatttgactgcatgaagtaaaaggaaattgacacattgagttgttcagcaggtaagagaagagacagtggaggagtccagctcaattctaactactgtgtgacttggacaggttgcttcactcctggacggatgtaggggtttgaaagagatgatctcttacattcccctttggctttaaaattctaggagtccttgaaaatcttaattttttactgaactgagaggaagaaggagccttattctgtgtataattggaataagcagatctaggatcaaaagacggaagttggagaagctgatttccactttaagaaccctgtcaccctgggttgggatgtttctcctagtgtaggatgagtttctagctcctgggataattcgttttgtctaagcaaaagatgatttgaggtgggaccagatgagcaaggatgtccttgcagttgattctgcatgactataaaacaggccaaaattaaaaccacgaaggaatcctgaggcagattggcccctggcacctgaggagtgagcctgagggatcccactctgcagtaggagtaacgtgagcgagcaagtgaatggggtgggtttaccggctctgtaatctatcaacctagggcctcagcagtggccccctgcccagtaggaattggaccaatcccaagttctaaggcttgtcttaagtccttgcagaacaaggacaaactttctgaatcattcatttctctcatctagagctggtgggagattgagaggtgaatgggacatccaagatccctaaaaagaattgttcgatagcgtgcatgtgttataaagtggtgacacgggcatcctgttgaaatgatggatggctcactgccataggctgatagcagttgtcataaagatattttgggggaatttgaaaaggacgtaaagaaaaatctttcatattggcttgttggttatataacttcaaatttaataaaggaatacttacgtagtaattacatttccttgaaaaaactatagtgaatagaaatccctagccatttcattttttatgtttttaatgaagatctttaaaataccataggtggtaatcgtggaaaatttgaaaaatctcatgtcagtgtattaagatggtggagaagtttttttctccattatttaatggaactttgggtctttttattaaaaatgtgagactcatgaaattttggcagctgaatatttgtgaaataagaatgaattattaaaagatgtctttccata

SEQ ID NO: 195646 - DNA, 11154 bp, Homo sapiens
  Payload ID: 18617
  Gene Name: TSC22 domain family, member 2
  Uniprot ID: O75157
  ENST ID: ENST00000361875
  CDS Start-End: 1017-3359
cccagcatccctggcgcggccatttcagccccatcttggcccagcggagggagctgcagccgccgcttcagcagtttgaatttcagtttcttcggggtttaggaattgggcgcaccgaggaggagccggagaagccaccaccgctacctcacacagccggggcgcctccggtcccgtgccagcggtctgccgccgccgcccctctctgagagaagccgcgaggggaggccgagaccgccgtcgccgcccgcccgcaggggtggttccccctgtaaggggaggaccgagccggctttcccctcccccagagcgggtttccgcctgaggcagtcgacatgtccctggggctgagctccggctagagccggggagggagggccgcctgcccgcgccacagccccaccgcccgcccgcggaccttcagccagctccggcccgcggctcccggctgaattaggcatctccgactccggactcgccgctccttccctcagtcagagagcccagcgctgacgccggcaccggcctgaggagcccgagcggggcagcaccgcccctcacgccgccgccaccgcctcctcctcctcctcttcgccctcccactcccacccccagccaaggcctgctgaccgcgccgagcgccgagctggactgaccacggctgcccggagacgagagaggaagcagccggcccgcccctgggttcgcgctctcgccgcctctgagggaattgaattgaggcgccgcggctgcgagagctaaaaaggaaggaggagccgccgcgggactgagacgggggcagagccgaagagaccgacacagagaaggaaacgaggaggaggatgtctcaccgggcggccagcgcctggatcagcccgtgactcttaacagcggcgggcctcagaccccagcgcagactcggactttgtctttgggggcccgtgctctgccctccccggtttccgacaggacccagaggagccggcgtgcctctctgccctccagccttcttcaccatgtccaagatgccggccaagaagaagagctgcttccagatcaccagtgtcaccacggcccaggtggccactagcatcaccgaggacaccgagagcttggacgacccggacgagtcacgcacagaggacgtctcctccgagattttcgacgtctctcgggccacggattatggccctgaggaggtctgcgagcgcagctcttccgaagagacgcttaacaatgttggggatgcggagactcccgggaccgtctccccaaacctcctcctagatgggcagctggcagcggcggctgctgctcccgccaacggaggaggagtcgtttcggcccggagcgtgtctggggcgctcgccagtaccctggcggcggctgccacttcggcccccgcccccggagcacccggcggcccccagctcgcgggctcatccgccgggccagtgactgcagccccatctcagcctcccaccacatgtagttcccgttttcgcgtgatcaagctggaccacgggagcggagagccctatagacgcggccgatggacgtgtatggaatactatgagagggattcagacagcagcgtcctgactagatccggggattgcattagacacagcagtacttttgaccagactgcggagcgggacagcggcctgggcgccaccggagggtcggtggtggtagtagtggcctccatgcagggggcgcacgggcccgagtcgggaactgacagctccttgactgctgtgtcacagctacccccgtcggagaaaatgagccagcccactccggcccagccgcagagttttagcgttgggcagccacagccgccgccgccacccgtaggtggggctgtggctcaaagctcggctccgctgccgccgttcccgggagccgcgaccgggccgcagccaatgatggcagccgcgcagcccagccagccccagggagcggggcccgggggacagactctgccgccgacgaatgtaaccctggcgcagccggctatgtccctgcctccgcagccgggccctgcagtgggcgcccccgcggcgcagcagccccagcagttcgcgtatcctcagcctcagataccgcccggacatttgctgcccgtccagccctccggccagagtgagtacctgcagcagcacgtggccggcctgcagccgccaagccccgcgcagccctcgtccaccggcgccgcagcgagccccgccacggcggccacccttcccgtgggcaccggccagaatgcttcctcggtgggcgcgcagctcatgggcgcgtcttcccagcccagcgaagccatggccccccggacgggaccagcgcaaggcgggcaggtcgcgccttgtcagccgactggagtgcccccggctactgtgggaggcgtggtgcagccgtgcctcggtcctgccggggctgggcagccccagtccgtgcctccgccgcagatgggtggcagtggtccgctgtcagccgtacctggtggccctcacgccgtggtgcccggagttccaaacgtgcctgcagccgtgcccgctccaagcgtgcctagtgtgtctaccacttctgttactatgccaaatgtacccgcgcctctggcccagtcgcaacagctgagcagccatacgccagtcagcaggagcagcagcataatccagcatgttgggctgcccttagcgccaggcacacacagcgcaccaacaagtctaccacagtctgacctaagccagtttcaaactcagacccagcctttagtcgggcaagtcgacgatactagaagaaaatcagaacccctacctcaaccaccactttctctcattgctgaaaataagcctgttgtgaagccgcctgttgcagattccctggcaaacccccttcagttaacacctatgaacagtctggccacctctgtattcagcatagctattcctgttgatggtgatgaagacaggaatccttcaactgctttctaccaagcgttccatttgaacacgttaaaggaatcaaagagcctctgggatagtgcatctgggggaggtgttgtagccattgacaacaaaatagaacaagcaatggatctggtgaaaagccatttgatgtatgcagtaagagaagaagtggaagttttaaaggaacaaataaaagaattagttgaaagaaactctttacttgaacgagaaaatgcactgttaaaatctctttcaagcaatgatcaattatcccaactcccaacccaacaggccaatcctggtagcacttctcaacagcaagcagtgatagcacagcctccgcagccaacgcaacctccacagcagccgaatgtctcctcagcataaagctttcttaagcctcattaagaaaaaaactgaaagcaatctatccttgtgtgccactggtgttctttccactttatacgaaagcaagtagccatgctttggttgtgtgtttggccttttcagtattagacaatcattctacaagagcttttcctctctctgagatgtcatgcagcgctgttgatgtccagttctatgtcatcagtacacaaggagaataatagatggggtttattaaagcgagcaaagtctgcattttacctggtgcgcatgagtggggtctttaagagttttggtggctctcccatgtttcctattacccatggatttaccctgagccttcctatcacattataaataacagttcatctaaagagccacttttctttctgattcagtaacatttgcctacataagttttcatttatttgtgttttatttattacagggctgctattttcataatgtacatgaacaatgtcacagaacttttttaatttttttgaataattataagtatcagtaaaggaagtgaaagacaggattgcatttaatagataaaacgtttaggcaataattgaacaaaagaatcctggcatatttctaacactaatggcaatttacttatggtatttattttcagtagtaaagacccagcttgaatgtaaattttgtatagtgtaagtatgaagaacatagtgcaactgtacaggtagtcaccagttattgtgatatgataaataattgggctattttgatgaagaaaactttgttcatttgtttctactttctaagagaaattgccacgattcctctgcttttcaacatttcgtatgacttttttttcgggtgggaataaaaagctgtgaaattgttcaacctactttgtaaccaaagaagcaaagctgtgtaatggagtttggtttttttttgttgtttttttttttttgtctttttttttttttataatgcacattctttatgtatttttatttagtgttttctcagtcacaattttctttactgtctagcatgatctgcatgacctataatctttgaaccactttcgtacctcatgtttttatccagcactcttattgtaatatgtactagtctgtgaacaatgtcaaataaaagagaacgaacaggtagtttggtggagctgagctagtgtacaatacactagttgtaaaaaaaaaaaaaaaaaaaagtgagccatcttttgttcatttaaaatggtgttttgaatttcgtatgcagaaaacgttttgttacattgcagattttaatgtatttaataaatgcaacatgcagattaagtgcagtgtatactgagtatttaaattaaaatgtacatttcataaatacagtttcaaaagaaagcatcattttgtgtatactaacacattaagtgtatgtcagaaattgatgtataaatatatattttaacattttctgaaattaaactgcagttttgttgaaatatttggctctatatgtgttcaaaatttgactagatttgtattttcacagttcaaaatactccttaaagacctgttaataatgacttactgatagttcttaaattttcaaagtaaaacaatttaaagaatgcaaaaatagtgagcaatatttgtactcaatattcatattatgttagtgatacttaagtaggaaatccttgtctaccaaaacttttacttgaattcagaaaggtgcctgtagaaattaacatgcactgcatctgtagccagctagctaatcagagttaatgagaaccagtagttagttctccgtgttaaaagacttatttgaagtaaaaatttaatcagattagccacaaacaaacaaggcataaaattgggatgtacatgagattgccaaatattttctattctagttgtgctgcaagacattgaacaaaatgttaatgaataacattataaatcaaggaactaagtacataggcttgagtaagcaaccctaaggatgtgtagtaagattccaagtagagctgctacaggtgagatacttaatggaatgtgaaacttcactgttggactgttaaccgaaaaggtttgctggctgtgcccctccagtgctaactgtgacatgtgatatttaatacaggtggagaaaaactagtcttagaaatgggatttttgtgaaaatagattccattttgattctggggctggaaaaacacttcataaacaaagtaatagtctccaaggaaatgaataataaggtttaaaatggtaacagcagttattactacttttatattaagaaaaacagtagaaaaggagagaaaatatgggtagttcacagaagagataaatggcagtttctaaaggttcaacctctagtaacctaagaaatgcaaattaatgtttttggcgaattgtaataagtgtcctaagtagcaggacttaacatagaaagaaagacaggctttcctgtgtacttttagaaagtaatttggcagtatgtatctagagccttaaataataagctttccagtgtaacgacaggagaagatactcaactcatggtccattgttcaaaaatgcagaattattgtggtgtctgccctctgctttcccatcatcccctcccctcaaaatccaaactatccctactgtcaacccttcccccagctgattgtttaggatcttaagtaacttccaattcagctttggagatttagtctcctgctccaaatagttgtaaatattaactgattgagatcccaatttggaggcacagtcttacaggaatgccatctatctaattctgtcagtgtaatgcccatagagcaaggtcccacataagcttttctgttttaatttagccggtaaatcataagtagaaatttttctgatacggtaattgtctacaattcaaacctaactttccccaaataaaatttagtttgttccgatgtgatctcacagcttgccacaccaaaaacaaatagtaggggttaggaggcattaaataaacagtttccttaactcctgattgtccaaaatagctgaatttttccaattctatttataatatcctatgctaattagaagtattgagataacgttttataatcaagcctccagtgactggggatcacagctgccattattcacaagaattttcacaggtgaatgattatatttctccaagttgcaaactccagtaattcatggacctttttttaaaaaaaaaaaaagtcttaatagaaccagaatatctctgttcttgaaaatttatctttgcagaaccagaaatagctaattgtctggaaacaatttttaagatttgaagtcacatttttaaaagaagctttatggctcagtggcaagcactttgtgacatttctttaataatcctatgaaaaggacaaaacccagccctcaaaattgacaatttgaggacataataagccaactgataatgcagtgaggaatacttgttactatgtacagtcagggatggttttgtcagggtaggtttcctcaaaaacatgacacctgagtcttgaaggtcataagagccagagggaagggtgttccaagcacaagaaaagagaactcaatggcttaaaagtataaacaaggctcctagggcagccacagaattgcattggagacaggcaggcagtgacttccccactgacctagtattttggcatctattcagaaagcaagaatgatttattgaatggttttaagcaatgggatactatgctcaaattatgctggatgtgcacaattccagtggcagatgggaggtaggttagagtagctgaaactggaagctgagaaataatttaggagggatgacaatccggaaaataaatgaaagggcaaaattacataggcaattttgtgaaggtcatgaaggaagtttgtcttgggtctttctgtaccattttcctctccacaatgaacatcccattcccagtgtcaggtatcaggtgcctattttctttttttcttttttctttttttttttttttgagacagagtcttgctgtgctcaggctggagtgcagtggcaagatctcggctcactgcaacctccgcctcccaggttcaagcgattctcctgcctcagcctcctgagtagctgggattacaggcgtgtgccaccatgccaggctaatttttgtatttttagtagagacagggtttcaccatgttggccaggttggtcttgaactcctgacctcaagtcatctcccccgcccgcctgggcctcccaaagtgttgggattacaggcgtgagccaccgcacccagctgcctattttcttgtccctccaaaaaaagattaaagagtcccaactcatacttgaaagtttgactcggtcttttccttccaacagttataaatctgtgaaatgaaagtctttgtttccttaaagggatttcaagaatttaacaaaagggttggggaatggaacctttgctgtcactatgcctgtctctcaattctaccctaaaggtaaactaaatggaatccttttatggtgactaggattaggatgttgattccaaagcctttccctaaaatctattccttgctccctggaaaggataatacaggttctggcccccactgtaggtactgacagcccaaggcagaataggttttgctaggctttagccttttattctttgacataggtcagtcctgcaggcttcttttttctaagtctcctgcctatccaaaaccagaccttttctcccacctccttctgcttcaagcctcttaataatccatatttctattttctagcaatagtaatagtttattatttagtgatgtatacttgcaccccatttactccttttcaatatttcaggatacatctttgtcctgtatttctgtaccagttcacagaatttctacagcaagatccctttaaatgtatggctttccttcataggttgcaaggattactttatacaagtgctactgtaactatatcttttgtggagtacaattggtatgacatgctgtgttcatagatgaaaatgctaagtgaggcactctgaagcaagttaaagttcacagacattcttgcttgcccaccacccccccgaaccccgccatggaatcatcaaataagaaaaataagacagattttcagattggtgatggcaaagtaagacgctggtattttgcactggcgcagtccatttagttgttgaatttgttcagcatacctggatggtgagtgagttagctttatttttcattctcagcagggaaactgatagactaggcagtttggggaattttcccattgtctactgtcatgggtccatagtatttaagtttacagactacaacattgtccacagaagccatatttatccccttggagggaagggaaaggtgtgctaacttagatcataaaaacaactgaattttaaaacaaggcaaatgccacagttcaacttctccataaaaaagttaagttcatctctccattcttttgcatgcctacaatatttccatataacaactgtaaaatactcttgcctgctgcaatccaaatgttatccggatcacagttcttgctgtcatttcacaggcatgcaatgtatctatagataggtcatatcatacctgaggaagatcagagacagcaagggaacattttccccacacttgagatggaaataataacaggtcagtggctaataaaaagaaacatgtatgactttgtaaaaccctaaaagtgatgttttcaagaaatttaggtttcttttttttattttataaaaaaaatgttgacatgcaatttaattctatttcaatttaggtgctgcaacctgtactggatgtttggggatagaaagatgaatgggacatgatttgtgtgctccaatgagctcagtccagtgtaagtgtaaaagttaaagtgccatattgtttattcagagtatatgttatagtttgtgaaccttatatcatttgttaaatgaaaggtttttataaatcaacagtaatattgccatcccatgtaaaaatcctttgatattgccaggaaacaactttaaatcaccagaaagctttaacatcaaataatacttttagaaggaggggaaaagccttccacctcgacatcgagcctatgaagtattccctaaaaaagaggaactaatctgagaaaagtttacacatttttaatactctaagttgtagataatgaaattgatttaaatcaaagttaactagaataggattcatgtgtcatgaattatattgtctattgtctcataagcaacaagtgacacttattatcttggctgacaaaatcagctaccatttaatgaaccaagttaagaataactcaggtgactgataccaaaaataaatctctaatacagctgagaatccagaaacacaaataatatgttgagtaagtaataaaagtgacatttcaaattagtaaggaaaaaatggattattcaacaaatagtatgggatagcataacaatttagaagaaatataaagttagatctttcacaaaaattaattctagctagactagcagttagtcttctactttttggttactcccttttagaaattggaagctatgaagctatataccctgtccatttgaaaatgcacataagcaaagaactttacaaataggttataaagagaagctcaatctcagcaaaataagggaagtgcacattaaaacacaagaaaccatctcagatccaactaatatttagcgtgcatacaaatcaaaagctggaaagggtgtggaaaaacaggaatacattgctagtgagcatacaaattggcacagcctcttttaaagacaattgtgtatcacccattaaattttaaaagtcacataccctgtgacctaacaattccaacttttaatgtcctaaagaaacatacatgtgttcacaagatagcctgtacaatgatgtcaattgcacctttgcttgtacagtagacccccttatctgcattttcactttttgaggtttcagtcatccaaggtcaaccacaatacaaaaatattaaatggaaaattccagaaacgaacataagttttaaacttcaaacctttctgcatagtataataaaaatctctcactatccctctccatcctgcctgggacaggaatcatccctttgtccagtgtatccacaatgtatacactcattatatacccattttataatgcccattagtcatttctattatcagatcataaaaaaacatagtacatagagggtttggtattattcatggtttcaggcattcagtgagggtcttggaaaatatcctccatgatgggggagctactgtaatactatgaaattggaaaaaccaaaatactcatcaagaggatggactatggtacacatgatgaagtattaagtatcaatgaaaaagagagagtcctacatgtccggcatggaaggatctccaggagacaatgttaaaagtttgggggaaaaattgaaagacaatacctgtaatacatatgatactagtgatgttaaatcacatcacacacacacacacacacacacacacacacacacaaatactgtatagtgtacttctacaagtacatatttgtgtattatatagagagaaggtctggaaggatactaaccaaactgtcaacagtagtttggtagcgtgcattagctttaactgtaatgtttgatgtttttgaatatgcatttatgtattgtttgtgtaatgacaaattaataaattagaaataaaataaaataatgtgtt

SEQ ID NO: 195647 - DNA, 2093 bp, Homo sapiens
  Payload ID: 18617
  Gene Name: TSC22 domain family, member 2
  ENST ID: ENST00000466814
  CDS Start-End: 1-613
aatccagcatgttgggctgcccttagcgccaggcacacacagcgcaccaacaagtctaccacagtctgacctaagccagtttcaaactcagacccagcctttagtcgggcaagtcgacgatactagaagaaaatcagaacccctacctcaaccaccactttctctcattgctgaaaataagcctgttgtgaagccgcctgttgcagattccctggcaaacccccttcagttaacacctatgaacagtctggccacctctgtattcagcatagctattcctgttgatggtgatgaagacagtgcatctgggggaggtgttgtagccattgacaacaaaatagaacaagcaatggatctggtgaaaagccatttgatgtatgcagtaagagaagaagtggaagttttaaaggaacaaataaaagaattagttgaaagaaactctttacttgaacgagaaaatgcactgttaaaatctctttcaagcaatgatcaattatcccaactcccaacccaacaggccaatcctggtagcacttctcaacagcaagcagtgatagcacagcctccgcagccaacgcaacctccacagcagccgaatgtctcctcagcataaagctttcttaagcctcattaagaaaaaaactgaaagcaatctatccttgtgtgccactggtgttctttccactttatacgaaagcaagtagccatgctttggttgtgtgtttggccttttcagtattagacaatcattctacaagagcttttcctctctctgagatgtcatgcagcgctgttgatgtccagttctatgtcatcagtacacaaggagaataatagatggggtttattaaagcgagcaaagtctgcattttacctggtgcgcatgagtggggtctttaagagttttggtggctctcccatgtttcctattacccatggatttaccctgagccttcctatcacattataaataacagttcatctaaagagccacttttctttctgattcagtaacatttgcctacataagttttcatttatttgtgttttatttattacagggctgctattttcataatgtacatgaacaatgtcacagaacttttttaatttttttgaataattataagtatcagtaaaggaagtgaaagacaggattgcatttaatagataaaacgtttaggcaataattgaacaaaagaatcctggcatatttctaacactaatggcaatttacttatggtatttattttcagtagtaaagacccagcttgaatgtaaattttgtatagtgtaagtatgaagaacatagtgcaactgtacaggtagtcaccagttattgtgatatgataaataattgggctattttgatgaagaaaactttgttcatttgtttctactttctaagagaaattgccacgattcctctgcttttcaacatttcgtatgacttttttttcgggtgggaataaaaagctgtgaaattgttcaacctactttgtaaccaaagaagcaaagctgtgtaatggagtttggtttttttttgttgtttttttttttttgtctttttttttttttataatgcacattctttatgtatttttatttagtgttttctcagtcacaattttctttactgtctagcatgatctgcatgacctataatctttgaaccactttcgtacctcatgtttttatccagcactcttattgtaatatgtactagtctgtgaacaatgtcaaataaaagagaacgaacaggtagtttggtggagctgagctagtgtacaatacactagttgtaaaaaaaaaaaaaaaaaaaagtgagccatcttttgttcatttaaaatggtgttttgaatttcgtatgcagaaaacgttttgttacattgcagattttaatgtatttaataaatgcaacatgcagattaagtgcagtgtatactgagtatttaaattaaaatgtacatttcataaatacagtttcaaaagaaagcatcattttgtgtatactaacacattaagtgtatgtcagaaattgatgtataaatatatattttaacattttctgaaattaaactgcagttttgttg

SEQ ID NO: 195648 - DNA, 826 bp, Homo sapiens
  Payload ID: 18617
  Gene Name: TSC22 domain family, member 2
  ENST ID: ENST00000480589
  CDS Start-End: 1-350
agctgagcagccatacgccagtcagcaggagcagcagcataatccagcatgttgggctgcccttagcgccaggcacacacagcgcaccaacaagtctaccacagtctgacctaagccagtttcaaactcagacccagcctttagtcgggcaagtcgacgatactagaagaaaatcagaacccctacctcaaccaccactttctctcattgctgaaaataagcctgttgtgaagccgcctgttgcagattccctggcaaacccccttcagttaacacctatgaacagtctggccacctctgtattcagcatagctattcctgttgatggtgatgaagacaggatctggtgaaaagccatttgatgtatgcagtaagagaagaagtggaagttttaaaggaacaaataaaagaattagttgaaagaaactctttacttgaacgagaaaatgcactgttaaaatctctttcaagcaatgatcaattatcccaactcccaacccaacaggccaatcctggtagcacttctcaacagcaagcagtgatagcacagcctccgcagccaacgcaacctccacagcagccgaatgtctcctcagcataaagctttcttaagcctcattaagaaaaaaactgaaagcaatctatccttgtgtgccactggtgttctttccactttatacgaaagcaagtagccatgctttggttgtgtgtttggccttttcagtattagacaatcattctacaagagcttttcctctctctgagatgtcatgcagcgctgttgatgtccagttctatgtcatcagtacacaaggagaataataga

SEQ ID NO: 195649 - DNA, 715 bp, Homo sapiens
  Payload ID: 18617
  Gene Name: TSC22 domain family, member 2
  ENST ID: ENST00000485421
  CDS Start-End: 1-245
ctgaaaataagcctgttgtgaagccgcctgttgcagattccctggcaaacccccttcagttaacacctatgaacagtctggccacctctgtattcagcatagctattcctgttgatggtgatgaagacaggaatccttcaactgctttctaccaagcgttccatttgaacacgttaaaggaatcaaagagcctctgggatagaattttttttagaattcagcatcggaggaggaatgtgacataataatgatcgaaagccgaaagtttaaaagttgtgatgccctcacatggttggagggttattctagcttctaaggactgaatgttgtccacaagagtgtcatcaggtcataaattgtgcatctgggggaggtgttgtagccattgacaacaaaatagaacaagcaatggatctggtgaaaagccatttgatgtatgcagtaagagaagaagtggaagttttaaaggaacaaataaaagaattagttgaaagaaactctttacttgaacgagaaaatgcactgttaaaatctctttcaagcaatgatcaattatcccaactcccaacccaacaggccaatcctggtagcacttctcaacagcaagcagtgatagcacagcctccgcagccaacgcaacctccacagcagccgaatgtctcctcagcataaagctttcttaagcctcattaagaaaaaaactgaaagcaatcta

SEQ ID NO: 195650 - DNA, 2213 bp, Homo sapiens
  Payload ID: 18618
  Gene Name: TSC22 domain family, member 3
  Uniprot ID: Q99576
  ENST ID: ENST00000315660
  CDS Start-End: 313-915
atatcccagtgctgactcccgggcgtgcagaccgctaactagctcactcgctctcagctcctgccaccgctcagccgtcacagcccaggggagcccgagagcctgagagcctgcaaaccggggagggagggagcaaaggagggagggagcaagggcgcgccctggctctccctctgccctgctgcccgcccttcctgcctccacagcttgtcttttccaggcaccctggagtcccctcaggccagctcggtgggcgcgcacctgccagccgcccctgacctcgcaggccaggcgacctccgagcctgagaagatggcccagtccaagctcgattgccgctcacctgtcggcctcgactgctgcaactgctgcctggacctggcccatcggagtgggctccagcgaggcagcagcggggagaacaacaacccgggcagccctacagtgagcaactttcggcagctgcaggaaaagctggtctttgagaacctcaataccgacaagctcaacagcataatgcggcaggattcgctagagccggtgctgcgggacccctgctacctgatcaacgagggcatctgcaaccgcaacatcgaccagaccatgctctccatcctgctcttcttccacagtgcctccggagccagcgtggtggccatagacaacaagatcgaacaggccatggatctggtgaagaatcatctgatgtatgctgtgagagaggaggtggagatcctgaaggagcagatccgagagctggtggagaagaactcccagctagagcgtgagaacaccctgttgaagaccctggcaagcccagagcagctggagaagttccagtcctgtctgagccctgaagagccagctcccgaatccccacaagtgcccgaggcccctggtggttctgcggtgtaagtggctctgtcctcagggtgggcagagccactaaacttgttttacctagttctttccagtttgtttttggctccccaagcatcatctcacgaggagaactttacacctagcacagctggtgccaagagatgtcctaaggacatggccacctgggtccactccagcgacagacccctgacaagagcaggtctctggaggctgagttgcatggggcctagtaacaccaagccagtgagcctctaatgctactgcgccctgggggctcccagggcctgggcaacttagctgcaactggcaaaggagaagggtagtttgaggtgtgacaccagtttgctccagaaagtttaaggggtctgtttctcatctccatggacatcttcaacagcttcacctgacaacgactgttcctatgaagaagccacttgtgttttaagcagaggcaacctctctcttctcctctgtttcgtgaaggcaggggacacagatgggagagattgagccaagtcagccttctgttggttaatatggtataatgcatggctttgtgcacagcccagtgtgggattacagctttgggatgaccgcttacaaagttctgtttggttagtattggcatagtttttctatatagccataaatgcgtatatatacccatagggctagatctgtatcttagtgtagcgatgtatacatatacacatccacctacatgttgaagggcctaaccagccttgggagtattgactggtcccttacctcttatggctaagtctttgactgtgttcatttaccaagttgacccagtttgtcttttaggttaagtaagactcgagagtaaaggcaaggaggggggccagcctctgaatgcggccacggatgccttgctgctgcaaccctttccccagctgtccactgaaacgtgaagtcctgttttgaatgccaaacccaccattcactggtgctgactacatagaatggggttgagagaagatcagtttgggcttcacagtgtcatttgaaaacgttttttgttttgttttgtaattattgtggaaaactttcaagtgaacagaaggatggtgtcctactgtggatgagggatgaacaaggggatggctttgatccaatggagcctgggaggtgtgcccagaaagcttgtctgtagcgggttttgtgagagtgaacactttccactttttgacaccttatcctgatgtatggttccaggatttggattttgattttccaaatgtagcttgaaatttcaataaactttgctctgtttttctaaaaataaa

SEQ ID NO: 195651 - DNA, 1216 bp, Homo sapiens
  Payload ID: 18618
  Gene Name: TSC22 domain family, member 3
  ENST ID: ENST00000372382
  CDS Start-End: 365-697
aattgctagagctgcttttccaagacagtgtccatctctccaccaagattctccttgggctccctcccactcatcatcgccttctgcatctgcatctgcattctcctccccattttcctgcccctgaaattcggagctctgggccctggccatgcagggcagttcacatgatccacagagaacaaggcactttctctttctctgtctttccttcttgcttccctccttctggactttggggattttccatgaaaccaaagtaactatgtaagtggcagtggccttcctgtctatagtctcccacactggagtggaaccagaagggaagagagaagataagcgagaagcaaggacaaattaaaccatggcatttcagcctccttattcctccagcctcttcagaaaaagggacaatgcctccggagccagcgtggtggccatagacaacaagatcgaacaggccatggatctggtgaagaatcatctgatgtatgctgtgagagaggaggtggagatcctgaaggagcagatccgagagctggtggagaagaactcccagctagagcgtgagaacaccctgttgaagaccctggcaagcccagagcagctggagaagttccagtcctgtctgagccctgaagagccagctcccgaatccccacaagtgcccgaggcccctggtggttctgcggtgtaagtggctctgtcctcagggtgggcagagccactaaacttgttttacctagttctttccagtttgtttttggctccccaagcatcatctcacgaggagaactttacacctagcacagctggtgccaagagatgtcctaaggacatggccacctgggtccactccagcgacagacccctgacaagagcaggtctctggaggctgagttgcatggggcctagtaacaccaagccagtgagcctctaatgctactgcgccctgggggctcccagggcctgggcaacttagctgcaactggcaaaggagaagggtagtttgaggtgtgacaccagtttgctccagaaagtttaaggggtctgtttctcatctccatggacatcttcaacagcttcacctgacaacgactgttcctatgaagaagccacttgtgttttaagcagaggcaacctctctcttctcctctgtttcgtgaaggcaggggacacagatgggagagattgagccaagtcagccttctgttgg

SEQ ID NO: 195652 - DNA, 2266 bp, Homo sapiens
  Payload ID: 18618
  Gene Name: TSC22 domain family, member 3
  Uniprot ID: Q99576
  ENST ID: ENST00000372383
  CDS Start-End: 369-971
ctccacaggtccgccccaatccccgctcacacttgggaaacttgggactgcgctggggccgcgtgtggcacctcaggggggcggcccccggcctcaagaggagggggaggagaaggaggaagaggaggaagtgagcccgaaggatccgctcggagctgtttgtccagctgtttctattcgcacccggagcagtacagccagaagggggccgagccgaaggtggctggctttaggcgctaatttccaactcttttcctcacagcttgtcttttccaggcaccctggagtcccctcaggccagctcggtgggcgcgcacctgccagccgcccctgacctcgcaggccaggcgacctccgagcctgagaagatggcccagtccaagctcgattgccgctcacctgtcggcctcgactgctgcaactgctgcctggacctggcccatcggagtgggctccagcgaggcagcagcggggagaacaacaacccgggcagccctacagtgagcaactttcggcagctgcaggaaaagctggtctttgagaacctcaataccgacaagctcaacagcataatgcggcaggattcgctagagccggtgctgcgggacccctgctacctgatcaacgagggcatctgcaaccgcaacatcgaccagaccatgctctccatcctgctcttcttccacagtgcctccggagccagcgtggtggccatagacaacaagatcgaacaggccatggatctggtgaagaatcatctgatgtatgctgtgagagaggaggtggagatcctgaaggagcagatccgagagctggtggagaagaactcccagctagagcgtgagaacaccctgttgaagaccctggcaagcccagagcagctggagaagttccagtcctgtctgagccctgaagagccagctcccgaatccccacaagtgcccgaggcccctggtggttctgcggtgtaagtggctctgtcctcagggtgggcagagccactaaacttgttttacctagttctttccagtttgtttttggctccccaagcatcatctcacgaggagaactttacacctagcacagctggtgccaagagatgtcctaaggacatggccacctgggtccactccagcgacagacccctgacaagagcaggtctctggaggctgagttgcatggggcctagtaacaccaagccagtgagcctctaatgctactgcgccctgggggctcccagggcctgggcaacttagctgcaactggcaaaggagaagggtagtttgaggtgtgacaccagtttgctccagaaagtttaaggggtctgtttctcatctccatggacatcttcaacagcttcacctgacaacgactgttcctatgaagaagccacttgtgttttaagcagaggcaacctctctcttctcctctgtttcgtgaaggcaggggacacagatgggagagattgagccaagtcagccttctgttggttaatatggtataatgcatggctttgtgcacagcccagtgtgggattacagctttgggatgaccgcttacaaagttctgtttggttagtattggcatagtttttctatatagccataaatgcgtatatatacccatagggctagatctgtatcttagtgtagcgatgtatacatatacacatccacctacatgttgaagggcctaaccagccttgggagtattgactggtcccttacctcttatggctaagtctttgactgtgttcatttaccaagttgacccagtttgtcttttaggttaagtaagactcgagagtaaaggcaaggaggggggccagcctctgaatgcggccacggatgccttgctgctgcaaccctttccccagctgtccactgaaacgtgaagtcctgttttgaatgccaaacccaccattcactggtgctgactacatagaatggggttgagagaagatcagtttgggcttcacagtgtcatttgaaaacgttttttgttttgttttgtaattattgtggaaaactttcaagtgaacagaaggatggtgtcctactgtggatgagggatgaacaaggggatggctttgatccaatggagcctgggaggtgtgcccagaaagcttgtctgtagcgggttttgtgagagtgaacactttccactttttgacaccttatcctgatgtatggttccaggatttggattttgattttccaaatgtagcttgaaatttcaataaactttgctctgtttttctaaaaat

SEQ ID NO: 195653 - DNA, 2199 bp, Homo sapiens
  Payload ID: 18618
  Gene Name: TSC22 domain family, member 3
  Uniprot ID: Q99576
  ENST ID: ENST00000372384
  CDS Start-End: 302-904
gtcatatcccagtgctgactcccgggcgtgcagaccgctaactagctcactcgctctcagctcctgccaccgctcagccgtcacagcccaggggagcccgagagcctgagagcctgcaaaccggggagggagggagcaaaggagggagggagcaagggcgcgccctggctctccctctgccctgctgcccgcccttcctgcctccacaggcaccctggagtcccctcaggccagctcggtgggcgcgcacctgccagccgcccctgacctcgcaggccaggcgacctccgagcctgagaagatggcccagtccaagctcgattgccgctcacctgtcggcctcgactgctgcaactgctgcctggacctggcccatcggagtgggctccagcgaggcagcagcggggagaacaacaacccgggcagccctacagtgagcaactttcggcagctgcaggaaaagctggtctttgagaacctcaataccgacaagctcaacagcataatgcggcaggattcgctagagccggtgctgcgggacccctgctacctgatcaacgagggcatctgcaaccgcaacatcgaccagaccatgctctccatcctgctcttcttccacagtgcctccggagccagcgtggtggccatagacaacaagatcgaacaggccatggatctggtgaagaatcatctgatgtatgctgtgagagaggaggtggagatcctgaaggagcagatccgagagctggtggagaagaactcccagctagagcgtgagaacaccctgttgaagaccctggcaagcccagagcagctggagaagttccagtcctgtctgagccctgaagagccagctcccgaatccccacaagtgcccgaggcccctggtggttctgcggtgtaagtggctctgtcctcagggtgggcagagccactaaacttgttttacctagttctttccagtttgtttttggctccccaagcatcatctcacgaggagaactttacacctagcacagctggtgccaagagatgtcctaaggacatggccacctgggtccactccagcgacagacccctgacaagagcaggtctctggaggctgagttgcatggggcctagtaacaccaagccagtgagcctctaatgctactgcgccctgggggctcccagggcctgggcaacttagctgcaactggcaaaggagaagggtagtttgaggtgtgacaccagtttgctccagaaagtttaaggggtctgtttctcatctccatggacatcttcaacagcttcacctgacaacgactgttcctatgaagaagccacttgtgttttaagcagaggcaacctctctcttctcctctgtttcgtgaaggcaggggacacagatgggagagattgagccaagtcagccttctgttggttaatatggtataatgcatggctttgtgcacagcccagtgtgggattacagctttgggatgaccgcttacaaagttctgtttggttagtattggcatagtttttctatatagccataaatgcgtatatatacccatagggctagatctgtatcttagtgtagcgatgtatacatatacacatccacctacatgttgaagggcctaaccagccttgggagtattgactggtcccttacctcttatggctaagtctttgactgtgttcatttaccaagttgacccagtttgtcttttaggttaagtaagactcgagagtaaaggcaaggaggggggccagcctctgaatgcggccacggatgccttgctgctgcaaccctttccccagctgtccactgaaacgtgaagtcctgttttgaatgccaaacccaccattcactggtgctgactacatagaatggggttgagagaagatcagtttgggcttcacagtgtcatttgaaaacgttttttgttttgttttgtaattattgtggaaaactttcaagtgaacagaaggatggtgtcctactgtggatgagggatgaacaaggggatggctttgatccaatggagcctgggaggtgtgcccagaaagcttgtctgtagcgggttttgtgagagtgaacactttccactttttgacaccttatcctgatgtatggttccaggatttggattttgattttccaaatgtagcttgaaatttcaataaactttgctctgtttttctaaaaat

SEQ ID NO: 195654 - DNA, 1812 bp, Homo sapiens
  Payload ID: 18618
  Gene Name: TSC22 domain family, member 3
  ENST ID: ENST00000372390
  CDS Start-End: 281-514
acgcaggaaggggggggtcaccgccgctctgggatccgtcatcgaagcgtccctgcggccgctgcgccgtgaaaaccagctgctgcagccgcagaggcagccggaggcagaggggcggcgggcaggaccagacagggctgggcagggggctggccgagcgccgtgcgccgcttgggagaaggccggaagcttaccagccgagaaggaattcctagctagcttcagagccggtgcctccggagccagcgtggtggccatagacaacaagatcgaacaggccatggatctggtgaagaatcatctgatgtatgctgtgagagaggaggtggagatcctgaaggagcagatccgagagctggtggagaagaactcccagctagagcgtgagaacaccctgttgaagaccctggcaagcccagagcagctggagaagttccagtcctgtctgagccctgaagagccagctcccgaatccccacaagtgcccgaggcccctggtggttctgcggtgtaagtggctctgtcctcagggtgggcagagccactaaacttgttttacctagttctttccagtttgtttttggctccccaagcatcatctcacgaggagaactttacacctagcacagctggtgccaagagatgtcctaaggacatggccacctgggtccactccagcgacagacccctgacaagagcaggtctctggaggctgagttgcatggggcctagtaacaccaagccagtgagcctctaatgctactgcgccctgggggctcccagggcctgggcaacttagctgcaactggcaaaggagaagggtagtttgaggtgtgacaccagtttgctccagaaagtttaaggggtctgtttctcatctccatggacatcttcaacagcttcacctgacaacgactgttcctatgaagaagccacttgtgttttaagcagaggcaacctctctcttctcctctgtttcgtgaaggcaggggacacagatgggagagattgagccaagtcagccttctgttggttaatatggtataatgcatggctttgtgcacagcccagtgtgggattacagctttgggatgaccgcttacaaagttctgtttggttagtattggcatagtttttctatatagccataaatgcgtatatatacccatagggctagatctgtatcttagtgtagcgatgtatacatatacacatccacctacatgttgaagggcctaaccagccttgggagtattgactggtcccttacctcttatggctaagtctttgactgtgttcatttaccaagttgacccagtttgtcttttaggttaagtaagactcgagagtaaaggcaaggaggggggccagcctctgaatgcggccacggatgccttgctgctgcaaccctttccccagctgtccactgaaacgtgaagtcctgttttgaatgccaaacccaccattcactggtgctgactacatagaatggggttgagagaagatcagtttgggcttcacagtgtcatttgaaaacgttttttgttttgttttgtaattattgtggaaaactttcaagtgaacagaaggatggtgtcctactgtggatgagggatgaacaaggggatggctttgatccaatggagcctgggaggtgtgcccagaaagcttgtctgtagcgggttttgtgagagtgaacactttccactttttgacaccttatcctgatgtatggttccaggatttggattttgattttccaaatgtagcttgaaatttcaataaactttgctctgtttttctaaaaataaa

SEQ ID NO: 195655 - DNA, 2027 bp, Homo sapiens
  Payload ID: 18618
  Gene Name: TSC22 domain family, member 3
  Uniprot ID: Q99576
  ENST ID: ENST00000372397
  CDS Start-End: 325-729
tttgcatggcccctgacgccatgtgacgcagccggctcctcctatataaagaagcaggagccaaaatatctccgagtctgggttggactggcggccgtggagtttgtgacatacgaggtgacacccctcgagtcacttcccttcaactccagctggagcgcctgcttggctttgggttcgttctgcagccttcgccccgctcctagcctcagggccggactccagcgcagagcccagcccagcgcagcctgccagcagccacccagccgcccagccgcccagccccgcacgaaacccggccagagcttcctagcagcccgagccatgaacaccgaaatgtatcagacccccatggaggtggcggtctaccagctgcacaatttctccatctccttcttctcttctctgcttggaggggatgtggtttccgttaagctggacaacagtgcctccggagccagcgtggtggccatagacaacaagatcgaacaggccatggatctggtgaagaatcatctgatgtatgctgtgagagaggaggtggagatcctgaaggagcagatccgagagctggtggagaagaactcccagctagagcgtgagaacaccctgttgaagaccctggcaagcccagagcagctggagaagttccagtcctgtctgagccctgaagagccagctcccgaatccccacaagtgcccgaggcccctggtggttctgcggtgtaagtggctctgtcctcagggtgggcagagccactaaacttgttttacctagttctttccagtttgtttttggctccccaagcatcatctcacgaggagaactttacacctagcacagctggtgccaagagatgtcctaaggacatggccacctgggtccactccagcgacagacccctgacaagagcaggtctctggaggctgagttgcatggggcctagtaacaccaagccagtgagcctctaatgctactgcgccctgggggctcccagggcctgggcaacttagctgcaactggcaaaggagaagggtagtttgaggtgtgacaccagtttgctccagaaagtttaaggggtctgtttctcatctccatggacatcttcaacagcttcacctgacaacgactgttcctatgaagaagccacttgtgttttaagcagaggcaacctctctcttctcctctgtttcgtgaaggcaggggacacagatgggagagattgagccaagtcagccttctgttggttaatatggtataatgcatggctttgtgcacagcccagtgtgggattacagctttgggatgaccgcttacaaagttctgtttggttagtattggcatagtttttctatatagccataaatgcgtatatatacccatagggctagatctgtatcttagtgtagcgatgtatacatatacacatccacctacatgttgaagggcctaaccagccttgggagtattgactggtcccttacctcttatggctaagtctttgactgtgttcatttaccaagttgacccagtttgtcttttaggttaagtaagactcgagagtaaaggcaaggaggggggccagcctctgaatgcggccacggatgccttgctgctgcaaccctttccccagctgtccactgaaacgtgaagtcctgttttgaatgccaaacccaccattcactggtgctgactacatagaatggggttgagagaagatcagtttgggcttcacagtgtcatttgaaaacgttttttgttttgttttgtaattattgtggaaaactttcaagtgaacagaaggatggtgtcctactgtggatgagggatgaacaaggggatggctttgatccaatggagcctgggaggtgtgcccagaaagcttgtctgtagcgggttttgtgagagtgaacactttccactttttgacaccttatcctgatgtatggttccaggatttggattttgattttccaaatgtagcttgaaatttcaataaactttgctctgtttttctaaaaataaa

SEQ ID NO: 195656 - DNA, 569 bp, Homo sapiens
  Payload ID: 18618
  Gene Name: TSC22 domain family, member 3
  ENST ID: ENST00000514426
  CDS Start-End: 139-537
atgcaatcgctacatctattgaaagggtaacgacagacggagatcaactaaggtggcagccctacagtgagcaactttcggcagctgcaggaaaagctggtctttgagaacctcaataccgacaagctcaacagcataatgcggcaggattcgctagagccggtgctgcgggacccctgctacctgatcaacgagggcatctgcaaccgcaacatcgaccagaccatgctctccatcctgctcttcttccacagtgcctccggagccagcgtggtggccatagacaacaagatcgaacaggccatggatctggtgaagaatcatctgatgtatgctgtgagagaggaggtggagatcctgaaggagcagatccgagagctggtggagaagaactcccagctagagcgtgagaacaccctgttgaagaccctggcaagcccagagcagctggagaagttccagtcctgtctgagccctgaagagccagctcccgaatccccacaagtgcccgaggcccctggtggttctgcggtgtaagtggctctgtcctcagggtgggcagagccact

SEQ ID NO: 195657 - DNA, 551 bp, Homo sapiens
  Payload ID: 18618
  Gene Name: TSC22 domain family, member 3
  ENST ID: ENST00000503515
  CDS Start-End: 252-551
gagtctgggttggactggcggccgtggagtttgtgacatacgaggtgacacccctcgagtcacttcccttcaactccagctggagcgcctgcttggctttgggttcgttctgcagccttcgccccgctcctagcctcagggccggactccagcgcagagcccagcccagcgcagcctgccagcagccacccagccgcccagccgcccagccccgcacgaaacccggccagagcttcctagcagcccgagccatgaacaccgaaatgtatcagacccccatggaggtggcggtctaccagctgcacaatttctccatctccttcttctcttctctgcttggaggggatgtggtttccgttaagctggacaacagtgcctccggagccagcgtggtggccatagacaacaagatcgaacaggccatggtgagtggcatcactgcgtcattctcatcccctgacttagctgctgcttatgtaactctgggcaggattgagggaatgggtgaaaaagcccttagccaaaaccctgaggaagccgacagcctgcct

SEQ ID NO: 195658 - DNA, 503 bp, Homo sapiens
  Payload ID: 18618
  Gene Name: TSC22 domain family, member 3
  ENST ID: ENST00000502961
  CDS Start-End: 330-503
aaaggccagacttgtgaatgaaggagccgatgcgggggtggggagtactgactgaaattattccaagtctctgagtcctgagaaaccctggaaacccaccacttgcccacccagaacatccctccatcttacagagctggggcacgcccctcaggcctgtgaacatgcaatcgctacatctattgaaagggtaacgacagacggagatcaactaaggtggcagcttgtcttttccaggcaccctggagtcccctcaggccagctcggtgggcgcgcacctgccagccgcccctgacctcgcaggccaggcgacctccgagcctgagaagatggcccagtccaagctcgattgccgctcacctgtcggcctcgactgctgcaactgctgcctggacctggcccatcggagtgggctccagcgaggcagcagcggggagaacaacaacccgggcagccctacagtgagcaactttcggcagctgcaggaaaagctggtctttgag

SEQ ID NO: 195659 - DNA, 581 bp, Homo sapiens
  Payload ID: 18618
  Gene Name: TSC22 domain family, member 3
  ENST ID: ENST00000510887
  CDS Start-End: 223-581
agagagaaggaaggggaggactgaggagagacggcgaaggggcagagggaaaccgggacagagactgcctctgaggggttcagggaagagaggacacagcgagctggggaaaggagcttgtcttttccaggcaccctggagtcccctcaggccagctcggtgggcgcgcacctgccagccgcccctgacctcgcaggccaggcgacctccgagcctgagaagatggcccagtccaagctcgattgccgctcacctgtcggcctcgactgctgcaactgctgcctggacctggcccatcggagtgggctccagcgaggcagcagcggggagaacaacaacccgggcagccctacagtgagcaactttcggcagctgcaggaaaagctggtctttgagaacctcaataccgacaagctcaacagcataatgcggcaggattcgctagagccggtgctgcgggacccctgctacctgatcaacgagggcatctgcaaccgcaacatcgaccagaccatgctctccatcctgctcttcttccacagtgcctccggagccagcgtggtggccatagacaacaagat

SEQ ID NO: 195660 - DNA, 567 bp, Homo sapiens
  Payload ID: 18618
  Gene Name: TSC22 domain family, member 3
  ENST ID: ENST00000502650
  CDS Start-End: 220-567
aagggtgcgggcggggtggggcgaggggtggagggacaggatccagccgctcggggcccccgcccgccagccggagaagtggcggaggaccgttctccgccgtcccctctaggcttgtcttttccaggcaccctggagtcccctcaggccagctcggtgggcgcgcacctgccagccgcccctgacctcgcaggccaggcgacctccgagcctgagaagatggcccagtccaagctcgattgccgctcacctgtcggcctcgactgctgcaactgctgcctggacctggcccatcggagtgggctccagcgaggcagcagcggggagaacaacaacccgggcagccctacagtgagcaactttcggcagctgcaggaaaagctggtctttgagaacctcaataccgacaagctcaacagcataatgcggcaggattcgctagagccggtgctgcgggacccctgctacctgatcaacgagggcatctgcaaccgcaacatcgaccagaccatgctctccatcctgctcttcttccacagtgcctccggagccagcgtggtggccata

SEQ ID NO: 195661 - DNA, 546 bp, Homo sapiens
  Payload ID: 18618
  Gene Name: TSC22 domain family, member 3
  ENST ID: ENST00000480691
  CDS Start-End: 179-546
agggtaacgacagacggagatcaactaaggtggcaggtaaggttcagaaaaggagaaggacaacaaatttggagaaataggagaaggcaccctggagtcccctcaggccagctcggtgggcgcgcacctgccagccgcccctgacctcgcaggccaggcgacctccgagcctgagaagatggcccagtccaagctcgattgccgctcacctgtcggcctcgactgctgcaactgctgcctggacctggcccatcggagtgggctccagcgaggcagcagcggggagaacaacaacccgggcagccctacagtgagcaactttcggcagctgcaggaaaagctggtctttgagaacctcaataccgacaagctcaacagcataatgcggcaggattcgctagagccggtgctgcgggacccctgctacctgatcaacgagggcatctgcaaccgcaacatcgaccagaccatgctctccatcctgctcttcttccacagtgcctccggagccagcgtggtggccatagacaacaagatcgaacaggc

SEQ ID NO: 195662 - DNA, 425 bp, Homo sapiens
  Payload ID: 18618
  Gene Name: TSC22 domain family, member 3
  ENST ID: ENST00000505965
  CDS Start-End: 173-425
tctatttcaaaggccagacttgtgaatgaaggagccgatgcgggggtggggagtactgactgaaatcttgtcttttccaggcaccctggagtcccctcaggccagctcggtgggcgcgcacctgccagccgcccctgacctcgcaggccaggcgacctccgagcctgagaagatggcccagtccaagctcgattgccgctcacctgtcggcctcgactgctgcaactgctgcctggacctggcccatcggagtgggctccagcgaggcagcagcggggagaacaacaacccgggcagccctacagtgagcaactttcggcagctgcaggaaaagctggtctttgagaacctcaataccgacaagctcaacagcataatgcggcaggattcgctagagccggtgctgcgggacccctgctacctga

SEQ ID NO: 195663 - DNA, 576 bp, Homo sapiens
  Payload ID: 18618
  Gene Name: TSC22 domain family, member 3
  ENST ID: ENST00000486554
  CDS Start-End: 501-576
gggggctggccgagcgccgtgcgccgcttgggagaaggccggaagcttaccagccgagaaggaattcctagctagcttcagagccgggtaggtttgcctgggaccttgtaggccggctgtgggggactccccgggtcgcacagccccattgtttgcatattgcccgagcaggccacggtggcctgcgcgccccaggactcgcaagcagctccgatcggttggaactcggggcggcggcagcagcgctgagccggcctggatgaggagatgcagcttcctgcaggggccaaggaaggatctggggacaaactgtccggaactctgggccagggaggcgagaaggagagagagaggaagagccgaggcagatggaggactttggccacaactgccatgtactcaagagtagaaccgagtgggtaatgggtcgctttgctttttgtcttggcagtgcctccggagccagcgtggtggccatagacaacaagatcgaacaggccatggatctggtgaagaatcatctgatgtatgctgtgagagaggaggtggagatcctgaaggagcagatccgagagc

SEQ ID NO: 195664 - DNA, 521 bp, Homo sapiens
  Payload ID: 18618
  Gene Name: TSC22 domain family, member 3
  ENST ID: ENST00000506724
  CDS Start-End: 220-521
gcgtgcgtatttctggcggaggatgcgccatgagcgctgaaagagcctgaaccgaagcgtccggctcgccgagagagtgagagccgggccggctcccaggagcgcgggcgaggcttgtcttttccaggcaccctggagtcccctcaggccagctcggtgggcgcgcacctgccagccgcccctgacctcgcaggccaggcgacctccgagcctgagaagatggcccagtccaagctcgattgccgctcacctgtcggcctcgactgctgcaactgctgcctggacctggcccatcggagtgggctccagcgaggcagcagcggggagaacaacaacccgggcagccctacagtgagcaactttcggcagctgcaggaaaagctggtctttgagaacctcaataccgacaagctcaacagcataatgcggcaggattcgctagagccggtgctgcgggacccctgctacctgatcaacgagggcatctgcaaccgcaacatcgaccagaccatgctctccat

SEQ ID NO: 195665 - DNA, 802 bp, Homo sapiens
  Payload ID: 18618
  Gene Name: TSC22 domain family, member 3
  ENST ID: ENST00000514897
  CDS Start-End: 430-802
gctgctctatttcaaaggccagacttgtgaatgaaggagccgatgcgggggtggggagtactgactgaaatgtaagtcagttttacgtgaaaactgaacgtcatgaaaagtttagttttttcagacactaatcgttatttaatcctacacatttaaagtattccaagtctctgagtcctgagaaaccctggaaacccaccacttgcccacccagaacatccctccatcttacagagctggggcacgcccctcaggcctgtgaacatgcaatcgctacatctattgaaagggtaacgacagacggagatcaactaaggtggcagcttgtcttttccaggcaccctggagtcccctcaggccagctcggtgggcgcgcacctgccagccgcccctgacctcgcaggccaggcgacctccgagcctgagaagatggcccagtccaagctcgattgccgctcacctgtcggcctcgactgctgcaactgctgcctggacctggcccatcggagtgggctccagcgaggcagcagcggggagaacaacaacccgggcagccctacagtgagcaactttcggcagctgcaggaaaagctggtctttgagaacctcaataccgacaagctcaacagcataatgcggcaggattcgctagagccggtgctgcgggacccctgctacctgatcaacgagggcatctgcaaccgcaacatcgaccagaccatgctctccatcctgctcttcttccacagtgcctccggagccagcgtggtggccatagacaacaagatcgaacaggccatgg

SEQ ID NO: 195666 - DNA, 956 bp, Homo sapiens
  Payload ID: 18618
  Gene Name: TSC22 domain family, member 3
  Uniprot ID: Q99576
  ENST ID: ENST00000506081
  CDS Start-End: 205-807
acatctattgaaagggtaacgacagacggagatcaactaaggtggcaggtaaggttcagaaaaggagaaggacaacaaatttggagaaataggagaagcttgtcttttccaggcaccctggagtcccctcaggccagctcggtgggcgcgcacctgccagccgcccctgacctcgcaggccaggcgacctccgagcctgagaagatggcccagtccaagctcgattgccgctcacctgtcggcctcgactgctgcaactgctgcctggacctggcccatcggagtgggctccagcgaggcagcagcggggagaacaacaacccgggcagccctacagtgagcaactttcggcagctgcaggaaaagctggtctttgagaacctcaataccgacaagctcaacagcataatgcggcaggattcgctagagccggtgctgcgggacccctgctacctgatcaacgagggcatctgcaaccgcaacatcgaccagaccatgctctccatcctgctcttcttccacagtgcctccggagccagcgtggtggccatagacaacaagatcgaacaggccatggatctggtgaagaatcatctgatgtatgctgtgagagaggaggtggagatcctgaaggagcagatccgagagctggtggagaagaactcccagctagagcgtgagaacaccctgttgaagaccctggcaagcccagagcagctggagaagttccagtcctgtctgagccctgaagagccagctcccgaatccccacaagtgcccgaggcccctggtggttctgcggtgtaagtggctctgtcctcagggtgggcagagccactaaacttgttttacctagttctttccagtttgtttttggctccccaagcatcatctcacgaggagaactttacacctagcacagctggtgccaagagatgtcctaaggacatggccac

SEQ ID NO: 195667 - DNA, 2383 bp, Homo sapiens
  Payload ID: 18619
  Gene Name: TSC22 domain family, member 4
  Uniprot ID: Q9Y3Q8
  ENST ID: ENST00000300181
  CDS Start-End: 756-1943
ggaggaggaggaggaggagaggagcagtcagcaggcccgaggaggcaggacttcctggtgtgggggttgtcaacagcccagaaagagaaagacggagaggcagagacccaggggagccgaggagcggagacacggacccagcagggtcacgcgggaggagactcgggacacccactcgctggctgccaccgggagcagaggggggctcggccgccccctcccacatcagtctccagacccttggggcttcagaggccgctcctaggctcctcggaggaggcgcgggtttcttcttttccggagagcaaactttcctcggagatgcctggcaggatgagccgcggcccccggagaggacgggacagcctctgatcgccgcctgcgtgccccgccactgcccatggccaggaggccccagggaacggacagcccgacctcttaggcgccgggaccctcaggctcagatcagtggccgaggccccagagtttgcaaactcagctctggagttcagcagcaacagcagcaggaaaaacctgcccctgctcccccctcccgccacctcccctctcctcttctcccctcacccagcaggcacccccggttcccgccaggccctcctgccatgtcggacccagacgtccccaggggctcggatgtccccgccatgtggcccccttgttccaggggtgcctgagccccttcaaggagccccaacccacccccaaccttggcccagccctgagccccagggaccatgagcgggggcaagaagaagagtagtttccaaatcaccagcgtcaccacggactatgagggccctgggagcccaggggcttcggatccccctaccccacagcccccaaccgggcccccgccccgcctgcccaatggggagcccagccccgatccggggggcaagggcaccccccggaatggctccccaccacctggggccccttcctcccgtttccgggtggtgaagctgccccacggcctgggagagccttatcgccgcggtcgctggacgtgtgtggatgtttatgagcgagacctggagccccacagcttcggcggactcctggagggaattcgaggggcctcagggggcgccgggggcagatctttggattccaggttggagctggccagcctcggcctgggcgcccccaccccaccgtcaggcctgtctcagggccccacctcctggctccgtccaccccccacctctcctggacctcaggcccgctccttcactgggggactgggccagctggtggtgcccagcaaagccaaggcagagaaacccccactgtcggcctcctcaccccagcagcgccccccagagcctgagaccggtgagagtgcgggcacatcccgggctgccacgcccctgccctctctgagggtggaagcggaggctgggggctcaggggccaggacccctccactgtcccggaggaaagctgtagacatgcggctgcggatggagttgggtgctccagaagagatggggcaggtgcccccacttgactctcgccccagctccccagccctctacttcacccacgatgccagcctggttcacaaatctccagaccccttcggagcagtagcagctcagaagttcagcctggcccactccatgttggccatcagtggtcacctagacagcgacgatgatagtggctccggaagcctggttggcattgacaacaaaatcgagcaagccatggacttggtgaagtcccacctcatgtttgcggtccgggaggaggtggaggtgctgaaggagcagatccgggaattggcggagcggaacgctgcgctggagcaggagaatgggctgctgcgcgccctggccagcccggagcagctggctcagctgccctcctcgggggtcccacggcttgggccccctgcgcccaatgggccctccgtctgagcctcccttcccttacaatgtgcctttggggctgcccggccttgcgtcagccgcctgccccctcttcctatgcagctttaatgtccccgtgtccccggggtgggagttcaaggctcagtaatggcctggtcccccggcccctgccccatctcctcatcatccccagccttgatggaggagggagggcttcaggacggggcgtcagagggagccccctctgggagggaaccaacccccaccctccctcctgggaccccccagcagtagacggcttgggggagtcggaggctccccggcagacaccccacccccatcttgttcccttgaggtgcctcctctcctctgcccaggggagggagtgtggacagtatctggaagttctgggattcaggttgttattaaaataataataataattaaaaactctgaagaaacttgaa

SEQ ID NO: 195668 - DNA, 1469 bp, Homo sapiens
  Payload ID: 18619
  Gene Name: TSC22 domain family, member 4
  Uniprot ID: Q9Y3Q8
  ENST ID: ENST00000393991
  CDS Start-End: 578-1048
ggacttcctggtgtgggggttgtcaacagcccagaaagagaaagacggagaggcagagacccaggggagccgaggagcggagacacggacccagcagggtcacgcgggaggagactcgggacacccactcgctggctgccaccgggagcagaggggggctcggccgccccctcccacatcagtctccagacccttggggcttcagaggccgctcctaggctcctcggaggaggcgcgggtttcttcttttccggagagcaaactttcctcggagatgcctggcaggatgagccgcggcccccggagaggacgggacagcctctgatcgccgcctgcgtgccccgccactgcccatggccaggaggccccagggaacggacagcccgacctcttaggcgccgggaccctcaggctcagatcagtggccgaggccccagagcgccccccagagcctgagaccggtgagagtgcgggcacatcccgggctgccacgcccctgccctctctgagggtggaagcggaggctgggggctcaggggccaggacccctccactgtcccggaggaaagctgtagacatgcggctgcggatggagttgggtgctccagaagagatggggcaggtgcccccacttgactctcgccccagctccccagccctctacttcacccacgatgccagcctggttcacaaatctccagaccccttcggagcagtagcagctcagaagttcagcctggcccactccatgttggccatcagtggtcacctagacagcgacgatgatagtggctccggaagcctggttggcattgacaacaaaatcgagcaagccatggacttggtgaagtcccacctcatgtttgcggtccgggaggaggtggaggtgctgaaggagcagatccgggaattggcggagcggaacgctgcgctggagcaggagaatgggctgctgcgcgccctggccagcccggagcagctggctcagctgccctcctcgggggtcccacggcttgggccccctgcgcccaatgggccctccgtctgagcctcccttcccttacaatgtgcctttggggctgcccggccttgcgtcagccgcctgccccctcttcctatgcagctttaatgtccccgtgtccccggggtgggagttcaaggctcagtaatggcctggtcccccggcccctgccccatctcctcatcatccccagccttgatggaggagggagggcttcaggacggggcgtcagagggagccccctctgggagggaaccaacccccaccctccctcctgggaccccccagcagtagacggcttgggggagtcggaggctccccggcagacaccccacccccatcttgttcccttgaggtgcctcctctcctctgcccaggggagggagtgtggacagtatctggaagttctgggattcaggttgttattaaaataataataataattaaa

SEQ ID NO: 195669 - DNA, 1071 bp, Homo sapiens
  Payload ID: 18619
  Gene Name: TSC22 domain family, member 4
  ENST ID: ENST00000423266
  CDS Start-End: 1-635
gtctcctctctgcctgcctggcaccagccagaccctgctctgcccggggggctctgagccccccaggcattcccttcactgcatccctctccattgggggggtgtctaaggaccctttccccttgggcatggcccagccaggggtctctgtcaagtccctggtgtcgtcttatgagacccgagtggtggggatggctccggggctgccccgaaaaaggggctgtgcctcttccccttgctctccccggggtgcatcccccatccgagggacatctgggcccccgccccaccggggcctgggaggccctgggcagcggccttcaacccgcagggggatggacaaaaccctcctctccctcattctctactgtcacagtggctccggaagcctggttggcattgacaacaaaatcgagcaagccatggacttggtgaagtcccacctcatgtttgcggtccgggaggaggtggaggtgctgaaggagcagatccgggaattggcggagcggaacgctgcgctggagcaggagaatgggctgctgcgcgccctggccagcccggagcagctggctcagctgccctcctcgggggtcccacggcttgggccccctgcgcccaatgggccctccgtctgagcctcccttcccttacaatgtgcctttggggctgcccggccttgcgtcagccgcctgccccctcttcctatgcagctttaatgtccccgtgtccccggggtgggagttcaaggctcagtaatggcctggtcccccggcccctgccccatctcctcatcatccccagccttgatggaggagggagggcttcaggacggggcgtcagagggagccccctctgggagggaaccaacccccaccctccctcctgggaccccccagcagtagacggcttgggggagtcggaggctccccggcagacaccccacccccatcttgttcccttgaggtgcctcctctcctctgcccaggggagggagtgtggacagtatctggaagttctgggattcaggttgttattaaaataataataataattaaaaactctgaagaaact

SEQ ID NO: 195670 - DNA, 503 bp, Homo sapiens
  Payload ID: 18619
  Gene Name: TSC22 domain family, member 4
  ENST ID: ENST00000456330
  CDS Start-End: 1-503
ggcactgtctcctctctgcctgcctggcaccagccagaccctgctctgcccggggggctctgagccccccaggcattcccttcactgcatccctctccattgggggggtgtctaaggaccctttccccttgggcatggcccagccaggggtctctgtcaagtccctggtgtcgtcttatgagacccgagtggtggggatggctccggggctgccccgaaaaaggggctgtgcctcttccccttgctctccccggggtgcatcccccatccgagggacatctgggcccccgccccaccggggcctgggaggccctgggcagcggccttcaacccgcagggggatggacaaaaccctcctctccctcattctctactgtcacagtggctccggaagcctggttggcattgacaacaaaatcgagcaagccatgccctcaaggcactgggcaggggatgaggcacccaccccgttgacgctgtgcctgtcccggggcccccaggac

SEQ ID NO: 195671 - DNA, 1960 bp, Homo sapiens
  Payload ID: 18620
  Gene Name: TSEN15 tRNA splicing endonuclease subunit
  Uniprot ID: Q8WW01
  ENST ID: ENST00000361641
  CDS Start-End: 80-595
ggaacccacaggcgcgcgcgccgctgcttctggccgggcgcgggtcgtggtgcaccacgggagcgccgcaccggccggcatggaggagcgcggcgattccgagccgacccccggctgcagcggcctgggtccgggcggtgttcgcggctttggcgacggcggtggagctccttcgtgggcccctgaggacgcctggatgggcactcaccctaagtatctagaaatgatggaattagatataggagatgccacccaagtttatgtagcgttcttggtttacctggacctcatggaaagcaaaagctggcatgaagtaaactgtgtaggattaccagaactccagctcatctgccttgttggtactgagatagaaggggaggggttacagactgtggtgcctacccccatcactgcttccctcagccataacaggataagggagatcttgaaggcatctcgaaagttgcaaggtgatccagatttgccgatgtcttttactttggccatagtggagtctgattctacaatagtctattataaacttactgatggatttatgctgccagaccctcagaatatttctcttagaagatgacatccatgtttcctgatgcttgttttattcatacaagattggatttgagacccatcagactgcttcatcttttatctcagaaatagggttgacgtacatagtgagggttgacttccccattccataaggttttcattctgaagagtaaaacttccccaggtagaagactttctccttcttaaaaaatatagggtgatttctttaaaactttgttatctagagacagtttaattacagttatatacaggtttatgcctaggatgtattcagatgggtgggacctgtgtgctgcttttgtcatcccacactcaaagttgtctctttgtttcttgctgccactgccagctcattgttgagactgccatttctttctcttactcagctctccccagtgccttttggccactgcagctaccgtagaatggcattttatatgtaccttgtcacccacttctgtttactttttcctctccagtaaaaagtaaaagatttctttcaattggtcttcccattgcagttactgttatttctcttttttggttaactttaaatcaaaactcaaaatatgttcatccagagtgtgtcttaagtaacttacgtgtcttaagtaacagggaccagagacatgttacctacaagagttctgggctatccttttcattcttatcacatatcatagcttgaatattacaacagtgtgggagagaatcaaccgtaaaaatgtcttcattaattagacccagttattccacttttgttaatgtctctcaaattgtacaaagtataaaaaattatatgcacaaagatgttccaagtgacattacttttagtagcccaaattataaaccactttaaagtttggggtaaagattggcaaactttttctataaagggccagaaagtaactattttaggtttttaaacctactgtctctgtcataacttgtcaacactgctgtatgaagcacaaaagcagccatagacaatacataaacaatacgggcgtggctttgttccagtaaaactttgtttacaaatgtggtgccatagtttgtcatccctgggtctaggaaatagtcaataaacagatatatacaaatgatacataatgtacttattaaaaattagtaatgaatattattaaaaacatgaaaatattaccttaagtaaaaattgcaagacggaaaagtgtataagtgggtgtaatcatggctgaaataacagaccaagcatatgataaaaagataacaaagtaaatcaaattactaactggttatagtgggataggaggcagaaaatggatgactttgtcttttctcaatgtttttatttgtattttataataaaaatgttttaaaattaaaa

SEQ ID NO: 195672 - DNA, 1743 bp, Homo sapiens
  Payload ID: 18620
  Gene Name: TSEN15 tRNA splicing endonuclease subunit
  Uniprot ID: Q8WW01
  ENST ID: ENST00000423085
  CDS Start-End: 11-400
accggccggcatggaggagcgcggcgattccgagccgacccccggctgcagcggcctgggtccgggcggtgttcgcggctttggcgacggcggtggagctccttcgtgggcccctgaggacgcctggatgggcactcaccctaagtatctagaaatgatggaattagatataggagatgccacccaagtttatgtagcgttcttggtttacctggacctcatggaaagcaaaagctggcatgaagtaaactgtgtaggattaccagaactccagctcatctgccttgttggtactgagatagaaggggaggggttacagactgtggtgcctacccccatcactgcttccctcagccataacagaatatttctcttagaagatgacatccatgtttcctgatgcttgttttattcatacaagattggatttgagacccatcagactgcttcatcttttatctcagaaatagggttgacgtacatagtgagggttgacttccccattccataaggttttcattctgaagagtaaaacttccccaggtagaagactttctccttcttaaaaaatatagggtgatttctttaaaactttgttatctagagacagtttaattacagttatatacaggtttatgcctaggatgtattcagatgggtgggacctgtgtgctgcttttgtcatcccacactcaaagttgtctctttgtttcttgctgccactgccagctcattgttgagactgccatttctttctcttactcagctctccccagtgccttttggccactgcagctaccgtagaatggcattttatatgtaccttgtcacccacttctgtttactttttcctctccagtaaaaagtaaaagatttctttcaattggtcttcccattgcagttactgttatttctcttttttggttaactttaaatcaaaactcaaaatatgttcatccagagtgtgtcttaagtaacttacgtgtcttaagtaacagggaccagagacatgttacctacaagagttctgggctatccttttcattcttatcacatatcatagcttgaatattacaacagtgtgggagagaatcaaccgtaaaaatgtcttcattaattagacccagttattccacttttgttaatgtctctcaaattgtacaaagtataaaaaattatatgcacaaagatgttccaagtgacattacttttagtagcccaaattataaaccactttaaagtttggggtaaagattggcaaactttttctataaagggccagaaagtaactattttaggtttttaaacctactgtctctgtcataacttgtcaacactgctgtatgaagcacaaaagcagccatagacaatacataaacaatacgggcgtggctttgttccagtaaaactttgtttacaaatgtggtgccatagtttgtcatccctgggtctaggaaatagtcaataaacagatatatacaaatgatacataatgtacttattaaaaattagtaatgaatattattaaaaacatgaaaatattaccttaagtaaaaattgcaagacggaaaagtgtataagtgggtgtaatcatggctgaaataacagaccaagcatatgataaaaagataacaaagtaaatcaaattactaactggttatagtgggataggaggcagaaaatggatgactttgtcttttctcaatgtttttatttgtattttataataaaaatgttttaaaa

SEQ ID NO: 195673 - DNA, 1628 bp, Homo sapiens
  Payload ID: 18620
  Gene Name: TSEN15 tRNA splicing endonuclease subunit
  ENST ID: ENST00000462677
  CDS Start-End: 1-410
aggagcgcggcgattccgagccgacccccggctgcagcggcctgggtccgggcggtgttcgcggctttggcgacggcggtggagctccttcgtgggcccctgaggacgcctggatgggcactcaccctaagtatctagaaatgatggaattagatataggagatgccacccaagtttatgtagcgttcttggtttacctggacctcatggaaagcaaaagctggcatgaagtaaactgtgtaggattaccagaactccagctcatctgccttgttggtactgagatagaaggggaggggttacagactgtggtgcctacccccatcactgcttccctcagccataacagatattggcgtgccacttttgaagaaggaaaatacttagctacattaaaagatttgcattgaagaagcaattgtgatatgctgccttttatcacagtgtgacttcccatcagtgctgagataagggagatcttgaaggcatctcgaaagttgcaaggtgatccagatttgccgatgtcttttactttggccatagtggagtctgattctacaatagtctattataaacttactgatggatttatgctgccagaccctcagaatatttctcttagaagatgacatccatgtttcctgatgcttgttttattcatacaagattggatttgagacccatcagactgcttcatcttttatctcagaaatagggttgacgtacatagtgagggttgacttccccattccataaggttttcattctgaagagtaaaacttccccaggtagaagactttctccttcttaaaaaatatagggtgatttctttaaaactttgttatctagagacagtttaattacagttatatacaggtttatgcctaggatgtattcagatgggtgggacctgtgtgctgcttttgtcatcccacactcaaagttgtctctttgtttcttgctgccactgccagctcattgttgagactgccatttctttctcttactcagctctccccagtgccttttggccactgcagctaccgtagaatggcattttatatgtaccttgtcacccacttctgtttactttttcctctccagtaaaaagtaaaagatttctttcaattggtcttcccattgcagttactgttatttctcttttttggttaactttaaatcaaaactcaaaatatgttcatccagagtgtgtcttaagtaacttacgtgtcttaagtaacagggaccagagacatgttacctacaagagttctgggctatccttttcattcttatcacatatcatagcttgaatattacaacagtgtgggagagaatcaaccgtaaaaatgtcttcattaattagacccagttattccacttttgttaatgtctctcaaattgtacaaagtataaaaaattatatgcacaaagatgttccaagtgacattacttttagtagcccaaattataaaccactttaaagtttggggtaaagattggcaaactttttctataaagggccagaaagtaactattttaggtttttaaacctactgtctctgtcataacttgtcaacactgctgtatgaagcacaaaagcagccatagacaatacataaacaata

SEQ ID NO: 195674 - DNA, 806 bp, Homo sapiens
  Payload ID: 18620
  Gene Name: TSEN15 tRNA splicing endonuclease subunit
  ENST ID: ENST00000485209
  CDS Start-End: 78-437
aacccacaggcgcgcgcgccgctgcttctggccgggcgcgggtcgtggtgcaccacgggagcgccgcaccggccggcatggaggagcgcggcgattccgagccgacccccggctgcagcggcctgggtccgggcggtgttcgcggctttggcgacggcggtggagctccttcgtgggcccctgaggacgcctggatgggcactcaccctaagtatctagaaatgatggaattagatataggagatgccacccaagtttatgtagcgttcttggtttacctggacctcatggaaagcaaaagctggcatgaagtaaactgtgtaggattaccagaactccagctcatctgccttgttggtactgagatagaaggggaggggttacagactgtggtgcctacccccatcactgcttccctcagccataacaggtggtaattaatgcttttctagcttgaatggctaaagcttgttttcttcttcaagtagaattagttggaatgataacttggataagggagatcttgaaggcatctcgaaagttgcaaggtgatccagatttgccgatgtcttttactttggccatagtggagtctgattctacaatagtctattataaacttactgatggatttatgctgccagaccctcagaatatttctcttagaagatgacatccatgtttcctgatgcttgttttattcatacaagattggatttgagacccatcagactgcttcatcttttatctcagaaatagggttgacgtacatagtgagggttgacttccccattccataaggtttt

SEQ ID NO: 195675 - DNA, 618 bp, Homo sapiens
  Payload ID: 18620
  Gene Name: TSEN15 tRNA splicing endonuclease subunit
  ENST ID: ENST00000533373
  CDS Start-End: 31-435
gtgcaccacgggagcgccgcaccggccggcatggaggagcgcggcgattccgagccgacccccggctgcagcggcctgggtccgggcggtgttcgcggctttggcgacggcggtggagctccttcgtgggcccctgaggacgcctggatgggcactcaccctaagtatctagaaatgatggaattagatataggagatgccacccaagtttatgtagcgttcttggtttacctggacctcatggaaagcaaaagctggcatgaagtaaactgtgtaggattaccagaactccagctcatctgccttgttggtactgagatagaaggggaggggttacagactgtggtgcctacccccatcactgcttccctcagccataacaggataagggagatcttgaaggcatctcgaaagttgcaagaatatttctcttagaagatgacatccatgtttcctgatgcttgttttattcatacaagattggatttgagacccatcagactgcttcatcttttatctcagaaatagggttgacgtacatagtgagggttgacttccccattccataaggttttcattctgaagagtaaaacttccccaggtagaagactttctcct

SEQ ID NO: 195676 - DNA, 2381 bp, Homo sapiens
  Payload ID: 18621
  Gene Name: TSEN2 tRNA splicing endonuclease subunit
  Uniprot ID: Q8NCE0
  ENST ID: ENST00000284995
  CDS Start-End: 388-1785
aagaaaggtaagggccctgggcgaggaaagcgcggccctttccgagtttggtgttttgcagcgaaaggaaatctcgctcttccgaaagtcctccagggcgagagaggaaagggcctaggtactgtgctggggtcgcacagccggccgagacagtgccgggacggggagccaggcttccgagtgcgcccggtcactgactcctccgcgctttcctcgtgcgcctgcagcccttggttcttggaaacgccggcgccttgttcagggctggtggggctggggcgcaaggtgcagctgacaatgcccgagaggagccgcagcctctggtggagttcggtcgggtgtgggggtagtcaaggaaagaagcaaagggaatacctcctctgaaaaatggcagaagcagttttccatgccccaaagaggaaaagaagagtgtatgagacttacgagtctccattgccaatcccttttggtcaggaccatggtcctctgaaagaattcaagatattccgtgctgaaatgattaacaacaatgtgattgtgaggaatgcggaggacattgagcagctctatgggaaaggttattttggaaaaggtattctttcaagaagccgtccaagcttcacaatttcagatcctaaactggttgctaaatggaaagatatgaagacaaacatgcctatcatcacatcaaagaggtatcagcatagtgttgagtgggcagcagagctgatgcgtagacaggggcaggatgagagtacagtgcgcagaatcctcaaggattacacgaaaccgcttgagcatcctcctgtgaaaaggaatgaagaggctcaagtgcatgacaagcttaactctggaatggtttccaacatggaaggcacagcagggggagagagaccttctgtggtaaacggggactctggaaagtcaggtggtgtgggtgatccccgtgagccattaggctgcctgcaggagggctctggctgccacccaacaacagagagctttgagaaaagcgtgcgagaggatgcctcacctctgccccatgtctgttgctgcaaacaagatgctctcatcctccagcgtggccttcatcatgaagacggcagccagcacatcggcctcctgcatcctggggacagagggcctgaccatgagtacgtgctggtcgaggaagcggagtgtgccatgagcgagagggaggctgccccaaatgaggaattggtgcaaagaaacaggttaatatgcagaagaaatccatataggatctttgagtatttgcaactcagcctagaagaggcctttttcttggtctatgctctgggatgtttaagtatttactatgagaaggagcctttaacgatagtgaagctctggaaagctttcactgtagttcagcccacgttcagaaccacctacatggcctaccattactttcgaagcaagggctgggtgcccaaagtgggactcaagtacgggacagatttactgctatatcggaaaggccctccattttaccatgcaagttattctgtcattatcgagctagttgatgaccattttgaaggctctctccgcaggcctctcagttggaagtccctggctgccttgagcagagtttccgttaatgtctctaaggaacttatgctgtgctatttgattaaaccctctactatgactgacaaggaaatggagtcaccagaatgtatgaaaaggattaaagttcaggaggtgattctgagtcgatgggtttcttcacgagagaggagtgaccaagacgatctttaacaattcaacctcaaatttctaatttcaccaacaactatttattgagggctaggtaaaaagttctttttgttgtaatcgtccattaattcataagttttaaagggcatggtgctcccagcaccagaaaactatcagtgtttttaaagataaattacacaagggaggagaaagatccctgtgctaggactgcagattctatacttgcgttggcctctaactctccaatccagagcctcctgcctctggcgtcagtcttttccctcatccactcactggggagattggactagaggagtcctgagaggacacttccaacaagagacatttattctctgattttacctgaaaatggtagtagtttacatttatacagtacagtttatgaagcactttcatacgcaggcatctcttgttacctacatctaagctgttcccgaaagagtgttacagaacacaacagtattgtacaatattcgataagcatatcttcactgcacttgttataaaaatgagtggtgaaataatgtttggagacataatgaaagcgattaacatttggcaaaatataataaagcctttttgtaattggtgagaaa

SEQ ID NO: 195677 - DNA, 2149 bp, Homo sapiens
  Payload ID: 18621
  Gene Name: TSEN2 tRNA splicing endonuclease subunit
  Uniprot ID: Q8NCE0
  ENST ID: ENST00000402228
  CDS Start-End: 156-1553
aacggcgagcgcgtggggccaagaaaggtaagggccctgggcgaggaaagcgcggccctttccgagtttggtgttttgcagcgaaaggaaatctcgctcttccgaaagtcctccagggcgagagaggaaagggcctagaatacctcctctgaaaaatggcagaagcagttttccatgccccaaagaggaaaagaagagtgtatgagacttacgagtctccattgccaatcccttttggtcaggaccatggtcctctgaaagaattcaagatattccgtgctgaaatgattaacaacaatgtgattgtgaggaatgcggaggacattgagcagctctatgggaaaggttattttggaaaaggtattctttcaagaagccgtccaagcttcacaatttcagatcctaaactggttgctaaatggaaagatatgaagacaaacatgcctatcatcacatcaaagaggtatcagcatagtgttgagtgggcagcagagctgatgcgtagacaggggcaggatgagagtacagtgcgcagaatcctcaaggattacacgaaaccgcttgagcatcctcctgtgaaaaggaatgaagaggctcaagtgcatgacaagcttaactctggaatggtttccaacatggaaggcacagcagggggagagagaccttctgtggtaaacggggactctggaaagtcaggtggtgtgggtgatccccgtgagccattaggctgcctgcaggagggctctggctgccacccaacaacagagagctttgagaaaagcgtgcgagaggatgcctcacctctgccccatgtctgttgctgcaaacaagatgctctcatcctccagcgtggccttcatcatgaagacggcagccagcacatcggcctcctgcatcctggggacagagggcctgaccatgagtacgtgctggtcgaggaagcggagtgtgccatgagcgagagggaggctgccccaaatgaggaattggtgcaaagaaacaggttaatatgcagaagaaatccatataggatctttgagtatttgcaactcagcctagaagaggcctttttcttggtctatgctctgggatgtttaagtatttactatgagaaggagcctttaacgatagtgaagctctggaaagctttcactgtagttcagcccacgttcagaaccacctacatggcctaccattactttcgaagcaagggctgggtgcccaaagtgggactcaagtacgggacagatttactgctatatcggaaaggccctccattttaccatgcaagttattctgtcattatcgagctagttgatgaccattttgaaggctctctccgcaggcctctcagttggaagtccctggctgccttgagcagagtttccgttaatgtctctaaggaacttatgctgtgctatttgattaaaccctctactatgactgacaaggaaatggagtcaccagaatgtatgaaaaggattaaagttcaggaggtgattctgagtcgatgggtttcttcacgagagaggagtgaccaagacgatctttaacaattcaacctcaaatttctaatttcaccaacaactatttattgagggctaggtaaaaagttctttttgttgtaatcgtccattaattcataagttttaaagggcatggtgctcccagcaccagaaaactatcagtgtttttaaagataaattacacaagggaggagaaagatccctgtgctaggactgcagattctatacttgcgttggcctctaactctccaatccagagcctcctgcctctggcgtcagtcttttccctcatccactcactggggagattggactagaggagtcctgagaggacacttccaacaagagacatttattctctgattttacctgaaaatggtagtagtttacatttatacagtacagtttatgaagcactttcatacgcaggcatctcttgttacctacatctaagctgttcccgaaagagtgttacagaacacaacagtattgtacaatattcgataagcatatcttcactgcacttgttataaaaatgagtggtgaaataatgtttggagacataatgaaagcgattaacatttggcaaaatataataaagcctttttgtaattggtgagaaa

SEQ ID NO: 195678 - DNA, 1909 bp, Homo sapiens
  Payload ID: 18621
  Gene Name: TSEN2 tRNA splicing endonuclease subunit
  Uniprot ID: Q8NCE0
  ENST ID: ENST00000454502
  CDS Start-End: 93-1313
actgcttgacggcagcggtgtccgccccacggccggcgttgccggggtaacggcgagcgcgtggggccaagaaagaatacctcctctgaaaaatggcagaagcagttttccatgccccaaagaggaaaagaagagtgtatgagacttacgagtctccattgccaatcccttttggtcaggaccatggtcctctgaaagaattcaagatattccgtgctgaaatgattaacaacaatgtgattgtgaggaatgcggaggacattgagcagctctatgggaaaggttattttggaaaaggtattctttcaagaagccgtccaagcttcacaatttcagatcctaaactggttgctaaatggaaagatatgaagacaaacatgcctatcatcacatcaaagaggtatcagcatagtgttgagtgggcagcagagctgatgcgtagacaggggcaggatgagagtacagtgcgcagaatcctcaaggattacacgaaaccgcttgagcatcctcctgtgaaaaggaatgaagaggctcaagtgcatgacaagcttaactctggaatggtttccaacatggaaggcacagcagggggagagagaccttctgtgcgtggccttcatcatgaagacggcagccagcacatcggcctcctgcatcctggggacagagggcctgaccatgagtacgtgctggtcgaggaagcggagtgtgccatgagcgagagggaggctgccccaaatgaggaattggtgcaaagaaacaggttaatatgcagaagaaatccatataggatctttgagtatttgcaactcagcctagaagaggcctttttcttggtctatgctctgggatgtttaagtatttactatgagaaggagcctttaacgatagtgaagctctggaaagctttcactgtagttcagcccacgttcagaaccacctacatggcctaccattactttcgaagcaagggctgggtgcccaaagtgggactcaagtacgggacagatttactgctatatcggaaaggccctccattttaccatgcaagttattctgtcattatcgagctagttgatgaccattttgaaggctctctccgcaggcctctcagttggaagtccctggctgccttgagcagagtttccgttaatgtctctaaggaacttatgctgtgctatttgattaaaccctctactatgactgacaaggaaatggagtcaccagaatgtatgaaaaggattaaagttcaggaggtgattctgagtcgatgggtttcttcacgagagaggagtgaccaagacgatctttaacaattcaacctcaaatttctaatttcaccaacaactatttattgagggctaggtaaaaagttctttttgttgtaatcgtccattaattcataagttttaaagggcatggtgctcccagcaccagaaaactatcagtgtttttaaagataaattacacaagggaggagaaagatccctgtgctaggactgcagattctatacttgcgttggcctctaactctccaatccagagcctcctgcctctggcgtcagtcttttccctcatccactcactggggagattggactagaggagtcctgagaggacacttccaacaagagacatttattctctgattttacctgaaaatggtagtagtttacatttatacagtacagtttatgaagcactttcatacgcaggcatctcttgttacctacatctaagctgttcccgaaagagtgttacagaacacaacagtattgtacaatattcgataagcatatcttcactgcacttgttataaaaatgagtggtgaaataatgtttggagacataatgaaagcgattaacatttggcaaaatataataaagcctttttgtaattggtgagaaa

SEQ ID NO: 195679 - DNA, 1239 bp, Homo sapiens
  Payload ID: 18621
  Gene Name: TSEN2 tRNA splicing endonuclease subunit
  ENST ID: ENST00000446004
  CDS Start-End: 104-1239
tttgcggccgcactgcttgacggcagcggtgtccgccccacggccggcgttgccggggtaacggcgagcgcgtggggccaagaaagaatacctcctctgaaaaatggcagaagcagttttccatgccccaaagaggaaaagaagagtgtatgagacttacgagtctccattgccaatcccttttggtcaggaccatggtcctctgaaagaattcaagatattccgtgctgaaatgattaacaacaatgtgattgtgaggaatgcggaggacattgagcagctctatgggaaaggttattttggaaaaggtattctttcaagaagccgtccaagcttcacaatttcagatcctaaactggttgctaaatggaaagatatgaagacaaacatgcctatcatcacatcaaagaggtatcagcatagtgttgagtgggcagcagagctgatgcgtagacaggggcaggatgagagtacagtgcgcagaatcctcaaggattacacgaaaccgcttgagcatcctcctgtgaaaaggaatgaagaggctcaagtgcatgacaagcttaactctggaatggtttccaacatggaaggcacagcagggggagagagaccttctgtggtaaacggggactctggaaagtcaggtggtgtgggtgatccccgtgagccattaggctgcctgcaggagggctctggctgccacccaacaacagagagctttgagaaaagcgtgcgagaggatgcctcacctctgccccatgtctgttgctgcaaacaagatgctctcatcctccagcgtggccttcatcatgaagacggcagccagcacatcggcctcctgcatcctggggacagagggcctgaccatgagtacgtgctggtcgaggaagcggagtgtgccatgagcgagagggaggctgccccaaatgaggaattggtgcaaagaaacaggttaatatgcagaagaaatccatataggatctttgagtatttgcaactcagcctagaagaggcctttttcttggtctatgctctgggatgtttaagtatttactatgagaaggagcctttaacgatagtgaagctctggaaagctttcactgtagttcagcccacgttcagaaccacctacatggcctaccattactttcgaagcaagggctgggtgcccaaagtgggactcaagtacgggacagatttactgctatatcggaaaggccctccattttaccatgcaag

SEQ ID NO: 195680 - DNA, 2697 bp, Homo sapiens
  Payload ID: 18621
  Gene Name: TSEN2 tRNA splicing endonuclease subunit
  Uniprot ID: Q8NCE0
  ENST ID: ENST00000444864
  CDS Start-End: 388-1596
aagaaaggtaagggccctgggcgaggaaagcgcggccctttccgagtttggtgttttgcagcgaaaggaaatctcgctcttccgaaagtcctccagggcgagagaggaaagggcctaggtactgtgctggggtcgcacagccggccgagacagtgccgggacggggagccaggcttccgagtgcgcccggtcactgactcctccgcgctttcctcgtgcgcctgcagcccttggttcttggaaacgccggcgccttgttcagggctggtggggctggggcgcaaggtgcagctgacaatgcccgagaggagccgcagcctctggtggagttcggtcgggtgtgggggtagtcaaggaaagaagcaaagggaatacctcctctgaaaaatggcagaagcagttttccatgccccaaagaggaaaagaagagtgtatgagacttacgagtctccattgccaatcccttttggtcaggaccatggtcctctgaaagaattcaagatattccgtgctgaaatgattaacaacaatgtgattgtgaggaatgcggaggacattgagcagctctatgggaaaggttattttggaaaaggtattctttcaagaagccgtccaagcttcacaatttcagatcctaaactggttgctaaatggaaagatatgaagacaaacatgcctatcatcacatcaaagaggtatcagcatagtgttgagtgggcagcagagctgatgcgtagacaggggcaggatgagagtacagtgcgcagaatcctcaaggattacacgaaaccgcttgagcatcctcctgtgaaaaggaatgaagaggctcaagtgcatgacaagcttaactctggaatggtttccaacatggaaggcacagcagggggagagagaccttctgtggtaaacggggactctggaaagtcaggtggtgtgggtgatccccgtgagccattaggctgcctgcaggagggctctggctgccacccaacaacagagagctttgagaaaagcgtgcgagaggatgcctcacctctgccccatgtctgttgctgcaaacaagatgctctcatcctccagcgtggccttcatcatgaagacggcagccagcacatcggcctcctgcatcctggggacagagggcctgaccatgagtacgtgctggtcgaggaagcggagtgtgccatgagcgagagggaggctgccccaaatgaggaagcctttttcttggtctatgctctgggatgtttaagtatttactatgagaaggagcctttaacgatagtgaagctctggaaagctttcactgtagttcagcccacgttcagaaccacctacatggcctaccattactttcgaagcaagggctgggtgcccaaagtgggactcaagtacgggacagatttactgctatatcggaaaggccctccattttaccatgcaagttattctgtcattatcgagctagttgatgaccattttgaaggctctctccgcaggcctctcagttggaagtccctggctgccttgagcagagtttccgttaatgtctctaaggtaacacaacatcagctttgccattggagtgtcacttaaatggttcagtttttttttttttcttaaatgtagtagaatcaaaaaagttagttgtagaaacttcataacattcctgccagtgacatgctggaagatttggggtcattcgtacccttcccttattgcgctagaagttgtcctcccctcatgttacattttattgtcccctccctcccaactgctgctgagctccaatgacggagctttggagtgtcccatggtgatctgatctgggtaggcattgcttctcttcccaggggtatcgttgctatgtgacttgttttatactgcaatttaacattcactcatacacatattcacaaaggagtcaaaacattgaaagtttgcagatctcttagagaggaagggacttgatatttgttgctaagcactttcccaccctgttgttatcctcatcctgaggatgagaaaccaaggttggagccgttgagtggctaatccaagatcacacagctcatgtgcatactcgggatccaaacccacagctctctggctccctggcttttgtttcactatatccttcgtgttgccatcagagataggagggactcagcttacacaaggactatcaagaaagaaagctgtgtgtgttctcattactcagtgatttgctggctgaaaacaaattgtagataccctctaatttcatcctcatgctgctggaggtgaggtggggctgaggccagagggtcttgcagggctagagatgactgccctttagagcaggttaggttgcctaggctttagcttggtcctatagaaaattagggagcctatactgtttctagaatttttatgcccattttaggggacttgtagcatatacttaatatgtcctcacttaacattgttgatatgttcttggaaactgcaactttaatgtcgtataacaaaaccgttttttcttctcatcatttcaagaaaacaatgttgaagtttatttgaagacctgctgtacatctgtattagtccattctcatgctgctataaagaaatacttgagactgggtaatttataatgaaaagaggtttaattgactcacagttccatgtggctggggaggcctcaggaaacttaca

SEQ ID NO: 195681 - DNA, 553 bp, Homo sapiens
  Payload ID: 18621
  Gene Name: TSEN2 tRNA splicing endonuclease subunit
  ENST ID: ENST00000412698
  CDS Start-End: 1-306
aaggaacttatgctgtgctatttgattaaaccctctactatgactgacaaggaaatggagtcaccagaatgtatgaaaaggattaaagttcagtctcgctctgtcgtccaggctggagtccaatgctgcgatcttggatcactgcaacctctgcctgctgggtttaagcgattctcatgcctcagcctcctgagtagctgggattacaggcacgcaccaccacacacggctaatttttgtatttttagtagagacggggtttcactatgttggccaggctggtctggaactcctgacctcaagtgatctgcccgccttggcctcccaaagtgctgagagtacaggcgtgagccactgcatccagctcttagcatgtgcttttaaagtaaaaaccacgaggagaaggtactcattacttcataacttgtgtctcacccaccttgctgtcttcacatccccactttctgtatgcacattggaaggtgaatttgttcagctcacattaatttataggaataattttcattgctctgtgaataaaatgtgctaccac

SEQ ID NO: 195682 - DNA, 784 bp, Homo sapiens
  Payload ID: 18621
  Gene Name: TSEN2 tRNA splicing endonuclease subunit
  ENST ID: ENST00000455118
  CDS Start-End: 1-245
agctagttgatgaccattttgaaggctctctccgcaggcctctcagttggaagtccctggctgccttgagcagagtttccgttaatgtctctaaggaacttatgctgtgctatttgattaaaccctctactatgactgacaaggaaatggagtcaccagaatgtatgaaaaggattaaagttcaggaggtgattctgagtcgatgggtttcttcacgagagaggagtgaccaagacgatctttaacaattcaacctcaaatttctaatttcaccaacaactatttattgagggctagtttctcatcccagtttccccagcctcctgtgaaggtgtcagagaaagaagatagccctctcttcatgtgctttctgaactctgccttttcagtgggcagaggaagtgctttgtagcagcaaacccaacccctgagcctccatgtgtcgggtcaggcaaaatgaaattgacacaggctggaattttactgatttcagtcattgctgggctcgtttgtgcaaatagactcagaagagctcctttaaaaggagtgaccatttcctgatttagattctgagggggtttttggttttttttactgttgttcactatcatgagcttaccatgtgcttttttctttttttttttcttgtgatgtagtctcgctctgtcgtccaggctggagtccaatgctgcgatcttggatcactgcaacctctgcctgctgggtttaagcgattctcatgcctcagcctcctgagtagctgggattacaggcacgcaccacc

SEQ ID NO: 195683 - DNA, 2279 bp, Homo sapiens
  Payload ID: 18621
  Gene Name: TSEN2 tRNA splicing endonuclease subunit
  Uniprot ID: Q8NCE0
  ENST ID: ENST00000415684
  CDS Start-End: 22-1341
aaagaatacctcctctgaaaaatggcagaagcagttttccatgccccaaagaggaaaagaagagtgtatgagacttacgagtctccattgccaatcccttttggtcaggaccatggtcctctgaaagaattcaagatattccgtgctgaaatgattaacaacaatgtgattgtgaggaatgcggaggacattgagcagctctatgggaaaggttattttggaaaaggtattctttcaagaagccgtccaagcttcacaatttcagatcctaaactggttgctaaatggaaagatatgaagacaaacatgcctatcatcacatcaaagaggtatcagcatagtgttgagtgggcagcagagctgatgcgtagacaggggcaggatgagagtacagtgcgcagaatcctcaaggattacacgaaaccgcttgagcatcctcctgtgaaaaggaatgaagaggctcaagtgcatgacaagcttaactctggaatggtttccaacatggaaggcacagcagggggagagagaccttctgtggtaaacggggactctggaaagtcaggtggtgtgggtgatccccgtgagccattaggctgcctgcaggagggctctggctgccacccaacaacagagagctttgagaaaagcgtgcgagaggatgcctcacctctgccccatgtctgttgctgcaaacaagatgctctcatcctccagcgtggccttcatcatgaagacggcagccagcacatcggcctcctgcatcctggggacagagggcctgaccatgagtacgtgctggtcgaggaagcggagtgtgccatgagcgagagggaggctgccccaaatgaggaagcctttttcttggtctatgctctgggatgtttaagtatttactatgagaaggagcctttaacgatagtgaagctctggaaagctttcactgtagttcagcccacgttcagaaccacctacatggcctaccattactttcgaagcaagggctgggtgcccaaagtgggactcaagtacgggacagatttactgctatatcggaaaggccctccattttaccatgcaagttattctgtcattatcgagctagttgatgaccattttgaaggctctctccgcaggcctctcagttggaagtccctggctgccttgagcagagtttccgttaatgtctctaaggaacttatgctgtgctatttgattaaaccctctactatgactgacaaggaaatggagtcaccagaatgtatgaaaaggattaaagttcaggaggtgattctgagtcgatgggtttcttcacgagagaggagtgaccaagacgatctttaacaattcaacctcaaatttctaatttcaccaacaactatttattgagggctaggtaaaaagttctttttgttgtaatcgtccattaattcataagttttaaagggcatggtgctcccagcaccagaaaactatcagtgtttttaaagataaattacacaagggaggagaaagatccctgtgctaggactgcagattctatacttgcgttggcctctaactctccaatccagagcctcctgcctctggcgtcagtcttttccctcatccactcactggggagattggactagaggagtcctgagaggacacttccaacaagagacatttattctctgattttacctgaaaatggtagtagtttacatttatacagtacagtttatgaagcactttcatacgcaggcatctcttgttacctacatctaagctgttcccgaaagagtgttacagaacacaacagtattgtacaatattcgataagcatatcttcactgcacttgttataaaaatgagtggtgaaataatgtttggagacataatgaaagcgattaacatttggcaaaatataataaagcctttttgtaattggtgagaaagtcatgaagacttaagttgcctcagggcatctggtggcaagaggagggagatgggtggctgggcatggtggcccatacctataatcccagcacttgggaggccttgggaggccaaggcgcatggatcgcttgagcccaggagttggagaccagcttgggcaacatggtgaaacctcctctctactaacaaaaattatccaagcattgtagcacatgcctgtaattccagctgctcaggagactaaggtaggaggatcgcttgagcccaggaggaagaggttgcagtgagcggagattgtgccactgcaatccagcctgagcaatagagcaaggtcctgtctc

SEQ ID NO: 195684 - DNA, 2294 bp, Homo sapiens
  Payload ID: 18622
  Gene Name: TSEN34 tRNA splicing endonuclease subunit
  Uniprot ID: Q9BSV6
  ENST ID: ENST00000302937
  CDS Start-End: 188-1120
tgacgaagttgacgagggtgtcggcatgagggggtggagcaaggagcgcgtggcgcggtgcgcagtgggtggctccacctcgactgcgaattactgtttatgaggtgactcgctggttctatcggtggacagtgggacattctgaagggaggcaaggaggcggactgagcgctcccaattggggaggatgctggtggtggaggtggcgaacggccgctccctggtgtggggagccgaggcggtgcaggccctccgggagcgcctgggtgtggggggccgcacggtaggcgccctgccccgcgggccccgccagaactcgcgcctgggcctcccgctgctgctgatgcccgaagaggcgcggctcttggccgagatcggcgccgtgactctggtcagcgccccgcgtccagactctcggcaccacagcctggccctgacatccttcaagcgccagcaagaggagagcttccaggagcagagcgccttggcagctgaggcccgggagacccgtcgtcaggagctcctggagaagattacggagggccaggctgctaagaagcagaaactagaacaggcttcaggggccagctcaagccaggaggccggctcgagccaggctgccaaagaggatgagaccagtgatggccaggcttcgggagagcaggaggaagctggcccctcgtcttcccaagcaggaccctcaaatggggtagcccccttgcccagatctgctctccttgtccagctggccactgccaggcctcgaccggtcaaggccaggcccctggactggcgtgtccagtctaaagactggccccacgccggccgccctgcccacgagctgcgctacagtatctacagagacctgtgggagcgaggcttcttcctcagtgcggctggcaagttcggaggtgacttcctggtctatcctggtgaccccctccgcttccacgcccattatatcgctcagtgctgggcccctgaggacaccatcccactccaagacctggttgctgctgggcgccttggaaccagcgtcagaaagaccctgctcctctgttctccgcagcctgatggtaaggtggtctacacctccctgcaatgggccagcctgcagtgaactccagagacctaggggatgtggctgtgtcggcagcaagagcctttctggatgttccccagctcttctctgggagtctagaacatcctcctacctttctccgcggttagtttttgattccaggttttcgaacactacatcttttttatgttcttccttgtttcaaagcacttattggctgtgtttttgtagttacctattttcacactgtgagcttcccgagaatggggcctgggtttgattcatctgttttctacagggtttaagtctcaggaggtctcaataaacttggtatataaatgttcatgatttgaatgtttgcgacagtcctggaacccgtggatggtctcatctgcatgtacaggtgagaaaaaggcctggaggagggggactgacttgcccaaagtcacacacttagtaaatagcaggcctggcctttcaaaattggtttttctgactcctaaatctgcactctttctacctcactaaacttccttttgaaaagatttctatgaaatttcccagatgcatacaaacgttataaataaaaatataggctgggcacgatgacccacacctgtaatcccacagaacttttggaggccaaggcagggggatcgcttgagcccaggagtttgagaccagctctggcaacattgtaatacccagtctctacaaaaaataatttaaaaaaaaattagccagggatcccttgagcctgggaagttgaggctgctgtgagctgtgattgcaccactgccctccagcctgggagacagagcaagaacctgtctcaaaaaatatatatatgtgtgtgtgtatatatgtaaatatacacacatgtatgtatatatatgtgtgtgtatatatatatatattatgaaaggaaatgagtattgtaattttaggagttcagagcctggggagaaaggaaggactctggaaggcgttctgctttttcatggcctgggtagtggtgaatttttttgatactgtatatttatattttagactcttttttggatgtgttatattctgcaatttttataaaagctaaaacacatgtatttgtaaaaaatttgcacttatgaaatcatttacccatgtttttgcttaagaaagtactagaacactaccactattccaataattacacctttatcttatcaatgtg

SEQ ID NO: 195685 - DNA, 1548 bp, Homo sapiens
  Payload ID: 18622
  Gene Name: TSEN34 tRNA splicing endonuclease subunit
  Uniprot ID: Q9BSV6
  ENST ID: ENST00000396383
  CDS Start-End: 312-1244
cgaggacgcccgaacgccgaacttcctgtgctcgggagggggcagggttttgtactgtgggagtctgagagcgaggaggtccgaaagccgaatcacagtcgttcggaaagaggaggagcgaaggctcgagcgtccggaagagggtgtggcctcggcggtgccttagcctccagagcttctgaccgctgacgggaacacccgaagggggacgcccactttgcaagagggtggtgccaaaatggacctttgtaagggggcgtgtcgccgcgcttgcggaggtttgtttttcacgctccaaggcgcaatggaggatgctggtggtggaggtggcgaacggccgctccctggtgtggggagccgaggcggtgcaggccctccgggagcgcctgggtgtggggggccgcacggtaggcgccctgccccgcgggccccgccagaactcgcgcctgggcctcccgctgctgctgatgcccgaagaggcgcggctcttggccgagatcggcgccgtgactctggtcagcgccccgcgtccagactctcggcaccacagcctggccctgacatccttcaagcgccagcaagaggagagcttccaggagcagagcgccttggcagctgaggcccgggagacccgtcgtcaggagctcctggagaagattacggagggccaggctgctaagaagcagaaactagaacaggcttcaggggccagctcaagccaggaggccggctcgagccaggctgccaaagaggatgagaccagtgatggccaggcttcgggagagcaggaggaagctggcccctcgtcttcccaagcaggaccctcaaatggggtagcccccttgcccagatctgctctccttgtccagctggccactgccaggcctcgaccggtcaaggccaggcccctggactggcgtgtccagtctaaagactggccccacgccggccgccctgcccacgagctgcgctacagtatctacagagacctgtgggagcgaggcttcttcctcagtgcggctggcaagttcggaggtgacttcctggtctatcctggtgaccccctccgcttccacgcccattatatcgctcagtgctgggcccctgaggacaccatcccactccaagacctggttgctgctgggcgccttggaaccagcgtcagaaagaccctgctcctctgttctccgcagcctgatggtaaggtggtctacacctccctgcaatgggccagcctgcagtgaactccagagacctaggggatgtggctgtgtcggcagcaagagcctttctggatgttccccagctcttctctgggagtctagaacatcctcctacctttctccgcggttagtttttgattccaggttttcgaacactacatcttttttatgttcttccttgtttcaaagcacttattggctgtgtttttgtagttacctattttcacactgtgagcttcccgagaatggggcctgggtttgattcatctgttttctacagggtttaagtctcaggaggtctcaataaacttggtatataaatgtt

SEQ ID NO: 195686 - DNA, 1349 bp, Homo sapiens
  Payload ID: 18622
  Gene Name: TSEN34 tRNA splicing endonuclease subunit
  Uniprot ID: Q9BSV6
  ENST ID: ENST00000396388
  CDS Start-End: 113-1045
gaggcctaggggcggggcttcgccgagaccccggaggctttgggtgcgctgcagcggtccgcggcgcgcagctgtttcggtaactgctttgcctcccggctcccgcaggaggatgctggtggtggaggtggcgaacggccgctccctggtgtggggagccgaggcggtgcaggccctccgggagcgcctgggtgtggggggccgcacggtaggcgccctgccccgcgggccccgccagaactcgcgcctgggcctcccgctgctgctgatgcccgaagaggcgcggctcttggccgagatcggcgccgtgactctggtcagcgccccgcgtccagactctcggcaccacagcctggccctgacatccttcaagcgccagcaagaggagagcttccaggagcagagcgccttggcagctgaggcccgggagacccgtcgtcaggagctcctggagaagattacggagggccaggctgctaagaagcagaaactagaacaggcttcaggggccagctcaagccaggaggccggctcgagccaggctgccaaagaggatgagaccagtgatggccaggcttcgggagagcaggaggaagctggcccctcgtcttcccaagcaggaccctcaaatggggtagcccccttgcccagatctgctctccttgtccagctggccactgccaggcctcgaccggtcaaggccaggcccctggactggcgtgtccagtctaaagactggccccacgccggccgccctgcccacgagctgcgctacagtatctacagagacctgtgggagcgaggcttcttcctcagtgcggctggcaagttcggaggtgacttcctggtctatcctggtgaccccctccgcttccacgcccattatatcgctcagtgctgggcccctgaggacaccatcccactccaagacctggttgctgctgggcgccttggaaccagcgtcagaaagaccctgctcctctgttctccgcagcctgatggtaaggtggtctacacctccctgcaatgggccagcctgcagtgaactccagagacctaggggatgtggctgtgtcggcagcaagagcctttctggatgttccccagctcttctctgggagtctagaacatcctcctacctttctccgcggttagtttttgattccaggttttcgaacactacatcttttttatgttcttccttgtttcaaagcacttattggctgtgtttttgtagttacctattttcacactgtgagcttcccgagaatggggcctgggtttgattcatctgttttctacagggtttaagtctcaggaggtctcaataaacttggtatataaatgtt

SEQ ID NO: 195687 - DNA, 1912 bp, Homo sapiens
  Payload ID: 18622
  Gene Name: TSEN34 tRNA splicing endonuclease subunit
  ENST ID: ENST00000429671
  CDS Start-End: 100-1047
tgacgaagttgacgagggtgtcggcatgagggggtggagcaaggagcgcgtggcgcggtgcgcagtgggtggctccacctcgactgcgaattactgtttatgaggaggatgctggtggtggaggtggcgaacggccgctccctggtgtggggagccgaggcggtgcaggccctccgggagcgcctgggtgtggggggccgcacggtaggcgccctgccccgcgggccccgccagaactcgcgcctgggcctcccgctgctgctgatgcccgaagaggcgcggctcttggccgagatcggcgccgtgactctggtcagcgccccgcgtccagactctcggcaccacagcctggccctgacatccttcaagcgccagcaagaggagagcttccaggagcagagcgccttggcagctgaggcccgggagacccgtcgtcaggagctcctggagaagattacggagggccaggctgctaagaagcagaaactagaacaggcttcaggggccagctcaagccaggaggccggctcgagccaggctgccaaagaggatgagaccagtgatggccaggcttcgggagagcaggaggaagctggcccctcgtcttcccaagcaggaccctcaaatggggtagcccccttgcccagatctgctctccttgtccagctggccactgccaggcctcgaccggtcaaggccaggcccctggactggcgtgtccagtctaaagactggccccacgccggccgccctgcccacgagctgcgctacagtatctacagagacctgtgggagcgaggcttcttcctcagtgcggctggcaagttcggaggtgacttcctggtctatcctggtgaccccctccgcttccacgcccattatatcgctcagtgctgggcccctgaggacaccatcccactccaagacctggttgctgctgggcgccttggaaccagcgtcagaaagaccctgctcctctgttctccgcagcctgatgggtttaagtctcaggaggtctcaataaacttggtatataaatgttcatgatttgaatgtttgcgacagtcctggaacccgtggatggtctcatctgcatgtacaggtgagaaaaaggcctggaggagggggactgacttgcccaaagtcacacacttagtaaatagcaggcctggcctttcaaaattggtttttctgactcctaaatctgcactctttctacctcactaaacttccttttgaaaagatttctatgaaatttcccagatgcatacaaacgttataaataaaaatataggctgggcacgatgacccacacctgtaatcccacagaacttttggaggccaaggcagggggatcgcttgagcccaggagtttgagaccagctctggcaacattgtaatacccagtctctacaaaaaataatttaaaaaaaaattagccagggatcccttgagcctgggaagttgaggctgctgtgagctgtgattgcaccactgccctccagcctgggagacagagcaagaacctgtctcaaaaaatatatatatgtgtgtgtgtatatatgtaaatatacacacatgtatgtatatatatgtgtgtgtatatatatatatattatgaaaggaaatgagtattgtaattttaggagttcagagcctggggagaaaggaaggactctggaaggcgttctgctttttcatggcctgggtagtggtgaatttttttgatactgtatatttatattttagactcttttttggatgtgttatattctgcaatttttataaaagctaaaacacatgtatttgtaaaaaatttgcacttatgaaatcatttacccatgtttttgcttaagaaagtactagaacactaccactattccaataattacacctttatcttatcaatgtg

SEQ ID NO: 195688 - DNA, 956 bp, Homo sapiens
  Payload ID: 18622
  Gene Name: TSEN34 tRNA splicing endonuclease subunit
  ENST ID: ENST00000455798
  CDS Start-End: 230-956
cacaagcttcggtttacttcgtagatagttgggtacaagtgacgctaggatgataggcggagtcaacaggttcgccagacacccatgagtatttacaagggggcggggcgaaagcgacttgccctcaaaggggcggaaccccgagggccggcgtgcgcctacgggaccgggccaggatgacgatcctcaagttcccaagtagaggagaggaagcggcagagggaggaggatgctggtggtggaggtggcgaacggccgctccctggtgtggggagccgaggcggtgcaggccctccgggagcgcctgggtgtggggggccgcacggtaggcgccctgccccgcgggccccgccagaactcgcgcctgggcctcccgctgctgctgatgcccgaagaggcgcggctcttggccgagatcggcgccgtgactctggtcagcgccccgcgtccagactctcggcaccacagcctggccctgacatccttcaagcgccagcaagaggagagcttccaggagcagagcgccttggcagctgaggcccgggagacccgtcgtcaggagctcctggagaagattacggagggccaggctgctaagaagcagaaactagaacaggcttcaggggccagctcaagccaggaggccggctcgagccaggctgccaaagaggatgagaccagtgatggccaggcttcgggagagcaggaggaagctggcccctcgtcttcccaagcaggaccctcaaatggggtagcccccttgcccagatctgctctccttgtccagctggccactgccaggcctcgaccggtcaaggccaggcccctggactggcgtgtccagtctaaagactggccccacgccggccgccctgcccacgagctgcgctacagtatctacagagacctgtgggagcgaggcttcttcctcagtgcggctggcaagttcggaggtg

SEQ ID NO: 195689 - DNA, 853 bp, Homo sapiens
  Payload ID: 18622
  Gene Name: TSEN34 tRNA splicing endonuclease subunit
  ENST ID: ENST00000456872
  CDS Start-End: 100-853
tgacgaagttgacgagggtgtcggcatgagggggtggagcaaggagcgcgtggcgcggtgcgcagtgggtggctccacctcgactgcgaattactgtttatgaggaggatgctggtggtggaggtggcgaacggccgctccctggtgtggggagccgaggcggtgcaggccctccgggagcgcctgggtgtggggggccgcacggtaggcgccctgccccgcgggccccgccagaactcgcgcctgggcctcccgctgctgctgatgcccgaagaggcgcggctcttggccgagatcggcgccgtgactctggtcagcgccccgcgtccagactctcggcaccacagcctggccctgacatccttcaagcgccagcaagaggagagcttccaggagcagagcgccttggcagctgaggcccgggagacccgtcgtcaggagctcctggagaagattacggagggccaggctgctaagaagcagaaactagaacaggcttcaggggccagctcaagccaggaggccggctcgagccaggctgccaaagaggatgagaccagtgatggccaggcttcgggagagcaggaggaagctggcccctcgtcttcccaagcaggaccctcaaatggggtagcccccttgcccagatctgctctccttgtccagctggccactgccaggcctcgaccggtcaaggccaggcccctggactggcgtgtccagtctaaagactggccccacgccggccgccctgcccacgagctgcgctacagtatctacagagacctgtgggagcgaggcttcttcctcagtgcggctggcaagttcggaggtgacttcctggtctatcctg

SEQ ID NO: 195690 - DNA, 2297 bp, Homo sapiens
  Payload ID: 18622
  Gene Name: TSEN34 tRNA splicing endonuclease subunit
  ENST ID: ENST00000613310
  CDS Start-End: 188-1120
tgacgaagttgacgagggtgtcggcatgagggggtggagcaaggagcgcgtggcgcggtgcgcagtgggtggctccacctcgactgcgaattactgtttatgaggtgactcgctggttctatcggtggacagtgggacattctgaagggaggcaaggaggcggactgagcgctcccaattggggaggatgctggtggtggaggtggcgaacggccgctccctggtgtggggagccgaggcggtgcaggccctccgggagcgcctgggtgtggggggccgcacggtaggcgccctgccccgcgggccccgccagaactcgcgcctgggcctcccgctgctgctgatgcccgaagaggcgcggctcttggccgagatcggcgccgtgactctggtcagcgccccgcgtccagactctcggcaccacagcctggccctgacatccttcaagcgccagcaagaggagagcttccaggagcagagcgccttggcagctgaggcccgggagacccgtcgtcaggagctcctggagaagattacggagggccaggctgctaagaagcagaaactagaacaggcttcaggggccagctcaagccaggaggccggctcgagccaggctgccaaagaggatgagaccagtgatggccaggcttcgggagagcaggaggaagctggcccctcgtcttcccaagcaggaccctcaaatggggtagcccccttgcccagatctgctctccttgtccagctggccactgccaggcctcgaccggtcaaggccaggcccctggactggcgtgtccagtctaaagactggccccacgccggccgccctgcccacgagctgcgctacagtatctacagagacctgtgggagcgaggcttcttcctcagtgcggctggcaagttcggaggtgacttcctggtctatcctggtgaccccctccgcttccacgcccattatatcgctcagtgctgggcccccgaggacaccatcccactccaagacctggttgctgctgggcgccttggaaccagcgtcagaaagaccctgctcctctgttctccgcagcctgatggtaaggtggtctacacctccctgcaatgggccagcctgcagtgaactccagagacctaggggatgtggctgtgtcggcagcaagagcctttctggatgttccccagctcttctctgggagtctagaacatcctcctacctttctccgcggttagtttttgattccaggttttcgaacactacatcttttttatgttcttccttgtttcaaagcacttattggctgtgtttttgtagttacctattttcacactgtgagcttcccgagaatggggcctgggtttgattcatctgttttctacagggtttaagtctcaggaggtctcaataaacttggtatataaatgttcatgatttgaatgtttgcgacagtcctggaacccgtggatggtctcatctgcatgtacaggtgagaaaaaggcctggaggggggggactgacttgcccaaagtcacacacttagtaaatagcaggcctggcctttcaaaattggtttttctgactcctaaatctgcactctttctacctcactaaacttcctcttgaaaagatttctatgaaatttcccagatgcatacaaacgttataaataaaaatataggctgggcacgatgacccacacctgtaatcccacagaacttttggaggccaaggcagggggatcgcttgagcccaggagtttgagaccagctctggcaacattgtaatacccagtctctacaaaaaataatttaaaaaaaaattagccagggatcccttgagcctgggaagttgaggctgctgtgagctgtgattgcaccactgccctccagcctgggagacagagcaagaacctgtctcaaaaaatatatatatgtgtgtgtgtatatatgtaaatatacacacatgtatgtatatatatgtgtgtgtatatatatatatattatgaaaggaaatgagtattgtaattttaggagttcagagcctggggagaaaggaaggactctggaaggcgttctgctttttcatggcctgggtagtggtggagaatttttttgatactgtatatttatattttagactcttttttggatgtgttatattctgcaatttttataaaagctaaaacacatgtatttgtaaaaaatttgcacttatgaaatcatttacccatgtttttgcttaagaaagtactagaacactaccactattccaataattacacctttatcttatcaatgtg

SEQ ID NO: 195691 - DNA, 956 bp, Homo sapiens
  Payload ID: 18622
  Gene Name: TSEN34 tRNA splicing endonuclease subunit
  ENST ID: ENST00000622076
  CDS Start-End: 230-956
cacaagcttcggtttacttcgtagatagttgggtacaagtgacgctaggatgataggcggagtcaacaggttcgccagacacccatgagtatttacaagggggcggggcgaaagcgacttgccctcaaaggggcggaaccccgagggccggcgtgcgcctacgggaccgggccagggtgacgatcctcaagttcccaagtagaggagaggaagcggcagagggaggaggatgctggtggtggaggtggcgaacggccgctccctggtgtggggagccgaggcggtgcaggccctccgggagcgcctgggtgtggggggccgcacggtaggcgccctgccccgcgggccccgccagaactcgcgcctgggcctcccgctgctgctgatgcccgaagaggcgcggctcttggccgagatcggcgccgtgactctggtcagcgccccgcgtccagactctcggcaccacagcctggccctgacatccttcaagcgccagcaagaggagagcttccaggagcagagcgccttggcagctgaggcccgggagacccgtcgtcaggagctcctggagaagattacggagggccaggctgctaagaagcagaaactagaacaggcttcaggggccagctcaagccaggaggccggctcgagccaggctgccaaagaggatgagaccagtgatggccaggcttcgggagagcaggaggaagctggcccctcgtcttcccaagcaggaccctcaaatggggtagcccccttgcccagatctgctctccttgtccagctggccactgccaggcctcgaccggtcaaggccaggcccctggactggcgtgtccagtctaaagactggccccacgccggccgccctgcccacgagctgcgctacagtatctacagagacctgtgggagcgaggcttcttcctcagtgcggctggcaagttcggaggtg

SEQ ID NO: 195692 - DNA, 1548 bp, Homo sapiens; identical to SEQ ID NO: 195685
  Payload ID: 18622
  Gene Name: TSEN34 tRNA splicing endonuclease subunit
  Uniprot ID: Q9BSV6
  ENST ID: ENST00000614948
  CDS Start-End: 312-1244

SEQ ID NO: 195693 - DNA, 1915 bp, Homo sapiens
  Payload ID: 18622
  Gene Name: TSEN34 tRNA splicing endonuclease subunit
  ENST ID: ENST00000614734
  CDS Start-End: 100-1047
tgacgaagttgacgagggtgtcggcatgagggggtggagcaaggagcgcgtggcgcggtgcgcagtgggtggctccacctcgactgcgaattactgtttatgaggaggatgctggtggtggaggtggcgaacggccgctccctggtgtggggagccgaggcggtgcaggccctccgggagcgcctgggtgtggggggccgcacggtaggcgccctgccccgcgggccccgccagaactcgcgcctgggcctcccgctgctgctgatgcccgaagaggcgcggctcttggccgagatcggcgccgtgactctggtcagcgccccgcgtccagactctcggcaccacagcctggccctgacatccttcaagcgccagcaagaggagagcttccaggagcagagcgccttggcagctgaggcccgggagacccgtcgtcaggagctcctggagaagattacggagggccaggctgctaagaagcagaaactagaacaggcttcaggggccagctcaagccaggaggccggctcgagccaggctgccaaagaggatgagaccagtgatggccaggcttcgggagagcaggaggaagctggcccctcgtcttcccaagcaggaccctcaaatggggtagcccccttgcccagatctgctctccttgtccagctggccactgccaggcctcgaccggtcaaggccaggcccctggactggcgtgtccagtctaaagactggccccacgccggccgccctgcccacgagctgcgctacagtatctacagagacctgtgggagcgaggcttcttcctcagtgcggctggcaagttcggaggtgacttcctggtctatcctggtgaccccctccgcttccacgcccattatatcgctcagtgctgggcccccgaggacaccatcccactccaagacctggttgctgctgggcgccttggaaccagcgtcagaaagaccctgctcctctgttctccgcagcctgatgggtttaagtctcaggaggtctcaataaacttggtatataaatgttcatgatttgaatgtttgcgacagtcctggaacccgtggatggtctcatctgcatgtacaggtgagaaaaaggcctggaggggggggactgacttgcccaaagtcacacacttagtaaatagcaggcctggcctttcaaaattggtttttctgactcctaaatctgcactctttctacctcactaaacttcctcttgaaaagatttctatgaaatttcccagatgcatacaaacgttataaataaaaatataggctgggcacgatgacccacacctgtaatcccacagaacttttggaggccaaggcagggggatcgcttgagcccaggagtttgagaccagctctggcaacattgtaatacccagtctctacaaaaaataatttaaaaaaaaattagccagggatcccttgagcctgggaagttgaggctgctgtgagctgtgattgcaccactgccctccagcctgggagacagagcaagaacctgtctcaaaaaatatatatatgtgtgtgtgtatatatgtaaatatacacacatgtatgtatatatatgtgtgtgtatatatatatatattatgaaaggaaatgagtattgtaattttaggagttcagagcctggggagaaaggaaggactctggaaggcgttctgctttttcatggcctgggtagtggtggagaatttttttgatactgtatatttatattttagactcttttttggatgtgttatattctgcaatttttataaaagctaaaacacatgtatttgtaaaaaatttgcacttatgaaatcatttacccatgtttttgcttaagaaagtactagaacactaccactattccaataattacacctttatcttatcaatgtg

SEQ ID NO: 195694 - DNA, 1915 bp, Homo sapiens; identical to SEQ ID NO: 195693
  Payload ID: 18622
  Gene Name: TSEN34 tRNA splicing endonuclease subunit
  ENST ID: ENST00000615811
  CDS Start-End: 100-1047

SEQ ID NO: 195695 - DNA, 1348 bp, Homo sapiens
  Payload ID: 18622
  Gene Name: TSEN34 tRNA splicing endonuclease subunit
  Uniprot ID: Q9BSV6
  ENST ID: ENST00000612393
  CDS Start-End: 113-1045
gaggcctaggggcggggcttcgccgagaccccggaggctttgggtgcgctgcagcggtccgcggcgcgcagctgtttcggtaactgctttgcctcccggctcccgcaggaggatgctggtggtggaggtggcgaacggccgctccctggtgtggggagccgaggcggtgcaggccctccgggagcgcctgggtgtggggggccgcacggtaggcgccctgccccgcgggccccgccagaactcgcgcctgggcctcccgctgctgctgatgcccgaagaggcgcggctcttggccgagatcggcgccgtgactctggtcagcgccccgcgtccagactctcggcaccacagcctggccctgacatccttcaagcgccagcaagaggagagcttccaggagcagagcgccttggcagctgaggcccgggagacccgtcgtcaggagctcctggagaagattacggagggccaggctgctaagaagcagaaactagaacaggcttcaggggccagctcaagccaggaggccggctcgagccaggctgccaaagaggatgagaccagtgatggccaggcttcgggagagcaggaggaagctggcccctcgtcttcccaagcaggaccctcaaatggggtagcccccttgcccagatctgctctccttgtccagctggccactgccaggcctcgaccggtcaaggccaggcccctggactggcgtgtccagtctaaagactggccccacgccggccgccctgcccacgagctgcgctacagtatctacagagacctgtgggagcgaggcttcttcctcagtgcggctggcaagttcggaggtgacttcctggtctatcctggtgaccccctccgcttccacgcccattatatcgctcagtgctgggcccctgaggacaccatcccactccaagacctggttgctgctgggcgccttggaaccagcgtcagaaagaccctgctcctctgttctccgcagcctgatggtaaggtggtctacacctccctgcaatgggccagcctgcagtgaactccagagacctaggggatgtggctgtgtcggcagcaagagcctttctggatgttccccagctcttctctgggagtctagaacatcctcctacctttctccgcggttagtttttgattccaggttttcgaacactacatcttttttatgttcttccttgtttcaaagcacttattggctgtgtttttgtagttacctattttcacactgtgagcttcccgagaatggggcctgggtttgattcatctgttttctacagggtttaagtctcaggaggtctcaataaacttggtatataaatgt

SEQ ID NO: 195696 - DNA, 956 bp, Homo sapiens
  Payload ID: 18622
  Gene Name: TSEN34 tRNA splicing endonuclease subunit
  ENST ID: ENST00000615482
  CDS Start-End: 230-956
cacaagcttcggtttacttcgtagatagttgggtacaagtgacgctaggatgataggcggagtcaacaggttcgccagatacccatgagtatttacaagggggcggggcgaaagcgacttgccctcaaaggggcggaaccccgagggccggcgtgcgcctacgggaccgggccagggtgacgatcctcaagttcccaagtagaggagaggaagcggcagagggaggaggatgctggtggtggaggtggcgaacggccgctccctggtgtggggagccgaggcggtgcaggccctccgggagcgcctgggtgtggggggccgcacggtaggcgccctgccccgcgggccccgccagaactcgcgcctgggcctcccgctgctgctgatgcccgaagaggcgcggctcttggccgagatcggcgccgtgactctggtcagcgccccgcgtccagactctcggcaccacagcctggccctgacatccttcaagcgccagcaagaggagagcttccaggagcagagcgccttggcagctgaggcccgggagacccgtcgtcaggagctcctggagaagattacggagggccaggctgctaagaagcagaaactagaacaggcttcaggggccagctcaagccaggaggccggctcgagccaggctgccaaagaggatgagaccagtgatggccaggcttcgggagagcaggaggaagctggcccctcgtcttcccaagcaggaccctcaaatggggtagcccccttgcccagatctgctctccttgtccagctggccactgccaggcctcgaccggtcaaggccaggcccctggactggcgtgtccagtctaaagactggccccacgccggccgccctgcccacgagctgcgctacagtatctacagagacctgtgggagcgaggcttcttcctcagtgcggctggcaagttcggaggtg

SEQ ID NO: 195697 - DNA, 1087 bp, Homo sapiens
  Payload ID: 18622
  Gene Name: TSEN34 tRNA splicing endonuclease subunit
  ENST ID: ENST00000614483
  CDS Start-End: 81-1028
gtcggcatgagggggtggagcaaggagcgcgtggcgcggtgcgcagtgggtggctccacctcgactgcgaattactgtttatgaggaggatgctggtggtggaggtggcgaacggccgctccctggtgtggggagccgaggcggtgcaggccctccgggagcgcctgggtgtggggggccgcacggtaggcgccctgccccgcgggccccgccagaactcgcgcctgggcctcccgctgctgctgatgcccgaagaggcgcggctcttggccgagatcggcgccgtgactctggtcagcgccccgcgtccagactctcggcaccacagcctggccctgacatccttcaagcgccagcaagaggagagcttccaggagcagagcgccttggcagctgaggcccgggagacccgtcgtcaggagctcctggagaagattacggagggccaggctgctaagaagcagaaactagaacaggcttcaggggccagctcaagccaggaggccggctcgagccaggctgccaaagaggatgagaccagtgatggccaggcttcgggagagcaggaggaagctggcccctcgtcttcccaagcaggaccctcaaatggggtagcccccttgcccagatctgctctccttgtccagctggccactgccaggcctcgaccggtcaaggccaggcccctggactggcgtgtccagtctaaagactggccccacgccggccgccctgcccacgagctgcgctacagtatctacagagacctgtgggagcgaggcttcttcctcagtgcggctggcaagttcggaggtgacttcctggtctatcctggtgaccccctccgcttccacgcccattatatcgctcagtgctgggcccccgaggacaccatcccactccaagacctggttgctgctgggcgccttggaaccagcgtcagaaagaccctgctcctctgttctccgcagcctgatgggtttaagtctcaggaggtctcaataaacttggtatataaatgttcatgatttgaatgtttgcgacagtcctggaacccgtggatggtctcatctgcatgtacaggtga

SEQ ID NO: 195698 - DNA, 1915 bp, Homo sapiens; identical to SEQ ID NO: 195693
  Payload ID: 18622
  Gene Name: TSEN34 tRNA splicing endonuclease subunit
  ENST ID: ENST00000613653
  CDS Start-End: 100-1047

SEQ ID NO: 195699 - DNA, 1348 bp, Homo sapiens; identical to SEQ ID NO: 195695
  Payload ID: 18622
  Gene Name: TSEN34 tRNA splicing endonuclease subunit
  Uniprot ID: Q9BSV6
  ENST ID: ENST00000618135
  CDS Start-End: 113-1045

SEQ ID NO: 195700 - DNA, 1548 bp, Homo sapiens
  Payload ID: 18622
  Gene Name: TSEN34 tRNA splicing endonuclease subunit
  Uniprot ID: Q9BSV6
  ENST ID: ENST00000615000
  CDS Start-End: 312-1244
cgaggacgcccgaacgccgaacttcctgtgctcgggagggggcagggttttgtactgtgggagtctgagagcgaggaggtccgaaagccgaatcacagtcgttcggaaagaggaggagcgaaggctcgagcgtccggaagagggtgtggcctcggcggtgccttagcctccagagcttctgaccgctgacgggaacacccgaagggggacgcccactttgcaagagggtggtgccaaaatggacctttgtaagggggcgtgtcgccgcgcttgcggaggtttgtttttcacgctccaaggcgcaatggaggatgctggtggtggaggtggcgaacggccgctccctggtgtggggagccgaggcggtgcaggccctccgggagcgcctgggtgtggggggccgcacggtaggcgccctgccccgcgggccccgccagaactcgcgcctgggcctcccgctgctgctgatgcccgaagaggcgcggctcttggccgagatcggcgccgtgactctggtcagcgccccgcgtccagactctcggcaccacagcctggccctgacatccttcaagcgccagcaagaggagagcttccaggagcagagcgccttggcagctgaggcccgggagacccgtcgtcaggagctcctggagaagattacggagggccaggctgctaagaagcagaaactagaacaggcttcaggggccagctcaagccaggaggccggctcgagccaggctgccaaagaggatgagaccagtgatggccaggcttcgggagagcaggaggaagctggcccctcgtcttcccaagcaggaccctcaaatggggtagcccccttgcccagatctgctctccttgtccagctggccactgccaggcctcgaccggtcaaggccaggcccctggactggcgtgtccagtctaaagactggccccacgccggccgccctgcccacgagctgcgctacagtatctacagagacctgtgggagcgaggcttcttcctcagtgcggctggcaagttcggaggtgacttcctggtctatcctggtgaccccctccgcttccacgcccattatatcgctcagtgctgggcccccgaggacaccatcccactccaagacctggttgctgctgggcgccttggaaccagcgtcagaaagaccctgctcctctgttctccgcagcctgatggtaaggtggtctacacctccctgcaatgggccagcctgcagtgaactccagagacctaggggatgtggctgtgtcggcagcaagagcctttctggatgttccccagctcttctctgggagtctagaacatcctcctacctttctccgcggttagtttttgattccaggttttcgaacactacatcttttttatgttcttccttgtttcaaagcacttattggctgtgtttttgtagttacctattttcacactgtgagcttcccgagaatggggcctgggtttgattcatctgttttctacagggtttaagtctcaggaggtctcaataaacttggtatataaatgtt

SEQ ID NO: 195701 - DNA, 2297 bp, Homo sapiens; identical to SEQ ID NO: 195690
  Payload ID: 18622
  Gene Name: TSEN34 tRNA splicing endonuclease subunit
  ENST ID: ENST00000611560
  CDS Start-End: 188-1120

SEQ ID NO: 195702 - DNA, 1424 bp, Homo sapiens
  Payload ID: 18622
  Gene Name: TSEN34 tRNA splicing endonuclease subunit
  Uniprot ID: Q9BSV6
  ENST ID: ENST00000612236
  CDS Start-End: 188-1120
tgacgaagttgacgagggtgtcggcatgagggggtggagcaaggagcgcgtggcgcggtgcgcagtgggtggctccacctcgactgcgaattactgtttatgaggtgactcgctggttctatcggtggacagtgggacattctgaagggaggcaaggaggcggactgagcgctcccaattggggaggatgctggtggtggaggtggcgaacggccgctccctggtgtggggagccgaggcggtgcaggccctccgggagcgcctgggtgtggggggccgcacggtaggcgccctgccccgcgggccccgccagaactcgcgcctgggcctcccgctgctgctgatgcccgaagaggcgcggctcttggccgagatcggcgccgtgactctggtcagcgccccgcgtccagactctcggcaccacagcctggccctgacatccttcaagcgccagcaagaggagagcttccaggagcagagcgccttggcagctgaggcccgggagacccgtcgtcaggagctcctggagaagattacggagggccaggctgctaagaagcagaaactagaacaggcttcaggggccagctcaagccaggaggccggctcgagccaggctgccaaagaggatgagaccagtgatggccaggcttcgggagagcaggaggaagctggcccctcgtcttcccaagcaggaccctcaaatggggtagcccccttgcccagatctgctctccttgtccagctggccactgccaggcctcgaccggtcaaggccaggcccctggactggcgtgtccagtctaaagactggccccacgccggccgccctgcccacgagctgcgctacagtatctacagagacctgtgggagcgaggcttcttcctcagtgcggctggcaagttcggaggtgacttcctggtctatcctggtgaccccctccgcttccacgcccattatatcgctcagtgctgggcccctgaggacaccatcccactccaagacctggttgctgctgggcgccttggaaccagcgtcagaaagaccctgctcctctgttctccgcagcctgatggtaaggtggtctacacctccctgcaatgggccagcctgcagtgaactccagagacctaggggatgtggctgtgtcggcagcaagagcctttctggatgttccccagctcttctctgggagtctagaacatcctcctacctttctccgcggttagtttttgattccaggttttcgaacactacatcttttttatgttcttccttgtttcaaagcacttattggctgtgtttttgtagttacctattttcacactgtgagcttcccgagaatggggcctgggtttgattcatctgttttctacagggtttaagtctcaggaggtctcaataaacttggtatataaatgtt

SEQ ID NO: 195703 - DNA, 1346 bp, Homo sapiens
  Payload ID: 18622
  Gene Name: TSEN34 tRNA splicing endonuclease subunit
  Uniprot ID: Q9BSV6
  ENST ID: ENST00000611798
  CDS Start-End: 110-1042
ctcgactgcgaattactgtttatgaggtgactcgctggttctatcggtggacagtgggacattctgaagggaggcaaggaggcggactgagcgctcccaattggggaggatgctggtggtggaggtggcgaacggccgctccctggtgtggggagccgaggcggtgcaggccctccgggagcgcctgggtgtggggggccgcacggtaggcgccctgccccgcgggccccgccagaactcgcgcctgggcctcccgctgctgctgatgcccgaagaggcgcggctcttggccgagatcggcgccgtgactctggtcagcgccccgcgtccagactctcggcaccacagcctggccctgacatccttcaagcgccagcaagaggagagcttccaggagcagagcgccttggcagctgaggcccgggagacccgtcgtcaggagctcctggagaagattacggagggccaggctgctaagaagcagaaactagaacaggcttcaggggccagctcaagccaggaggccggctcgagccaggctgccaaagaggatgagaccagtgatggccaggcttcgggagagcaggaggaagctggcccctcgtcttcccaagcaggaccctcaaatggggtagcccccttgcccagatctgctctccttgtccagctggccactgccaggcctcgaccggtcaaggccaggcccctggactggcgtgtccagtctaaagactggccccacgccggccgccctgcccacgagctgcgctacagtatctacagagacctgtgggagcgaggcttcttcctcagtgcggctggcaagttcggaggtgacttcctggtctatcctggtgaccccctccgcttccacgcccattatatcgctcagtgctgggcccccgaggacaccatcccactccaagacctggttgctgctgggcgccttggaaccagcgtcagaaagaccctgctcctctgttctccgcagcctgatggtaaggtggtctacacctccctgcaatgggccagcctgcagtgaactccagagacctaggggatgtggctgtgtcggcagcaagagcctttctggatgttccccagctcttctctgggagtctagaacatcctcctacctttctccgcggttagtttttgattccaggttttcgaacactacatcttttttatgttcttccttgtttcaaagcacttattggctgtgtttttgtagttacctattttcacactgtgagcttcccgagaatggggcctgggtttgattcatctgttttctacagggtttaagtctcaggaggtctcaataaacttggtatataaatgtt

SEQ ID NO: 195704 - DNA, 1548 bp, Homo sapiens; identical to SEQ ID NO: 195685
  Payload ID: 18622
  Gene Name: TSEN34 tRNA splicing endonuclease subunit
  Uniprot ID: Q9BSV6
  ENST ID: ENST00000616063
  CDS Start-End: 312-1244

SEQ ID NO: 195705 - DNA, 2297 bp, Homo sapiens; identical to SEQ ID NO: 195690
  Payload ID: 18622
  Gene Name: TSEN34 tRNA splicing endonuclease subunit
  ENST ID: ENST00000613888
  CDS Start-End: 188-1120

SEQ ID NO: 195706 - DNA, 2421 bp, Homo sapiens
  Payload ID: 18622
  Gene Name: TSEN34 tRNA splicing endonuclease subunit
  ENST ID: ENST00000616209
  CDS Start-End: 312-1244
cgaggacgcccgaacgccgaacttcctgtgctcgggagggggcagggttttgtactgtgggagtctgagagcgaggaggtccgaaagccgaatcacagtcgttcggaaagaggaggagcgaaggctcgagcgtccggaagagggtgtggcctcggcggtgccttagcctccagagcttctgaccgctgacgggaacacccgaagggggacgcccactttgcaagagggtggtgccaaaatggacctttgtaagggggcgtgtcgccgcgcttgcggaggtttgtttttcacgctccaaggcgcaatggaggatgctggtggtggaggtggcgaacggccgctccctggtgtggggagccgaggcggtgcaggccctccgggagcgcctgggtgtggggggccgcacggtaggcgccctgccccgcgggccccgccagaactcgcgcctgggcctcccgctgctgctgatgcccgaagaggcgcggctcttggccgagatcggcgccgtgactctggtcagcgccccgcgtccagactctcggcaccacagcctggccctgacatccttcaagcgccagcaagaggagagcttccaggagcagagcgccttggcagctgaggcccgggagacccgtcgtcaggagctcctggagaagattacggagggccaggctgctaagaagcagaaactagaacaggcttcaggggccagctcaagccaggaggccggctcgagccaggctgccaaagaggatgagaccagtgatggccaggcttcgggagagcaggaggaagctggcccctcgtcttcccaagcaggaccctcaaatggggtagcccccttgcccagatctgctctccttgtccagctggccactgccaggcctcgaccggtcaaggccaggcccctggactggcgtgtccagtctaaagactggccccacgccggccgccctgcccacgagctgcgctacagtatctacagagacctgtgggagcgaggcttcttcctcagtgcggctggcaagttcggaggtgacttcctggtctatcctggtgaccccctccgcttccacgcccattatatcgctcagtgctgggcccccgaggacaccatcccactccaagacctggttgctgctgggcgccttggaaccagcgtcagaaagaccctgctcctctgttctccgcagcctgatggtaaggtggtctacacctccctgcaatgggccagcctgcagtgaactccagagacctaggggatgtggctgtgtcggcagcaagagcctttctggatgttccccagctcttctctgggagtctagaacatcctcctacctttctccgcggttagtttttgattccaggttttcgaacactacatcttttttatgttcttccttgtttcaaagcacttattggctgtgtttttgtagttacctattttcacactgtgagcttcccgagaatggggcctgggtttgattcatctgttttctacagggtttaagtctcaggaggtctcaataaacttggtatataaatgttcatgatttgaatgtttgcgacagtcctggaacccgtggatggtctcatctgcatgtacaggtgagaaaaaggcctggaggggggggactgacttgcccaaagtcacacacttagtaaatagcaggcctggcctttcaaaattggtttttctgactcctaaatctgcactctttctacctcactaaacttcctcttgaaaagatttctatgaaatttcccagatgcatacaaacgttataaataaaaatataggctgggcacgatgacccacacctgtaatcccacagaacttttggaggccaaggcagggggatcgcttgagcccaggagtttgagaccagctctggcaacattgtaatacccagtctctacaaaaaataatttaaaaaaaaattagccagggatcccttgagcctgggaagttgaggctgctgtgagctgtgattgcaccactgccctccagcctgggagacagagcaagaacctgtctcaaaaaatatatatatgtgtgtgtgtatatatgtaaatatacacacatgtatgtatatatatgtgtgtgtatatatatatatattatgaaaggaaatgagtattgtaattttaggagttcagagcctggggagaaaggaaggactctggaaggcgttctgctttttcatggcctgggtagtggtggagaatttttttgatactgtatatttatattttagactcttttttggatgtgttatattctgcaatttttataaaagctaaaacacatgtatttgtaaaaaatttgcacttatgaaatcatttacccatgtttttgcttaagaaagtactagaacactaccactattccaataattacacctttatcttatcaatgtg

SEQ ID NO: 195707 - DNA, 856 bp, Homo sapiens
  Payload ID: 18622
  Gene Name: TSEN34 tRNA splicing endonuclease subunit
  ENST ID: ENST00000617739
  CDS Start-End: 99-856
gacgaagttgacgagggtgtcggcatgagggggtggagcaaggagcgcgtggcgcggtgcgcagtgggtggctccacctcgactgcgaattactgtttatgaggaggatgctggtggtggaggtggcgaacggccgctccctggtgtggggagccgaggcggtgcaggccctccgggagcgcctgggtgtggggggccgcacggtaggcgccctgccccgcgggccccgccagaactcgcgcctgggcctcccgctgctgctgatgcccgaagaggcgcggctcttggccgagatcggcgccgtgactctggtcagcgccccgcgtccagactctcggcaccacagcctggccctgacatccttcaagcgccagcaagaggagagcttccaggagcagagcgccttggcagctgaggcccgggagacccgtcgtcaggagctcctggagaagattacggagggccaggctgctaagaagcagaaactagaacaggcttcaggggccagctcaagccaggaggccggctcgagccaggctgccaaagaggatgagaccagtgatggccaggcttcgggagagcaggaggaagctggcccctcgtcttcccaagcaggaccctcaaatggggtagcccccttgcccagatctgctctccttgtccagctggccactgccaggcctcgaccggtcaaggccaggcccctggactggcgtgtccagtctaaagactggccccacgccggccgccctgcccacgagctgcgctacagtatctacagagacctgtgggagcgaggcttcttcctcagtgcggctggcaagttcggaggtgacttcctggtctatcctggtga

SEQ ID NO: 195708 - DNA, 852 bp, Homo sapiens
  Payload ID: 18622
  Gene Name: TSEN34 tRNA splicing endonuclease subunit
  ENST ID: ENST00000617559
  CDS Start-End: 99-852
gacgaagttgacgagggtgtcggcatgagggggtggagcaaggagcgcgtggcgcggtgcgcagtgggtggctccacctcgactgcgaattactgtttatgaggaggatgctggtggtggaggtggcgaacggccgctccctggtgtggggagccgaggcggtgcaggccctccgggagcgcctgggtgtggggggccgcacggtaggcgccctgccccgcgggccccgccagaactcgcgcctgggcctcccgctgctgctgatgcccgaagaggcgcggctcttggccgagatcggcgccgtgactctggtcagcgccccgcgtccagactctcggcaccacagcctggccctgacatccttcaagcgccagcaagaggagagcttccaggagcagagcgccttggcagctgaggcccgggagacccgtcgtcaggagctcctggagaagattacggagggccaggctgctaagaagcagaaactagaacaggcttcaggggccagctcaagccaggaggccggctcgagccaggctgccaaagaggatgagaccagtgatggccaggcttcgggagagcaggaggaagctggcccctcgtcttcccaagcaggaccctcaaatggggtagcccccttgcccagatctgctctccttgtccagctggccactgccaggcctcgaccggtcaaggccaggcccctggactggcgtgtccagtctaaagactggccccacgccggccgccctgcccacgagctgcgctacagtatctacagagacctgtgggagcgaggcttcttcctcagtgcggctggcaagttcggaggtgacttcctggtctatcctg

SEQ ID NO: 195709 - DNA, 2421 bp, Homo sapiens; identical to SEQ ID NO: 195706
  Payload ID: 18622
  Gene Name: TSEN34 tRNA splicing endonuclease subunit
  ENST ID: ENST00000617149
  CDS Start-End: 312-1244

SEQ ID NO: 195710 - DNA, 2421 bp, Homo sapiens; identical to SEQ ID NO: 195706
  Payload ID: 18622
  Gene Name: TSEN34 tRNA splicing endonuclease subunit
  ENST ID: ENST00000619994
  CDS Start-End: 312-1244

SEQ ID NO: 195711 - DNA, 956 bp, Homo sapiens; identical to SEQ ID NO: 195691
  Payload ID: 18622
  Gene Name: TSEN34 tRNA splicing endonuclease subunit
  ENST ID: ENST00000621740
  CDS Start-End: 230-956

SEQ ID NO: 195712 - DNA, 2421 bp, Homo sapiens; identical to SEQ ID NO: 195706
  Payload ID: 18622
  Gene Name: TSEN34 tRNA splicing endonuclease subunit
  ENST ID: ENST00000622538
  CDS Start-End: 312-1244

SEQ ID NO: 195713 - DNA, 1912 bp, Homo sapiens; identical to SEQ ID NO: 195687
  Payload ID: 18622
  Gene Name: TSEN34 tRNA splicing endonuclease subunit
  ENST ID: ENST00000618447
  CDS Start-End: 100-1047

SEQ ID NO: 195714 - DNA, 1915 bp, Homo sapiens; identical to SEQ ID NO: 195693
  Payload ID: 18622
  Gene Name: TSEN34 tRNA splicing endonuclease subunit
  ENST ID: ENST00000619273
  CDS Start-End: 100-1047

SEQ ID NO: 195715 - DNA, 1915 bp, Homo sapiens; identical to SEQ ID NO: 195693
  Payload ID: 18622
  Gene Name: TSEN34 tRNA splicing endonuclease subunit
  ENST ID: ENST00000613337
  CDS Start-End: 100-1047

SEQ ID NO: 195716 - DNA, 2421 bp, Homo sapiens; identical to SEQ ID NO: 195706
  Payload ID: 18622
  Gene Name: TSEN34 tRNA splicing endonuclease subunit
  ENST ID: ENST00000614984
  CDS Start-End: 312-1244

SEQ ID NO: 195717 - DNA, 2297 bp, Homo sapiens; identical to SEQ ID NO: 195690
  Payload ID: 18622
  Gene Name: TSEN34 tRNA splicing endonuclease subunit
  ENST ID: ENST00000622524
  CDS Start-End: 188-1120

SEQ ID NO: 195718 - DNA, 1424 bp, Homo sapiens; identical to SEQ ID NO: 195702
  Payload ID: 18622
  Gene Name: TSEN34 tRNA splicing endonuclease subunit
  Uniprot ID: Q9BSV6
  ENST ID: ENST00000615975
  CDS Start-End: 188-1120

SEQ ID NO: 195719 - DNA, 1915 bp, Homo sapiens; identical to SEQ ID NO: 195693
  Payload ID: 18622
  Gene Name: TSEN34 tRNA splicing endonuclease subunit
  ENST ID: ENST00000619263
  CDS Start-End: 100-1047

SEQ ID NO: 195720 - DNA, 2297 bp, Homo sapiens; identical to SEQ ID NO: 195690
  Payload ID: 18622
  Gene Name: TSEN34 tRNA splicing endonuclease subunit
  ENST ID: ENST00000617902
  CDS Start-End: 188-1120

SEQ ID NO: 195721 - DNA, 1912 bp, Homo sapiens; identical to SEQ ID NO: 195687
  Payload ID: 18622
  Gene Name: TSEN34 tRNA splicing endonuclease subunit
  ENST ID: ENST00000617543
  CDS Start-End: 100-1047

SEQ ID NO: 195722 - DNA, 1327 bp, Homo sapiens
  Payload ID: 18622
  Gene Name: TSEN34 tRNA splicing endonuclease subunit
  Uniprot ID: Q9BSV6
  ENST ID: ENST00000615079
  CDS Start-End: 92-1024
gccgagaccccggaggctttgggtgcgctgcagcggtctgcggcgcgcagctgtttcggtaactgctttgcctcccggctcccgcaggaggatgctggtggtggaggtggcgaacggccgctccctggtgtggggagccgaggcggtgcaggccctccgggagcgcctgggtgtggggggccgcacggtaggcgccctgccccgcgggccccgccagaactcgcgcctgggcctcccgctgctgctgatgcccgaagaggcgcggctcttggccgagatcggcgccgtgactctggtcagcgccccgcgtccagactctcggcaccacagcctggccctgacatccttcaagcgccagcaagaggagagcttccaggagcagagcgccttggcagctgaggcccgggagacccgtcgtcaggagctcctggagaagattacggagggccaggctgctaagaagcagaaactagaacaggcttcaggggccagctcaagccaggaggccggctcgagccaggctgccaaagaggatgagaccagtgatggccaggcttcgggagagcaggaggaagctggcccctcgtcttcccaagcaggaccctcaaatggggtagcccccttgcccagatctgctctccttgtccagctggccactgccaggcctcgaccggtcaaggccaggcccctggactggcgtgtccagtctaaagactggccccacgccggccgccctgcccacgagctgcgctacagtatctacagagacctgtgggagcgaggcttcttcctcagtgcggctggcaagttcggaggtgacttcctggtctatcctggtgaccccctccgcttccacgcccattatatcgctcagtgctgggcccccgaggacaccatcccactccaagacctggttgctgctgggcgccttggaaccagcgtcagaaagaccctgctcctctgttctccgcagcctgatggtaaggtggtctacacctccctgcaatgggccagcctgcagtgaactccagagacctaggggatgtggctgtgtcggcagcaagagcctttctggatgttccccagctcttctctgggagtctagaacatcctcctacctttctccgcggttagtttttgattccaggttttcgaacactacatcttttttatgttcttccttgtttcaaagcacttattggctgtgtttttgtagttacctattttcacactgtgagcttcccgagaatggggcctgggtttgattcatctgttttctacagggtttaagtctcaggaggtctcaataaacttggtatataaatgt

SEQ ID NO: 195723 - DNA, 2297 bp, Homo sapiens; identical to SEQ ID NO: 195690
  Payload ID: 18622
  Gene Name: TSEN34 tRNA splicing endonuclease subunit
  ENST ID: ENST00000613712
  CDS Start-End: 188-1120

SEQ ID NO: 195724 - DNA, 2421 bp, Homo sapiens; identical to SEQ ID NO: 195706
  Payload ID: 18622
  Gene Name: TSEN34 tRNA splicing endonuclease subunit
  ENST ID: ENST00000615900
  CDS Start-End: 312-1244

SEQ ID NO: 195725 - DNA, 1944 bp, Homo sapiens
  Payload ID: 18623
  Gene Name: TSEN54 tRNA splicing endonuclease subunit
  Uniprot ID: Q7Z6J9
  ENST ID: ENST00000333213
  CDS Start-End: 37-1617
ggcgtggcggcgcgcgcagcggcaggcggcggcgggatggagcccgagcccgagcccgcggccgtggaggttcccgcggggcgcgtgctcagcgcccgggagctcttcgccgcccgctcgcggtcgcagaagctgccccagcgctcgcatggccccaaggactttctgcccgacggctcggcagctcaggccgagcggctgcgccggtgccgggaagagctctggcagctgctggcagagcagcgcgtggagcgcctgggcagcttggtggctgccgagtggaggccagaagagggcttcgtggagttgaagtctcccgcgggcaaattctggcagaccatgggcttctcagagcagggccggcagcgccttcacccggaagaggccttgtatcttctggagtgtggctccatccacctcttccaccaagacctgccactgtctatccaggaagcttaccagctgctgctgaccgaccacactgtgaccttcctgcagtaccaggtcttcagccacctgaagaggttgggttatgtggttcgacgattccaaccaagctctgtcctgtccccgtatgagaggcagcttaacctggatgccagcgtgcagcacttggaggatggagatggcaagagaaagaggagcagctccagccctcggtccattaataagaaggccaaggccctggacaactccctgcaacccaagagtctggcagcctccagcccacctccctgcagccagcccagccaatgcccagaggagaaaccccaggagtcaagccccatgaagggcccagggggcccctttcagcttctggggtccctgggccccagccctggcccggccagggagggggtggggtgcagctgggagagtggcagagccgagaacggagtcacgggagccggtaagcggcgctggaacttcgagcagatctccttccccaacatggcttcagacagccgccacacccttctgcgcgccccagccccagagctgctcccggccaacgtggctgggcgggagacagacgctgagtcctggtgccagaagctgaaccagcgcaaggagaagctctccaggcgggaacgggagcaccacgcggaggccgcgcagttccaggaagatgtcaacgccgatcccgaggtgcagcggtgctccagctggcgggagtacaaggagctgctgcagcggcggcaggtgcagaggagccagcgccgggcccctcacctgtggggccagcccgtcaccccgctgctgagtcctggccaggccagctccccagccgtggtccttcagcatatctctgtgctgcagacaacacaccttcctgatggaggtgcccggctgttggagaagtctgggggcttggaaatcatctttgatgtttaccaggccgacgctgtggccacattccgaaagaataaccctggcaaaccctatgcccggatgtgcattagtggatttgatgagcctgtcccagacctctgcagcctcaagcggttgtcttaccagagtggggatgtccctctgatctttgccctggtggatcatggtgacatctccttctacagcttcagggacttcacgttgccccaggatgtggggcactgacctcacagctctgcagaggatggagcttgctccgggggaccgggactgtctgttctcagggaccatctcggctgcctcctgtacccagactctaacctgtagcttcagaggccagtctgggccttggccctgggtgtctgatactcacagagtgaaactgtgaccctctcccttccctgctgccttgcagtgacccctctggaactcaggactcgattttaaggacccaggaggtggggcagaagagaggactgtgtgcctttaacgagagggtgcctgcttcgtgctataaagccaaagccattaaaaatagatttcttttctgct

SEQ ID NO: 195726 - DNA, 627 bp, Homo sapiens
  Payload ID: 18623
  Gene Name: TSEN54 tRNA splicing endonuclease subunit
  ENST ID: ENST00000434205
  CDS Start-End: 410-627
ggacggaagacaccgaaggaatggcgaacctccccggaccgctcctgacagttcccgggtggccttcggcctgcaaagtcggaatttgcacaccctccgctcgtccttccctgagcccttctgccctccttgcccagcccgggcggtggggactaagcagcgcgaggctgcagaggggcggtcacaagtgtgaccattcgcactgcactccagacgccggctcctcaggctttactggagagaagccccgaggagggctaggggcaaaagaggggccttctgcatctccagcaacctgcgggctgagctcccagacccggcgtcggggggcagcttggtggctgccgagtggaggccagaagagggcttcgtggagttgaagtctcccgcgggcaaattctggcagaccatgggcttctcagagcagggccggcagcgccttcacccggaagaggccttgtatcttctggagtgtggctccatccacctcttccaccaagacctgccactgtctatccaggaagcttaccagctgctgctgaccgaccacactgtgaccttcctgcagtaccaggtcttcagccacctgaagaggttgggttatgtggttcgacgattccaaccaag

SEQ ID NO: 195727 - DNA, 1139 bp, Homo sapiens
  Payload ID: 18623
  Gene Name: TSEN54 tRNA splicing endonuclease subunit
  ENST ID: ENST00000545228
  CDS Start-End: 1-778
caacatggcttcagacagccgccacacccttctgcgcgccccagccccagagctgctcccggccaacgtggctgggcgggagacagacgctgagtcctggtgccagaagctgaaccagcgcaaggagaagctctccaggcgggaacgggagcaccacgcggaggccgcgcagttccaggaagatgtcaacgccgatcccgaggtgcagcggtgctccagctggcgggagtacaaggagctgctgcagcggcggcaggtgcagaggagccagcgccgggcccctcacctgtggggccagcccgtcaccccgctgctgagtcctggccaggccagctccccaggtaccccctcagcctgccacatcttcgagggccactggcagctgaggaatcacaggactttggaaagggcatggatgaactgggatggattgaggcttaaggaagatgtgggaggagggagtggacccacaagcacggtcagttctccggcggctgcagcagggcctgtgtgggaaggcttagagatgccgtggtccttcagcatatctctgtgctgcagacaacacaccttcctgatggaggtgcccggctgttggagaagtctgggggcttggaaatcatctttgatgtttaccaggccgacgctgtggccacattccgaaagaataaccctggcaaaccctatgcccggatgtgcattagtggatttgatgagcctgtcccagacctctgcagcctcaagcggttgtcttaccagagtggggatgtccctctgatctttgccctggtggatcatggtgacatctccttctacagcttcagggacttcacgttgccccaggatgtggggcactgacctcacagctctgcagaggatggagcttgctccgggggaccgggactgtctgttctcagggaccatctcggctgcctcctgtacccagactctaacctgtagcttcagaggccagtctgggccttggccctgggtgtctgatactcacagagtgaaactgtgaccctctcccttccctgctgccttgcagtgacccctctggaactcaggactcgattttaaggacccaggaggtggggcagaagagaggactgtgtgcctttaacgagagggtgcctgct

SEQ ID NO: 195728 - DNA, 765 bp, Homo sapiens
  Payload ID: 18623
  Gene Name: TSEN54 tRNA splicing endonuclease subunit
  ENST ID: ENST00000583818
  CDS Start-End: 1-429
cgctcgcatggccccaaggactttctgcccgacggctcggcagctcaggccgagcggctgcgccggtgccgggaagagctctggcagctgctggcagagcagcgcgtggagcgcctgggcagcttggtggctgccgagtggaggccagaagagggcttcgtggagttgaagtctcccgcgggcaaattctggcagaccatgggcttctcagagcagggccggcagcgccttcacccggaagaggccttgtatcttctggagtgtggctccatccacctcttccaccaagacctgccactgtctatccaggaagcttaccagctgctgctgaccgaccacactgtgaccttcctgcagtaccaggtcttcagccacctgaagaggttgggttatgtggttcgacgattccaaccaagatccccaggctgaggaggtgggtcagtggcccacccgctgttctcaccccacagctctgtcctgtccccgtatgagaggcagcttaacctggatgccagcgtgcagcacttggaggatggagatggcaagagaaagaggagcagctccagccctcggtccattaataagaaggccaaggccctggacaactccctgcaacccaagagtctggcagcctccagcccacctccctgcagccagcccagccaatgcccagaggagaaaccccaggagtcaagccccatgaagggcccagggggcccctttcagcttctggggtccctgggccccagccctggcccggccagg

SEQ ID NO: 195729 - DNA, 798 bp, Homo sapiens
  Payload ID: 18623
  Gene Name: TSEN54 tRNA splicing endonuclease subunit
  ENST ID: ENST00000583173
  CDS Start-End: 1-537
atggagcccgagcccgagcccgcggccgtggaggttcccgcggggcgcgtgctcaggggcagcttggtggctgccgagtggaggccagaagagggcttcgtggagttgaagtctcccgcgggcaaattctggcagaccatgggcttctcagagcagggccggcagcgccttcacccggaagaggccttgtatcttctggagtgtggctccatccacctcttccaccaagacctgccactgtctatccaggaagcttaccagctgctgctgaccgaccacactgtgaccttcctgcagtaccaggtcttcagccacctgaagaggttgggttatgtggttcgacgattccaaccaagctctgtcctgtccccgtatgagaggcagcttaacctggatgccagcgtgcagcacttggaggatggagatggcaagagaaagaggagcagctccagccctcgacagccgccacacccttctgcgcgccccagccccagagctgctcccggccaacgtggctgggcgggagacagacgctgagtcctggtgccagaagctgaaccagcgcaaggagaagctctccaggcgggaacgggagcaccacgcggaggccgcgcagttccaggaagatgtcaacgccgatcccgaggtgcagcggtgctccagctggcgggagtacaaggagctgctgcagcggcggcaggtgcagaggagccagcgccgggcccctcacctgtggggccagcccgtcaccccgctgctgagtcctggccaggccagctccccagccgtggtccttca

SEQ ID NO: 195730 - DNA, 994 bp, Homo sapiens
  Payload ID: 18623
  Gene Name: TSEN54 tRNA splicing endonuclease subunit
  ENST ID: ENST00000578415
  CDS Start-End: 1-502
ggactttctgcccgacggctcggcagctcaggccgagcggctgcgccggtgccgggaagagctctggcagctgctggcagagcagcgcgtggagcgcctcttggtggctgccgagtggaggccagaagagggcttcgtggagttgaagtctcccgcggtgagcggcgggctcggggaccggggaccgccctccctgccctccctgccctccctcccttgtgacacttgctctgggccccacacagggcaaattctggcagaccatgggcttctcagagcagggccggcagcgccttcacccggaagaggccttgtatcttctggagtgtggctccatccacctcttccaccaagacctgccactgtctatccaggaagcttaccagctgctgctgaccgaccacactgtgaccttcctgcagtaccaggtcttcagccacctgaagaggttgggttatgtggttcgacgattccaaccaagctctgtcctgtccccgtatgagaggcagcttaacctggatgccagcgtgcagcacttggaggatggagatggcaagagaaagaggagcagctccagccctcggtccattaataagaaggccaaggccctggacaactccctgcaacccaagagtctggcagcctccagcccacctccctgcagccagcccagccaatgcccagaggagaaaccccaggagtcaagccccatgaagggcccagggggcccctttcagcttctggggtccctgggccccagccctggcccggccagggagggggtggggtgcagctgggagagtggcagagccgagaacggagtcacgggagccggtaagcggcgctggaacttcgagcagatctccttccccaacatggcttcagacagccgccacacccttctgcgcgccccagccccagagctgctcccggccaacgtggctgggcgggagacagacgctgagtcctggtgccagaagctgaaccagcgcaa

SEQ ID NO: 195731 - DNA, 1907 bp, Homo sapiens
  Payload ID: 18624
  Gene Name: t-SNARE domain containing 1
  ENST ID: ENST00000307180
  CDS Start-End: 119-1663
acgtgatgtttgggtgcccgccccgcccgcctcgcccgccgtgagcgcccggagcggtccgcgagccaccgaggcccagctcagtgtggaggctgctggccctgccatctgtaagaagatgtcatacggatccatcgcccgtggaggtggcctggggagccgtggccctttcgggggaccttcgagacaaggctgtcagcccctagagtgcgctagatgttggaccgagtatggaatccgccatttcccctgcccgtcgccagagagcaagctgcagaaccgctgtgtggggaaggacggggaaggtgatctggggccagcaggcacgcctattgtcccaagggccaggaagcgagggcctggggttgcccctgaaggcagccggatgccggagcccacctcatcacccaccattggcccgaggaaggactcggctgctgggccccatggccggatggcggggcccagcactacccgggccaagaagaggaagcccaacttctgcccgcaggagaccgaggtgctggtgtccaaggtgagcaagcaccaccagctgctgtttggcacggggctgctgaaggccgagcccactcgcaggtaccgcgtgtggagccgcatcctgcaggccgtgaatgcgctgggctactgtcgccgcgacgttgtggacctgaagcacaagtggcgggacctacgagccgtcgtgcggcgcaagctgggcgacctccggaaggcggcccatggccccagccctggttccggcaagccccaggccctggctctcacgcccgtggagcaggtggtggccaagaccttctcttgccaggccctgccctccgagggcttcagtctggagccgcccagagccacccaggtcgatccgtgcaacctccaggagctgttccaggagatgtcggccaacgtcttccgaatcaactccagtgtgacctccttggagcggagccttcagtccttagggacaccgagtgacacgcaggagcttcgggacagcctgcacacggcacagcaggagaccaacaagaccattgcagccagcgccagctccgtgaagcagatggccgagctgctgcgcagctcctgcccgcaggagcgtctgcagcaggagcgtcctcagctggaccggctgaaaacccagctctcagatgccattcagtgctatggagtggtgcagaagaaaattgcagaaaagtccagagcgctgcttcccatggcgcagaggggcagtaaacagcagagtccccaggccccgtttgccgagctggctgatgatgagaaggtctttaacgggagtgacaacatgtggcagggccaggagcaggcgctgctcccggacatcactgaagaggacctggaggccatccggctgcgggaggaggccatcctgcagatggagagcaacttgctggatgtgaatcagatcatcaaggacttggcctccatggtgtcagagcaaggagaagctgttgatagtattgaagccagccttgaggctgcgtcctcgcatgcggaggcagcccgccagctcctggctggagccagccggcaccaactccagagacacaagatcaagtgctgcttcctatcagctggagtcactgccctgcttgtcatcatcatcatcatcgccacctctgtccgaaagtgatgctacccgtgcatcggccgctgaaccgtcagctggctgtggtgtgggctctccagccccgagcacccctcctggcccggagctgggagctgatggagtccgctgcgttgtcagctgatgccgtcacttggcctgcaatggacccgagagcttcacagctgcctgctgtcctcccctgcactgaccccactcgcccctgtgtcggccccagctgagcacccgaataaaccgctgtggcttatcc

SEQ ID NO: 195732 - DNA, 1742 bp, Homo sapiens
  Payload ID: 18624
  Gene Name: t-SNARE domain containing 1
  ENST ID: ENST00000520166
  CDS Start-End: 40-1584
ctcagtgtggaggctgctggccctgccatctgtaagaagatgtcatacggatccatcgcccgtggaggtggcctggggagccgtggccctttcgggggaccttcgagacaaggctgtcagcccctagagtgcgctagatgttggaccgagtatggaatccgccatttcccctgcccgtcgccagagagcaagctgcagaaccgctgtgtggggaaggacggggaaggtgatctggggccagcaggcacgcctattgtcccaagggccaggaagcgagggcctggggttgcccctgaaggcagccggatgccggagcccacctcatcacccaccattggcccgaggaaggactcggctgctgggccccatggccggatggcggggcccagcactacccgggccaagaagaggaagcccaacttctgcccgcaggagaccgaggtgctggtgtccaaggtgagcaagcaccaccagctgctgtttggcacggggctgctgaaggccgagcccactcgcaggtaccgcgtgtggagccgcatcctgcaggccgtgaatgcgctgggctactgtcgccgcgacgttgtggacctgaagcacaagtggcgggacctacgagccgtcgtgcggcgcaagctgggcgacctccggaaggcggcccatggccccagccctggttccggcaagccccaggccctggctctcacgcccgtggagcaggtggtggccaagaccttctcttgccaggccctgccctccgagggcttcagtctggagccgcccagagccacccaggtcgatccgtgcaacctccaggagctgttccaggagatgtcggccaacgtcttccgaatcaactccagtgtgacctccttggagcggagccttcagtccttagggacaccgagtgacacgcaggagcttcgggacagcctgcacacggcacagcaggagaccaacaagaccattgcagccagcgccagctccgtgaagcagatggccgagctgctgcgcagctcctgcccgcaggagcgtctgcagcaggagcgtcctcagctggaccggctgaaaacccagctctcagatgccattcagtgctatggagtggtgcagaagaaaattgcagaaaagtccagagcgctgcttcccatggcgcagaggggcagtaaacagcagagtccccaggccccgtttgccgagctggctgatgatgagaaggtctttaacgggagtgacaacatgtggcagggccaggagcaggcgctgctcccggacatcactgaagaggacctggaggccatccggctgcgggaggaggccatcctgcagatggagagcaacttgctggatgtgaatcagatcatcaaggacttggcctccatggtgtcagagcaaggagaagctgttgatagtattgaagccagccttgaggctgcgtcctcgcatgcggaggcagcccgccagctcctggctggagccagccggcaccaactccagagacacaagatcaagtgctgcttcctatcagctggagtcactgccctgcttgtcatcatcatcatcatcgccacctctgtccgaaagtgatgctacccgtgcatcggccgctgaaccgtcagctggctgtggtgtgggctctccagccccgagcacccctcctggcccggagctgggagctgatggagtccgctgcgttgtcagctgatgccgtcacttggcctgcaatggacccgagagcttcacag

SEQ ID NO: 195733 - DNA, 1963 bp, Homo sapiens
  Payload ID: 18624
  Gene Name: t-SNARE domain containing 1
  Uniprot ID: Q96NA8
  ENST ID: ENST00000524325
  CDS Start-End: 177-1718
cggcggccattggctggtgcgggagggggcgcgcacgccggcggcgggaggggccgtcacgtgatgtttgggtgcccgccccgcccgcctcgcccgccgtgagcgcccggagcggtccgcgagccaccgaggcccagctcagtgtggaggctgctggccctgccatctgtaagaagatgtcatacggatccatcgcccgtggaggtggcctggggagccgtggccctttcgggggaccttcgagacaaggctgtcagcccctagagtgcgctagatgttggaccgagtatggaatccgccatttcccctgcccgtcgccagagagcaagctgcagaaccgctgtgtggggaaggacggggaaggtgatctggggccagcaggcacgcctattgtcccaagggccaggaagcgagggcctggggttgcccctgaaggcagccggatgccggagcccacctcatcacccaccattggcccgaggaaggactcggctgctgggccccatggccggatggcggggcccagcactacccgggccaagaagaggaagcccaacttctgcccgcaggagaccgaggtgctggtgtccaaggtgagcaagcaccaccagctgctgtttggcacggggctgctgaaggccgagcccactcgcaggtaccgcgtgtggagccgcatcctgcaggccgtgaatgcgctgggctactgtcgccgcgacgttgtggacctgaagcacaagtggcgggacctacgagccgtcgtgcggcgcaagctgggcgacctccggaaggcggcccatggccccagccctggttccggcaagccccaggccctggctctcacgcccgtggagcaggtggtggccaagaccttctcttgccaggccctgccctccgagggcttcagtctggagccgcccagagccacccaggtcgatccgtgcaacctccaggagctgttccaggagatgtcggccaacgtcttccgaatcaactccagtgtgacctccttggagcggagccttcagtccttagggacaccgagtgacacgcaggagcttcgggacagcctgcacacggcacagcaggagaccaacaagaccattgcagccagcgccagctccgtgaagcagatggccgagctgctgcgcagctcctgcccgcaggagcgtctgcagcaggagcgtcctcagctggaccggctgaaaacccagctctcagatgccattcagtgctatggagtggtgcagaagaaaattgcagaaaagtccagagcgctgcttcccatggcgcagaggggcagtaaacagagtccccaggccccgtttgccgagctggctgatgatgagaaggtctttaacgggagtgacaacatgtggcagggccaggagcaggcgctgctcccggacatcactgaagaggacctggaggccatccggctgcgggaggaggccatcctgcagatggagagcaacttgctggatgtgaatcagatcatcaaggacttggcctccatggtgtcagagcaaggagaagctgttgatagtattgaagccagccttgaggctgcgtcctcgcatgcggaggcagcccgccagctcctggctggagccagccggcaccaactccagagacacaagatcaagtgctgcttcctatcagctggagtcactgccctgcttgtcatcatcatcatcatcgccacctctgtccgaaagtgatgctacccgtgcatcggccgctgaaccgtcagctggctgtggtgtgggctctccagccccgagcacccctcctggcccggagctgggagctgatggagtccgctgcgttgtcagctgatgccgtcacttggcctgcaatggacccgagagcttcacagctgcctgctgtcctcccctgcactgaccccactcgcccctgtgtcggccccagctgagcacccgaataaaccgctgtggcttatcca

SEQ ID NO: 195734 - DNA, 589 bp, Homo sapiens
  Payload ID: 18624
  Gene Name: t-SNARE domain containing 1
  ENST ID: ENST00000520462
  CDS Start-End: 139-589
gaccctgagccgcagccccgcgagagcgccgcatttcggggaccggcccgcgggcacatgagcccctcggcgggtcctcgcgcgctgttcagaccccagctcagtgtggaggctgctggccctgccatctgtaagaagatgtcatacggatccatcgcccgtggaggtggcctggggagccgtggccctttcgggggaccttcgagacaaggctgtcagcccctagagtgcgctagatgttggaccgagtatggaatccgccatttcccctgcccgtcgccagagagcaagctgcagaaccgctgtgtggggaaggacggggaaggtgatctggggccagcaggcacgcctattgtcccaagggccaggaagcgagggcctggggttgcccctgaaggcagccggatgccggagcccacctcatcacccaccattggcccgaggaaggactcggctgctgggccccatggccggatggcggggcccagcactacccgggccaagaagaggaagcccaacttctgcccgcaggagaccgaggtgctggtgtccaaggtgagcaagcaccaccagctgctgtttggcacgg

SEQ ID NO: 195735 - DNA, 2110 bp, Homo sapiens
  Payload ID: 18624
  Gene Name: t-SNARE domain containing 1
  ENST ID: ENST00000519651
  CDS Start-End: 105-938
tgcccgccccgcccgcctcgcccgccgtgagcgcccggagcggtccgcgagccaccgaggcccagctcagtgtggaggctgctggccctgccatctgtaagaagatgtcatacggatccatcgcccgtggaggtggcctggggagccgtggccctttcgggggaccttcgagacaaggctgtcagcccctagccacccaggtcgatccgtgcaacctccaggagctgttccaggagatgtcggccaacgtcttccgaatcaactccagtgtgacctccttggagcggagccttcagtccttagggacaccgagtgacacgcaggagcttcgggacagcctgcacacggcacagcaggagaccaacaagaccattgcagccagcgccagctccgtgaagcagatggccgagctgctgcgcagctcctgcccggagcgtctgcagcaggagcgtcctcagctggaccggctgaaaacccagctctcagatgccattcagtgctatggagtggtgcagaagaaaattgcagaaaagtccagagcgctgcttcccatggcgcagaggggcagtaaacagcagagtccccaggccccgtttgccgagctggctgatgatgagaaggtctttaacgggagtgacaacatgtggcagggccaggagcaggcgctgctcccggacatcactgaagaggacctggaggccatccggctgcgggaggaggccatcctgcagatggagagcaacttgctggatgtgaatcagatcatcaaggacttggcctccatggtgtcagagcaaggagaagctgttgatagtattgaagccagccttgaggctgcgtcctcgcatgcggaggcagcccgccagctcctggctggagccagccggcaccaactgatgaggaggacgagacccccagctgcttgtggctgcccctgaggtccctggaagggcccagcctgcctgaacctgaccccctggacttacgaggagtcttccacgcacccacctcctcaccctccccacctgcttccccagcctccaccccaccagcaaccacactcatgggggccttccagccttccccgccctcttcggcgccagcacctcccttgccctccaggaggaccccagcggcagcatctgaaacgtccgcatttgagcagcagctgctggactcccaccggcagcagggcgccctgctgtcctcctgggcccagcagcagagcacactcatggcccagcaaaacctgctgctgcagcggctggccgagcagagccagcgtctggccgatggcgtggaggccctcaaccggaccctcgagaggctggtggaagcacgccctacccgggaagcctcaccctcactccaggacggtagtcctgccagtggagtggcccaggggcctgctggaggctcccaggacagccccaagggcacccactcggggctcgaggtcttctcagggatgatcttgaaggtggaggaggagatatagggctggtcgggggtgctggcagagccaaagggcaggagcagggcctccagtctttcccctgctgagtccaggcaggggagaggtggcagtgactgggtctccagggcaccgggacaactccagtccaggagaccggaaggatgagaggatgtgggctgtctacctgtgatgtcgcgtccttgccattgcctgtagagggtggtgacctgcagggaaaggctgcagagagccgacctgtgggactcagtggaccaggtctactcagggatgatgctgttggaggctccaaccccatgtggcagcagctgcgaagtctgcagcccagcgtccctggaagcaggggaggtggggaagatgcactgaggggccccctgctcactggaactctggaaagggtggctcagccaggctctaaaaaggtcccaagcgtgatctggtgtgactcctgaaagcccctgtccctttggtgggcatgcacacttggagggcagggctcctctgccctacgtggttctggcccaggggaaccacatcccatatgcctggaataatttctatccaattttctgttataaatacataaatatatatatatatatatatatgcctata

SEQ ID NO: 195736 - DNA, 583 bp, Homo sapiens
  Payload ID: 18624
  Gene Name: t-SNARE domain containing 1
  ENST ID: ENST00000518720
  CDS Start-End: 178-583
acgtgatgtttgggtgcccgccccgcccgcctcgcccgccgtgagcgcccggagcggtccgcgagccaccgaggcccagtgtcctgggacaatttttggcacattggaaatgttcagccaaattcctctacaaaaccatcagctgctgtagctgcacagtcttgagtgttcctgtccatgaacatgctcagtgtggaggctgctggccctgccatctgtaagaagatgtcatacggatccatcgcccgtggaggtggcctggggagccgtggccctttcgggggaccttcgagacaaggctgtcagcccctagagtgcgctagatgttggaccgagtatggaatccgccatttcccctgcccgtcgccagagagcaagctgcagaaccgctgtgtggggaaggacggggaaggtgatctggggccagcaggcacgcctattgtcccaagggccaggaagcgagggcctggggttgcccctgaaggcagccggatgccggagcccacctcatcacccaccattggcccgaggaaggactcggctgctgggccccatggccggatggcggggcccagcactaccc

SEQ ID NO: 195737 - DNA, 3429 bp, Homo sapiens
  Payload ID: 18625
  Gene Name: TSNAX-DISC1 readthrough (NMD candidate)
  ENST ID: ENST00000602634
  CDS Start-End: 159-575
acgtgagaggagacttccggccactgcgttgtagtcggcccggctgcaaagcgtttttctgcaggctgttttcccaggttccctcggcctgtacctcgcgcactcctcttgctccaggtccttcagtctccgctcgtctcaccgtaggctgtgacgacatgagcaacaaagaaggatcaggagggttcaggaaaaggaagcatgacaatttcccacataaccaaagaagagaagggaaggatgttaattcatcttcacccgtgatgttggcctttaaatcatttcagcaggaacttgatgcaaggcatgacaaatatgagagacttgtgaaacttagtcgggatataactgttgaaagtaaaaggacaatttttctcctccataggattacaagtgctcctgatatggaagatatattgactgaatcagaaattaaattggatggtgtcagacaaaagatattccaggtagcccaagagctatcaggggaagatatgcatcagttccatcgagccattactacagaagtttacaggcaagatcctactcacagaggctcttgggatcaaggctgacagaagctccatctgaagacttttatactatagaggcagaaaaagagtgatgaatcaagcactggcttctaaagcttccgcccagatgggaagcatatctcctctgctcacatttccctgaccaaagccagtcacatggccatcctcagcttcagagaggttgggaaggcattcccactatgtgtctggatgccagcaactcagaaatatttggcagccgggattgcttaccacctgcagcgtgctttcggaggcggcggctggcacggaggccgggctacatgagaagctcgacagggcctgggatcgggttcctttccccagcagtgggcacactgttccggttcccaggaggggtgtctggcgaggagtcccaccactcggagtccagggccagacagtgtggccttgactcgagaggcctcttggtccggagccctgtttccaagagtgcagcagcccctactgtgacctctgtgagaggaacctcggcgcactttgggattcagctcagaggtggcaccagattgcctgacaggcttagctggccgtgtggccctgggagtgctgggtggcagcaagagtttgcagccatggatagttctgagaccctggacgccagctgggaggcagcctgcagcgatggagcaaggcgtgtccgggcagcaggctctctgccatcagcagagttgagtagcaacagctgcagccctggctgtggccctgaggtccccccaacccctcctggctctcacagtgcctttacctcaagctttagctttattcggctctcgcttggctctgccggggaacgtggagaagcagaaggctgcccaccatccagagaggctgagtcccattgccagagcccccaggagatgggagccaaagctgccagcttggacgggcctcacgaggacccgcgatgtctctctcggcccttcagtctcttggctacacgggtctctgcagacttggcccaggccgcaaggaacagctccaggccagagcgtgacatgcattctttaccagacatggaccctggctcctccagttctctggatccctcactggctggctgtggtggtgatgggagcagcggctcaggggatgcccactcttgggacaccctgctcaggaaatgggagccagtgctgcgggactgcctgctgagaaaccggaggcagatggaggtaatatccttaagattaaaacttcagaaacttcaggaagatgcagttgagaatgatgattatgataaagctgagacgttacaacaaagattagaagacctggaacaagagaaaatcagcctgcactttcaacttccttcaaggcagccagctcttagcagtttcctgggtcacctggcagcacaagtccaggctgccttgcgccgtggggccactcagcaggccagcggagatgacacccacaccccactgagaatggagccgaggctgttggaacccactgctcaggacagcttgcacgtgtccatcacgagacgagactggcttcttcaggaaaagcagcagctacagaaagaaatcgaagctctccaagcaaggatgtttgtgctggaagccaaagatcaacagctgagaagggaaatagaggagcaagagcagcaactccagtggcagggctgcgacctgaccccactggtgggccagctgtccctgggtcagctgcaggaggtcagcaaggccttgcaggacaccctggcctcagccggtcagattcccttccatgcagagccaccggaaaccataaggagcctccaggaaagaataaaatccctcaacttgtcacttaaagaaatcactactaaggtgtgtatgagtgagaaattctgcagcaccctgaggaagaaagttaacgatattgaaacccaactaccagccttgcttgaagccaaaatgcatgccatatcaggaaaccatttctggacggctaaagacctcaccgaggagattagatcattaacatcagagagagaagggctggagggactcctcagcaagctgttggtgttgagttccaggaatgtcaaaaagctgggaagtgttaaagaagattacaacagactgagaagagaagtggagcaccaggagactgcctatggtaggtagtgcacaactgttccccggcaagatattgatgatatttgttgtgttttgtggccaggcagaatgttctgtgccttatgtgaacgtcactgtgaagagcgtcatggagcacatggcccttttccttggggacatttttggcaggtgccttggcaaaccgaatggaattacttgtcagcttttgttttcatattcacatgtgacatcttttctttttctgttccctgtctcaacctgtgtttgctaatagccttgttattatttagagcagtctctcccttggcaaggtcttgagcattttctttgtgtgacaattatcttccttttgtcccttggctccgtctccttgtctgcacaatcatagactaaatcaggctgatctgagaaaattgagggaagaccataaagtggctcttctatgtgtggacttttctgagagcttctttccccaggaaggatgatgtagaagatgtgaatgccgccttagccaaagtgtctgcttgtcagaggagttcaagtgttcctgtgttctttccttttccagtcgttaggagtaactgagcttactctgagatttgcacccagagggatggtctcagaagacgctggttcagtgcaaattgagatggtaaaaacttatttcttaaaaaatggttcctaaataaatgtcatttactaaaacaaatgaaagaaatatatatatgaataaatggctatatttt

SEQ ID NO: 195738 - DNA, 3557 bp, Homo sapiens
  Payload ID: 18625
  Gene Name: TSNAX-DISC1 readthrough (NMD candidate)
  ENST ID: ENST00000602962
  CDS Start-End: 159-719
acgtgagaggagacttccggccactgcgttgtagtcggcccggctgcaaagcgtttttctgcaggctgttttcccaggttccctcggcctgtacctcgcgcactcctcttgctccaggtccttcagtctccgctcgtctcaccgtaggctgtgacgacatgagcaacaaagaaggatcaggagggttcaggaaaaggaagcatgacaatttcccacataaccaaagaagagaagggaaggatgttaattcatcttcacccgtgatgttggcctttaaatcatttcagcaggaacttgatgcaaggcatgacaaatatgagagacttgtgaaacttagtcgggatataactgttgaaagtaaaaggacaatttttctcctccataggattacaagtgctcctgatatggaagatatattgactgaatcagaaattaaattggatggtgtcagacaaaagatattccaggtagcccaagagctatcaggggaagatatgcatcagttccatcgagccattactacaggactacaggaatatgtggaagctgtctcttttcaacacttcatcaaaacacgatcattaattagtatggatgaaattaataaacaattgatatttacgactgaagacaatgggaaagaaaataaaactaagtttacaggcaagatcctactcacagaggctcttgggatcaaggctgacagaagctccatctgaagacttttatactatagaggcagaaaaagagtgatgaatcaagcactggcttctaaagcttccgcccagatgggaagcatatctcctctgctcacatttccctgaccaaagccagtcacatggccatcctcagcttcagagaggttgggaaggcattcccactatgtgtctggatgccagcaactcagaaatatttggcagccgggattgcttaccacctgcagcgtgctttcggaggcggcggctggcacggaggccgggctacatgagaagctcgacagggcctgggatcgggttcctttccccagcagtgggcacactgttccggttcccaggaggggtgtctggcgaggagtcccaccactcggagtccagggccagacagtgtggccttgactcgagaggcctcttggtccggagccctgtttccaagagtgcagcagcccctactgtgacctctgtgagaggaacctcggcgcactttgggattcagctcagaggtggcaccagattgcctgacaggcttagctggccgtgtggccctgggagtgctgggtggcagcaagagtttgcagccatggatagttctgagaccctggacgccagctgggaggcagcctgcagcgatggagcaaggcgtgtccgggcagcaggctctctgccatcagcagagttgagtagcaacagctgcagccctggctgtggccctgaggtccccccaacccctcctggctctcacagtgcctttacctcaagctttagctttattcggctctcgcttggctctgccggggaacgtggagaagcagaaggctgcccaccatccagagaggctgagtcccattgccagagcccccaggagatgggagccaaagctgccagcttggacgggcctcacgaggacccgcgatgtctctctcggcccttcagtctcttggctacacgggtctctgcagacttggcccaggccgcaaggaacagctccaggccagagcgtgacatgcattctttaccagacatggaccctggctcctccagttctctggatccctcactggctggctgtggtggtgatgggagcagcggctcaggggatgcccactcttgggacaccctgctcaggaaatgggagccagtgctgcgggactgcctgctgagaaaccggaggcagatggaggtaatatccttaagattaaaacttcagaaacttcaggaagatgcagttgagaatgatgattatgataaagctgagacgttacaacaaagattagaagacctggaacaagagaaaatcagcctgcactttcaacttccttcaaggcagccagctcttagcagtttcctgggtcacctggcagcacaagtccaggctgccttgcgccgtggggccactcagcaggccagcggagatgacacccacaccccactgagaatggagccgaggctgttggaacccactgctcaggacagcttgcacgtgtccatcacgagacgagactggcttcttcaggaaaagcagcagctacagaaagaaatcgaagctctccaagcaaggatgtttgtgctggaagccaaagatcaacagctgagaagggaaatagaggagcaagagcagcaactccagtggcagggctgcgacctgaccccactggtgggccagctgtccctgggtcagctgcaggaggtcagcaaggccttgcaggacaccctggcctcagccggtcagattcccttccatgcagagccaccggaaaccataaggagcctccaggaaagaataaaatccctcaacttgtcacttaaagaaatcactactaaggtgtgtatgagtgagaaattctgcagcaccctgaggaagaaagttaacgatattgaaacccaactaccagccttgcttgaagccaaaatgcatgccatatcaggaaaccatttctggacggctaaagacctcaccgaggagattagatcattaacatcagagagagaagggctggagggactcctcagcaagctgttggtgttgagttccaggaatgtcaaaaagctgggaagtgttaaagaagattacaacagactgagaagagaagtggagcaccaggagactgcctatggtaggtagtgcacaactgttccccggcaagatattgatgatatttgttgtgttttgtggccaggcagaatgttctgtgccttatgtgaacgtcactgtgaagagcgtcatggagcacatggcccttttccttggggacatttttggcaggtgccttggcaaaccgaatggaattacttgtcagcttttgttttcatattcacatgtgacatcttttctttttctgttccctgtctcaacctgtgtttgctaatagccttgttattatttagagcagtctctcccttggcaaggtcttgagcattttctttgtgtgacaattatcttccttttgtcccttggctccgtctccttgtctgcacaatcatagactaaatcaggctgatctgagaaaattgagggaagaccataaagtggctcttctatgtgtggacttttctgagagcttctttccccaggaaggatgatgtagaagatgtgaatgccgccttagccaaagtgtctgcttgtcagaggagttcaagtgttcctgtgttctttccttttccagtcgttaggagtaactgagcttactctgagatttgcacccagagggatggtctcagaagacgctggttcagtgcaaattgagatggtaaaaacttatttcttaaaaaatggttcctaaataaatgtcatttactaaaacaaatgaaagaaatatatatatgaataaatggctatatttt

SEQ ID NO: 195739 - DNA, 3454 bp, Homo sapiens
  Payload ID: 18625
  Gene Name: TSNAX-DISC1 readthrough (NMD candidate)
  ENST ID: ENST00000602567
  CDS Start-End: 159-719
acgtgagaggagacttccggccactgcgttgtagtcggcccggctgcaaagcgtttttctgcaggctgttttcccaggttccctcggcctgtacctcgcgcactcctcttgctccaggtccttcagtctccgctcgtctcaccgtaggctgtgacgacatgagcaacaaagaaggatcaggagggttcaggaaaaggaagcatgacaatttcccacataaccaaagaagagaagggaaggatgttaattcatcttcacccgtgatgttggcctttaaatcatttcagcaggaacttgatgcaaggcatgacaaatatgagagacttgtgaaacttagtcgggatataactgttgaaagtaaaaggacaatttttctcctccataggattacaagtgctcctgatatggaagatatattgactgaatcagaaattaaattggatggtgtcagacaaaagatattccaggtagcccaagagctatcaggggaagatatgcatcagttccatcgagccattactacaggactacaggaatatgtggaagctgtctcttttcaacacttcatcaaaacacgatcattaattagtatggatgaaattaataaacaattgatatttacgactgaagacaatgggaaagaaaataaaactaagtttacaggcaagatcctactcacagaggctcttgggatcaaggctgacagaagctccatctgaagacttttatactatagaggcagaaaaagagtgatgaatcaagcactggcttctaaagcttccgcccagatgggaagcatatctcctctgctcacatttccctgaccaaagccagtcacatggccatcctcagcttcagagaggttgggaaggcattcccactatgtgtctggatgccagcaactcagaaatatttggcagccgggattgcttaccacctgcagcgtgctttcggaggcggcggctggcacggaggccgggctacatgagaagctcgacagggcctgggatcgggttcctttccccagcagtgggcacactgttccggttcccaggaggggtgtctggcgaggagtcccaccactcggagtccagggccagacagtgtggccttgactcgagaggcctcttggtccggagccctgtttccaagagtgcagcagcccctactgtgacctctgtgagaggaacctcggcgcactttgggattcagctcagaggtggcaccagattgcctgacaggcttagctggccgtgtggccctgggagtgctgggtggcagcaagagtttgcagccatggatagttctgagaccctggacgccagctgggaggcagcctgcagcgatggagcaaggcgtgtccgggcagcaggctctctgccatcagcagagttgagtagcaacagctgcagccctggctgtggccctgaggtccccccaacccctcctggctctcacagtgcctttacctcaagctttagctttattcggctctcgcttggctctgccggggaacgtggagaagcagaaggctgcccaccatccagagaggctgagtcccattgccagagcccccaggagatgggagccaaagctgccagcttggacgggcctcacgaggacccgcgatgtctctctcggcccttcagtctcttggctacacgggtctctgcagacttggcccaggccgcaaggaacagctccaggccagagcgtgacatgcattctttaccagacatggaccctggctcctccagttctctggatccctcactggctggctgtggtggtgatgggagcagcggctcaggggatgcccactcttgggacaccctgctcaggaaatgggagccagtgctgcgggactgcctgctgagaaaccggaggcagatggaggtaatatccttaagattaaaacttcagaaacttcaggaagatgcagttgagaatgatgattatgataaagctgagacgttacaacaaagattagaagacctggaacaagagaaaatcagcctgcactttcaacttccttcaaggcagccagctcttagcagtttcctgggtcacctggcagcacaagtccaggctgccttgcgccgtggggccactcagcaggccagcggagatgacacccacaccccactgagaatggagccgaggctgttggaacccactgctcaggacagcttgcacgtgtccatcacgagacgagactggcttcttcaggaaaagcagcagctacagaaagaaatcgaagctctccaagcaaggatgtttgtgctggaagccaaagatcaacagctgagaagggaaatagaggagcaagagcagcaactccagtggcagggctgcgacctgaccccactggtgggccagctgtccctgggtcagctgcaggaggtcagcaaggccttgcaggacaccctggcctcagccggtcagattcccttccatgcagagccaccggaaaccataaggagcctccaggaaagaataaaatccctcaacttgtcacttaaagaaatcactactaaggaaaccatttctggacggctaaagacctcaccgaggagattagatcattaacatcagagagagaagggctggagggactcctcagcaagctgttggtgttgagttccaggaatgtcaaaaagctgggaagtgttaaagaagattacaacagactgagaagagaagtggagcaccaggagactgcctatggtaggtagtgcacaactgttccccggcaagatattgatgatatttgttgtgttttgtggccaggcagaatgttctgtgccttatgtgaacgtcactgtgaagagcgtcatggagcacatggcccttttccttggggacatttttggcaggtgccttggcaaaccgaatggaattacttgtcagcttttgttttcatattcacatgtgacatcttttctttttctgttccctgtctcaacctgtgtttgctaatagccttgttattatttagagcagtctctcccttggcaaggtcttgagcattttctttgtgtgacaattatcttccttttgtcccttggctccgtctccttgtctgcacaatcatagactaaatcaggctgatctgagaaaattgagggaagaccataaagtggctcttctatgtgtggacttttctgagagcttctttccccaggaaggatgatgtagaagatgtgaatgccgccttagccaaagtgtctgcttgtcagaggagttcaagtgttcctgtgttctttccttttccagtcgttaggagtaactgagcttactctgagatttgcacccagagggatggtctcagaagacgctggttcagtgcaaattgagatggtaaaaacttatttcttaaaaaatggttcctaaataaatgtcatttactaaaacaaatgaaagaaatatatatatgaataaatggctatatttt

SEQ ID NO: 195740 - DNA, 3048 bp, Homo sapiens
  Payload ID: 18625
  Gene Name: TSNAX-DISC1 readthrough (NMD candidate)
  ENST ID: ENST00000602885
  CDS Start-End: 159-281
acgtgagaggagacttccggccactgcgttgtagtcggcccggctgcaaagcgtttttctgcaggctgttttcccaggttccctcggcctgtacctcgcgcactcctcttgctccaggtccttcagtctccgctcgtctcaccgtaggctgtgacgacatgagcaacaaagaaggatcaggagggttcaggaaaaggaagcatgacaatttcccacataaccaaagaagagaagggaaggatgttaattcatcttcacccgtgatgttggcctttaaatgactacaggaatatgtggaagctgtctcttttcaacacttcatcaaaacacgatcattaattagtatggatgaaattaataaacaattgatatttacgactgaagacaatgggaaagaaaataaaactgcagccgggattgcttaccacctgcagcgtgctttcggaggcggcggctggcacggaggccgggctacatgagaagctcgacagggcctgggatcgggttcctttccccagcagtgggcacactgttccggttcccaggaggggtgtctggcgaggagtcccaccactcggagtccagggccagacagtgtggccttgactcgagaggcctcttggtccggagccctgtttccaagagtgcagcagcccctactgtgacctctgtgagaggaacctcggcgcactttgggattcagctcagaggtggcaccagattgcctgacaggcttagctggccgtgtggccctgggagtgctgggtggcagcaagagtttgcagccatggatagttctgagaccctggacgccagctgggaggcagcctgcagcgatggagcaaggcgtgtccgggcagcaggctctctgccatcagcagagttgagtagcaacagctgcagccctggctgtggccctgaggtccccccaacccctcctggctctcacagtgcctttacctcaagctttagctttattcggctctcgcttggctctgccggggaacgtggagaagcagaaggctgcccaccatccagagaggctgagtcccattgccagagcccccaggagatgggagccaaagctgccagcttggacgggcctcacgaggacccgcgatgtctctctcggcccttcagtctcttggctacacgggtctctgcagacttggcccaggccgcaaggaacagctccaggccagagcgtgacatgcattctttaccagacatggaccctggctcctccagttctctggatccctcactggctggctgtggtggtgatgggagcagcggctcaggggatgcccactcttgggacaccctgctcaggaaatgggagccagtgctgcgggactgcctgctgagaaaccggaggcagatggaggtaatatccttaagattaaaacttcagaaacttcaggaagatgcagttgagaatgatgattatgataaagctgagacgttacaacaaagattagaagacctggaacaagagaaaatcagcctgcactttcaacttccttcaaggcagccagctcttagcagtttcctgggtcacctggcagcacaagtccaggctgccttgcgccgtggggccactcagcaggccagcggagatgacacccacaccccactgagaatggagccgaggctgttggaacccactgctcaggacagcttgcacgtgtccatcacgagacgagactggcttcttcaggaaaagcagcagctacagaaagaaatcgaagctctccaagcaaggatgtttgtgctggaagccaaagatcaacagctgagaagggaaatagaggagcaagagcagcaactccagtggcagggctgcgacctgaccccactggtgggccagctgtccctgggtcagctgcaggaggtcagcaaggccttgcaggacaccctggcctcagccggtcagattcccttccatgcagagccaccggaaaccataaggagcctccaggaaagaataaaatccctcaacttgtcacttaaagaaatcactactaaggtgtgtatgagtgagaaattctgcagcaccctgaggaagaaagttaacgatattgaaacccaactaccagccttgcttgaagccaaaatgcatgccatatcaggaaaccatttctggacggctaaagacctcaccgaggagattagatcattaacatcagagagagaagggctggagggactcctcagcaagctgttggtgttgagttccaggaatgtcaaaaagctgggaagtgttaaagaagattacaacagactgagaagagaagtggagcaccaggagactgcctatggtaggtagtgcacaactgttccccggcaagatattgatgatatttgttgtgttttgtggccaggcagaatgttctgtgccttatgtgaacgtcactgtgaagagcgtcatggagcacatggcccttttccttggggacatttttggcaggtgccttggcaaaccgaatggaattacttgtcagcttttgttttcatattcacatgtgacatcttttctttttctgttccctgtctcaacctgtgtttgctaatagccttgttattatttagagcagtctctcccttggcaaggtcttgagcattttctttgtgtgacaattatcttccttttgtcccttggctccgtctccttgtctgcacaatcatagactaaatcaggctgatctgagaaaattgagggaagaccataaagtggctcttctatgtgtggacttttctgagagcttctttccccaggaaggatgatgtagaagatgtgaatgccgccttagccaaagtgtctgcttgtcagaggagttcaagtgttcctgtgttctttccttttccagtcgttaggagtaactgagcttactctgagatttgcacccagagggatggtctcagaagacgctggttcagtgcaaattgagatggtaaaaacttatttcttaaaaaatggttcctaaataaatgtcatttactaaaacaaatgaaagaaatatatatatgaataaatggctatatttt

SEQ ID NO: 195741 - DNA, 3294 bp, Homo sapiens
  Payload ID: 18625
  Gene Name: TSNAX-DISC1 readthrough (NMD candidate)
  ENST ID: ENST00000602956
  CDS Start-End: 159-725
acgtgagaggagacttccggccactgcgttgtagtcggcccggctgcaaagcgtttttctgcaggctgttttcccaggttccctcggcctgtacctcgcgcactcctcttgctccaggtccttcagtctccgctcgtctcaccgtaggctgtgacgacatgagcaacaaagaaggatcaggagggttcaggaaaaggaagcatgacaatttcccacataaccaaagaagagaagggaaggatgttaattcatcttcacccgtgatgttggcctttaaatcatttcagcaggaacttgatgcaaggcatgacaaatatgagagacttgtgaaacttagtcgggatataactgttgaaagtaaaaggacaatttttctcctccataggattacaagtgctcctgatatggaagatatattgactgaatcagaaattaaattggatggtgtcagacaaaagatattccaggtagcccaagagctatcaggggaagatatgcatcagttccatcgagccattactacaggactacaggaatatgtggaagctgtctcttttcaacacttcatcaaaacacgatcattaattagtatggatgaaattaataaacaattgatatttacgactgaagacaatgggaaagaaaataaaactgcagccgggattgcttaccacctgcagcgtgctttcggaggcggcggctggcacggaggccgggctacatgagaagctcgacagggcctgggatcgggttcctttccccagcagtgggcacactgttccggttcccaggaggggtgtctggcgaggagtcccaccactcggagtccagggccagacagtgtggccttgactcgagaggcctcttggtccggagccctgtttccaagagtgcagcagcccctactgtgacctctgtgagaggaacctcggcgcactttgggattcagctcagaggtggcaccagattgcctgacaggcttagctggccgtgtggccctgggagtgctgggtggcagcaagagtttgcagccatggatagttctgagaccctggacgccagctgggaggcagcctgcagcgatggagcaaggcgtgtccgggcagcaggctctctgccatcagcagagttgagtagcaacagctgcagccctggctgtggccctgaggtccccccaacccctcctggctctcacagtgcctttacctcaagctttagctttattcggctctcgcttggctctgccggggaacgtggagaagcagaaggctgcccaccatccagagaggctgagtcccattgccagagcccccaggagatgggagccaaagctgccagcttggacgggcctcacgaggacccgcgatgtctctctcggcccttcagtctcttggctacacgggtctctgcagacttggcccaggccgcaaggaacagctccaggccagagcgtgacatgcattctttaccagacatggaccctggctcctccagttctctggatccctcactggctggctgtggtggtgatgggagcagcggctcaggggatgcccactcttgggacaccctgctcaggaaatgggagccagtgctgcgggactgcctgctgagaaaccggaggcagatggaggtaatatccttaagattaaaacttcagaaacttcaggaagatgcagttgagaatgatgattatgataaagctgagacgttacaacaaagattagaagacctggaacaagagaaaatcagcctgcactttcaacttccttcaaggcagccagctcttagcagtttcctgggtcacctggcagcacaagtccaggctgccttgcgccgtggggccactcagcaggccagcggagatgacacccacaccccactgagaatggagccgaggctgttggaacccactgctcaggacagcttgcacgtgtccatcacgagacgagactggcttcttcaggaaaagcagcagctacagaaagaaatcgaagctctccaagcaaggatgtttgtgctggaagccaaagatcaacagctgagaagggaaatagaggagcaagagcagcaactccagtggcagggctgcgacctgaccccactggtgggccagctgtccctgggtcagctgcaggaggtcagcaaggccttgcaggacaccctggcctcagccggtcagattcccttccatgcagagccaccggaaaccataaggagcctccaggaaagaataaaatccctcaacttgtcacttaaagaaatcactactaaggtgtgtatgagtgagaaattctgcagcaccctgaggaagaaagttaacgatattgaaacccaactaccagccttgcttgaagccaaaatgcatgccatatcaggaaaccatttctggacggctaaagacctcaccgaggagattagatcattaacatcagagagagaagggctggagggactcctcagcaagctgttggtgttgagttccaggaatgtcaaaaagctgggaagtgttaaagaagattacaacagactgagaagagaagtggagcaccaggagactgcctatggtaggtagtgcacaactgttccccggcaagatattgatgatatttgttgtgttttgtggccaggcagaatgttctgtgccttatgtgaacgtcactgtgaagagcgtcatggagcacatggcccttttccttggggacatttttggcaggtgccttggcaaaccgaatggaattacttgtcagcttttgttttcatattcacatgtgacatcttttctttttctgttccctgtctcaacctgtgtttgctaatagccttgttattatttagagcagtctctcccttggcaaggtcttgagcattttctttgtgtgacaattatcttccttttgtcccttggctccgtctccttgtctgcacaatcatagactaaatcaggctgatctgagaaaattgagggaagaccataaagtggctcttctatgtgtggacttttctgagagcttctttccccaggaaggatgatgtagaagatgtgaatgccgccttagccaaagtgtctgcttgtcagaggagttcaagtgttcctgtgttctttccttttccagtcgttaggagtaactgagcttactctgagatttgcacccagagggatggtctcagaagacgctggttcagtgcaaattgagatggtaaaaacttatttcttaaaaaatggttcctaaataaatgtcatttactaaaacaaatgaaagaaatatatatatgaataaatggctatatttt

SEQ ID NO: 195742 - DNA, 3326 bp, Homo sapiens
  Payload ID: 18626
  Gene Name: TSPY-like 1
  Uniprot ID: Q9H0U9
  ENST ID: ENST00000368608
  CDS Start-End: 74-1387
gcggcggttagctcccagttcggcctctgaggaaaacgggcgttcgcctgcggttggtccgactgttagcaacatgagcggcctggatggggtcaagaggaccactcccctccaaacccacagcatcattatttctgaccaagtcccgagcgaccaggacgcacaccagtacctgaggctccgcgaccaaagcgaggcgacacaggtgatggcggagccgggtgagggaggctcggagaccgtcgcgctcccgcctccaccgccttcagaggaggggggcgtaccccaggatgccgcgggccgtggcggtactccccagatccgagttgttgggggtcgcggtcatgtggcgatcaaagccgggcaggaagagggccagcctcccgccgaaggcctggcagccgcttctgtggtgatggcagccgaccgcagcctgaaaaagggcgttcagggtggagagaaggccctagaaatctgtggcgcccagagatccgcgtctgagctgacggcgggggcggaggctgaggcggaggaggtgaagacaggaaagtgcgccaccgtctcagcagccgtggctgagagggagagcgctgaggtggtgaaggaaggcctggcggagaaggaggtaatggaggagcagatggaggtagaggagcagccgccagaaggtgaagaaatagaagtggcggaggaggatagattggaggaggaggcgagggaggaagaagggccctggcctttgcatgaggctctccgcatggaccctctggaggccatccagctggaactggacactgtgaatgctcaggccgacagggccttccaacagctggagcacaagtttgggcggatgcgtcgacactacctggagcggaggaactacatcattcagaatatcccgggcttctggatgactgcttttcgaaaccacccccagttgtccgccatgattaggggccaagatgcagagatgttaaggtacataaccaatttagaggtgaaggaactcagacaccctagaaccggttgcaagttcaagttcttctttagaagaaacccctacttcagaaacaagctgattgtcaaggaatatgaggtaagatcctccggccgagtggtgtctctttctactccaattatatggcgcagggggcatgaaccccagtccttcattcgcagaaaccaagacctcatctgcagcttcttcacttggttttcagaccacagccttccagagtccgacaaaattgctgagattattaaagaggatctgtggccaaatccactgcaatactacctgttgcgtgaaggagtccgtagagcccgacgtcgcccgctaagggagcctgtagagatccccaggccctttgggttccagtctggttaacatttgcccttgggaatactcctgcacaaggtctcctaccaccttctgctggacctgtgcttgggcatcagcaatgagtatgccttctattgtgctttgtttttgctgacttttctgcaccctgtttcctttggatattcagttctctcaacctcaagattgagacggtggtgggtatgcttctccacttccatatgaccttcatgctgttctggaatatcacatgctacgaggtcatccttcacactacttgtaagccaagcaaatgatactgtagattgtactgcctttatctgcactgcttggaccctgtttattcccagggcctctgaactggttgctgtcacttggatttctagctttgggagcctgttccacctactcagctctgcattgagcagtatgggcacatgccctgtggacagttactggacgttaatgaactcagaggagaaaagcagtgagccacttgttctgtgtgatttatggtacttcattgctcttccttcacctctagtcactttctattgctacctgccctacattggctcctgccaaggtccctctctctccctgttttccttttttttttttttttttttttttttgagacggaggacggagtcttgctctgtcgcccaggttggagtgcagtggcgcgatctcggctcactgcaacctccacctcccgggttcaagcgattctcctgcctcagcctcccgagtagctgggactacaggcgcgcgccgccacgcccggctaatttttatatttttagtagagacggggtttcaccatgctggccaggctggtctcgaaccccgatctcgtgatccgccctccttagcctcccaatcctctcttaaaaaagtgatagctcagaaacatttgtaaaagcaaggtttttatttcattttggctctgtcattttcagaggcaaagaagttggcctgtaaaatagagtgctagagctcttacgcccctccccttcttcccaacttcctacttcctagcccttttatcaactcctagaatagttaaagagagacacatctagatgggatgaaaggtgccctaagcaggagaaactgaacaaaaggctagaggcatgggccaggtaaaaattgggcctagagtgaagactgtgctgtcgttaagagctttcgaggaaggagtacttactccccaatgatgatgaatggaaaaatacttttcagggagaattgaaggggttaaagtgttaaatatgttgcctagacaagggttctttaaagaaagacagcgcaactttgaatgctttcttacttgttttgtgacctaatttatgtggaagattgttatttcattaggatttagtaaaatttttttttctgattctaaacttattgtgaaaattgagctgtacagatattcttttgatttcaattgggaacatttggaagaacaacagtcttacttgcctgtacaatatagagacatatgaatagtcataacagttttcaacttgttcttgtttctgttaaactatattcctagaaacatagtttgaacaacttggtctttgttaggcttgtcaaattgccttcatggaaaaataatctacaaaagtatggtttaattgattgtcttacatgataattttccctggtaacaacttagtaagtgatatatcttttttcctaaattgcttaaatactgtgaaattgctctgacaaattggaagtgtaccattggcatatttgtcttcctttttatgcatgatggtaaaataaaagcatgttgttctgctagatttcttatttttcaccttacccataaatgtaatgcttgaatgaagttgttcatattaattaaaaattatggaatcattaaagtcctttaatccattaaagttcttaatggattaaaatcattaaagttcttaatggattaaaatca

SEQ ID NO: 195743 - DNA, 2815 bp, Homo sapiens
  Payload ID: 18627
  Gene Name: TSPY-like 2
  Uniprot ID: Q9H2G4
  ENST ID: ENST00000375442
  CDS Start-End: 133-2214
agagcgaggtggtgaggagagctggttgcgtgagtctcctcagctctgcttaccggtgcgactagcggcagcgacgcggctaaaagcgaaggggcgagtgcgagtcccctgagctgtacgaacgcggtcgccatggaccgcccagatgaggggcctccggccaagacccgccgcctgagcagctccgagtctccacagcgcgacccgcccccgccgccgccgccgccgccgctcctccgactgccgctgcctccaccccagcagcgcccgaggctccaggaggaaacggaggcggcacaggtgctggccgatatgaggggggtgggactgggccccgcgctgcccccgccgcctccctatgtcattctcgaggagggggggatccgcgcatacttcacgctcggtgctgagtgtcccggctgggattctaccatcgagtcggggtatggggaggcgcccccgcccacggagagcctggaagcactccccactcctgaggcctcgggggggagcctggaaatcgattttcaggttgtacagtcgagcagttttggtggagagggggccctagaaacctgtagcgcagtggggtgggcgccccagaggttagttgacccgaagagcaaggaagaggcgatcatcatagtggaggatgaggatgaggatgagcgggagagtatgaggagcagcaggaggcggcggcggcggcggaggaggaagcagaggaaggtgaagagggaaagcagagagagaaatgccgagaggatggagagcatcctgcaggcactggaggatattcagctggatctggaggcagtgaacatcaaggcaggcaaagccttcctgcgtctcaagcgcaagttcatccagatgcgaagacccttcctggagcgcagagacctcatcatccagcatatcccaggcttctgggtcaaagcattcctcaaccaccccagaatttcaattttgatcaaccgacgtgatgaagacattttccgctacttgaccaatctgcaggtacaggatctcagacatatctccatgggctacaaaatgaagctgtacttccagactaacccctacttcacaaacatggtgattgtcaaggagttccagcgcaaccgctcaggccggctggtgtctcactcaaccccaatccgctggcaccggggccaggaaccccaggcccgtcgtcacgggaaccaggatgcgagccacagctttttcagctggttctcaaaccatagcctcccagaggctgacaggattgctgagattatcaagaatgatctgtgggttaaccctctacgctactacctgagagaaaggggctccaggataaagagaaagaagcaagaaatgaagaaacgtaaaaccaggggcagatgtgaggtggtgatcatggaagacgcccctgactattatgcagtggaagacattttcagcgagatctcagacattgatgagacaattcatgacatcaagatctctgacttcatggagaccaccgactacttcgagaccactgacaatgagataactgacatcaatgagaacatctgcgacagcgagaatcctgaccacaatgaggtccccaacaacgagaccactgataacaacgagagtgctgatgaccacgaaaccactgacaacaatgagagtgcagatgacaacaacgagaatcctgaagacaataacaagaacactgatgacaacgaagagaaccctaacaacaacgagaacacttacggcaacaacttcttcaaaggtggcttctggggcagccatggcaacaaccaggacagcagcgacagtgacaatgaagcagatgaggccagtgatgatgaagataatgatggcaacgaaggtgacaatgagggcagtgatgatgatggcaatgaaggtgacaatgaaggcagcgatgatgacgacagagacattgagtactatgagaaagttattgaagactttgacaaggatcaggctgactacgaggacgtgatagagatcatctcagacgaatcagtggaagaagagggcattgaggaaggcatccagcaagatgaggacatctatgaggaaggaaactatgaggaggaaggaagtgaagatgtctgggaagaaggggaagattcggacgactctgacctagaggatgtgcttcaggtcccaaacggttgggccaatccggggaagagggggaaaaccggataagggttttccccttttggggatcacctctctgtatcccccacccactatcccatttgccctcctcctcagctagggccacgcggccccacattgcacttctggggggtgaccgacttcgtacacgggtttaaagtttatttttatggtttagtcattgcagagttcttattttggggggagggaaagggggctagtccccttcttttggccctccgcccccgcaggcttctgtgtgctgctaactgtatttattgtgatgccttggtcagggcccctctacccacttctcccagtcagttgtggccccagcccctctccctgtgctgtgtggagtggacaccctgacccccgaagcggggagggccgctgtggccttcgtcacagccgcgcagtgcccatggaggcgctgctgccaccttcctctcccaagttctttctccatccctctcctcttcccgccgcgccgctagcccgcctcggtgtctatgcaaggccgcttcgccattgcggtattctttgcggtattcttgtccccgtcccccagaaggctcgcctctccccgtggaccctgttaatcccaataaaattctgagcaagttca

SEQ ID NO: 195744 - DNA, 869 bp, Homo sapiens
  Payload ID: 18627
  Gene Name: TSPY-like 2
  ENST ID: ENST00000579390
  CDS Start-End: 119-869
aggagagctggttgcgtgagtctcctcagctctgcttaccggtgcgactagcggcagcgacgcggctaaaagcgaaggggcgagtgcgagtcccctgagctgtacgaacgcggtcgccatggaccgcccagatgaggggcctccggccaagacccgccgcctgagcagctccgagtctccacagcgcgacccgcccccgccgccgccgccgccgccgctcctccgactgccgctgcctccaccccagcagcgcccgaggctccaggaggaaacggaggcggcacagattatcaagaatgatctgtgggttaaccctctacgctactacctgagagaaaggggctccaggataaagagaaagaagcaagaaatgaagaaacgtaaaaccaggggcagatgtgaggtggtgatcatggaagacgcccctgactattatgcagtggaagacattttcagcgagatctcagacattgatgagacaattcatgacatcaagatctctgacttcatggagaccaccgactacttcgagaccactgacaatgagataactgacatcaatgagaacatctgcgacagcgagaatcctgaccacaatgaggtccccaacaacgagaccactgataacaacgagagtgctgatgaccacgaaaccactgacaacaatgagagtgcagatgacaacaacgagaatcctgaagacaataacaagaacactgatgacaacgaagagaaccctaacaacaacgagaacacttacggcaacaacttcttcaaaggtggcttctggggcagccatggcaacaaccaggacagcagcgacagtgacaatgaagcagatgaggccagtgatgatgaagataatgatg

SEQ ID NO: 195745 - DNA, 966 bp, Homo sapiens
  Payload ID: 18627
  Gene Name: TSPY-like 2
  ENST ID: ENST00000578306
  CDS Start-End: 1-370
ggaagaggcgatcatcatagtggaggatgaggatgaggatgagcgggagagtatgaggagcagcaggaggcggcggcggcggcggaggaggaagcagaggaaggtgaagagggaaagcagagagagaaatgccgagaggatggagagcatcctgcaggcactggaggatattcagctggatctggaggcagtgaacatcaaggcaggcaaagccttcctgcgtctcaagcgcaagttcatccagatgcgaagacccttcctggagcgcagagacctcatcatccagcatatcccaggcttctgggtcaaagcactccactcatcagttcctcaaccaccccagaatttcaattttgatcaaccgacgtgatgaagacattttccgctacttgaccaatctgcaggtacaggatctcagacatatctccatgggctacaaaatgaagctgtacttccagactaacccctacttcacaaacatggtgattgtcaaggagttccagcgcaaccgctcaggccggctggtgtctcactcaaccccaatccgctggcaccggggccaggaaccccaggcccgtcgtcacgggaaccaggatgcgagccacagctttttcagctggttctcaaaccatagcctcccagaggctgacaggattgctgagattatcaagaatgatctgtgggttaaccctctacgctactacctgagagaaaggggctccaggataaagagaaagaagcaagaaatgaagaaacgtaaaaccaggggcagatgtgaggtggtgatcatggaagacgcccctgactattatgcagtggaagacattttcagcgagatctcagacattgatgagacaattcatgacatcaagatctctgacttcatggagaccaccgactacttcgagaccactgacaatgagataactgacatcaatgagaacatctgcgacagcgagaatcctg

SEQ ID NO: 195746 - DNA, 4180 bp, Homo sapiens
  Payload ID: 18628
  Gene Name: TSPY-like 4
  Uniprot ID: Q9UJ04
  ENST ID: ENST00000420283
  CDS Start-End: 133-1377
cctgacatcaccagttgccatggtagcaccgccgagagtaaaggaggggtggtgctagacgtttcgggcagagctcggccgctgcggaggacaaggaactctccctctcccactagtctgacttcttccaaaatgagcggcctggatgggggcaacaagctccctctcgcccaaaccggcggcctggctgctcccgaccatgcctcaggagatccggaccgagaccagtgccaagggctccgtgaagaaaccgaggcgacacaggtgatggcgaacacaggtgggggcagcctggagaccgttgcggaggggggtgcatcccaggatcctgtcgactgtggccccgcgctccgcgtcccagttgccgggagtcgcggcggtgcagcgaccaaagccgggcaggaggatgctccaccttctacgaaaggtctggaagcagcctctgccgccgaggctgctgacagcagccagaaaaatggctgtcagcttggagagccccgtggccctgctgggcagaaggctctagaagcctgtggcgcagggggcttggggtctcagatgataccggggaagaaggccaaggaagtgacgactaaaaaacgcgccatctcggcagcagtggaaaaggagggagaagcaggggcggcgatggaggaaaagaaggtagtgcagaaggaaaaaaaggtggcaggaggggtgaaagaggagacacggcccagggccccgaagatcaataactgcatggactcactggaggccatcgatcaagagttgtcaaacgtaaatgcccaggctgacagggccttccttcagcttgagcgcaagtttggccgcatgcgaaggctccacatgcagcgcagaagtttcattatccagaatatcccaggtttctgggttactgcctttcgaaaccacccccagctgtcacctatgatcagtggccaagatgaagacatgctgaggtacatgatcaatttggaggtggaggagcttaaacaccccagagcaggctgcaaattcaagttcatctttcagggcaacccctacttccgaaatgaggggcttgtcaaggaatatgaacgcagatcctctggccgggtggtgtctctttccactccaatccgctggcaccgaggccaagacccccaggctcatatccacagaaaccgggaagggaacactatccctagtttcttcaactggttttcagaccacagccttctagaattcgacagaattgcagagattatcaaaggagaactgtggcccaatcccctacaatactacctgatgggtgaagggccccgtagaggaattcgaggcccaccaaggcagccagtggagagcgccagatccttcaggttccagtctggctaatctctgtcctgtgagaagcttctgcacaagtttccttaccacctcctcttggacctatgcttggccaacagcatgcagtcttccatctgctttctcttcatactgtggattatcttttcctttggttctaaatcttcagtaatcggttgcaagattgttggcttacctgcctgtgccattcttcctctgggccttcatgcttttctgcattgtgttaacatgtttcaagtgcatggccttctacggcttctatgccaagcgtatgatactatagatatagtgtaccatactgcctttctttgcatggcttggaccctatctgtgaccatgctcttctcccaatttaagtggttctgtaccacaaagaatcttgatacattttcacaaataactgattgggcttcatactttatgctggctgtgtcctgatacccatgtacttatggtaagctatttgggtattaccactgcaagacaaaactgatatcttaacccggccatcaacccaaattggacattccagactaccaccaactggatcccagctgccttcctgggcttgtgccatccaccctactggttatctgatagaacaagctggtggctgatgggtgactgctaggcgtgactgaggtaatagatgaaaagtgttctatgttatcacattggttttcctgtacctttggttactctacgtcatgaccagctgctggtgagtatgaagcctgtgctatagcccacccctactcactctcaccttctggttgaactttgcttaggccaccattgtctgcctcatcaggaactatctgtagacgtagctcccagggagctcacagcaacaccccctaccaccaggatgggcagtaatatgtgacagagcccaaagcaaggctggaacgcagtcccttccagcttagtctttctgactcctagccaacaaaccatccttaatgtgagcaacttctttaggcatttcctcttttccccgcctgcacccactctgaacatgacaaaagttgccagagttggggcattgaggaagagatatttctggaatgtgagacttgttatgcctctgtctctttctctccctcctcctcccctctccctccccctctccctcccatcccttttcttccctttcactctgaagcagttttagcttattaacagaaaacaaaactggcaaagcaggctttttgtttaatttgctctttccctgattgtgttcagagagaaaggttatgattaaatgggctccagatctcttattgcccttattcctccaccccacttcttttagcaaggtctgaaagtttcaaagggagacctataggttaattgtttagttataggcagtgttaaattaggcagattttgacatatttatctttttaccccatccattctaccaaaacctgtgtatttcttgagtttttagtttgagaagctggaaagagagagaagggcctcacagtgatgggttcaggacgggtcaaaggcaaaggcctttgtgatgtgagcaaaggcaaccaaaacttagcctcactccacttttctaaagatggaaattcttttttgggccttggactgcttctagggtagcattttgtaggtcactcttctcctttgtactattttgtttctgccctgatgtcccttgggtctccatcctactgcctggctttcttggccctcatttctcagcttctgcatttccttccctgctcctaacaaatgaagaagcaggctgcagcctgcattgtggaagatctccagcctccttgtaggggataaggggatgtgcagcatctgtgtggattttcacggacaagttccagtaggtgggacagtgatgccgtcaaggcttagttatgatcatgtgtggtgataaagaccatccaccatcacccttttcccctttggttttgaaggccttgccctaagctacctgagggtttaggaggtctgaacacacacagtggagaggttaatctaggttgggaaactgagtaaaagtccagagcaggaatgagcctgctgtggcgtgggtttggaaaggctcacaggaaagaacctgcaggatcaggggtgggaggggaggcccctgaggtgctctccagggaagaggggctggggtttaaatagcatgcttggaggaagattttccttcaatttttcctaagtccttgaattcaccagtagatttttgtaaacaaaatgtaagtcgatgttttctctcaattatcctaggagtgacctttatatgtgtggaagattaatggtatatgctccttatgtcactgtttttgagtaaaatccatttcctttctctgtttcagcctatgacaaaattgatgtttacaggcctgctttttgcttataattgacaacatgtgcaaaaataccaaatttgtgtcctgtgcagtatgaagaattcagtgaatattcattaatgtattagcttgttttgctctctgttcatatatggctctattcttagaaatataatttgaatgtgatctttcaatagtctgaatattttacaaattatagctatgtcttgtgaaaataacctcaaaaagaaaaatacgactctgttgtcttacttgatatttcttgccctagtaatgtacttgacatttatgttcctaagcagtgtaagtaccagtagaatttctctgtcaaactcaatgatcatttagtacttttgtcttctcccatgtgcttgaaggaaaaataaagtgtcactaccgtatttcttgttttcatcaaaaaataaaaataatttaaaaaattc

SEQ ID NO: 195747 - DNA, 4491 bp, Homo sapiens
  Payload ID: 18629
  Gene Name: TSPY-like 5
  Uniprot ID: Q86VY4
  ENST ID: ENST00000322128
  CDS Start-End: 121-1374
acagttgtacgttcgtgacgtcggcggttgccgtggagagacccgctcggtcccgaccgagagctggcgtcaggagccgcagggtcacagcgtgtctttgaagctgcctccgccgccaccatgagcggccgaagtcggggtcgaaagtcctcccgcgccaaaaaccggggcaaaggccgcgccaaagcccgagtccgccctgctccggacgacgccccgcgcgacccggacccttcacagtaccagagtctcggggaagacacccaggcggcacaggtgcaggctggcgcggggtggggtggcctggaagccgctgcgtccgcgcagctcctccggctcggggaggaggccgcctgccggctccccctggactgtggcctcgcgctgcgggcccgagctgcgggggaccacgggcaggccgcggccaggcccggcccggggaaggccgcatctctctcggagcgcctggccgcagacactgtcttcgtgggaacagcgggaaccgtgggaaggccgaaaaatgccccccgcgttggaaaccggcgtggccctgccgggaagaaggccccagaaacctgtagcaccgcggggagggggcctcaggtcatagctggtgggaggcagaagaaaggggcggcaggggagaatacctcggtgtcagctggggaggaaaagaaggaagagagggatgcagggtcggggcccccagcgacggaaggcagcatggatacgctggagaacgtgcagctgaagctggagaacatgaacgcccaggcggacagggcctaccttcggctctccaggaagtttgggcagttgcgactgcagcacttggagcgcaggaaccacctcatccaaaatatcccgggcttctgggggcaagcatttcagaaccatccccagctagcatcctttctgaatagccaagagaaagaggtactgagctacttaaacagcttggaagtggaagagctcggccttgccagattgggctacaaaatcaagttctacttcgatcgcaacccgtatttccaaaataaggtgctcatcaaggaatatgggtgtggtccttctggccaggtggtgtctcgttctactccaatccagtggctcccagggcatgatctccagtccctaagccagggaaacccagaaaacaaccgtagtttctttgggtggttttcaaaccacagctccattgagtctgacaagattgtggagataatcaacgaagaattgtggcccaatcccttgcagttctaccttttgagtgaaggggctcgtgtagagaaaggaaaggaaaaagaaggcaggcaaggtccaggaaagcagccaatggagactactcagcctggggtgagccaatccaactgatcctgcacaagtctccctgctacctcctgctgggctgctcctggttgactacatatttggctctctgccttctcttcatgttggcctctgtgtactatagaccctttggactttagttacaagaatatggcatttatgatcatgttcttttgcctcccatagcctcttgcttttctacgttagtgtcacatgttatgtgatcgcacccggactgttcatatgttaagcacacatactttagatgtgtgctccctgttatctacattgcctggaccttgttcttggctctggcctttcctacttgtctttaacatggacactcatgagtcatcctccaggacgaccagtgcatcctcaagctctgctccttcagggccagtgacttgctgggcttcgtgttcatgctggccatgcatgtcatctatgcaagcgtttccattgccactgcagaatgaagccagtgcacatggtattagtcatcagccagaacttcctgttctgtgggtctggggtcaccagctgagatgtcacctgctttatttctggctttggcctgtggtctgtgatacccatcctgcttgatgttctgcagaatggcacttgactgctgggcatgcatgaagttaagggcaagaaacagtatgccatgtgttctgtaccatcatgtgtctcttcttgcttctgggcccttctactggtgaactttcatcaagatctgcgccatgccgtgtcactatcaagccattaagttttgtctgggttgctgtcagccccagttggcttcctggtcaacaaggacctcaagaactgcctgtggaccgaggccccctaccagtgcatgagacacacacctaccctccccagctttccaggaaccctactggctgccagactgatgggcgggctggtatgtgtggacatgtgttcactgtcattatgctgtggctccaggtgagggtgaggactgggcctatatagaatccagataccattgtcaacttcccttattcccgtctaagatgtgagcagagtgccatagtaggggttctgggaagaggtatttctgatttgtgggcctctgcttgcttgacttcaggtcacttatacttcttattttgcttgcctgccttcatccctcatttcctccctctcattcttctttcctccctccctttcctggtagcctcctttcctccccttctgccttccccttccttctttccttattcttttttattttgtttaaatagtaccacagagaaaacaactgaaaaaccacatttttctacatacagctggggaggtagctgagaacttggcactgcgcacacatactaggttgaaagagagttgaggaaaccagaaggccaagtggatctgctggcaaaccctgaacctgtctcctgcgcttgctctacagttctgaagttgaaaatccttttcatgcctagcatctgcttgagttataaaccccaaggcagccatgtcatagactagtgtttactcttgttttgactttgttttaatgcttcctaagacccaagtgcctcctgctgtttcctcctttgtggtagcctctggccatctggacctcaatccccagctttcccactttcagcagtcctttgctctctttgcttctacctcaaatagccccaggagtgggctttagtctccaatatggagcatctcaagcttctcctgggggatggggattgggatgggcagaatctgttttggatctccgggttatttccagtgggtgtaaaagcagagctgggcctttccctctcttatccctgagggtgggtaagaaggactgtatctacacctgttcttccctaccttctcttttgttagggaggcctcattctaagttcctcaagagagtccttggcttaaagctgtagcaagggtgtgctaggtgggggatttggagcaaaaccgtcgagtaggcatgatactggtatggagtgggcctgcaaaatcagacagaaatggcttgagaagccgcagggggagcatgcctgtctctcagtgatagagtatgggagggacctccctagcttggaaaatgagaattgaaggggttatgaacaaataggatgcctagttgaggatgttcccaaagttttgtccaatcttatcattagtagattttataagccacagagacaaaccagaaacggaataatgttactttggatgctttatttttttgttctaggtgtggctttgtacatgcagaagaatgctatatgctgcacattttgcctttaaagtcttacgactttccccattttagtctaatgggaagatacagatgtgcaagtctgcttttttgttttttgttattatttttttttttttgctctgtgttatggacattttcagacatgcacagaagtggagaggatggtccttggaccccatgtgtccatcacctagctgcatcacttatcagctatggtcaacctggtttcatctgtatctctctcttttcacctgtattgtttattgaaaatccaagacactatgccaatgcaaccgtgactactttgggagattggtagtctcttttgatggtgatagtgatggggtgcactatcataatcacatcaggtctgctttttgcttttaatgttaactaatgaagttccagagatgggccttagaaatgtgttttaagaattaacaaggagtctcaaaaagaaatgagagggatgcttcctttcccttgcatctacaaaacaagagagagactgttctgttgtaaaactctttcaaaaattctgatatggtaaggtacttgagacccttcaccagaatgtcaatctttttttctgtgtaacatggaaacttgtgtgaccattagcattgttatcagcttgtactggtctcataactctggttttggaagaataatttggaaattgttgctgtgttctgtgaaaataacctccccaaaataattagtaactggttgttctacttggtaatttgacaccctgttaataacgcaattatttctgtgttcttaaacagtataaatagttgtaagtttgcatgcatgatggaaaaataaaaacctgtatctctgttatatttctgattttc

SEQ ID NO: 195748 - DNA, 3089 bp, Homo sapiens
  Payload ID: 18630
  Gene Name: TSPY-like 6
  Uniprot ID: Q8N831
  ENST ID: ENST00000317802
  CDS Start-End: 122-1354
gagactgaagagtgggcggcgcaaatgggcgaggtgtttactcgccattttgtgtgaggaacgttgacgctacctacctctggcctggcctctacccactgctgccctggccgctaccaacatgagcctcccggagagtcctcacagccccgctactctcgactatgctctggaagacccgcaccagggccagaggtcccgagaaaagagcaaggcgacagaggtaatggcagatatgtttgatggccgcttggagccaatcgtgttcccaccgccccggcttccagaggagggggtcgcgccccaggatcccgcagatggtggccatactttccacatcttggtcgatgcgggtcgcagtcatggagccatcaaagcggggcaggaagtgactccaccacccgcggagggcctagaagcggcctctgcctcgctgacaactgacggcagcctcaaaaatggctttccgggtgaagagacgcacggcctaggtggggagaaggctctagaaacctgtggggcagggaggtcggagtctgaagtgattgcagaggggaaggccgaggacgtgaagcctgaggagtgtgccatgttctcagccccagtggatgagaagccaggaggcgaagaaatggacgtggcggaagaaaacagagcaatagatgaggtaaacagggaggcagggcctgggcccgggcccgggcccctgaacgtgggtctccacctgaaccccctggagtccatccagctggaactggactccgtgaatgcagaggctgacagggcgctcctgcaggtggagcgcaggtttgggcagattcatgaatactacctggagcagaggaatgacatcattcgcaatatcccgggcttctgggtcactgctttccgccaccacccacagctgtctgccatgattagaggccaagatgccgagatgttaagctacttaaccaatttggaagtgaaggagctcagacaccctaggacaggctgcaagtttaagttcttctttcaaagaaacccttacttcagaaacaagctgattgtaaaggtgtatgaggtcagatccttcggccaagtggtgtctttttccactctaatcatgtggcgccggggccatggaccccagtccttcattcataggaaccgacatgtcatctgcagcttcttcacctggttttcagaccacagccttccagagtccgacaggattgctcagattattaaagaggacctctggtcaaatccactgcagtactacctgttgggtgaagacgcccatagagctagacgtcgcctggtaagggagccagtggagatccccaggccctttgggttccagtgtggttaacctttgcctttggaattactcctgcagaaggttgcctgccaccaccagctggacctgagcttgggcaacagcattaggtatgccctttactttttttgttctgactttcctgtaccctctgtttaaactttccgttctctcaacctgaagattgagaccttggtggctgtgctgctcccctttcacctggtcgtcttgctattctgcattaacatcacatgctcccagccgatgggtcacatccttctaagcgaagcgaatgatgctgtaggttacactgtatttacctttgtttggactcggtttgttcccaggacctctggtctggctcctcctacttggatttctagctgtgtctaagaacctattcagctcaccctgctctgcatctgacagtacaggtgcatggcctgtggacaattgctgggcattaatgaagtcaagggagaacagcagggggcaagttggtctgtgtgaattatgggaccccattacttttcctgagactggtcacctattgctgcctgctactggctattcccaagtactgctacttgggcagctccctgctgagtgaacatatcccagaccattgccagctccactctctggtttctaataaacagggatctccagaacactggtggtggacacagctttcctgtcagcacacaaaagacctgttcctcttccaaaagacctctctttaccaccaccaccctcatcactcagaaaccctactgtttgttagacaggtggttgaggggacatgtcagaccctatcctcatggcaaggttaatatgttggtgttcttgacaagtaccaggctttctcagccacaaccagtggattcattcaaaatctaggtacctttatttgcctcccttcctgaacctaatgaagtgccagagtgagtgtacactttcttttctctcatctctcataaatctcttctgtcttcctttaaaaaaaacaaaagtagtagttcagaaacatccgcagaagcaggctttttagtttcttggctctctttgtcatgtccagaggcaggctgttctgtaaaatagactgccagacctcttattgcccattctcctttcttctcagcccctcacccctctttagcaattcctagagggtttaaaggactacagagctgtatggaatgaaaggtgatttctagttcagagtggatagaagaactaaagagattgtgatgggtgctctaggcagggaaaactgaacaaaaaggcagaaatgattcaggggaaaatcgggcctagaatttacactgggttgactagttatgatgggaagagaagtacttttttttagtatgcacgtagaagaatagaagatggttggagtgttaaatatgttccctagagaagggttctttgaagaaacactgcaattttgggtgttctctttcttgtttgcatatggccttacttatgtggaagattaatactgtgttataatattttctctttctgtttactgggaagattcagctgtacagattttcttttactttcaaatagaaatatttggaataatatcagtctttcttttttgtacattatgtggatatggatattcatggcagttttcagcctgttcttgtttctgttaaaaccgtatctttaacattttaatttgaataacttggtcttatctgatgcggaagactggaaactattgtgttcatgggtaaataaactacaaaatatt

SEQ ID NO: 195749 - DNA, 5188 bp, Homo sapiens
  Payload ID: 18631
  Gene Name: TSR1, 20S rRNA accumulation, homolog (S. cerevisiae)
  Uniprot ID: Q2NL82
  ENST ID: ENST00000301364
  CDS Start-End: 1081-3495
cccgcacagacgtcaggcggcaggcccggccccttcccacagccggaggggggttgcgcacagcgacgggggatcggggcggggagaggccgtgcgcgcctaggggcggcagacccgggcgcgcgccacgggggtcgctgtcatggcaacgcacccgctcccgcatggagggcgcgaagccgcattgtgagcgctggccctggagcccgcggccccgcggctgagagcgagcctcggtcccgctgaagctcccctgacttctgcctgctccctctcccgacgggacggaaagggccggggctcgggcatggggtcccctgcggtccgagcctgcccacggcgaagccggtgcagcctggccccgtgacccctctgaatccccgtccggccgtcgccgtgcagttgtcaagtttctgggaagattagtgggagcgcagccgcccgagcccgacggccggagggtcgcggccagtcccccttgccgggtcgccacgtcccacaaggtccttcccggccgctccgtgggaggcggggcgcaggttggagtaacagggacgggcttgagctggtacggaaccgggcaaggtgagagaagtgtcttccacgcgattcccaagcctcgctagggaatcgagggagaagaaaggttgctcagagtgataaagaacatgccgttgcaaacggaagagcaacgtgcccgaatctaggtgacaggaagggcttaggccttttcggcacgaatggagccttccagtcaacatgcttctacgtgatgcagctttatagcgcaaaaaaatgacaatgcaaggggtacaaacagccctgctagaccaacagcccgagcctcgacagtctacatccggcgccttcaagcccccaaccacacactgcgaagtgggaaaagttcccagcgcggcttggcgaacccgctaacacggcgctctcacgagctgctggaaaagaccttcgcgagagggcgcagggagtcccgctccctggagggcccgcccccttggaggggaccggaagcgcttgtcctggcccggaagcagtgctgactccgtacacgcgcgctgcggcatggcggcccaccgccccggcccgctcaagcagcagaataaagctcataaaggcggacggcatcggggtcggggatctgcacagcgggacggcaagggccgtctggcactgaaaaccctaagcaagaaggtgagaaaagaactcagcagagtcgaccagaggcatcgcgccagccagctccgaaagcagaagaaggaggcggttctggcagagaagagacagctgggtggcaaggatggccctcctcatcaggtactggtggtgcccctgcacagcagaatttccctgccagaggccatgcagctgcttcaagatagggacactggaacagtacacttgaatgaattgggaaacacccagaactttatgctgctgtgcccccgcttgaaacatcggtggtttttcacctcagcaaggccaggggatctgcacgttgtgttagacatggctaaagtagctgataccatcctgttcctccttgatccactagaaggctgggacagcaccggtgattactgtctttcctgcctctttgctcagggccttccgacctatacactagctgtccaggggatttctggcctcccactgaagaaacaaatagataccaggaagaagctaagtaaagcagtggagaagcgctttccgcatgacaaactcctcttgttagacactcaacaggaggcagggatgctgcttaggcagttggctaaccagaagcaacagcatcttgcttttcgagatcggcgggcctacctatttgcccatgctgttgattttgttcctagtgaagagaataacttggtgggcaccttgaaaatttcaggctatgttcgagggcagactctgaatgtcaataggttgctgcatatcgttggatatggtgatttccagatgaaacagatagatgcccccggagaccctttccctttaaatcctagaggaattaaaccccaaaaggacccagacatggcaatggagatttgtgctacggatgctgtagatgatatggaagaaggtcttaaagtcctaatgaaggcagaccctggtagacaggaatccttgcaagcagaggttatcccagatccaatggagggagagcaaacctggcccactgaggaggagctgagcgaggcaaaggatttcttgaaggaaagttctaaggtggtaaagaaggtccccaaaggaacatccagttaccaagctgaatggattttggatggtggcagccaaagtggtggggaaggagatgaatatgaatatgatgatatggaacatgaggattttatggaggaggaatctcaggatgagagtagtgaagaagaggaagaatatgaaactatgactattggggagtctgtgcatgatgatctgtatgataagaaagtagatgaagaagctgaggcaaaaatgttggagaaatataaacaagaaagactggaagagatgtttccagatgaagtggacacgccccgtgatgtggctgctcgaattcgatttcagaaatacagaggccttaagagcttccggacatctccatgggatcctaaggaaaaccttcctcaagattatgctcgaatatttcagtttcagaactttactaacactaggaaaagcatctttaaagaggttgaagaaaaagaggttgaaggagctgaggttggctggtatgtcacacttcatgtctctgaagtccccgtctcagtggtcgagtgcttcaggcaaggaacacccttgattgcattttctttactacctcatgaacagaagatgtcagtattgaatatggtggtgaggcgtgaccctggcaacactgaacctgtgaaagccaaggaagagctcatatttcactgtggattcaggcgcttccgagcctcacctttattctctcagcacactgcagcggacaaacataaattgcagagattcctgactgctgacatggccctggtggcgacagtctatgcgccaatcacttttcctcctgcatctgtgctgcttttcaagcaaaaaagcaatggaatgcacagcctcattgctacaggccatcttatgtcagtagatccagacagaatggtcatcaagagagttgttctgagtggtcatcctttcaaaatttttactaagatggcagtagtacgttacatgttcttcaacagagaggatgtgctgtggtttaaaccagtggaactgagaacgaagtggggccggagaggacatatcaaggaacctttaggtacccatggccacatgaaatgcagctttgatgggaagctaaaatctcaagacacagtactgatgaacctgtataaacgagtcttccccaaatggacttatgatccatatgtaccagaaccagtaccctggctgaaaagtgagatttcttcaacagtgcctcaagggggcatggagtaatggattcaaagagattctgtcttaccggtgccagtcagtactccagggatgggaggcacaagttgtgattgggcaaagtttattttctatgtcagcctgtcagtccactgccccattttgcaagacttttttttagccttgacaaaatgtctcagttaagtataaaagtttttccactacttagtccaaaaaaaactattaaatcttaatgaaatagccactctccattaagaatctgataactaagagttgacaatactaggaaacaaaatgtcttcagtatctaaagacactgaattcccaccatttccttttctgtaaattaaacagaaacagactgataagaagctggcctttcagcctgcttcacccaagttatggaggaggttaagtctacatttccaccactgagcacaatacaaatgttctttacttctggggaaacagtttgaaaatgttgagacagcacagcagccactccaacaccagctgtaggttcaatgagtagtttcatcctctcccacaccagctgggttgcacactgttgatatggaagggagtaggaattagtgaaaggggagtctagttggtttacctataaagttcagatgagaatacgtgtccagtttgaattttcttatcactgtgtacacacgcttcccaaagcttttctttaattctgactctgcttctgtcaagagggttgtcattaatacatctagggtaccctcccatgtcatgaagttacctagtcaggttcccgtgggtcacttgctactcctaagggaagtttcttctgcctaagaagttacaccatgctttgctatttcttttcttgctggagcctcaccttaatttcatcctctgtgacagtgaagatatcatccacaaggtccctgataataggccaggtgttcaagccaatgctggatttgacaccatctgctatggtttctggaggataaagattgggcatcagtttccccttcagcttggactggtagcagtcatctgcatttgagggttcagcagcatataccttcacactaggtttcagagcctgggaagaggaatattaagacatcttaacaacaaaccacaacattgcctgcatgtctaaaagaaaatatgggcctggtgtggtggctcacacctgtaatcccaacactttgggagcccgaggcgggtggatcagctgaggtcaggagttcaagaccagcctggccaacctggtgaaatgcagtgtcaactaaaaataggaaaatcagccaggcgtggtggcagacccctgtaatcccagctactcaagaggctgaggtaggagaatcacttgaacttgggaggggtaggttgcagtgagctgagatcacaccaaaatggggtggggcgcagtggctcacgcctgtaatcccagcactttgggaggccgaggtgggcggatcacgaggtagggagatcaagaccatcctggctaacacggtgaaaccccgtctctactaaaaatacaaaaaaaaaaaacaaaaaaaaactagccaggcatggtggcaggcacctgtagtcccagctactcgggaggcagaggcaggagaatggcgtgaacctgggaggtggagcttgcagtgagccaagatcgtgccactgcactccagcctgggtgacagagtgagactccgtctcaaaaaaaaaaagaaaa

SEQ ID NO: 195750 - DNA, 1290 bp, Homo sapiens
  Payload ID: 18631
  Gene Name: TSR1, 20S rRNA accumulation, homolog (S. cerevisiae)
  ENST ID: ENST00000576112
  CDS Start-End: 31-1137
agtgctgactccgtacacgcgcgctgcggcatggcggcccaccgccccggcccgctcaagcagcagaataaagctcataaaggcggacggcatcggggtcggggatctgcacagcgggacggcaagggccgtctggcactgaaaaccctaagcaagaaggtgagaaaagaactcagcagagtcgaccagaggcatcgcgccagccagctccgaaagcagaagaaggaggcggttctggcagagaagagacagctgggtggcaaggatggccctcctcatcaggtactggtggtgcccctgcacagcagaatttccctgccagaggccatgcagctgcttcaagatagggacactggaacagtacacttgaatgaattgggaaacacccagaactttatgctgctgtgcccccgcttgaaacatcggtggtttttcacctcagcaaggccaggggatctgcacgttgtgttagacatggctaaagtagctgataccatcctgttcctccttgatccactagaaggctgggacagcaccgcactagctgtccaggggatttctggcctcccactgaagaaacaaatagataccaggaagaagctaagtaaagcagtggagaagcgctttccgcatgacaaactcctcttgttagacactcaacaggaggcagggatgctgcttaggcagttggctaaccagaagcaacagcatcttgcttttcgagatcggcgggcctacctatttgcccatgctgttgattttgttcctagtgaagagaataacttggtgggcaccttgaaaatttcaggctatgttcgagggcagactctgaatgtcaataggttgctgcatatcgttggatatggtgatttccagatgaaacagatagatgcccccggagaccctttccctttaaatcctagaggaattaaaccccaaaaggacccagacatggcaatggagatttgtgctacggatgctgtagatgatatggaagaaggtcttaaagtcctaatgaaggcagaccctggtagacaggaatccttgcaagcagaggttatcccagatccaatggagggagagcaaacctggcccactgaggaggagctgagcgaggcaaagggtcagtattggtaaacttgtctgtaattcatctgacctggaattgtggattttctgtagctgttccaagtgagggccctataggatagagtggggtgggggtatagttgaaagtctctcctcaccctcaaatgctgtatgttttcaataaacaaacattatacacag

SEQ ID NO: 195751 - DNA, 387 bp, Homo sapiens
  Payload ID: 18631
  Gene Name: TSR1, 20S rRNA accumulation, homolog (S. cerevisiae)
  ENST ID: ENST00000575049
  CDS Start-End: 1-161
aagaggttgaaggagctgaggttggctggtatgtcacacttcatgtctctgaagtccccgtctcagtggtcgagtgcttcaggcaaggaacacccttgattgcattttctttactacctcatgaacagaagcggacaaacataaattgcagagattcctgactgctgacatggccctggtggcgacagtctatgcgccaatcacttttcctcctgcatctgtgctgcttttcaagcaaaaaagcaatggaatgcacagcctcattgctacaggccatcttatgtcagtagatccagacagaatggtcatcaagagagttgttctgagtggtcatcctttcaaaatttttactaagatggcagtagtacgttacatgttcttcaacag

SEQ ID NO: 195752 - DNA, 794 bp, Homo sapiens
  Payload ID: 18631
  Gene Name: TSR1, 20S rRNA accumulation, homolog (S. cerevisiae)
  ENST ID: ENST00000571806
  CDS Start-End: 231-443
agtctacatccggcgccttcaagcccccaaccacacactgcgaagtgggaaaagttcccagcgcggcttggcgaacccgctaacacggcgctctcacgagctgctggaaaagaccttcgcgagagggcgcagggagtcccgctccctggagggcccgcccccttggaggggaccggaagcgcttgtcctggcccggaagcagtgctgactccgtacacgcgcgctgcggcatggcggcccaccgccccggcccgctcaagcagcagaataaagctcataaaggcggacggcatcggggtcggggatctgcacagcgggacggcaagggttctggcagagaagagacagctgggtggcaaggatggccctcctcatcaggtactggtggtgcccctgcacagcagaatttccctgccagaggccatgcagctgcttcaagatagggacactggaacagtacacttgaatgaattgggaaacacccagaactttatgctgctgtgcccccgcttgaaacatcggtggtttttcacctcagcaaggccaggggatctgcacgttgtgttagacatggctaaagtagctgataccatcctgttcctccttgatccactagaaggctgggacagcaccggtgattactgtctttcctgcctctttgctcagggccttccgacctatacactagctgtccaggggatttctggcctcccactgaagaaacaaatagataccaggaagaagctaagtaaagcagtggagaagcgctttccgcatgacaaactcctcttgtt

SEQ ID NO: 195753 - DNA, 1534 bp, Homo sapiens
  Payload ID: 18632
  Gene Name: TSR2, 20S rRNA accumulation, homolog (S. cerevisiae)
  Uniprot ID: Q969E8
  ENST ID: ENST00000375151
  CDS Start-End: 22-597
cacgtggactggggccggataatggcgggcgctgcagaagatgcgcgagctcttttccgggctggggtctgcgcggccctggaggcctggccggccttgcagatcgctgtggagaatggcttcgggggtgtgcacagccaggagaaggccaagtggctggggggtgcagtggaggattacttcatgcgcaatgctgacttggagctagatgaggtggaagacttccttggagagctgttgaccaacgagtttgatacagttgtggaagacgggagtctgccccaggtgagccagcaactgcagaccatgttccaccacttccagaggggtgatggggctgctctgagggagatggcctcctgcatcactcagagaaaatgcaaggtcacagccactgcacttaagacagctagagagactgatgaggatgaagatgatgtggacagtgtggaagagatggaggtcacagctacgaatgatggggctgctacagatggggtctgcccccagcctgaaccctctgatccagacgctcagactattaaggaagaggatatagtggaagatggctggaccattgtccggagaaaaaaatgagtggggatgattggaaatggctttgggcccttatttgctgttctaagagttgtctgtaggggttttttttttgaggattgcagacctgtggactggttaccccatctccaccctctcccctgttcctctgtctggctccctccagggcaaggaaaacctagggtccttggtcttgggggtggggggaccttttccagcatattcccctgggcctttagttaacatccgagtgacgaagccgggttccccagtacagtgtcttttgggtgcggtcattgtgaggaaggggatgagtgagtgtgggtgtggctggaggaggagctagatgccggtggacagtgggcaggtggatttggggaggagaggatcagcagcagcagcagtactcagtgatagggggctggctgggtcaggaatggtgagatgaacatgcaagtggaagagagaatagttgaaaatgtgaatgaaagtagctctggagcctctcccttaccccaccccacacacacgcaacagctctgtacccctgcccagaacttggaacctcccaggaatgctgccttccttcagcccagcctccagtcctgggttccctcaggaattcgaagaccttggctaggtggtgagcttggaagagctgggctttgttttctgtctcctctaacctctttccttactccttatcccatcccatttgagttcaggggtgaggcttaagatcttaataaataataccttactgcttaatctgtggcttgacctgtgagtagtagccttagaatcagccttctgggagctcagcttcagagtttacaagggagcagtttctgggcccaccctagcagcctggtactttggacaaccaaacagatgaacgaacggagcacagcagtgctatgaaagttactgtaagcctgaaataaactgtatttttctt

SEQ ID NO: 195754 - DNA, 1243 bp, Homo sapiens
  Payload ID: 18633
  Gene Name: TSR3, 20S rRNA accumulation, homolog (S. cerevisiae)
  Uniprot ID: Q9UJK0
  ENST ID: ENST00000007390
  CDS Start-End: 108-1046
ggaccggaagtggcgtccggcgcaagcgctggcagccgcacagcccattgggaggccgaggggcgcggccgtggggtggggagtccccggcaccccaggtccgcgccatgggccgcaggagggcagcgcgcgggccgggggcggaaggcggccgccctcggcacctcccgacgcgctccctggaggccttcgccgaggaggtcggcgccgcgctgcaggcttccgtggagccaggggcggctgacggcgagggcggcccgggcccggcggcgctgccctgcacgctggccatgtgggagttgggccactgcgacccccggcgctgcacgggccgcaagctggcccgcctggggctggtgcgctgcctgcgcctgggccacagattcggcggtctggtgctgagccccgtgggcaagcagtacgcgtcccccgcagacagacagctggtggcgcagtctggggtcgccgtcatcgactgctcctgggccaggctggacgagacaccgtttgggaagatgcgagggagccacttgcgcctgttgccctacctggtggccgccaaccccgtgaactatggccggccctacagactttcctgcgtggaagcgtttgctgccaccttctgcatcgtaggctttccagaccttgctgtcattttgctgcggaagtttaaatggggcaagggcttcttggacctgaaccgccagctcctggacaagtacgcggcctgcggcagcccggaggaggtgctgcaggcggagcaggagttcttggccaatgccaaggagagcccccaggaggaggagatcgatcccttcgatgtggattcagggagagagtttggaaaccccaacaggcctgtggccagcacccggctgccctcggacactgatgacagtgatgcgtctgaggacccagggcctggcgccgagcgcggaggagccagcagcagctgctgtgaagaggagcagacgcagggacggggggctgaggccagggccccggctgaggtttggaaaggaatcaagaaacggcagagagactgagggttgcagacacatatatttttgaggctgggtgacgagaaaatctagagacatgagggacataaatgggcctggcagcctcggctctttgcggctgctggcaggactgagctgtccgggttctccccacacttccagcacagctgtgctctgtgtcctgcctcggcgctctcgcaaatgaagctgcaggccaagaa

SEQ ID NO: 195755 - DNA, 649 bp, Homo sapiens
  Payload ID: 18633
  Gene Name: TSR3, 20S rRNA accumulation, homolog (S. cerevisiae)
  ENST ID: ENST00000566296
  CDS Start-End: 1-329
cgcctggggctggtgcgctgcctgcgcctgggccacagattcggcggtctggtgctgagccccgtgggcaagcagtacgcgtcccccgcagacagacagctggtggcgcagtctggggtcgccgtcatcgactgctcctgggccaggctggacgagacaccgtttgggaagatgcgagggagccacttgcgcctgttgccctacctggtggccgccaaccccgtgaactatggccggccctacagactttcctgcgtggaagcgtttgctgccaccttctgcatcgtaggctttccagaccttgctgtcattttgctgcggaagtttaaatggggcaagggcttcttggacctgaaccgccagctcctggacaagtacgcggcctgcggcagcccggaggaggtgctgcaggcggagcaggagttcttggccaatgccaaggagagcccccaggaggaggagatcggctgccctcggacactgatgacagtgatgcgtctgaggacccagggcctggcgccgagcgcggaggagccagcagcagctgctgtgaagaggagcagacgcagggacggggggctgaggccagggccccggctgaggtttggaaaggaatcaagaaacggcagagagactgagggttgcagac

SEQ ID NO: 195756 - DNA, 438 bp, Homo sapiens
  Payload ID: 18634
  Gene Name: TSSK6 activating co-chaperone
  Uniprot ID: Q96A04
  ENST ID: ENST00000368251
  CDS Start-End: 48-425
tgaggctgtgagcagtaccggagggcaccacacctgttggtgttcagatggagcggcacactagtcatcctaacagaaaagttccagccaaagaggaagctaatgctgtgcctctctgtagagcaaaaccctcccccagctatattaatcttcaagcaagttccccaccagccacttttctgaacatccagacaacaaagctgccctcggttgatcacaagcccaaggaatgcctaggactcctggaatgtatgtatgcaaacctccagcttcagacccagctcgcccaacaacagatggctgttttggaacatttacaggcatctgtgacacaactggctcctgggaggggaagcaataactcttctctcccagccttatctcctaatccattgttaaatcacctgccccaattcagtaaatgaattgtggaacaaa

SEQ ID NO: 195757 - DNA, 491 bp, Homo sapiens
  Payload ID: 18634
  Gene Name: TSSK6 activating co-chaperone
  Uniprot ID: Q96A04
  ENST ID: ENST00000368252
  CDS Start-End: 101-478
agccttagcaacaggtggactagagaggcgggactccagccagcacatgggggaaagacctgccggcttggcgcagggcaccacacctgttggtgttcagatggagcggcacactagtcatcctaacagaaaagttccagccaaagaggaagctaatgctgtgcctctctgtagagcaaaaccctcccccagctatattaatcttcaagcaagttccccaccagccacttttctgaacatccagacaacaaagctgccctcggttgatcacaagcccaaggaatgcctaggactcctggaatgtatgtatgcaaacctccagcttcagacccagctcgcccaacaacagatggctgttttggaacatttacaggcatctgtgacacaactggctcctgggaggggaagcaataactcttctctcccagccttatctcctaatccattgttaaatcacctgccccaattcagtaaatgaattgtggaacaaa

SEQ ID NO: 195758 - DNA, 512 bp, Homo sapiens
  Payload ID: 18634
  Gene Name: TSSK6 activating co-chaperone
  Uniprot ID: Q96A04
  ENST ID: ENST00000368253
  CDS Start-End: 127-504
ggcgcaggcgccaaggctctggcagttggccagcacaccactacgcatgtgtgtcaactctagggttgggtgctggggttgcggctttcggttaacaccgcaggcaccacacctgttggtgttcagatggagcggcacactagtcatcctaacagaaaagttccagccaaagaggaagctaatgctgtgcctctctgtagagcaaaaccctcccccagctatattaatcttcaagcaagttccccaccagccacttttctgaacatccagacaacaaagctgccctcggttgatcacaagcccaaggaatgcctaggactcctggaatgtatgtatgcaaacctccagcttcagacccagctcgcccaacaacagatggctgttttggaacatttacaggcatctgtgacacaactggctcctgggaggggaagcaataactcttctctcccagccttatctcctaatccattgttaaatcacctgccccaattcagtaaatgaattgtgga

SEQ ID NO: 195759 - DNA, 598 bp, Homo sapiens
  Payload ID: 18634
  Gene Name: TSSK6 activating co-chaperone
  Uniprot ID: Q96A04
  ENST ID: ENST00000368254
  CDS Start-End: 208-585
ggcagttggccagcacaccactacgcatgtgtgtcaactctagggttgggtgctggggttgcggctttcggttaacaccgcagattggaacaggctgagatctgctggagacaacttaggaaattatcatagtgaaaatactaacatggattgttgatcatctgatgctatgattctttcccaggcaccacacctgttggtgttcagatggagcggcacactagtcatcctaacagaaaagttccagccaaagaggaagctaatgctgtgcctctctgtagagcaaaaccctcccccagctatattaatcttcaagcaagttccccaccagccacttttctgaacatccagacaacaaagctgccctcggttgatcacaagcccaaggaatgcctaggactcctggaatgtatgtatgcaaacctccagcttcagacccagctcgcccaacaacagatggctgttttggaacatttacaggcatctgtgacacaactggctcctgggaggggaagcaataactcttctctcccagccttatctcctaatccattgttaaatcacctgccccaattcagtaaatgaattgtggaacaaa

SEQ ID NO: 195760 - DNA, 751 bp, Homo sapiens
  Payload ID: 18634
  Gene Name: TSSK6 activating co-chaperone
  Uniprot ID: Q96A04
  ENST ID: ENST00000368255
  CDS Start-End: 361-738
aggaggatcgcttgaacctgggaggcagaggttgcagtgaacagagatcgcgccactgcaacccagcctgggtgacagagcgagactttgtctcaaaatataaaaagaaaaaaaataagggatcttccaaaaggaaaaggtgaccagtcgagaaatctgggaaaacccaactggttagtgggaaagagtacaacgccggggacacggagggaacgattacatctaagatcagtgagattggaacaggctgagatctgctggagacaacttaggaaattatcatagtgaaaatactaacatggattgttgatcatctgatgctatgattctttcccaggcaccacacctgttggtgttcagatggagcggcacactagtcatcctaacagaaaagttccagccaaagaggaagctaatgctgtgcctctctgtagagcaaaaccctcccccagctatattaatcttcaagcaagttccccaccagccacttttctgaacatccagacaacaaagctgccctcggttgatcacaagcccaaggaatgcctaggactcctggaatgtatgtatgcaaacctccagcttcagacccagctcgcccaacaacagatggctgttttggaacatttacaggcatctgtgacacaactggctcctgggaggggaagcaataactcttctctcccagccttatctcctaatccattgttaaatcacctgccccaattcagtaaatgaattgtggaacaaa

SEQ ID NO: 195761 - DNA, 741 bp, Homo sapiens
  Payload ID: 18634
  Gene Name: TSSK6 activating co-chaperone
  ENST ID: ENST00000481479
  CDS Start-End: 362-664
tgcgactcggctcctatcggaccgtgaaggctaagaaaggcttcacagttcccactcttttggtctagccttagcaacaggtggactagagaggcgggactccagccagcacatgggggaaagacctgccggcttggcgcagggtgaagtgggagttgtagtcttaccgggccggactgcgcagcctttttccgggcacactgggagttgtggtttatcgcctctggactaatggctattggaacaggctgagatctgctggagacaacttaggaaattatcatagtgaaaatactaacatggattgttgatcatctgatgctatgattctttcccaggcaccacacctgttggtgttcagatggagcggcacactagtcatcctaacagaaaagttccagccaaagaggaagctaatgctgtgcctctctgtagagcaaaaccctcccccagctatattaatcttcaagcaagttccccaccagccacttttctgaacatccagacaacaaagctgccctcggcccaaggaatgcctaggactcctggaatgtatgtatgcaaacctccagcttcagacccagctcgcccaacaacagatggctgttttggaacatttacaggcatctgtgacacaactggctcctgggaggggaagcaataactcttctctcccagccttatctcctaatccattgttaaatcacctgccccaattcagtaaatgaattgtggaacaaa

SEQ ID NO: 195762 - DNA, 477 bp, Homo sapiens
  Payload ID: 18634
  Gene Name: TSSK6 activating co-chaperone
  ENST ID: ENST00000466306
  CDS Start-End: 101-403
gtcttaccgggccggactgcgcagcctttttccgggcacactgggagttgtggtttatcgcctctggactaatggctgcaccacacctgttggtgttcagatggagcggcacactagtcatcctaacagaaaagttccagccaaagaggaagctaatgctgtgcctctctgtagagcaaaaccctcccccagctatattaatcttcaagcaagttccccaccagccacttttctgaacatccagacaacaaagctgccctcggcccaaggaatgcctaggactcctggaatgtatgtatgcaaacctccagcttcagacccagctcgcccaacaacagatggctgttttggaacatttacaggcatctgtgacacaactggctcctgggaggggaagcaataactcttctctcccagccttatctcctaatccattgttaaatcacctgccccaattcagtaaatgaattgtggaac

SEQ ID NO: 195763 - DNA, 601 bp, Homo sapiens
  Payload ID: 18634
  Gene Name: TSSK6 activating co-chaperone
  ENST ID: ENST00000470342
  CDS Start-End: 224-526
caggcgccaaggctctggcagttggccagcacaccactacgcatgtgtgtcaactctagggttgggtgctggggttgcggctttcggttaacaccgcagattggaacaggctgagatctgctggagacaacttaggaaattatcatagtgaaaatactaacatggattgttgatcatctgatgctatgattctttcccaggcaccacacctgttggtgttcagatggagcggcacactagtcatcctaacagaaaagttccagccaaagaggaagctaatgctgtgcctctctgtagagcaaaaccctcccccagctatattaatcttcaagcaagttccccaccagccacttttctgaacatccagacaacaaagctgccctcggcccaaggaatgcctaggactcctggaatgtatgtatgcaaacctccagcttcagacccagctcgcccaacaacagatggctgttttggaacatttacaggcatctgtgacacaactggctcctgggaggggaagcaataactcttctctcccagccttatctcctaatccattgttaaatcacctgccccaattcagtaaatgaattgtggaaca

SEQ ID NO: 195764 - DNA, 2712 bp, Homo sapiens
  Payload ID: 18635
  Gene Name: tsukushi, small leucine rich proteoglycan
  Uniprot ID: Q8WUA8
  ENST ID: ENST00000333090
  CDS Start-End: 175-1236
cccgcggccggcccgagccgccacccggcgcccggcaggggggagcctggctgcgggcggggaccggggggcgggccgcgccgcgcggagaaaagcgctggccggagggcccgcggccgggccgccggggtgagcgtgccgaggcggctgtggcgcaggcttccagcccccaccatgccgtggcccctgctgctgctgctggccgtgagtggggcccagacaacccggccatgcttccccgggtgccaatgcgaggtggagaccttcggccttttcgacagcttcagcctgactcgggtggattgtagcggcctgggcccccacatcatgccggtgcccatccctctggacacagcccacttggacctgtcctccaaccggctggagatggtgaatgagtcggtgttggcggggccgggctacacgacgttggctggcctggatctcagccacaacctgctcaccagcatctcacccactgccttctcccgccttcgctacctggagtcgcttgacctcagccacaatggcctgacagccctgccagccgagagcttcaccagctcacccctgagcgacgtgaaccttagccacaaccagctccgggaggtctcagtgtctgccttcacgacgcacagtcagggccgggcactacacgtggacctctcccacaacctcattcaccgcctcgtgccccaccccacgagggccggcctgcctgcgcccaccattcagagcctgaacctggcctggaaccggctccatgccgtgcccaacctccgagacttgcccctgcgctacctgagcctggatgggaaccctctagctgtcattggtccgggtgccttcgcggggctgggaggccttacacacctgtctctggccagcctgcagaggctccctgagctggcgcccagtggcttccgtgagctaccgggcctgcaggtcctggacctgtcgggcaaccccaagcttaactgggcaggagctgaggtgttttcaggcctgagctccctgcaggagctggacctttcgggcaccaacctggtgcccctgcctgaggcgctgctcctccacctcccggcactgcagagcgtcagcgtgggccaggatgtgcggtgccggcgcctggtgcgggagggcacctacccccggaggcctggctccagccccaaggtggccctgcactgcgtagacacccgggattctgctgccaggggccccaccatcttgtgacaaatggtgtggcccagggccacataacagactgctgtcctgggctgcctcaggtcccgagtaacttatgttcaatgtgccaacaccagtggggagcccgcaggcctatgtggcagcgtcaccacaggagttgtgggcctaggagaggctttggacctgggagccacacctaggagcaaagtctcacccctttgtctacgttgcttccccaaaccatgagcagagggacttcgatgccaaaccagactcgggtcccctcctgcttcccttccccacttatcccccaagtgccttccctcatgcctgggccggcctgacccgcaatgggcagagggtgggtgggaccccctgctgcagggcagagttcaggtccactgggctgagtgtccccttgggcccatggcccagtcactcaggggcgagtttcttttctaacatagccctttctttgccatgaggccatgaggcccgcttcatccttttctatttccctagaaccttaatggtagaaggaattgcaaagaatcaagtccacccttctcatgtgacagatggggaaactgaggccttgagaaggaaaaaggctaatctaagttcctgcgggcagtggcatgactggagcacagcctcctgcctcccagcccggacccaatgcactttcttgtctcctctaataagccccaccctccccgcctgggctccccttgctgcccttgcctgttccccattagcacaggagtagcagcagcaggacaggcaagagcctcacaagtgggactctgggcctctgaccagctgtgcggcatgggctaagtcactctgcccttcggagcctctggaagcttagggcacattggttccagcctagccagtttctcaccctgggttggggtcccccagcatccagactggaaacctacccattttcccctgagcatcctctagatgctgccccaaggagttgctgcagttctggagcctcatctggctgggatctccaaggggcctcctggattcagtccccactggccctgagcacgacagcccttcttaccctcccaggaatgccgtgaaaggagacaaggtctgcccgacccatgtctatgctctacccccagggtagcatctcagcttccgaaccctgggctgtttccttagtcttcattttataaaagttgttgcctttttaacggagtgtcactttcaaccggcctcccctacccctgctggccggggatggagacatgtcatttgtaaaagcagaaaaaggttgcatttgttcacttttgtaatattgtcctgggcctgtgttggggtgttgggggaagctgggcatcagtggccacatgggcatcaggggctggccccacagagaccccacagggcagtgagctctgtcttcccccacctgcctagcccatcatctatctaaccggtccttgatttaataaacactataaaaagttctttgcttta

SEQ ID NO: 195765 - DNA, 3554 bp, Homo sapiens
  Payload ID: 18635
  Gene Name: tsukushi, small leucine rich proteoglycan
  Uniprot ID: Q8WUA8
  ENST ID: ENST00000527881
  CDS Start-End: 1027-2088
gtacacagaagtcaagaattgaggtttgggaacctctgcctagatttcagaagatgtatggaaacacctggatgcccaggcaaaagtttgctgcaggggtgggaccctcatggagaacctctgctagggcagtgcagaaaggaaatgtggggttggagtagagtccctactggggcaccgcctagtggagctgtgagaagaggggcaccatcctctagaccgcagaatggcagatccactaacagcttgcactgtgcacctggaaaagctgcagacactcaacgccagtccgtgaaagcagccagaaaggaggctgcaccctgcaaagccacgggggtggagctgcccaagactgtgggaacccacctcttgcatcagcatgactcagatatgcgggacatggagtcaaaggagatcattttggaactttaataagatttgactgccctgctggattttgaacttgcctggggcctgtagcccctttgttttggctaatttcttccatgtggaacagctgtatttacccaatgcctgtacccccactgtatctaggaagtaactaacttgcttttgattttacaggctcgtaggtggaagggacttgtctcagatgagacattggactgtggacttttgggttaatactgaaatgagttaagactttgggggactgttgggaaggcatgattggttttgaaatgtgagaacatgagatttgggagggaccaggggtggaatgatatggtttagctgtgcccgcacccaaatctcaacttgaattgtatctcccagtattcccatgtgttgtgggagggacccagtgggaggtaattgaatcatggggccagtctttcccgagctattctcgtgatagtgaataagtctcacaagatctgatgggtttatcaggggcttcagcttttgcttcctcctcattctctcttgccgccgccatgtaagaagtgccttttgccttccaccatgattgttagaccttccacagccacgtggaattcccccaccatgccgtggcccctgctgctgctgctggccgtgagtggggcccagacaacccggccatgcttccccgggtgccaatgcgaggtggagaccttcggccttttcgacagcttcagcctgactcgggtggattgtagcggcctgggcccccacatcatgccggtgcccatccctctggacacagcccacttggacctgtcctccaaccggctggagatggtgaatgagtcggtgttggcggggccgggctacacgacgttggctggcctggatctcagccacaacctgctcaccagcatctcacccactgccttctcccgccttcgctacctggagtcgcttgacctcagccacaatggcctgacagccctgccagccgagagcttcaccagctcacccctgagcgacgtgaaccttagccacaaccagctccgggaggtctcagtgtctgccttcacgacgcacagtcagggccgggcactacacgtggacctctcccacaacctcattcaccgcctcgtgccccaccccacgagggccggcctgcctgcgcccaccattcagagcctgaacctggcctggaaccggctccatgccgtgcccaacctccgagacttgcccctgcgctacctgagcctggatgggaaccctctagctgtcattggtccgggtgccttcgcggggctgggaggccttacacacctgtctctggccagcctgcagaggctccctgagctggcgcccagtggcttccgtgagctaccgggcctgcaggtcctggacctgtcgggcaaccccaagcttaactgggcaggagctgaggtgttttcaggcctgagctccctgcaggagctggacctttcgggcaccaacctggtgcccctgcctgaggcgctgctcctccacctcccggcactgcagagcgtcagcgtgggccaggatgtgcggtgccggcgcctggtgcgggagggcacctacccccggaggcctggctccagccccaaggtggccctgcactgcgtagacacccgggattctgctgccaggggccccaccatcttgtgacaaatggtgtggcccagggccacataacagactgctgtcctgggctgcctcaggtcccgagtaacttatgttcaatgtgccaacaccagtggggagcccgcaggcctatgtggcagcgtcaccacaggagttgtgggcctaggagaggctttggacctgggagccacacctaggagcaaagtctcacccctttgtctacgttgcttccccaaaccatgagcagagggacttcgatgccaaaccagactcgggtcccctcctgcttcccttccccacttatcccccaagtgccttccctcatgcctgggccggcctgacccgcaatgggcagagggtgggtgggaccccctgctgcagggcagagttcaggtccactgggctgagtgtccccttgggcccatggcccagtcactcaggggcgagtttcttttctaacatagccctttctttgccatgaggccatgaggcccgcttcatccttttctatttccctagaaccttaatggtagaaggaattgcaaagaatcaagtccacccttctcatgtgacagatggggaaactgaggccttgagaaggaaaaaggctaatctaagttcctgcgggcagtggcatgactggagcacagcctcctgcctcccagcccggacccaatgcactttcttgtctcctctaataagccccaccctccccgcctgggctccccttgctgcccttgcctgttccccattagcacaggagtagcagcagcaggacaggcaagagcctcacaagtgggactctgggcctctgaccagctgtgcggcatgggctaagtcactctgcccttcggagcctctggaagcttagggcacattggttccagcctagccagtttctcaccctgggttggggtcccccagcatccagactggaaacctacccattttcccctgagcatcctctagatgctgccccaaggagttgctgcagttctggagcctcatctggctgggatctccaaggggcctcctggattcagtccccactggccctgagcacgacagcccttcttaccctcccaggaatgccgtgaaaggagacaaggtctgcccgacccatgtctatgctctacccccagggtagcatctcagcttccgaaccctgggctgtttccttagtcttcattttataaaagttgttgcctttttaacggagtgtcactttcaaccggcctcccctacccctgctggccggggatggagacatgtcatttgtaaaagcagaaaaaggttgcatttgttcacttttgtaatattgtcctgggcctgtgttggggtgttgggggaagctgggcatcagtggccacatgggcatcaggggctggccccacagagaccccacagggcagtgagctctgtcttcccccacctgcctagcccatcatctatctaaccggtccttgatttaataaacactataaaaagtt

SEQ ID NO: 195766 - DNA, 542 bp, Homo sapiens
  Payload ID: 18635
  Gene Name: tsukushi, small leucine rich proteoglycan
  ENST ID: ENST00000525167
  CDS Start-End: 227-542
agaccccggctgggaggaagaggcgagcggtgggtcccaggctccggccctgggctggggagaggaagggacagggcggctggcgttgccctccccgcgcttcttggaaagagtgtgatccagagttgcgtctgtttggtagggagacaggctccgctttgagacccactctccgtttgcagcccgcccccggggtagggggccaaccctcggacccgcccccaccatgccgtggcccctgctgctgctgctggccgtgagtggggcccagacaacccggccatgcttccccgggtgccaatgcgaggtggagaccttcggccttttcgacagcttcagcctgactcgggtggattgtagcggcctgggcccccacatcatgccggtgcccatccctctggacacagcccacttggacctgtcctccaaccggctggagatggtgaatgagtcggtgttggcggggccgggctacacgacgttggctggcctggatctcagccacaacctgctcaccagcatctcacccactgccttctccc

SEQ ID NO: 195767 - DNA, 643 bp, Homo sapiens
  Payload ID: 18635
  Gene Name: tsukushi, small leucine rich proteoglycan
  ENST ID: ENST00000533752
  CDS Start-End: 192-643
aataaggaaagaagcagcaagcagactgggtgtgttaacaagtctgggccactgcaggaggtacattgcccaatttctgcaccccgaggccctccaaagtctaggagaagctcctgggaggtccagggcccaagaccaaagcctctatcaactctcccacctgtgaactgcccctctcccaagcccccaccatgccgtggcccctgctgctgctgctggccgtgagtggggcccagacaacccggccatgcttccccgggtgccaatgcgaggtggagaccttcggccttttcgacagcttcagcctgactcgggtggattgtagcggcctgggcccccacatcatgccggtgcccatccctctggacacagcccacttggacctgtcctccaaccggctggagatggtgaatgagtcggtgttggcggggccgggctacacgacgttggctggcctggatctcagccacaacctgctcaccagcatctcacccactgccttctcccgccttcgctacctggagtcgcttgacctcagccacaatggcctgacagccctgccagccgagagcttcaccagctcacccctgagcgacgtgaaccttagccacaaccagctccgggaggtctcagtgtctgcctt

SEQ ID NO: 195768 - DNA, 2666 bp, Homo sapiens
  Payload ID: 18635
  Gene Name: tsukushi, small leucine rich proteoglycan
  Uniprot ID: Q8WUA8
  ENST ID: ENST00000612930
  CDS Start-End: 130-1191
acattgcccaatttctgcaccccgaggccctccaaagtctaggagaagctcctgggaggtccagggcccaagaccaaagcctctatcaactctcccacctgtgaactgcccctctcccaagcccccaccatgccgtggcccctgctgctgctgctggccgtgagtggggcccagacaacccggccatgcttccccgggtgccaatgcgaggtggagaccttcggccttttcgacagcttcagcctgactcgggtggattgtagcggcctgggcccccacatcatgccggtgcccatccctctggacacagcccacttggacctgtcctccaaccggctggagatggtgaatgagtcggtgttggcggggccgggctacacgacgttggctggcctggatctcagccacaacctgctcaccagcatctcacccactgccttctcccgccttcgctacctggagtcgcttgacctcagccacaatggcctgacagccctgccagccgagagcttcaccagctcacccctgagcgacgtgaaccttagccacaaccagctccgggaggtctcagtgtctgccttcacgacgcacagtcagggccgggcactacacgtggacctctcccacaacctcattcaccgcctcgtgccccaccccacgagggccggcctgcctgcgcccaccattcagagcctgaacctggcctggaaccggctccatgccgtgcccaacctccgagacttgcccctgcgctacctgagcctggatgggaaccctctagctgtcattggtccgggtgccttcgcggggctgggaggccttacacacctgtctctggccagcctgcagaggctccctgagctggcgcccagtggcttccgtgagctaccgggcctgcaggtcctggacctgtcgggcaaccccaagcttaactgggcaggagctgaggtgttttcaggcctgagctccctgcaggagctggacctttcgggcaccaacctggtgcccctgcctgaggcgctgctcctccacctcccggcactgcagagcgtcagcgtgggccaggatgtgcggtgccggcgcctggtgcgggagggcacctacccccggaggcctggctccagccccaaggtggccctgcactgcgtagacacccgggattctgctgccaggggccccaccatcttgtgacaaatggtgtggcccagggccacataacagactgctgtcctgggctgcctcaggtcccgagtaacttatgttcaatgtgccaacaccagtggggagcccgcaggcctatgtggcagcgtcaccacaggagttgtgggcctaggagaggctttggacctgggagccacacctaggagcaaagtctcacccctttgtctacgttgcttccccaaaccatgagcagagggacttcgatgccaaaccagactcgggtcccctcctgcttcccttccccacttatcccccaagtgccttccctcatgcctgggccggcctgacccgcaatgggcagagggtgggtgggaccccctgctgcagggcagagttcaggtccactgggctgagtgtccccttgggcccatggcccagtcactcaggggcgagtttcttttctaacatagccctttctttgccatgaggccatgaggcccgcttcatccttttctatttccctagaaccttaatggtagaaggaattgcaaagaatcaagtccacccttctcatgtgacagatggggaaactgaggccttgagaaggaaaaaggctaatctaagttcctgcgggcagtggcatgactggagcacagcctcctgcctcccagcccggacccaatgcactttcttgtctcctctaataagccccaccctccccgcctgggctccccttgctgcccttgcctgttccccattagcacaggagtagcagcagcaggacaggcaagagcctcacaagtgggactctgggcctctgaccagctgtgcggcatgggctaagtcactctgcccttcggagcctctggaagcttagggcacattggttccagcctagccagtttctcaccctgggttggggtcccccagcatccagactggaaacctacccattttcccctgagcatcctctagatgctgccccaaggagttgctgcagttctggagcctcatctggctgggatctccaaggggcctcctggattcagtccccactggccctgagcacgacagcccttcttaccctcccaggaatgccgtgaaaggagacaaggtctgcccgacccatgtctatgctctacccccagggtagcatctcagcttccgaaccctgggctgtttccttagtcttcattttataaaagttgttgcctttttaacggagtgtcactttcaaccggcctcccctacccctgctggccggggatggagacatgtcatttgtaaaagcagaaaaaggttgcatttgttcacttttgtaatattgtcctgggcctgtgttggggtgttgggggaagctgggcatcagtggccacatgggcatcaggggctggccccacagagaccccacagggcagtgagctctgtcttcccccacctgcctagcccatcatctatctaaccggtccttgatttaataaacactataaaaagttctttgcttt

SEQ ID NO: 195769 - DNA, 3477 bp, Homo sapiens
  Payload ID: 18636
  Gene Name: TTK protein kinase
  Uniprot ID: P33981
  ENST ID: ENST00000230510
  CDS Start-End: 582-3152
aaaaagcactgaaattcttgagctggcggcagggctgaacgtagctcagtgaaagatcctttcttgccacatcctctctaagccaggctgtgagaaccgcgggaaacgaaggagaagggtggcggtggggtcagtaaagggccggcccaaggtgcatcttttaggtcctgatgctaggagcagccgtccctgcccctatattcctctcactgggtaggtttgctcgggagtggctacctcccaggcaaaaattcggcctggttaaactggaaagaccaggaaagcccgcccacgggcgtccggggaacgcctgcaaagtgccagcaccctaccaacccaggcgccgcacgggtggggtcgcggccgcaggctcttccggggcgggcctagcctgacgcaggaggaggggcggcccccgtcgcacaagaaccaatcacgactgtcgcttctacgtggctagcattgaccaataggagaccgtagtgatagcgacggggaaattcaaacgtgtttgcggaaaggagtttgggttccatcttttcatttccccagcgcagctttctgtagtttttttcttagaaatggaatccgaggatttaagtggcagagaattgacaattgattccataatgaacaaagtgagagacattaaaaataagtttaaaaatgaagaccttactgatgaactaagcttgaataaaatttctgctgatactacagataactcgggaactgttaaccaaattatgatgatggcaaacaacccagaggactggttgagtttgttgctcaaactagagaaaaacagtgttccgctaagtgatgctcttttaaataaattgattggtcgttacagtcaagcaattgaagcgcttcccccagataaatatggccaaaatgagagttttgctagaattcaagtgagatttgctgaattaaaagctattcaagagccagatgatgcacgtgactactttcaaatggccagagcaaactgcaagaaatttgcttttgttcatatatcttttgcacaatttgaactgtcacaaggtaatgtcaaaaaaagtaaacaacttcttcaaaaagctgtagaacgtggagcagtaccactagaaatgctggaaattgccctgcggaatttaaacctccaaaaaaagcagctgctttcagaggaggaaaagaagaatttatcagcatctacggtattaactgcccaagaatcattttccggttcacttgggcatttacagaataggaacaacagttgtgattccagaggacagactactaaagccaggtttttatatggagagaacatgccaccacaagatgcagaaataggttaccggaattcattgagacaaactaacaaaactaaacagtcatgcccatttggaagagtcccagttaaccttctaaatagcccagattgtgatgtgaagacagatgattcagttgtaccttgttttatgaaaagacaaacctctagatcagaatgccgagatttggttgtgcctggatctaaaccaagtggaaatgattcctgtgaattaagaaatttaaagtctgttcaaaatagtcatttcaaggaacctctggtgtcagatgaaaagagttctgaacttattattactgattcaataaccctgaagaataaaacggaatcaagtcttctagctaaattagaagaaactaaagagtatcaagaaccagaggttccagagagtaaccagaaacagtggcaatctaagagaaagtcagagtgtattaaccagaatcctgctgcatcttcaaatcactggcagattccggagttagcccgaaaagttaatacagagaaacataccacttttgagcaacctgtcttttcagtttcaaaacagtcaccaccaatatcaacatctaaatggtttgacccaaaatctatttgtaagacaccaagcagcaataccttggatgattacatgagctgttttagaactccagttgtaaagaatgactttccacctgcttgtcagttgtcaacaccttatggccaacctgcctgtttccagcagcaacagcatcaaatacttgccactccacttcaaaatttacaggttttagcatcttcttcagcaaatgaatgcatttcggttaaaggaagaatttattccatattaaagcagataggaagtggaggttcaagcaaggtatttcaggtgttaaatgaaaagaaacagatatatgctataaaatatgtgaacttagaagaagcagataaccaaactcttgatagttaccggaacgaaatagcttatttgaataaactacaacaacacagtgataagatcatccgactttatgattatgaaatcacggaccagtacatctacatggtaatggagtgtggaaatattgatcttaatagttggcttaaaaagaaaaaatccattgatccatgggaacgcaagagttactggaaaaatatgttagaggcagttcacacaatccatcaacatggcattgttcacagtgatcttaaaccagctaactttctgatagttgatggaatgctaaagctaattgattttgggattgcaaaccaaatgcaaccagatacaacaagtgttgttaaagattctcaggttggcacagttaattatatgccaccagaagcaatcaaagatatgtcttcctccagagagaatgggaaatctaagtcaaagataagccccaaaagtgatgtttggtccttaggatgtattttgtactatatgacttacgggaaaacaccatttcagcagataattaatcagatttctaaattacatgccataattgatcctaatcatgaaattgaatttcccgatattccagagaaagatcttcaagatgtgttaaagtgttgtttaaaaagggacccaaaacagaggatatccattcctgagctcctggctcatccatatgttcaaattcaaactcatccagttaaccaaatggccaagggaaccactgaagaaatgaaatatgttctgggccaacttgttggtctgaattctcctaactccattttgaaagctgctaaaactttatatgaacactatagtggtggtgaaagtcataattcttcatcctccaagacttttgaaaaaaaaaggggaaaaaaatgatttgcagttattcgtaatgtcagataccacctataaaatatattggactgttatactcttgaatccctgtggaaatctacatttgaagacaacatcactctgaagtgttatcagcaaaaaaaattcagtagattatctttaaaagaaaactgtaaaaatagcaaccacttatggcactgtatatattgtagacttgttttctctgttttatgctcttgtgtaatctacttgacatcattttactcttggaatagtgggtggatagcaagtatattctaaaaaactttgtaaataaagttttgtggctaaaatgacactaacattt

SEQ ID NO: 195770 - DNA, 3010 bp, Homo sapiens
  Payload ID: 18636
  Gene Name: TTK protein kinase
  Uniprot ID: P33981
  ENST ID: ENST00000369798
  CDS Start-End: 112-2685
agcattgaccaataggagaccgtagtgatagcgacggggaaattcaaacgtgtttgcggaaaggagtttgggttccatcttttcatttccccagcgcagctttctgtagaaatggaatccgaggatttaagtggcagagaattgacaattgattccataatgaacaaagtgagagacattaaaaataagtttaaaaatgaagaccttactgatgaactaagcttgaataaaatttctgctgatactacagataactcgggaactgttaaccaaattatgatgatggcaaacaacccagaggactggttgagtttgttgctcaaactagagaaaaacagtgttccgctaagtgatgctcttttaaataaattgattggtcgttacagtcaagcaattgaagcgcttcccccagataaatatggccaaaatgagagttttgctagaattcaagtgagatttgctgaattaaaagctattcaagagccagatgatgcacgtgactactttcaaatggccagagcaaactgcaagaaatttgcttttgttcatatatcttttgcacaatttgaactgtcacaaggtaatgtcaaaaaaagtaaacaacttcttcaaaaagctgtagaacgtggagcagtaccactagaaatgctggaaattgccctgcggaatttaaacctccaaaaaaagcagctgctttcagaggaggaaaagaagaatttatcagcatctacggtattaactgcccaagaatcattttccggttcacttgggcatttacagaataggaacaacagttgtgattccagaggacagactactaaagccaggtttttatatggagagaacatgccaccacaagatgcagaaataggttaccggaattcattgagacaaactaacaaaactaaacagtcatgcccatttggaagagtcccagttaaccttctaaatagcccagattgtgatgtgaagacagatgattcagttgtaccttgttttatgaaaagacaaacctctagatcagaatgccgagatttggttgtgcctggatctaaaccaagtggaaatgattcctgtgaattaagaaatttaaagtctgttcaaaatagtcatttcaaggaacctctggtgtcagatgaaaagagttctgaacttattattactgattcaataaccctgaagaataaaacggaatcaagtcttctagctaaattagaagaaactaaagagtatcaagaaccagaggttccagagagtaaccagaaacagtggcaatctaagagaaagtcagagtgtattaaccagaatcctgctgcatcttcaaatcactggcagattccggagttagcccgaaaagttaatacagagcagaaacataccacttttgagcaacctgtcttttcagtttcaaaacagtcaccaccaatatcaacatctaaatggtttgacccaaaatctatttgtaagacaccaagcagcaataccttggatgattacatgagctgttttagaactccagttgtaaagaatgactttccacctgcttgtcagttgtcaacaccttatggccaacctgcctgtttccagcagcaacagcatcaaatacttgccactccacttcaaaatttacaggttttagcatcttcttcagcaaatgaatgcatttcggttaaaggaagaatttattccatattaaagcagataggaagtggaggttcaagcaaggtatttcaggtgttaaatgaaaagaaacagatatatgctataaaatatgtgaacttagaagaagcagataaccaaactcttgatagttaccggaacgaaatagcttatttgaataaactacaacaacacagtgataagatcatccgactttatgattatgaaatcacggaccagtacatctacatggtaatggagtgtggaaatattgatcttaatagttggcttaaaaagaaaaaatccattgatccatgggaacgcaagagttactggaaaaatatgttagaggcagttcacacaatccatcaacatggcattgttcacagtgatcttaaaccagctaactttctgatagttgatggaatgctaaagctaattgattttgggattgcaaaccaaatgcaaccagatacaacaagtgttgttaaagattctcaggttggcacagttaattatatgccaccagaagcaatcaaagatatgtcttcctccagagagaatgggaaatctaagtcaaagataagccccaaaagtgatgtttggtccttaggatgtattttgtactatatgacttacgggaaaacaccatttcagcagataattaatcagatttctaaattacatgccataattgatcctaatcatgaaattgaatttcccgatattccagagaaagatcttcaagatgtgttaaagtgttgtttaaaaagggacccaaaacagaggatatccattcctgagctcctggctcatccatatgttcaaattcaaactcatccagttaaccaaatggccaagggaaccactgaagaaatgaaatatgttctgggccaacttgttggtctgaattctcctaactccattttgaaagctgctaaaactttatatgaacactatagtggtggtgaaagtcataattcttcatcctccaagacttttgaaaaaaaaaggggaaaaaaatgatttgcagttattcgtaatgtcagataccacctataaaatatattggactgttatactcttgaatccctgtggaaatctacatttgaagacaacatcactctgaagtgttatcagcaaaaaaaattcagtagattatctttaaaagaaaactgtaaaaatagcaaccacttatggcactgtatatattgtagacttgttttctctgttttatgctcttgtgtaatctacttgacatcattttactcttggaatagtgggtggatagcaagtatattctaaaaaactttgtaaataaagttttgtggctaaaatgacactaacattt

SEQ ID NO: 195771 - DNA, 530 bp, Homo sapiens
  Payload ID: 18636
  Gene Name: TTK protein kinase
  ENST ID: ENST00000509313
  CDS Start-End: 67-306
aaacgtgtttgcggaaaggagtttgggttccatcttttcatttccccagcgcagctttctgtagaaatggaatccgaggatttaagtggcagagaattgacaattgattccataatgaacaaagtgagagacattaaaaataagtttaaaaatgaagaccttactgatgaactaagcttgaataaaatttctgctgatactacagaatgcaggctacatgatggcagggtttttgtctgttatatccacagaactttgaatggtgtctggcacatgataactcgggaactgttaaccaaattatgatgatggcaaacaacccagaggactggttgagtttgttgctcaaactagagaaaaacagtgttccgctaagtgatgctcttttaaataaattgattggtcgttacagtcaagcaattgaagcgcttcccccagataaatatggccaaaatgagagttttgctagaattcaagtgagatttgctgaattaaaagctattcaagagccagatgatgcacgtgactac

SEQ ID NO: 195772 - DNA, 549 bp, Homo sapiens
  Payload ID: 18636
  Gene Name: TTK protein kinase
  ENST ID: ENST00000511260
  CDS Start-End: 98-549
atgcgacgcggctaaacgagctggagggggaggggatgtctcactgcctcagcgggtctggccggtggggtgatgcaggaggttttgttgaggaaaaatggaatccgaggatttaagtggcagagaattgacaattgattccataatgaacaaagtgagagacattaaaaataagtttaaaaatgaagaccttactgatgaactaagcttgaataaaatttctgctgatactacagataactcgggaactgttaaccaaattatgatgatggcaaacaacccagaggactggttgagtttgttgctcaaactagagaaaaacagtgttccgctaagtgatgctcttttaaataaattgattggtcgttacagtcaagcaattgaagcgcttcccccagataaatatggccaaaatgagagttttgctagaattcaagtgagatttgctgaattaaaagctattcaagagccagatgatgcacgtgactactttcaaatggccagagcaaactgcaagaaatttgcttttgttcatatatcttttgcaca

SEQ ID NO: 195773 - DNA, 3725 bp, Homo sapiens
  Payload ID: 18636
  Gene Name: TTK protein kinase
  Uniprot ID: P33981
  ENST ID: ENST00000509894
  CDS Start-End: 830-3400
accacaaagccacttagcggcagagcctcgcacccgcgaagattattactagggagatgtttttacccctgaggacacctgagcccttaagtggggcaggcttcgagggaggggggccgataaggcgacttcagacagggcaatcacgatgggcgcttgagttctgcgcagaattttgacaagggggagggtcttggcttgaagacagagcgtggagtcatttaaggataatggaagggcataagcagaagctcaaggataaaaagcactgaaattcttgagctggcggcagggctgaacgtagctcagtgaaagatcctttcttgccacatcctctctaagccaggctgtgagaaccgcgggaaacgaaggagaagggtggcggtggggtcagtaaagggccggcccaaggtgcatcttttaggtcctgatgctaggagcagccgtccctgcccctatattcctctcactgggtaggtttgctcgggagtggctacctcccaggcaaaaattcggcctggttaaactggaaagaccaggaaagcccgcccacgggcgtccggggaacgcctgcaaagtgccagcaccctaccaacccaggcgccgcacgggtggggtcgcggccgcaggctcttccggggcgggcctagcctgacgcaggaggaggggcggcccccgtcgcacaagaaccaatcacgactgtcgcttctacgtggctagcattgaccaataggagaccgtagtgatagcgacggggaaattcaaacgtgtttgcggaaaggagtttgggttccatcttttcatttccccagcgcagctttctgtagaaatggaatccgaggatttaagtggcagagaattgacaattgattccataatgaacaaagtgagagacattaaaaataagtttaaaaatgaagaccttactgatgaactaagcttgaataaaatttctgctgatactacagataactcgggaactgttaaccaaattatgatgatggcaaacaacccagaggactggttgagtttgttgctcaaactagagaaaaacagtgttccgctaagtgatgctcttttaaataaattgattggtcgttacagtcaagcaattgaagcgcttcccccagataaatatggccaaaatgagagttttgctagaattcaagtgagatttgctgaattaaaagctattcaagagccagatgatgcacgtgactactttcaaatggccagagcaaactgcaagaaatttgcttttgttcatatatcttttgcacaatttgaactgtcacaaggtaatgtcaaaaaaagtaaacaacttcttcaaaaagctgtagaacgtggagcagtaccactagaaatgctggaaattgccctgcggaatttaaacctccaaaaaaagcagctgctttcagaggaggaaaagaagaatttatcagcatctacggtattaactgcccaagaatcattttccggttcacttgggcatttacagaataggaacaacagttgtgattccagaggacagactactaaagccaggtttttatatggagagaacatgccaccacaagatgcagaaataggttaccggaattcattgagacaaactaacaaaactaaacagtcatgcccatttggaagagtcccagttaaccttctaaatagcccagattgtgatgtgaagacagatgattcagttgtaccttgttttatgaaaagacaaacctctagatcagaatgccgagatttggttgtgcctggatctaaaccaagtggaaatgattcctgtgaattaagaaatttaaagtctgttcaaaatagtcatttcaaggaacctctggtgtcagatgaaaagagttctgaacttattattactgattcaataaccctgaagaataaaacggaatcaagtcttctagctaaattagaagaaactaaagagtatcaagaaccagaggttccagagagtaaccagaaacagtggcaatctaagagaaagtcagagtgtattaaccagaatcctgctgcatcttcaaatcactggcagattccggagttagcccgaaaagttaatacagagaaacataccacttttgagcaacctgtcttttcagtttcaaaacagtcaccaccaatatcaacatctaaatggtttgacccaaaatctatttgtaagacaccaagcagcaataccttggatgattacatgagctgttttagaactccagttgtaaagaatgactttccacctgcttgtcagttgtcaacaccttatggccaacctgcctgtttccagcagcaacagcatcaaatacttgccactccacttcaaaatttacaggttttagcatcttcttcagcaaatgaatgcatttcggttaaaggaagaatttattccatattaaagcagataggaagtggaggttcaagcaaggtatttcaggtgttaaatgaaaagaaacagatatatgctataaaatatgtgaacttagaagaagcagataaccaaactcttgatagttaccggaacgaaatagcttatttgaataaactacaacaacacagtgataagatcatccgactttatgattatgaaatcacggaccagtacatctacatggtaatggagtgtggaaatattgatcttaatagttggcttaaaaagaaaaaatccattgatccatgggaacgcaagagttactggaaaaatatgttagaggcagttcacacaatccatcaacatggcattgttcacagtgatcttaaaccagctaactttctgatagttgatggaatgctaaagctaattgattttgggattgcaaaccaaatgcaaccagatacaacaagtgttgttaaagattctcaggttggcacagttaattatatgccaccagaagcaatcaaagatatgtcttcctccagagagaatgggaaatctaagtcaaagataagccccaaaagtgatgtttggtccttaggatgtattttgtactatatgacttacgggaaaacaccatttcagcagataattaatcagatttctaaattacatgccataattgatcctaatcatgaaattgaatttcccgatattccagagaaagatcttcaagatgtgttaaagtgttgtttaaaaagggacccaaaacagaggatatccattcctgagctcctggctcatccatatgttcaaattcaaactcatccagttaaccaaatggccaagggaaccactgaagaaatgaaatatgttctgggccaacttgttggtctgaattctcctaactccattttgaaagctgctaaaactttatatgaacactatagtggtggtgaaagtcataattcttcatcctccaagacttttgaaaaaaaaaggggaaaaaaatgatttgcagttattcgtaatgtcagataccacctataaaatatattggactgttatactcttgaatccctgtggaaatctacatttgaagacaacatcactctgaagtgttatcagcaaaaaaaattcagtagattatctttaaaagaaaactgtaaaaatagcaaccacttatggcactgtatatattgtagacttgttttctctgttttatgctcttgtgtaatctacttgacatcattttactcttggaatagtgggtggatagcaagtatattctaaaaaactttgtaaataaagttttgtggctaaaatgacactaacattt

SEQ ID NO: 195774 - DNA, 541 bp, Homo sapiens
  Payload ID: 18636
  Gene Name: TTK protein kinase
  ENST ID: ENST00000502580
  CDS Start-End: 125-541
gtaggtaagttctgtcttaccggtgcaccggcgcactgaggaacagccgcagccggtgtaggggctcattgttagcgctggtcggtgaggggtggggcgaggtgggggcagctcggagccagaaatggaatccgaggatttaagtggcagagaattgacaattgattccataatgaacaaagtgagagacattaaaaataagtttaaaaatgaagaccttactgatgaactaagcttgaataaaatttctgctgatactacagataactcgggaactgttaaccaaattatgatgatggcaaacaacccagaggactggttgagtttgttgctcaaactagagaaaaacagtgttccgctaagtgatgctcttttaaataaattgattggtcgttacagtcaagcaattgaagcgcttcccccagataaatatggccaaaatgagagttttgctagaattcaagtgagatttgctgaattaaaagctattcaagagccagatgatgcacgtgactactttcaaatggccagagcaaactgc

SEQ ID NO: 195775 - DNA, 569 bp, Homo sapiens
  Payload ID: 18636
  Gene Name: TTK protein kinase
  ENST ID: ENST00000504040
  CDS Start-End: 43-569
agttaaagtaggagttatgactgttcagtttttttcttagaaatggaatccgaggatttaagtggcagagaattgacaattgattccataatgaacaaagtgagagacattaaaaataagtttaaaaatgaagaccttactgatgaactaagcttgaataaaatttctgctgatactacagataactcgggaactgttaaccaaattatgatgatggcaaacaacccagaggactggttgagtttgttgctcaaactagagaaaaacagtgttccgctaagtgatgctcttttaaataaattgattggtcgttacagtcaagcaattgaagcgcttcccccagataaatatggccaaaatgagagttttgctagaattcaagtgagatttgctgaattaaaagctattcaagagccagatgatgcacgtgactactttcaaatggccagagcaaactgcaagaaatttgcttttgttcatatatcttttgcacaatttgaactgtcacaaggtaatgtcaaaaaaagtaaacaacttcttcaaaaagctgtagaacgtggagcagtacc

SEQ ID NO: 195776 - DNA, 240 bp, Homo sapiens
  Payload ID: 18636
  Gene Name: TTK protein kinase
  ENST ID: ENST00000627129
  CDS Start-End: 1-240
atggaatccgaggatttaagtggcagagaattgacaattgattccataatgaacaaagtgagagacattaaaaataagtttaaaaatgaagaccttactgatgaactaagcttgaataaaatttctgctgatactacagaatgcaggctacatgatggcagggtttttgtctgttatatccacagaactttgaatggtgtctggcacatgataactcgggaactgttaaccaaattatga

SEQ ID NO: 195777 - DNA, 2071 bp, Homo sapiens
  Payload ID: 18637
  Gene Name: Tu translation elongation factor, mitochondrial
  Uniprot ID: P49411
  ENST ID: ENST00000313511
  CDS Start-End: 140-1507
agacactggcggctagaggggcccggacttgccctcccagctctaacttccgccggaagtgccttccagccgcaggcgcccttcttcttctgtgcgctcgggctcctggtcccggctccccggttaccggggcgcgagtatgaccacaatggcggccgccaccctgctgcgcgcgacgccccacttcagcggtctcgccgccggccggaccttcctgctgcagggtctgttgcggctgctgaaagccccggcattgcctctcttgtgccgcggcctggccgtggaggccaagaagacttacgtgcgcgacaagccacatgtgaatgtgggtaccatcggccatgtggaccacgggaagaccacgctgactgcagccatcacgaagattctagctgagggaggtggggctaagttcaagaagtacgaggagattgacaatgccccggaggagcgagctcggggtatcaccatcaatgcggctcatgtggagtatagcactgccgcccgccactacgcccacacagactgcccgggtcatgcagattatgttaagaatatgatcacaggcactgcacccctcgacggctgcatcctggtggtagcagccaatgacggccccatgccccagacccgagagcacttattactggccagacagattggggtggagcatgtggtggtgtatgtgaacaaggctgacgctgtccaggactctgagatggtggaactggtggaactggagatccgggagctgctcaccgagtttggctataaaggggaggagaccccagtcatcgtaggctctgctctctgtgcccttgagggtcgggaccctgagttaggcctgaagtctgtgcagaagctactggatgctgtggacacttacatcccagtgcccgcccgggacctggagaagcctttcctgctgcctgtggaggcggtgtactccgtccctggccgtggcaccgtggtgacaggtacactagagcgtggcattttaaagaagggagacgagtgtgagctcctaggacatagcaagaacatccgcactgtggtgacaggcattgagatgttccacaagagcctggagagggccgaggccggagataacctcggggccctggtccgaggcttgaagcgggaggacttgcggcggggcctggtcatggtcaagccaggttccatcaagccccaccagaaggtggaggcccaggtttacatcctcagcaaggaggaaggtggccgccacaagccctttgtgtcccacttcatgcctgtcatgttctccctgacttgggacatggcctgtcggattatcctgcccccagagaaggagcttgccatgcccggggaggacctgaagttcaacctaatcttgcggcagccaatgatcttagagaaaggccagcgtttcaccctgcgagatggcaaccggactattggcaccggtctagtcaccaacacgctggccatgactgaggaggagaagaatatcaaatggggttgagtgtgcagatctctgctcagcttcccttgcgtttaaggcctgccctagccagggctccctcctgcttccagtaccctctcatggcataggctgcaacccagcagagggcagctagatggacatttcccctgctcggaagggttggcctgcctggctggggaggtcagtaaactttgaatagtaagccagcctgtgtcctgtgtcctttgtgcaaattggagaggataggggaggacaaaaagggtgttgaaccccagacagatggggagcttgtgagatcccagagcagttttaacggataaatcaagtccagtgagcttagtgattgcctagacacagtaggatgccgttattcagcctcctgggagatagtgggaaagaatgttctatcgctctggagccagcatggcttcagctcaggtgccaaacccatcttgtttcctcggaatactaagtgaatgtctagcatccattcacattctgtgggaacagggactggacaggcatacctcagatgctgtaggtttgcttccagactaccacaataaagcaggtcacaaattt

SEQ ID NO: 195778 - DNA, 966 bp, Homo sapiens
  Payload ID: 18637
  Gene Name: Tu translation elongation factor, mitochondrial
  ENST ID: ENST00000565012
  CDS Start-End: 62-367
cccttcttcttctgtgcgctcgggctcctggtcccggctccccggttaccggggcgcgagtatgaccacaatggcggccgccaccctgctgcgcgcgacgccccacttcagcggtctcgccgccggccggaccttcctgctgcagggtctgttgcggctgctgaaagccccggcattgcctctcttgtgccgcggcctggccgtggaggccaagaagacttacgtgcgcgacaagccacatgtgaatgtgggtaccatcggccatgtggaccacgggaagaccacgctgactgcagccatcacgaagaaatatgatcacaggcactgcacccctcgacggctgcatcctggtggtagcagccaatgacggccccatgccccagacccgagagcacttattactggccagacagattggggtggagcatgtggtggtgtatgtgaacaaggctgacgctgtccaggactctgagatggtggaactggtggaactggagatccgggagctgctcaccgagtttggctataaaggggaggagaccccagtcatcgtaggctctgctctctgtgcccttgagggtcgggaccctgagttaggcctgaagtctgtgcagaagctactggatgctgtggacacttacatcccagtgcccgcccgggacctggagaagcctttcctgctgcctgtggaggcggtgtactccgtccctggccgtggcaccgtggtgacaggtacactagagcgtggcattttaaagaagggagacgagtgtgagctcctaggacatagcaagaacatccgcactgtggtgacaggcattgagatgttccacaagagcctggagagggccgaggccggagataacctcggggccctggtccgaggcttgaagcgggaggacttgcggcggggcctggtcatggtcaagccaggttccatcaagccccaccagaaggtggaggccc

SEQ ID NO: 195779 - DNA, 2019 bp, Homo sapiens
  Payload ID: 18638
  Gene Name: tubby bipartite transcription factor
  Uniprot ID: P50607
  ENST ID: ENST00000299506
  CDS Start-End: 150-1670
tggcgtgcagcgcgggcctcggcggggcccagcgccccggcccgggaggatgcggcccggggcggcccgggagctgagcagggcccccgcgccggcccctccgggccccggcctccagagccgcagccaccgccccgcccccgagagacatgacttccaagccgcattccgactggattccctacagtgtcttagatgatgagggcagaaacctgaggcagcagaagcttgatcggcagcgggccctgctggagcagaagcagaagaagaagcgccaggagcccctgatggtgcaggccaatgcagatgggcggccccggagccggcgggcccggcagtcagaggaacaagcccccctggtggagtcctacctcagcagcagtggcagcaccagctaccaagttcaagaggccgactcactcgccagtgtgcagctgggagccacgcgcccaacagcaccagcttcagccaagagaaccaaggcggcagctacagcagggggccagggtggcgccgctaggaaggagaagaagggaaagcacaaaggcaccagcgggccagcagcactggcagaagacaagtctgaggcccaaggcccagtgcagattctgactgtgggccagtcagaccacgcccaggacgcaggggagacggcagctggtgggggcgaacggcccagcgggcaggatctccgtgccacgatgcagaggaagggcatctccagcagcatgagctttgacgaggatgaggaggatgaggaggagaatagctccagctcctcccagctaaatagtaacacccgccccagctctgctactagcaggaagtccgtcagggaggcagcctcagcccctagcccaacagctccagagcaaccagtggacgttgaggtccaggatcttgaggagtttgcactgaggccggccccccagggtatcaccatcaaatgccgcatcactcgggacaagaaagggatggaccggggcatgtaccccacctactttctgcacctggaccgtgaggatgggaagaaggtgttcctcctggcgggaaggaagagaaagaagagtaaaacttccaattacctcatctctgtggacccaacagacttgtctcgaggaggggacagctatatcgggaaactgcggtccaacttgatgggcaccaagttcactgtttatgacaatggagtcaaccctcagaaggcctcatcctccactttggaaagtggaaccttacgtcaggagctggcagctgtgtgctacgagacaaacgtcttaggcttcaaggggcctcggaagatgagcgtgattgtcccaggcatgaacatggttcatgagagagtctctatccgcccccgcaacgagcatgagacactgctagcacgctggcagaataagaacacggagagtatcatcgagctgcaaaacaagacacctgtctggaatgatgacacacagtcctatgtactcaacttccatgggcgcgtcacacaggcctccgtgaagaacttccagatcatccatggcaatgacccggactacatcgtgatgcagtttggccgggtagcagaggatgtgttcaccatggattacaactacccgctgtgtgcactgcaggcctttgccattgccctgtccagcttcgacagcaagctggcgtgcgagtagaggcctcttcgtgccctttggggttgcccagcctggagcggagcttgcctgcctgcctgtggagacagccctgcctatcctctgtatataggccttccgccagatgaagctttggccctcagtgggctccctggcccagccagccaggaactggctcctttgcctctgctactgaggcaggggagtagtggagagcgggtgggtgggtgtgaagggatgagaataattctttccatgccacgagatcaacacacactcccacccttggggtagtagtgtgttgtagtcgtacttaccaagctgagcaacctcttcagctgggaaggccgcaagaggcatagagggagag

SEQ ID NO: 195780 - DNA, 6420 bp, Homo sapiens
  Payload ID: 18638
  Gene Name: tubby bipartite transcription factor
  Uniprot ID: P50607
  ENST ID: ENST00000305253
  CDS Start-End: 242-1927
cttgaggattcagtctggtcctgaagggtttggggggagactgcgaccagaagatgtttccatgtcctaattaatgggtgatggtggttgttagtctgactgttgccacggtgatgaagggagacatccaagtgctggtttcagtactgaggcgaatacagggaatttcaacaggctccaggtcttactatgcagcctgaagtgggaccatcccttaaacccactccatcctgtggccacgatgggggccaggacacctttgccttctttctgggtttctttctttgccgagacagggattttgttcccaggaggcactccctggcccatgggatctcagcattcaaagcagcacaggaaacctgggcccctgaaacggggccaccgaagagatcggagaacaaccaggaggaagtactggaaggaaggaagggagatcgctcgtgtcttagatgatgagggcagaaacctgaggcagcagaagcttgatcggcagcgggccctgctggagcagaagcagaagaagaagcgccaggagcccctgatggtgcaggccaatgcagatgggcggccccggagccggcgggcccggcagtcagaggaacaagcccccctggtggagtcctacctcagcagcagtggcagcaccagctaccaagttcaagaggccgactcactcgccagtgtgcagctgggagccacgcgcccaacagcaccagcttcagccaagagaaccaaggcggcagctacagcagggggccagggtggcgccgctaggaaggagaagaagggaaagcacaaaggcaccagcgggccagcagcactggcagaagacaagtctgaggcccaaggcccagtgcagattctgactgtgggccagtcagaccacgcccaggacgcaggggagacggcagctggtgggggcgaacggcccagcgggcaggatctccgtgccacgatgcagaggaagggcatctccagcagcatgagctttgacgaggatgaggaggatgaggaggagaatagctccagctcctcccagctaaatagtaacacccgccccagctctgctactagcaggaagtccgtcagggaggcagcctcagcccctagcccaacagctccagagcaaccagtggacgttgaggtccaggatcttgaggagtttgcactgaggccggccccccagggtatcaccatcaaatgccgcatcactcgggacaagaaagggatggaccggggcatgtaccccacctactttctgcacctggaccgtgaggatgggaagaaggtgttcctcctggcgggaaggaagagaaagaagagtaaaacttccaattacctcatctctgtggacccaacagacttgtctcgaggaggggacagctatatcgggaaactgcggtccaacttgatgggcaccaagttcactgtttatgacaatggagtcaaccctcagaaggcctcatcctccactttggaaagtggaaccttacgtcaggagctggcagctgtgtgctacgagacaaacgtcttaggcttcaaggggcctcggaagatgagcgtgattgtcccaggcatgaacatggttcatgagagagtctctatccgcccccgcaacgagcatgagacactgctagcacgctggcagaataagaacacggagagtatcatcgagctgcaaaacaagacacctgtctggaatgatgacacacagtcctatgtactcaacttccatgggcgcgtcacacaggcctccgtgaagaacttccagatcatccatggcaatgacccggactacatcgtgatgcagtttggccgggtagcagaggatgtgttcaccatggattacaactacccgctgtgtgcactgcaggcctttgccattgccctgtccagcttcgacagcaagctggcgtgcgagtagaggcctcttcgtgccctttggggttgcccagcctggagcggagcttgcctgcctgcctgtggagacagccctgcctatcctctgtatataggccttccgccagatgaagctttggccctcagtgggctccctggcccagccagccaggaactggctcctttgcctctgctactgaggcaggggagtagtggagagcgggtgggtgggtgtgaagggatgagaataattctttccatgccacgagatcaacacacactcccacccttggggtagtagtgtgttgtagtcgtacttaccaagctgagcaacctcttcagctgggaaggccgcaagaggcatagagggagaggaagcacactgcagggctgctgtggcccagtcgtccgctcagccaaggagtcagatggcaatgggtactccagcaggtaggggcacagtgaatgtgtgtatgtatgaaggccacatcaactttatgtagcaaagggcttggtggccaagcctggcccttaaacaactgcagaaagcccttcaacttcagaaggcctcactcaagcctgagagaagttgggagggtggtggggacaggtaagtggcaggaccctgtcaggattgcaggtgcctggcttgctgtggctatgggaatcagctggtggctaggtttctagcgcatttgatttctccaggtttgctgtgtctcacagaggcagtaggaacccagctctcagggctgtcttggtggatgggccctgcaagacacaggctcagcatgcagaagtgcatgaacagggtccctggatcagggttgttctgggagtcctgtcagcttccccaggagctctctgctgagcagcccagcacaacccccaggaaacacaaatggggtccaggtcaccagcctgactgcacacagctaggcatgcctgggaatcctgctgccagagaaccattcccaagccatggcatgctccttgaagaatctctcctctctctctctctctggaaagacccaactttctcactgctgtcagccaagtcatggttggtaaccatgtaggttcttgggagggaatgggacagggtgaataaagcagggaatattttagaaccacaagagatcagcagtggcaggacccttaggaatctagtacaaccttgttgctttaggtgagtcacactcagaaaatggggcttgccctgggtcacctagctggttaatggcagcattcagaacttcaagttctcttgatttctttgttcccactgtcccccaagaaactagtatctctggcctcctgggggcccattctgcatgccctccccacttcccccgattcagagacttagaagcatcagagttgataaattagattgaaaccattccagtaggaaatcaggcagttccctgttgaaagttgtctggctttttgcacgtgagtatgatccaggattggcctgtgtctggcccctccgcgagggctactcagcagtaagcaggccttagtacggctgctgcacacttctcggtctaggtgggagagagtgcataaaggttctggggctgggcctgagcctaactccctccactaccgctatttctccttggatggcaccatccaccctgcaggcttgggaactgtaagctcaagcttttgctcatttgtcatttaccctggtggaggcttcttgcccagatagagatctgaaattggtgggaagcaagcaggggtcgtaccttgctttagagtagatgtttggaaaagctaagtagaaattttttaaaatagaagttgtattttaaacgtgttaggctttataggtgaaggacttgttttgacttaagtagaagtaatatgctctcatttctttgtaatctagattttcctatgttgaatgcttaaagcaaggcatacctgtcctagcaggatctgcccacacctcggccgtacatctctgtgagagaccccctccaacgattagcttttgcaacatggtccagtttctagagggcactagaactttgtgccagcgctggcgagataccatggtgccatcctcctttctatagttccagtttagcccttccctgcctttaaggagaagagatcttcatggtgacatttgagatgatggaaactagatcgtctctaatgttaggtcaagctatttctctggatctatgattttaagatagaacaggctggttctgagttctggtgagacggagaccccggtggcagtggaaaaatcagaagcacaaaggaaaactcttggcctctgctttctcctgtagcacaaagagggagttggctggatcttttggtggagtcaggaaagacaggctgagctttctagcctaagtgtggagaaggatagcctcagccacaaaactctgtcaggcattgaatgacaagcatcagtagctgagtgcactcctggtgatcctggttttccttgaccactggccctggggccatgggtgcatggactcgtaaagctgctagggcccctagaaaccacctgggttcagcctctcccacaataagagttcttgcccttcataccctctacctggatggatggtctttgggcagggaattaatgacagaatgagcagtccctaatggtattgggcagttgggagtgagtttaggcagcttctctgtaaccgcttctggggccacaccccaaaactctacaccctctgccccagaacaattctgcagagtggtgaagttcacttccccaactcttctccaagtctagctttcctttccttctggctccaaggtgctctgtgtccgtctgtgtatgtgtgtgtctgtgcgtctgtgtgtttatttggggaaaagggcaatcagcaatcaactgaggtttcttaattgtgattatattcctgagaatgaatgagtaggaaaggaataaggatgttgttatgatcgcctgtggattttgtccattcatctcatgctctctgaacagaaggtatacctgggaagataccagctttttctctcagggttctgagtcagaggacaccatccaagaatgttgttagcttttcagttcccgctctgcattgcctgaaaaaactggtatgttgcacgtatgcttttggttgaaattgaacatactctagtgaatgtgccttaaaaatcaagacactagttcagaggaagcacataatgtccagatctatggcgaacacaggtgttggaagccaggactgtgataatcagaagctataagagaactttcggagcctgcctccttcagtgacaagtagggcacaaaattctagaagcagaaggttgtttttttttttttttctccattctgaaaatagcaggacatttacctcttaaataaacttagcatttagaggtaattctaaatttaacaagtgacagggttggtttcaaagaaaaaggtccatgctttgcttacaatggagtctgcagtgaggggagatgctgggatagccatttccatggctctgttatgcaagcacaaatttcatctcctagatggacttcctggttttctcttactgcagtaacactggccttcccttctctaattccttaccccagctgcggcatccctgtgttaactcaggatgccaagtggccctcagattacacttctccagatagctgaatgagtctgctttcactgtgactgggacctgaatgacctgcagtcagggcccagagttgggactctatactaccctgggctctggtctgtaggtttgtagtagccaccggtaataagccaagggctaggctcttgtttgagtttatggccacctggaattttcagtcatctcatgatacaggcgggaggggcagaacagatagattacgacaggtttggtttttaaattttccaaccaagtggaaaggcaagttggtcttatagaaagcactactgcacttagtagctatgtgattttgagcaaaccacataatctctctaggtccattttcctaaccacaagataaagatgttacattgtcaaagcttgccgtaggatttggggtgaatgaaaattattccttgctttcatcactacctttatagctctcatcactacctttatagctcatcactgtgcctttttttctttcctaagaaagacatcacatccctctcctctcctcctctgtgctcctgtccctccctccccctagcaaggtccaggcaaagctggagatgaggctgagatccagagtttcctagaacgcaacttaggatggctaggaaagggaagcctgactgctcggtcaggagggtgcagtatctcttgctgggaacacagccagttttcacaatgcctagactgtgtatgtctatttgcacaagattgtcttttcctattttggagtggtcagacattttatttttgttcaagattatctggcgttttagacaaatttgcaaaactgtgcttttattgactttttgaataaactttggtattctggagcaaa

SEQ ID NO: 195781 - DNA, 1759 bp, Homo sapiens
  Payload ID: 18638
  Gene Name: tubby bipartite transcription factor
  ENST ID: ENST00000534099
  CDS Start-End: 60-1598
cagccccaagcccagcgccgccgccgcccgcggagccccgagcggagccggaggcggcgatggagggagtcagcagccaccggaccctgtcttacagccgctggagctatgacagtgtcttagatgatgagggcagaaacctgaggcagcagaagcttgatcggcagcgggccctgctggagcagaagcagaagaagaagcgccaggagcccctgatggtgcaggccaatgcagatgggcggccccggagccggcgggcccggcagtcagaggaacaagcccccctggtggagtcctacctcagcagcagtggcagcaccagctaccaagttcaagaggccgactcactcgccagtgtgcagctgggagccacgcgcccaacagcaccagcttcagccaagagaaccaaggcggcagctacagcagggggccagggtggcgccgctaggaaggagaagaagggaaagcacaaaggcaccagcgggccagcagcactggcagaagacaagtctgaggcccaaggcccagtgcagattctgactgtgggccagtcagaccacgcccaggacgcaggggagacggcagctggtgggggcgaacggcccagcgggcaggatctccgtgccacgatgcagaggaagggcatctccagcagcatgagctttgacgaggatgaggaggatgaggaggagaatagctccagctcctcccagctaaatagtaacacccgccccagctctgctactagcaggaagtccgtcagggaggcagcctcagcccctagcccaacagctccagagcaaccagtggacgttgaggtccaggatcttgaggagtttgcactgaggccggccccccagggtatcaccatcaaatgccgcatcactcgggacaagaaagggatggaccggggcatgtaccccacctactttctgcacctggaccgtgaggatgggaagaaggtgttcctcctggcgggaaggaagagaaagaagagtaaaacttccaattacctcatctctgtggacccaacagacttgtctcgaggaggggacagctatatcgggaaactgcggtccaacttgatgggcaccaagttcactgtttatgacaatggagtcaaccctcagaaggcctcatcctccactttggaaagtggaaccttacgtcaggagctggcagctgtgtgctacgagacaaacgtcttaggcttcaaggggcctcggaagatgagcgtgattgtcccaggcatgaacatggttcatgagagagtctctatccgcccccgcaacgagcatgagacactgctagcacgctggcagaataagaacacggagagtatcatcgagctgcaaaacaagacacctgtctggaatgatgacacacagtcctatgtactcaacttccatgggcgcgtcacacaggcctccgtgaagaacttccagatcatccatggcaatgacccggactacatcgtgatgcagtttggccgggtagcagaggatgtgttcaccatggattacaactacccgctgtgtgcactgcaggcctttgccattgccctgtccagcttcgacagcaagctggcgtgcgagtagaggcctcttcgtgccctttggggttgcccagcctggagcggagcttgcctgcctgcctgtggagacagccctgcctatcctctgtatataggccttccgccagatgaagctttggccctcagtgggctccctggcccagccagccaggaactggctccttt

SEQ ID NO: 195782 - DNA, 2162 bp, Homo sapiens
  Payload ID: 18639
  Gene Name: tubby like protein 1
  Uniprot ID: O00294
  ENST ID: ENST00000229771
  CDS Start-End: 81-1709
gaagttgagccgagattagcaggagtcgggagggaggctcctagacctgcagagaaaggggtgcgataggcaaaggcaccatgcctctgcgggatgaaaccctccgagaggtgtgggcctctgacagtgggcatgaagaagaaagcctgagcccggaggccccgcggcgccccaaacagcgacccgccccggcacagaggctaaggaagaagaggacggaggcccccgaatccccctgccccacgggatccaagccccggaagcccggagctgggcggacggggaggccgcgggaggagccttccccagacccagcccaggcccgggcgccgcagacggtctacgccaggttcctcagggaccccgaggccaagaagcgcgacccccgggaaacctttctggtagcccgtgccccagacgcggaggacgaggaggaggaggaagaggaggacgaggaggacgaggaagaggaggcagaggaaaagaaagagaaaatccttctgcctcccaagaagcccctgagagagaagagctccgcagacctgaaggagaggagggccaaggcccagggcccaaggggagacctgggaagccctgaccccccaccgaaacctctgcgtgttaggaataaggaagctccagcaggggaggggaccaagatgagaaagaccaagaagaaagggtctggggaggccgacaaggacccctcagggagcccagccagtgcgaggaagagcccagcagccatgtttctggttggggaaggcagtcctgacaagaaagccctgaagaagaaaggcactcccaaaggcgcgaggaaggaggaagaagaggaggaggaggcagctacggtgataaagaagagcaatcaaaagggcaaagccaaaggaaaaggcaaaaagaaagcgaaggaggagagggccccgtctccccccgtggaggtggacgaaccccgggagtttgtgctccggcctgccccccagggccgcacggtgcgctgccggctgacccgggacaaaaagggcatggatcgaggcatgtatccctcctacttcctgcacctggacacggagaagaaggtgttcctcttggctggcaggaaacgaaaacggagcaagacagccaattacctcatctccatcgaccctaccaatctgtcccgaggaggggagaatttcatcgggaagctgaggtccaacctcctggggaaccgcttcacggtctttgacaacgggcagaacccacagcgtgggtacagcactaatgtggcaagccttcggcaggagctggcagctgtgatctatgaaaccaacgtgctgggcttccgtggcccccggcgcatgaccgtcatcattcctggcatgagtgcggagaacgagagggtccccatccggccccgaaatgctagtgacggcctgctggtgcgctggcagaacaagacgctggagagcctcatagaactgcacaacaagccacctgtctggaacgatgacagtggctcctacaccctcaacttccaaggccgggtcacccaggcctcagtcaagaacttccagattgtccacgctgatgaccccgactatatcgtgctgcagttcggccgcgtggcggaggacgccttcaccctagactaccggtacccgctgtgcgccctgcaggccttcgccatcgccctctccagtttcgacgggaagctggcctgcgagtgaccccagcagcccctcagcgcccccagagcccgtcagcgtgggggaaaggattcagtggaggctggcagggtccctccagcaaagctcccgcggaaaactgctcctgtgtcggggctgacctctcactgcctctcggtgacctccgtcctctccccagcctggcacaggccgaggcaggaggagcccggacggcgggtaggacggagatgaagaacatctggagttggagccgcacatctggtctcggagctcgcctgcgccgctgtgcccccctcctccccgcgccccagtcacttcctgtccgggagcagtagtcattgttgttttaacctcccctctccccgggaccgcgctagggctccgaggagctggggcgggctaggaggagggggtaggtgatgggggacgagggccaggcacccacatccccaataaagccgcgtccttggccaa

SEQ ID NO: 195783 - DNA, 1941 bp, Homo sapiens
  Payload ID: 18639
  Gene Name: tubby like protein 1
  Uniprot ID: O00294
  ENST ID: ENST00000322263
  CDS Start-End: 19-1488
gcgataggcaaaggcaccatgcctctgcgggatgaaaccctccgagaggtgtgggcctctgacagtgggcatgaagaagaaagcctgagcccggaggccccgcggcgccccaaacagcgacccgccccggcacagaggctaaggaagaagaggacggaggcccccgaatccccctgccccacgggatccaagccccggaagcccggagaggaggaggaggaagaggaggacgaggaggacgaggaagaggaggcagaggaaaagaaagagaaaatccttctgcctcccaagaagcccctgagagagaagagctccgcagacctgaaggagaggagggccaaggcccagggcccaaggggagacctgggaagccctgaccccccaccgaaacctctgcgtgttaggaataaggaagctccagcaggggaggggaccaagatgagaaagaccaagaagaaagggtctggggaggccgacaaggacccctcagggagcccagccagtgcgaggaagagcccagcagccatgtttctggttggggaaggcagtcctgacaagaaagccctgaagaagaaaggcactcccaaaggcgcgaggaaggaggaagaagaggaggaggaggcagctacggtgataaagaagagcaatcaaaagggcaaagccaaaggaaaaggcaaaaagaaagcgaaggaggagagggccccgtctccccccgtggaggtggacgaaccccgggagtttgtgctccggcctgccccccagggccgcacggtgcgctgccggctgacccgggacaaaaagggcatggatcgaggcatgtatccctcctacttcctgcacctggacacggagaagaaggtgttcctcttggctggcaggaaacgaaaacggagcaagacagccaattacctcatctccatcgaccctaccaatctgtcccgaggaggggagaatttcatcgggaagctgaggtccaacctcctggggaaccgcttcacggtctttgacaacgggcagaacccacagcgtgggtacagcactaatgtggcaagccttcggcaggagctggcagctgtgatctatgaaaccaacgtgctgggcttccgtggcccccggcgcatgaccgtcatcattcctggcatgagtgcggagaacgagagggtccccatccggccccgaaatgctagtgacggcctgctggtgcgctggcagaacaagacgctggagagcctcatagaactgcacaacaagccacctgtctggaacgatgacagtggctcctacaccctcaacttccaaggccgggtcacccaggcctcagtcaagaacttccagattgtccacgctgatgaccccgactatatcgtgctgcagttcggccgcgtggcggaggacgccttcaccctagactaccggtacccgctgtgcgccctgcaggccttcgccatcgccctctccagtttcgacgggaagctggcctgcgagtgaccccagcagcccctcagcgcccccagagcccgtcagcgtgggggaaaggattcagtggaggctggcagggtccctccagcaaagctcccgcggaaaactgctcctgtgtcggggctgacctctcactgcctctcggtgacctccgtcctctccccagcctggcacaggccgaggcaggaggagcccggacggcgggtaggacggagatgaagaacatctggagttggagccgcacatctggtctcggagctcgcctgcgccgctgtgcccccctcctccccgcgccccagtcacttcctgtccgggagcagtagtcattgttgttttaacctcccctctccccgggaccgcgctagggctccgaggagctggggcgggctaggaggagggggtaggtgatgggggacgagggccaggcacccacatccccaataaagccgcgtccttggccaa

SEQ ID NO: 195784 - DNA, 492 bp, Homo sapiens
  Payload ID: 18639
  Gene Name: tubby like protein 1
  ENST ID: ENST00000428978
  CDS Start-End: 9-492
aaggcaccatgcctctgcgggatgaaaccctccgagaggtgtgggcctctgacagtgggcatgaagaagaaagcctgagcccggaggccccgcggcgccccaaacagcgacccgccccggcacagaggctaaggaagaagaggacggaggcccccgaatccccctgccccacgggatccaagccccggaagcccggagagtttctacctgcagaggaggaggaggaagaggaggacgaggaggacgaggaagaggaggcagaggaaaagaaagagaaaatccttctgcctcccaagaagcccctgagagagaagagctccgcagacctgaaggagaggagggccaaggcccagggcccaaggggagacctgggaagccctgaccccccaccgaaacctctgcgtgttaggaataaggaagctccagcaggggaggggaccaagatgagaaagaccaagaagaaagggtctggggaggccgacaaggacccct

SEQ ID NO: 195785 - DNA, 2084 bp, Homo sapiens
  Payload ID: 18639
  Gene Name: tubby like protein 1
  ENST ID: ENST00000614066
  CDS Start-End: 12-1634
gcaaaggcaccatgcctctgcgggatgaaaccctccgagaggtgtgggcctctgacagtgggcatgaagaagaaagcctgagcccggaggccccgcggcgccccaaacagcgacccgccccggcacagaggctaaggaagaagaggacggaggcccccgaatccccctgccccacgggatccaagccccggaagcccggagctgggcggacggggaggccgcgggaggagccttccccagacccagcccaggcccgggcgccgcagacggtctacgccaggttcctcagggaccccgaggccaagaagcgcgacccccgggaaacctttctggtagcccgtgccccagacgcggaggacgaggaggaggaggaagaggaggacgaggaggacgaggaagaggaggcagaggaaaagaaagagaaaatccttctgcctcccaagaagcccctgagagagaagagctccgcagacctgaaggagaggagggccaaggcccagggcccaaggggagacctgggaagccctgaccccccaccgaaacctctgcgtgttaggaataaggaagctccagcaggggaggggaccaagatgagaaagaccaagaagaaagggtctggggaggccgacaaggacccctcagggagcccagccagtgcgaggaagagcccagcagccatgtttctggttggggaaggcagtcctgacaagaaagccctgaagaagaaaggcactcccaaaggcgcgaggaaggaggaagaagaggaggaggaggcagctacggtgataaagaagagcaatcaaaagggcaaagccaaaggaaaaggcaaaaagaaggaggagagggccccgtctccccccgtggaggtggacgaaccccgggagtttgtgctccggcctgccccccagggccgcacggtgcgctgccggctgacccgggacaaaaagggcatggatcgaggcatgtatccctcctacttcctgcacctggacacggagaagaaggtgttcctcttggctggcaggaaacgaaaacggagcaagacagccaattacctcatctccatcgaccctaccaatctgtcccgaggaggggagaatttcatcgggaagctgaggtccaacctcctggggaaccgcttcacggtctttgacaacgggcagaacccacagcgtgggtacagcactaatgtggcaagccttcggcaggagctggcagctgtgatctatgaaaccaacgtgctgggcttccgtggcccccggcgcatgaccgtcatcattcctggcatgagtgcggagaacgagagggtccccatccggccccgaaatgctagtgacggcctgctggtgcgctggcagaacaagacgctggagagcctcatagaactgcacaacaagccacctgtctggaacgatgacagtggctcctacaccctcaacttccaaggccgggtcacccaggcctcagtcaagaacttccagattgtccacgctgatgaccccgactatatcgtgctgcagttcggccgcgtggcggaggacgccttcaccctagactaccggtacccgctgtgcgccctgcaggccttcgccatcgccctctccagtttcgacgggaagctggcctgcgagtgaccccagcagcccctcagcgcccccagagcccgtcagcgtgggggaaaggattcagtggaggctggcagggtccctccagcaaagctcccgcggaaaactgctcctgtgtcggggctgacctctcactgcctctcggtgacctccgtcctctccccagcctggcacaggccgaggcaggaggagcccggacggcgggtaggacggagatgaagaacatctggagttggagccgcacatctggtctcggagctcgcctgcgccgctgtgcccccctcctccccgcgccccagtcacttcctgtccgggagcagtagtcattgttgttttaacctcccctctccccgggaccgcgctagggctccgaggagctggggcgggctaggaggagggggtaggtgatgggggacgagggccaggcacccacatccccaataaagccgcgtccttggc

SEQ ID NO: 195786 - DNA, 1754 bp, Homo sapiens
  Payload ID: 18640
  Gene Name: tubby like protein 2
  Uniprot ID: O00295
  ENST ID: ENST00000221399
  CDS Start-End: 146-1708
ggaagtggagagtggagggtcagaagggagtggaccagttcaggtcccagagggaatcctccctccctctgagccgtctttcttctcctccctatttcgcagatatcccgagattaggtccccagcttccaaagagaggatcagaatgtctcaggataatgacacattgatgagagacatcctggggcatgagctcgctgctatgaggctgcagaagctggaacagcagcggcggctgtttgaaaagaagcagcgacagaagcgccaggagctcctcatggttcaggccaatcctgacgcttccccgtggctttggcgctcttgtctgcgggaggagcgccttttaggtgacagaggccttgggaaccctttcctccggaagaaagtgtcagaggcacatctgccctctggcatccacagtgccctgggcaccgtgagctgtggtggagacggcaggggcgagcgcggcctcccgacaccgcggacagaagcagtgttcaggaatctcggtctccagtcccctttcttatcctggctcccagacaattccgatgcagaattggaggaagtctccgtggagaatggttccgtctctcccccaccttttaaacagtctccgagaatccgacgcaagggttggcaagcccaccaacgacctgggacccgtgcagagggtgagagtgactcccaggatatgggagatgcacacaagtcacccaatatgggaccaaaccctggaatggatggtgactgtgtatatgaaaacttggccttccaaaaggaagaagacttggaaaagaagagagaggcctctgagtctacagggacgaactcctcagcagcacacaacgaagagttgtccaaggccctgaaaggcgagggtggcacggacagcgaccatatgaggcacgaagcctccttggcaatccgctccccctgccctgggctggaggaggacatggaagcctacgtgctgcggccagcgctcccgggcaccatgatgcagtgctacctcacccgtgacaagcacggcgtggacaagggcttgttccccctctactacctctacctggagacctctgacagcctgcagcgcttcctcctggctgggcgaaagagaagaaggagcaaaacttctaattacctcatctccctggatcctacacacctatctcgggacggggacaatttcgtgggcaaagtcagatccaatgtcttcagcaccaagttcaccatctttgacaatggggtgaatcctgaccgggagcatttaaccaggaatactgcccggatcagacaggagctgggggctgtgtgttatgagcccaacgtcttaggatacctggggcctcggaaaatgactgtgattctcccaggaaccaacagccagaaccagcgaatcaatgtccagccactaaatgaacaggagtcgctactgagtcgttaccaacgtggggacaaacaagggttgcttttgttgcacaacaaaaccccgtcgtgggacaaggagaacggtgtctacacgctcaatttccatggtcgagtcactcgggcttcggtgaagaacttccaaatcgtggatcccaaacaccaagaacatctggtgctccagttcggccgagtgggcccagacacattcaccatggacttctgctttccatttagcccgctccaggccttcagcatctgcttgtccagtttcaattagaagctggctgttgaataactcaataaaataccatacccttgccagc

SEQ ID NO: 195787 - DNA, 840 bp, Homo sapiens
  Payload ID: 18640
  Gene Name: tubby like protein 2
  ENST ID: ENST00000518572
  CDS Start-End: 149-840
agatatcccgagattaggtccccagcttccaaagagaggatcaggtatgtttagagattggccagagaggcaaggtaccgaggcatcaatgtgagcagcctctccaggcacctggtgaggagaacaagtctcccggatcccaggcagaatgtctcaggataatgacacattgatgagagacatcctggggcatgagctcgctgctatgaggctgcagaagctggaacagcagcggcggctgtttgaaaagaagcagcgacagaagcgccaggagctcctcatggttcaggccaatcctgacgcttccccgtggctttggcgctcttgtctgcgggaggagcgccttttaggtgacagagtgttcaggaatctcggtctccagtcccctttcttatcctggctcccagacaattccgatgcagaattggaggaagtctccgtggagaatggttccgtctctcccccaccttttaaacagtctccgagaatccgacgcaagggttggcaagcccaccaacgacctgggacccgtgcagagggtgagagtgactcccaggatatgggagatgcacacaagtcacccaatatgggaccaaaccctggaatggatggtgactgtgtatatgaaaacttggccttccaaaaggaagaagacttggaaaagaagagagaggcctctgagtctacagggacgaactcctcagcagcacacaacgaagagttgtccaaggccctgaaaggcgagggtggcacggacagcgaccatatgaggcacgaagcctccttggcaatccgctccccctgccctgggctggaggaggacatggaagcctacgtgct

SEQ ID NO: 195788 - DNA, 649 bp, Homo sapiens
  Payload ID: 18640
  Gene Name: tubby like protein 2
  ENST ID: ENST00000520977
  CDS Start-End: 89-649
gggactctcttgggcaaccgaggttccctgtgcactgtcaccatgggcctgtgtctctctcagcatcctggggcatgagctcgctgctatgaggctgcagaagctggaacagcagcggcggctgtttgaaaagaagcagcgacagaagcgccaggagctcctcatggttcaggccaatcctgacgcttccccgtggctttggcgctcttgtctgcgggaggagcgccttttaggtgacagaggccttgggaaccctttcctccggaagaaagtgtcagaggcacatctgccctctggcatccacagtgccctgggcaccgtgagctgtggtggagacggcaggggcgagcgcggcctcccgacaccgcggacagaagcagtgttcaggaatctcggtctccagtcccctttcttatcctggctcccagacaattccgatgcagaattggaggaagtctccgtggagaatggttccgtctctcccccaccttttaaacagtctccgagaatccgacgcaagggttggcaagcccaccaacgacctgggacccgtgcagagggtgagagtgactcccaggatatgggagatgcacacaagtcacccaatatgggaccaaaccctggaatggatggtgactgtgtatatgaa

SEQ ID NO: 195789 - DNA, 283 bp, Homo sapiens
  Payload ID: 18640
  Gene Name: tubby like protein 2
  ENST ID: ENST00000522341
  CDS Start-End: 1-243
tgggacaaggagaacggtgtctacacgctcaatttccatggtcgagtcactcgggcttcggtgaagaacttccaaatcgtggatcccaaacaccgtgagctcctggaaaccagtttagccgggccagaagaacatctggtgctccagttcggccgagtgggcccagacacattcaccatggacttctgctttccatttagcccgctccaggccttcagcatctgcttgtccagtttcaattagaagctggctgttgaataactcaataaaataccataccctt

SEQ ID NO: 195790 - DNA, 736 bp, Homo sapiens
  Payload ID: 18640
  Gene Name: tubby like protein 2
  ENST ID: ENST00000522945
  CDS Start-End: 106-736
agcggacttgcggacccccgtgggaagctggaaacaggctactagatcccgacaggagtgggtgctgggattcgggctgcctgggtccggaagcaaatttaaagaatgtctcaggataatgacacattgatgagagacatcctggggcatgagctcgctgctatgaggctgcagaagctggaacagcagcggcggctgtttgaaaagaagcagcgacagaagcgccaggagctcctcatggttcaggccaatcctgacgcttccccgtggctttggcgctcttgtctgcgggaggagcgccttttaggccttgggaaccctttcctccggaagaaagtgtcagaggcacatctgccctctggcatccacagtgccctgggcaccgtgagctgtggtggagacggcaggggcgagcgcggcctcccgacaccgcggacagaagcagtgttcaggaatctcggtctccagtcccctttcttatcctggctcccagacaattccgatgcagaattggaggaagtctccgtggagaatggttccgtctctcccccaccttttaaacagtctccgagaatccgacgcaagggttggcaagcccaccaacgacctgggacccgtgcagagggtgagagtgactcccaggatatgggagatgcacacaagtcacccaatatgggaccaaaccctggaatggatggtgactgtgtatatgaaaacttggccttccaaaaggaag

SEQ ID NO: 195791 - DNA, 1951 bp, Homo sapiens
  Payload ID: 18641
  Gene Name: tubby like protein 3
  Uniprot ID: O75386
  ENST ID: ENST00000397132
  CDS Start-End: 42-1547
ggaagagtgtgtacgtggtgggggcttcctcggtggcgggcatggaggcttcgcgctgccggctcagtcccagcggcgacagtgtcttccatgaagaaatgatgaagatgcgacaggctaagctggattatcagaggctactacttgagaagaggcaaaggaaaaagcgccttgagccatttatggtgcagcccaatccagaagccaggctacgtcgggcaaagccaagggccagtgatgagcagactcccttggtgaactgtcatactccccacagcaatgtcatcttacatggtattgatggtccagctgctgtcctgaaaccagacgaagttcatgctccatcagtaagctcctctgttgtggaagaagatgctgaaaacaccgtggatactgcttccaagccaggacttcaggagcgtctccaaaagcatgatatctctgaaagtgtgaacttcgatgaggagactgatggaatatcccagtcagcatgtttagaaagacccaattctgcatcaagccagaattcaaccgatacaggcacttccggttctgctactgccgcccaaccagctgataacctcctgggagacatagacgacctggaggactttgtgtatagtcctgcccctcaaggtgtcacagtaagatgtcggataatccgggataaaaggggaatggatcggggtctcttccccacctactatatgtacttggaaaaagaagaaaatcagaagatatttcttcttgcagctagaaagcggaaaaagagcaaaacagccaactaccttatctccattgatccagttgatttatctcgtgaaggagaaagttatgtcggcaagcttagatccaacctcatggggaccaagtttacagtttatgaccgtggcatctgccccatgaagggccggggtttggtaggagcggcccacacccggcaggagctggctgccatctcctatgaaacaaacgtacttggatttaaaggtcctaggaaaatgtctgtgatcattcctggaatgacactgaatcataagcagatcccctatcagccacaaaacaaccatgacagtttgctctcaaggtggcagaacagaactatggaaaatctggttgagctgcacaacaaggcccccgtctggaacagtgacactcagtcctatgtcctcaacttccgtggccgggtcactcaggcgtctgtgaagaacttccagatagtccacaaaaatgaccctgattatatagtcatgcagtttggacgtgtggcagatgacgtgttcacactggattacaactacccactttgtgcagtacaggcctttggcatcggtctttctagctttgacaaatgtatccaaaccttgagaatgcaggagctctgtgagctccaccgtcagcaccattcagctgcatcccttgtgcacagaactgtttgccagcgttgggtgggacacccgtggcggctgctccctcagacctcccttctgtggactgacctctcacctccgcctgttgttcctgcaccacatcagataagcatgtgaaggagggccaactggcagctgcgggacccttggcttgtcccccaccgacaagtcccacctgctgggtgaggacgagactgtttccatctcaggcatgtatcccaccaagtgcctccctcacagccatgcccagaagcctcacacctcgtcaccaccaccaccccccaccccatcctgaggcactgcctggcagataaccctggttggccacagaagctattaatacacgacagcatgtggggaaggacttatggtgggccaggtggacctcatcctgcttcttcctccctctggtttaaagagatatataaactaatttcacataatttgtgtgtgcaggtgattggtttttacataagtcctatttataccttttatatgttacagaaataaaagttaattta

SEQ ID NO: 195792 - DNA, 3076 bp, Homo sapiens
  Payload ID: 18641
  Gene Name: tubby like protein 3
  Uniprot ID: O75386
  ENST ID: ENST00000448120
  CDS Start-End: 52-1380
gcgacggcggggaagagtgtgtacgtggtgggggcttcctcggtggcgggcatggaggcttcgcgctgccggctcagtcccagcggcgacagtgtcttccatgaagaaatgatgaagatgcgacaggctaagctggattatcagaggctactacttgagaagaggcaaaggaaaaagcgccttgagccatttatggtgcagcccaatccagaagccaggctacgtcgggcaaagccaagggccagtgatgagcagactcccttggtgaactgtcatactccccacagcaatgtcatcttacatggtattgatggtccagctgctgtcctgaaaccagacgaagttcatgctccatcagtaagctcctctgttgtggaagaagatgctgaaaacaccgtggatactgcttccaagccaggacttcaggagcgtctccaaaagcatgatatctctgaaagtgtgaacttcgatgaggagactgatggaatatcccagtcagcatgtttagaaagacccaattctgcatcaagccagaattcaaccgatacaggcacttccggttctgctactgccgcccaaccagctgataacctcctgggagacatagacgacctggaggactttgtgtatagtcctgcccctcaaggtgtcacagtaagatgtcggataatccgggataaaaggggaatggatcggggtctcttccccacctactatatgtacttggaaaaagaagaaaatcagaagatatttcttcttgcagctagaaagcggaaaaagagcaaaacagccaactaccttatctccattgatccagttgatttatctcgtgaaggagaaagttatgtcggcaagcttagatccaacctcatggggaccaagtttacagtttatgaccgtggcatctgccccatgaagggccggggtttggtaggagcggcccacacccggcaggagctggctgccatctcctatgaaacaaacgtacttggatttaaaggtcctaggaaaatgtctgtgatcattcctggaatgacactgaatcataagcagatcccctatcagccacaaaacaaccatgacagtttgctctcaaggtggcagaacagaactatggaaaatctggttgagctgcacaacaaggcccccgtctggaacagtgacactcagtcctatgtcctcaacttccgtggccgggtcactcaggcgtctgtgaagaacttccagatagtccacaaaaatgaccctgattatatagtcatgcagtttggacgtgtggcagatgacgtgttcacactggattacaactacccactttgtgcagtacaggcctttggcatcggtctttctagctttgacagtaagctggcgtgtgaatgagagaacagtcaggcagggagcccttctccccacagagctttcaggagcagacagtggcctccccttcccctccctgccccaggacttaaagagcaatagtttgccccttttggaatgatctctgaatatataaaacacacacacaaagagcaatagtttgccccttttggaacgacccctgaatatataaaacacacacacgaagagcaatagtttgccccttttggaacgacccctgaatatataaaacacacacgaagagcaatagtttgccccttttggaacgacccctgaatatataaaacacacacacgaagagcaatagtttgccccttttggaacgacccctgaatatataaaacacacacacaccccgcgcactctcactccttttccaggtttcatagacttggtgagggatcacagcttagcatgggtgagagatgatttaaagcacagggagattcttgtcacattggggtctccaaagctagaatgggatttcatgtgcttggaaacttgcagtagaatcagggactgacatcgcagttcctctcctctcttcattccctcacagcagattggccggcaccaatcttagtcaagagtggctgtgatcacatttgtgatcaattatgtgagaattttatataattgtcttcatttcaattaaggctgaaagcataaactctagaggtgactcagtcaggactgacagtaatgtgataattgccttcattttcaacccaggagtgcctctcacagctatatgactacggatccattagtgaggagcgacacacacacctgtaggcatcctgtgcaaacactttgtcattatcaagagagatggcagtattgaccatttagtttagttaaaaaaaaaaaaaaaaaggtggcaggagaggctttggggaggatcagccagcagacatgagcactgctggcccgtgtggcagagctgtggactttcttctcggctccctcaaccctggctcaggcacagaaggtgttttgctacgtttttttgattattacacccctccacgtattatgtgactcttacaccagttcacccttcccagaatgtatccaaaccttgagaatgcaggagctctgtgagctccaccgtcagcaccattcagctgcatcccttgtgcacagaactgtttgccagcgttgggtgggacacccgtggcggctgctccctcagacctcccttctgtggactgacctctcacctccgcctgttgttcctgcaccacatcagataagcatgtgaaggagggccaactggcagctgcgggacccttggcttgtcccccaccgacaagtcccacctgctgggtgaggacgagactgtttccatctcaggcatgtatcccaccaagtgcctccctcacagccatgcccagaagcctcacacctcgtcaccaccaccaccccccaccccatcctgaggcactgcctggcagataaccctggttggccacagaagctattaatacacgacagcatgtggggaaggacttatggtgggccaggtggacctcatcctgcttcttcctccctctggtttaaagagatatataaactaatttcacataatttgtgtgtgcaggtgattggtttttacataagtcctatttataccttttatatgttacagaaataaaagttaatttatataaaaatg

SEQ ID NO: 195793 - DNA, 1229 bp, Homo sapiens
  Payload ID: 18641
  Gene Name: tubby like protein 3
  ENST ID: ENST00000538354
  CDS Start-End: 58-177
actctagcgacggcggggaagagtgtgtacgtggtgggggcttcctcggtggcgggcatggaggcttcgcgctgccggctcagtcccagcggcgacagtgtcttccatgaagaaatgatgaagatgcgacaggctaagctggattatcaggtattgatggtccagctgctgtcctgaaaccagacgaagttcatgctccatcagtaagctcctctgttgtggaagaagatgctgaaaacaccgtggatactgcttccaagccaggacttcaggagcgtctccaaaagcatgatatctctgaaagtgtgaacttcgatgaggagactgatggaatatcccagtcagcatgtttagaaagacccaattctgcatcaagccagaattcaaccgatacaggcacttccggttctgctactgccgcccaaccagctgataacctcctgggagacatagacgacctggaggactttgtgtatagtcctgcccctcaaggtgtcacagtaagatgtcggataatccgggataaaaggggaatggatcggggtctcttccccacctactatatgtacttggaaaaagaagaaaatcagaagatccaacctcatggggaccaagtttacagtttatgaccgtggcatctgccccatgaagggccggggtttggtaggagcggcccacacccggcaggagctggctgccatctcctatgaaacaaacgtacttggatttaaaggtcctaggaaaatgtctgtgatcattcctggaatgacactgaatcataagcagatcccctatcagccacaaaacaaccatgacagtttgctctcaaggtggcagaacagaactatggaaaatctggttgagctgcacaacaaggcccccgtctggaacagtgacactcagtcctatgtcctcaacttccgtggccgggtcactcaggcgtctgtgaagaacttccagatagtccacaaaaatgaccctgattatatagtcatgcagtttggacgtgtggcagatgacgtgttcacactggattacaactacccactttgtgcagtacaggcctttggcatcggtctttctagctttgacagtaagctggcgtgtgaatgagagaacagtcaggcagggagcccttctccccacagagctttcaggagcagacagtggcctccccttcccctccctgccccaggacttaaagagcaatagtttgccccttttggaat

SEQ ID NO: 195794 - DNA, 449 bp, Homo sapiens
  Payload ID: 18641
  Gene Name: tubby like protein 3
  ENST ID: ENST00000538704
  CDS Start-End: 1-328
cccctatcagccacaaaacaaccatgacagtttgctctcaaggtggcagaacagaactatggaaaatctggttgagctgcacaacaaggcccccgtctggaacagtgacactcagtcctatgtcctcaacttccgtggccgggtcactcaggcgtctgtgaagaacttccagatagtccacaaaaatgaccctgattatatagtcatgcagtttggacgtgtggcagatgacgtgttcacactggattacaactacccactttgtgcagtacaggcctttggcatcggtctttctagctttgacagagtgcctctcacagctatatgactacggatccattagtgaggagcgacacacacacctgtaggcatcctgtgcaaacactttgtcattatcaagagagatggcagtattgaccatttagtttagttaaaaaaaaaaaaaaaaa

SEQ ID NO: 195795 - DNA, 542 bp, Homo sapiens
  Payload ID: 18641
  Gene Name: tubby like protein 3
  ENST ID: ENST00000541678
  CDS Start-End: 1-400
cattcctggaatgacactgaatcataagcagatcccctatcagccacaaaacaaccatgacagtttgctctcaaggtggcagaacagaactatggaaaatctggttgagctgcacaacaaggcccccgtctggaacagtgacactcagtcctatgtcctcaacttccgtggccgggtcactcaggcgtctgtgaagaacttccagatagtccacaaaaatgaccctgattatatagtcatgcagtttggacgtgtggcagatgacgtgttcacactggattacaactacccactttgtgcagtacaggcctttggcatcggtctttctagctttgacacagattggccggcaccaatcttagtcaagagtggctgtgatcacatttgtgatcaattatgagtgcctctcacagctatatgactacggatccattagtgaggagcgacacacacacctgtaggcatcctgtgcaaacactttgtcattatcaagagagatggcagtattgaccatttagtttagttaaaaaaaaaaaaaaaaa

SEQ ID NO: 195796 - DNA, 1373 bp, Homo sapiens
  Payload ID: 18641
  Gene Name: tubby like protein 3
  ENST ID: ENST00000545331
  CDS Start-End: 58-177
actctagcgacggcggggaagagtgtgtacgtggtgggggcttcctcggtggcgggcatggaggcttcgcgctgccggctcagtcccagcggcgacagtgtcttccatgaagaaatgatgaagatgcgacaggctaagctggattatcaggtattgatggtccagctgctgtcctgaaaccagacgaagttcatgctccatcagtaagctcctctgttgtggaagaagatgctgaaaacaccgtggatactgcttccaagccaggacttcaggagcgtctccaaaagcatggatacaggcacttccggttctgctactgccgcccaaccagctgataacctcctgggagacatagacgacctggaggactttgtgtatagtcctgcccctcaaggtgtcacagtaagatgtcggataatccgggataaaaggggaatggatcggggtctcttccccacctactatatgtacttggaaaaagaagaaaatcagaagatatttcttcttgcagctagaaagcggaaaaagagcaaaacagccaactaccttatctccattgatccagttgatttatctcgtgaaggagaaagttatgtcggcaagcttagatccaacctcatggggaccaagtttacagtttatgaccgtggcatctgccccatgaagggccggggtttggtaggagcggcccacacccggcaggagctggctgccatctcctataaccatgacagtttgctctcaaggtggcagaacagaactatggaaaatctggttgagctgcacaacaaggcccccgtctggaacagtgacactcagtcctatgtcctcaacttccgtggccgggtcactcaggcgtctgtgaagaacttccagatagtccacaaaaatgaccctgattatatagtcatgcagtttggacgtgtggcagatgacgtgttcacactggattacaactacccactttgtgcagtacaggcctttggcatcggtctttctagctttgacagtaagctggcgtgtgaatgagagaacagtcaggcagggagcccttctccccacagagctttcaggagcagacagtggcctccccttcccctccctgccccaggacttaaagagcaatagtttgccccttttggaatgatctctgaatatataaaacacacacacaaagagcaatagtttgccccttttggaacgacccctgaatatataaaacacacacacgaagagcaatagtttgccccttttggaacgacccctgaatatataaaacacacacgaagagcaatagtttgccccttttggaacgacccctgaatatataaaacacacacacgaagagcaatagtttgccccttttggaacga

SEQ ID NO: 195797 - DNA, 548 bp, Homo sapiens
  Payload ID: 18641
  Gene Name: tubby like protein 3
  ENST ID: ENST00000544943
  CDS Start-End: 138-548
agccactctagcgacggcggggaagagtgtctagaaagcggaaaaagagcaaaacagccaactaccttatctccattgatccagttgatttatctcgtgaaggagaaagttatgtcggcaagcttagatccaacctcatggggaccaagtttacagtttatgaccgtggcatctgccccatgaagggccggggtttggtaggagcggcccacacccggcaggagctggctgccatctcctatgaaacaaacgtacttggatttaaaggtcctaggaaaatgtctgtgatcattcctggaatgacactgaatcataagcagatcccctatcagccacaaaacaaccatgacagtttgctctcaaggtggcagaacagaactatggaaaatctggttgagctgcacaacaaggcccccgtctggaacagtgacactcagtcctatgtcctcaacttccgtggccgggtcactcaggcgtctgtgaagaacttccagatagtccacaaaaatgaccctgattatatagtcatgcagtttggacgtgtggca

SEQ ID NO: 195798 - DNA, 978 bp, Homo sapiens
  Payload ID: 18641
  Gene Name: tubby like protein 3
  Uniprot ID: O75386
  ENST ID: ENST00000540184
  CDS Start-End: 77-589
attccgggctcgaaggctgtgcggtctgccaggagctgcggccccgtccggcccgggctgtgtcttccatgaagaaatgatgaagatgcgacaggctaagctggattatcagaggctactacttgagaagaggcaaaggaaaaagcgccttgagccatttatggtgcagcccaatccagaagccaggctacgtcgggcaaagccaagggccagtgatgagcagactcccttggtgaactgtcatactccccacagcaatgtcatcttacatggtattgatggtccagctgctgtcctgaaaccagacgaagttcatgctccatcagtaagctcctctgttgtggaagaagatgctgaaaacaccgtggatactgcttccaagccaggacttcaggagcgtctccaaaagcatgatatctctgaaagtgtgaacttcgatgaggagactgatggaatatcccagtcagcatgtttagaaagacccaattctgcatcaagccagaattcaaccttttcctcattctgtcagaagactgaagacacgggatacaggcacttccggttctgctactgccgcccaaccagctgataacctcctgggagacatagacgacctggaggactttgtgtatagtcctgcccctcaaggtgtcacagtaagatgtcggataatccgggataaaaggggaatggatcggggtctcttccccacctactatatgtacttggaaaaagaagaaaatcagaagatatttcttcttgcagctagaaagcggaaaaagagcaaaacagccaactaccttatctccattgatccagttgatttatctcgtgaaggagaaagttatgtcggcaagcttagatccaacctcatggggaccaagtttacagtttatgaccgtggcatctgccccatgaagggccggggtttggtaggagcggcccacacccggcaggagctggctgccatctcctatg

SEQ ID NO: 195799 - DNA, 1430 bp, Homo sapiens
  Payload ID: 18641
  Gene Name: tubby like protein 3
  ENST ID: ENST00000610453
  CDS Start-End: 45-1367
cggggaagagtgtgtacgtggtgggggcttcctcggtggcgggcatggaggcttcgcgctgccggctcagtcccagcggcgacagtgtcttccatgaagaaatgatgaagatgcgacaggctaagctggattatcagaggctactacttgagaagaggcaaaggaaaaagcgccttgagccatttatggtgcagcccaatccagaagccaggctacgtcgggcaaagccaagggccagtgatgagcagactcccttggtgaactgtcatactccccacagcaatgtcatcttacatggtattgatggtccagctgctgtcctgaaaccagacgaagttcatgctccatcagtaagctcctctgttgtggaagaagatgctgaaaacaccgtggatactgcttccaagccaggacttcaggagcgtctccaaaagcatgatatctctgaaagtgtgaacttcgatgaggagactgatggaatatcccagtcagcatgtttagaaagacccaattctgcatcaagccagaattcaaccgatacaggccttccggttctgctactgccgcccaaccagctgataacctcctgggagacagacgacctggaggactttgtgtatagtcctgcccctcaaggtgtcacagtaagatgtcggataatccgggataaaaggggaatggatcggggtcttccccacctactatatgtacttggaaaagaagaaaatcagaagatatttcttcttgcagctagaaagcggaaaaagagcaaaacagccaactaccttatctccattgatccagttgatttatctcgtgaaggagaaagttatgtcggcaagcttagatccaacctcatggggaccaagtttacagtttatgaccgtggcatctgccccatgaagggccggggtttggtaggagcggcccacacccggcaggagctggctgccatctcctatgaaacaaacgtacttggatttaaaggtcctaggaaaatgtctgtgatcattcctggaatgacactgaatcataagcagatcccctatcagccacaaaacaaccatgacagtttgctctcaaggtggcagaacagaactatggaaaatctggttgagctgcacaacaaggcccccgtctggaacagtgacactcagtcctatgtcctcaacttccgtggccgggtcactcaggcgtctgtgaagaacttccagatagtccacaaaaatgaccctgattatatagtcatgcagtttggacgtgtggcagatgacgtgttcacactggattacaactacccactttgtgcagtacaggcctttggcatcggtctttctagctttgacagtaagctggcgtgtgaatgagagaacagtcaggcagggagcccttctccccacagagctttcaggagcagacagtggcctccc

SEQ ID NO: 195800 - DNA, 5170 bp, Homo sapiens
  Payload ID: 18642
  Gene Name: tubby like protein 4
  Uniprot ID: Q9NRJ4
  ENST ID: ENST00000367094
  CDS Start-End: 1358-3394
gaaattttaatttattattcccccccttttttcctgcatctataggataatattgtaaaatagcaattgaaaccaataattattaaataaatatcaaggaaaatccaagcaaagctttctttttgttggactagtggtgtggtgtttggagacagtctctgaatgtgaacaggaaagcacccatcagcaaaacactatcactctctagggagacagctgggggaatctgactctggcttctgcttttgttttaagggattaacttccctgtcaagtccaagaagacttgcgtatgagaagattacctgatggacttaattctaagattagcttttttcatcaagatggaaaaagatctttaggagcagaaaaggggagtgctaactgggggagcgagaagggagacgagcaaaagaaacaaaatcttgccacgtggctctgttttgtcagcaagaggatttaagactcacccagggcaaacactgggaccactgtaagagcgctggaacattctgcctcttgagtgaaggggccttctttctagcctctatggcactgaggggtgcgccggctggtggaggagcagtccgatggagccctgcgttccccggggacacagggccaagctttgaggtggaaagtttctggttctgaaacaacaaggagagagtctgtttttcttcctaaaatttggactcttgtctgcacaaactctggtctgttttgcacggtttgtgtgcctttttttccctttatgcaatctttttcagctttagcagcagaaatttgtctagttcaggaaacatgctagagggtggcttcagaaggaagatgatcctgtgtattctgtctctgcatccgaacttttgaagagaaaaattcgagctagagggattcttaaagccttaagttacttgaaatctatgtatttgcaaccctttgtctctggaatcatattacactaaactggaatctcaggctgaatgagaataaccaagtggagtaaaaagaagaaaaccgtttcttgatcaccacttaattaacgatgctctttctccaaaggatcagcacgttcttcctctgagaacttgaaaatacaaatggaccccatgtttttttaagcattaccttttcttagaagactgccatcatcttttatagaggaattttttcactatgcattcggtggatctttataaaatactgaccttctaattagattcaggtcagtcttaattaaagggggaaaaaagcaacgcaagccaaccacaaaaacacatataccaatgaaagaaattggtttaaatttcacagcattaacattactttttaagtaaaacagttcattgaagaaagtatgtatgcagcagtggaacatgggcctgtgctttgcagcgattccaacatcctgtgcctgtcctggaaggggcgtgtccccaagagtgagaaggagaagcctgtgtgcaggagacgctactatgaggaaggctggctggccacgggcaacgggcgaggagtggttggggtgactttcacctctagtcactgtcgcagggacaggagtactccacagaggataaatttcaacctccggggccacaatagcgaggttgtgctggtgaggtggaatgagccctaccagaaactggccacgtgcgatgcggacggaggcatattcgtgtggattcagtacgagggcaggtggtctgtggagctggtcaacgaccgcggggcgcaggtgagtgatttcacgtggagccatgatggaactcaagcacttatttcctatcgagatgggtttgtcctggttgggtctgtcagtggacaaagacactggtcatccgaaatcaacttggaaagtcaaattacgtgtggcatatggactcctgacgaccaacaggtgctgtttggcacggccgatgggcaggtgattgtcatggattgccacggcagaatgctggcccacgtcctcttgcacgagtcagacggtgtcctcggcatgtcctggaactacccgatcttcctggtggaggacagcagcgagagcgacacggactcagatgactacgcccctccccaagatggtccggcagcatatcccatcccagtgcagaacatcaagcctctgctcaccgtcagcttcacctcgggagacatcagcttaatgaacaactacgatgacttgtctcccacggtcatccgctcagggctgaaagaggtggtagcccagtggtgcacacagggggacttgctggcagtcgctgggatggaacggcagacccagcttggtgagcttcccaatggtccccttctgaagagtgccatggtcaagttctacaatgttcgtggggagcacatcttcacactggacactctcgtgcagcgccccatcatctccatctgctggggtcaccgggattcgaggctgttgatggcatcaggaccagccctgtacgtggtgcgtgtggagcaccgggtgtccagcctgcagctgctgtgccagcaggccatcgccagcaccttgcgtgaggacaaggacgtcagcaagctgactctgcccccccgcctctgctcctacctctccactgccttcatccccaccatcaagcccccaattccagatccgaacaacatgagagactttgtcagctacccatcagccggcaacgagcggctgcactgcaccatgaagcgcacagaggacgacccggaggtgggcggcccgtgctacacgctctacctggagtacctgggcgggcttgtgcccatcctcaaagggcggcgcatcagcaagctgcggccagagttcgtcatcatggacccgcggacagatagcaaaccagatgaaatctatgggaacagcttgatttctactgtgatcgacagctgcaactgctcagactccagtgacattgagctgagtgatgactgggctgccaagaaatctcccaaaatctccagagctagcaaatcacccaaactcccaaggatcagcattgaggcccgcaagtcacccaagctgccccgggctgctcaggagctctcccggtccccacggttgcccctgcgcaagccctctgtgggctcgcccagcctgactcggagagagtttccttttgaagacatcactcagcacaactatcttgctcaggtcacgtctaatatctggggaaccaaatttaagattgtgggcttggctgctttcctgccaaccaacctcggtgcagtaatctataaaaccagcctcctgcatctccagccgcggcagatgaccatttatctcccagaagttcggaaaatttccatggactatattaatttacctgtcttcaacccaaatgttttcagtgaagatgaagatgatttaccaggtgatgcagtttggacggattgatggcagtgcgtacattctagacttccagtatccgttctcagccgtgcaggcctttgcagttgccctggccaacgtgactcagcgcctcaaatgaagagactggtgtggggaggagagagatgcagagagcctttggaagaggtcttcggagatgccagaggagccctctaggggtccgatgcctgggaggaccagaagccaacagcaaaactggaaaagcccggcaggcccaggagagggcgctgacctgtggtcgtcatttatttggttgggttttattaccttttattgtctgttcttcttttcttctttcatttcagtggcatttggaagcaaagagtgctaggcacctgctgttctttcaggaaacagcttggctgtggtaatgctctactgggcccttcagaatgaagacagtctgccttagagcctgctattcttttagacatagggaggatgcattatcctgtattctcctccaacatcaccactagcgtaaaagcaaaaagcttttacaaaacacagccaaaaattctcaagatgcaggttcttggggaatgggatggggacagcatttgatttacactgattatgttactccccaaaaggtgacttaattaataaagggcatttgggcagacacactgtgttggaccaacaaagtaggctctttacaggggtgttctcaccaggtagaaatgcgatttgctcactgaggatgttggggaagggacgaagggtaaagaagaaactgcacgtatacacaggttcacatcactctgcagacagcaatgtgactcagcgtgtgacttgtagcagcagtacgagggctacactcctctgctgaggatgtctacattgaaagcctccactagtttcatcgtttgtcaaagttccgtaggatcagtgatggtcattcagcatgactggttctgggagaaggtgagagacaaaaatggaaagatcctggcctgtggtagtggtagcagttttctcaaataatgtggtgacagtcactagatcctcacatgctgagaaacagcctctactctctctgccccttttactttttaatctggaatgcattactgtaaacatgatctttcccatgagataccatgttctatgccttcccattctaaaagtgtggacaacgcttgatttgaaaccactccttttctcctcttggctacattaaaattcagttgactacaaatgctttctatcaaattagaaatgtaaccaaaaaaatgttaagtgttcaccagggtattaaaatacagaggagtatggtcaaatctttgacaaaattttcatgatcttctctaacaaaaaaagttgtttattaactgtacagactgtttactaaggagctaaaccactgagaaaacgttattaaaattgtaatacctaggtagttggttgatcacagtttgttaattgtataaaaaaaaattacctagaatatctcttcccacttcctcgtcctcgtgagaacctgtgggcagtattcaagccctgatgacaaaacccagtgttttttgttgttgttttttgttgttgttttttgtttttgtttttgtttttctcagtcttacctgtgatgttgtttaggatcaggcccctctcctgggcctgctgtgcaggagcacaggaactatctgctggcgttgggttccaaatttgcattttatttggaaacagacaagtagaagatgctacagaaaagtattttcaaatttaaacgttttttaatcccctgttttagttaaaaaa

SEQ ID NO: 195801 - DNA, 11295 bp, Homo sapiens
  Payload ID: 18642
  Gene Name: tubby like protein 4
  Uniprot ID: Q9NRJ4
  ENST ID: ENST00000367097
  CDS Start-End: 1530-6161
tgtttgttgcactttatttttcagtgggtttggtgatttggacggattaaaattctagactgaaaagtaactcctactgtggttatggctagaggaaagcaagttcaagtatgatgggacaagtttgaataatgaactgattcctttgcctatcttaattaactgtatttgagaaattttaatttattattcccccccttttttcctgcatctataggataatattgtaaaatagcaattgaaaccaataattattaaataaatatcaaggaaaatccaagcaaagctttctttttgttggactagtggtgtggtgtttggagacagtctctgaatgtgaacaggaaagcacccatcagcaaaacactatcactctctagggagacagctgggggaatctgactctggcttctgcttttgttttaagggattaacttccctgtcaagtccaagaagacttgcgtatgagaagattacctgatggacttaattctaagattagcttttttcatcaagatggaaaaagatctttaggagcagaaaaggggagtgctaactgggggagcgagaagggagacgagcaaaagaaacaaaatcttgccacgtggctctgttttgtcagcaagaggatttaagactcacccagggcaaacactgggaccactgtaagagcgctggaacattctgcctcttgagtgaaggggccttctttctagcctctatggcactgaggggtgcgccggctggtggaggagcagtccgatggagccctgcgttccccggggacacagggccaagctttgaggtggaaagtttctggttctgaaacaacaaggagagagtctgtttttcttcctaaaatttggactcttgtctgcacaaactctggtctgttttgcacggtttgtgtgcctttttttccctttatgcaatctttttcagctttagcagcagaaatttgtctagttcaggaaacatgctagagggtggcttcagaaggaagatgatcctgtgtattctgtctctgcatccgaacttttgaagagaaaaattcgagctagagggattcttaaagccttaagttacttgaaatctatgtatttgcaaccctttgtctctggaatcatattacactaaactggaatctcaggctgaatgagaataaccaagtggagtaaaaagaagaaaaccgtttcttgatcaccacttaattaacgatgctctttctccaaaggatcagcacgttcttcctctgagaacttgaaaatacaaatggaccccatgtttttttaagcattaccttttcttagaagactgccatcatcttttatagaggaattttttcactatgcattcggtggatctttataaaatactgaccttctaattagattcaggtcagtcttaattaaagggggaaaaaagcaacgcaagccaaccacaaaaacacatataccaatgaaagaaattggtttaaatttcacagcattaacattactttttaagtaaaacagttcattgaagaaagtatgtatgcagcagtggaacatgggcctgtgctttgcagcgattccaacatcctgtgcctgtcctggaaggggcgtgtccccaagagtgagaaggagaagcctgtgtgcaggagacgctactatgaggaaggctggctggccacgggcaacgggcgaggagtggttggggtgactttcacctctagtcactgtcgcagggacaggagtactccacagaggataaatttcaacctccggggccacaatagcgaggttgtgctggtgaggtggaatgagccctaccagaaactggccacgtgcgatgcggacggaggcatattcgtgtggattcagtacgagggcaggtggtctgtggagctggtcaacgaccgcggggcgcaggtgagtgatttcacgtggagccatgatggaactcaagcacttatttcctatcgagatgggtttgtcctggttgggtctgtcagtggacaaagacactggtcatccgaaatcaacttggaaagtcaaattacgtgtggcatatggactcctgacgaccaacaggtgctgtttggcacggccgatgggcaggtgattgtcatggattgccacggcagaatgctggcccacgtcctcttgcacgagtcagacggtgtcctcggcatgtcctggaactacccgatcttcctggtggaggacagcagcgagagcgacacggactcagatgactacgcccctccccaagatggtccggcagcatatcccatcccagtgcagaacatcaagcctctgctcaccgtcagcttcacctcgggagacatcagcttaatgaacaactacgatgacttgtctcccacggtcatccgctcagggctgaaagaggtggtagcccagtggtgcacacagggggacttgctggcagtcgctgggatggaacggcagacccagcttggtgagcttcccaatggtccccttctgaagagtgccatggtcaagttctacaatgttcgtggggagcacatcttcacactggacactctcgtgcagcgccccatcatctccatctgctggggtcaccgggattcgaggctgttgatggcatcaggaccagccctgtacgtggtgcgtgtggagcaccgggtgtccagcctgcagctgctgtgccagcaggccatcgccagcaccttgcgtgaggacaaggacgtcagcaagctgactctgcccccccgcctctgctcctacctctccactgccttcatccccaccatcaagcccccaattccagatccgaacaacatgagagactttgtcagctacccatcagccggcaacgagcggctgcactgcaccatgaagcgcacagaggacgacccggaggtgggcggcccgtgctacacgctctacctggagtacctgggcgggcttgtgcccatcctcaaagggcggcgcatcagcaagctgcggccagagttcgtcatcatggacccgcggacagatagcaaaccagatgaaatctatgggaacagcttgatttctactgtgatcgacagctgcaactgctcagactccagtgacattgagctgagtgatgactgggctgccaagaaatctcccaaaatctccagagctagcaaatcacccaaactcccaaggatcagcattgaggcccgcaagtcacccaagctgccccgggctgctcaggagctctcccggtccccacggttgcccctgcgcaagccctctgtgggctcgcccagcctgactcggagagagtttccttttgaagacatcactcagcacaactatcttgctcaggtcacgtctaatatctggggaaccaaatttaagattgtgggcttggctgctttcctgccaaccaacctcggtgcagtaatctataaaaccagcctcctgcatctccagccgcggcagatgaccatttatctcccagaagttcggaaaatttccatggactatattaatttacctgtcttcaacccaaatgttttcagtgaagatgaagatgatttaccagtgacaggagcatctggtgtccctgagaacagcccaccttgtaccgtgaacatccctattgcaccgatccacagctcggctcaggctatgtcccccacgcagagcatagggctggtgcagtccctactggccaatcagaatgtgcagctagatgtcctgaccaaccagacgacagctgtagggacagcagaacatgcaggtgacagtgccacccagtacccagtctccaaccggtactccaatcctggacaggtgattttcggaagcgtggaaatgggccgcatcattcagaacccccctccactgtccctgcctcccccgccgcaggggcccatgcagctgtccacggtgggccatggagaccgagaccacgaacacctgcagaagtcagccaaggccctgcggccaacaccgcagctggcagctgagggggacgcagtggtctttagtgccccccaggaggtccaggtgacgaagataaaccctccacccccgtacccaggaaccatccccgctgcccccaccacagcagcacccccgccccctctgccgcccccacagcccccagtggatgtgtgcttgaagaagggcgacttctccctctaccccacgtcagtgcactaccagacccccctgggctatgagaggatcaccaccttcgacagcagtggcaacgtggaggaggtgtgccggccccgcacccggatgctgtgctcccagaacacgtacaccctccccggcccgggtagctctgccaccttgaggctcacggccactgagaagaaggtccctcagccctgcagcagtgccaccctgaaccgcctgaccgtccctcgctactccatccccaccggggacccacccccgtatcctgaaattgccagccagctggcccaggggcggggggctgcccagaggtccgacaatagcctcatccacgctaccctgcggaggaacaaccgtgaggctacgctcaagatggcccagctggccgacagcccgcgggcccccctgcagcccctggccaagtccaagggcgggcccgggggggtggtgacacagctcccagcgcggcccccacctgccctgtacacctgcagtcagtgcagtggcacagggcccagctcacagcccggagcctccctggcccataccgccagcgcctccccgttggcctcccagtcctcctacagcctcctgagcccacccgacagcgcccgcgaccgcaccgactacgtcaactcggccttcacggaggacgaggccctgtcccagcactgtcagcttgagaagcccttgaggcaccctcccctgcctgaagctgctgtcaccctgaaacggccacccccttaccagtgggaccccatgctgggtgaggatgtttgggttcctcaagaaaggacagcacagacttcagggcccaaccccttaaaactgtcctctctgatgctgagtcagggccagcacctggacgtgtcccgactgcccttcatctcccccaagtctcctgccagccccactgccactttccaaacaggctatgggatgggagtgccatatccaggaagctataacaacccccctttgcctggagtgcaggctccctgctctcccaaagatgccctgtccccaacgcagtttgcacaacaggagcctgctgtggtccttcagccgctgtacccacccagcctctcctattgcaccctgccccccatgtacccaggaagcagcacgtgctctagtttacagctgccacctgtcgccttgcatccatggagttcctacagcgcctgcccgcccatgcagaacccccagggcactctccccccaaagccacacttggtggtggagaagccccttgtgtccccaccacctgccgacctccaaagccacttgggcacagaggtgatggtagagactgcagacaacttccaggaagtcctctccctgaccgaaagcccagtcccccagcggacagaaaaatttggaaagaagaaccggaagcgcctggacagccgagcagaagaaggcagcgttcaggccatcactgagggcaaagtgaagaaggaggctaggactttgagtgactttaattccctaatctccagcccacacctggggagagagaagaagaaagtgaagagtcagaaagaccaactgaagtcaaagaagttgaataagacaaacgagttccaggacagctccgagagcgagcctgagctgttcatcagcggggatgagctcatgaaccagagccagggcagcagaaagggctggaaaagcaagcgctccccacgggccgccggcgagctggaggaggccaagtgccggcgggccagtgagaaggaggacgggcggctgggcagccaaggcttcgtgtacgtgatggccaacaagcagccgctgtggaacgaggccacccaggtctaccagctggacttcggggggcgggtgacccaggagtccgccaagaacttccagattgagttagaggggcggcaggtgatgcagtttggacggattgatggcagtgcgtacattctagacttccagtatccgttctcagccgtgcaggcctttgcagttgccctggccaacgtgactcagcgcctcaaatgaagagactggtgtggggaggagagagatgcagagagcctttggaagaggtcttcggagatgccagaggagccctctaggggtccgatgcctgggaggaccagaagccaacagcaaaactggaaaagcccggcaggcccaggagagggcgctgacctgtggtcgtcatttatttggttgggttttattaccttttattgtctgttcttcttttcttctttcatttcagtggcatttggaagcaaagagtgctaggcacctgctgttctttcaggaaacagcttggctgtggtaatgctctactgggcccttcagaatgaagacagtctgccttagagcctgctattcttttagacatagggaggatgcattatcctgtattctcctccaacatcaccactagcgtaaaagcaaaaagcttttacaaaacacagccaaaaattctcaagatgcaggttcttggggaatgggatggggacagcatttgatttacactgattatgttactccccaaaaggtgacttaattaataaagggcatttgggcagacacactgtgttggaccaacaaagtaggctctttacaggggtgttctcaccaggtagaaatgcgatttgctcactgaggatgttggggaagggacgaagggtaaagaagaaactgcacgtatacacaggttcacatcactctgcagacagcaatgtgactcagcgtgtgacttgtagcagcagtacgagggctacactcctctgctgaggatgtctacattgaaagcctccactagtttcatcgtttgtcaaagttccgtaggatcagtgatggtcattcagcatgactggttctgggagaaggtgagagacaaaaatggaaagatcctggcctgtggtagtggtagcagttttctcaaataatgtggtgacagtcactagatcctcacatgctgagaaacagcctctactctctctgccccttttactttttaatctggaatgcattactgtaaacatgatctttcccatgagataccatgttctatgccttcccattctaaaagtgtggacaacgcttgatttgaaaccactccttttctcctcttggctacattaaaattcagttgactacaaatgctttctatcaaattagaaatgtaaccaaaaaaatgttaagtgttcaccagggtattaaaatacagaggagtatggtcaaatctttgacaaaattttcatgatcttctctaacaaaaaaagttgtttattaactgtacagactgtttactaaggagctaaaccactgagaaaacgttattaaaattgtaatacctaggtagttggttgatcacagtttgttaattgtataaaaaaaaattacctagaatatctcttcccacttcctcgtcctcgtgagaacctgtgggcagtattcaagccctgatgacaaaacccagtgttttttgttgttgttttttgttgttgttttttgtttttgtttttgtttttctcagtcttacctgtgatgttgtttaggatcaggcccctctcctgggcctgctgtgcaggagcacaggaactatctgctggcgttgggttccaaatttgcattttatttggaaacagacaagtagaagatgctacagaaaagtattttcaaatttaaacgttttttaatcccctgttttagttaaaaaattggaaaagaaaccgacccatttttttcccagatcaagatgacatgacatcactcccaattctctccaaaccccagagaaatactgacgaagttttctgatgtggcaaaggatatttcccatctaataccagtttctcatttatatttaacgtattggacctgatatttttagtgggtgcattcttccagaaagaattcagcaatgttatcagaattaattcttttatatgagtttatgtagcttgatatggtgtttcagtgcttattggttgtgcaataatggttatagcctgttagataatctaaatgcaattcccctgttttgtcgtttaggagataattatttatcttgcttttcatagtgttcttaggaattattttgttgttacgttttggtgagttatacccattttatttatttagaaaaatagtatctttgttaacgacttacatggtcacagtatattttgctgcaagaaataaagaggatatgatagaaggtttttttttttttttttttttttttttgagacggagtcccactcttgtcgcccaactagagtgtagtggcacaatctcggctccccacaacctctgactccagggttcaggtgattattttgcctcagcctcccaagcagctgggattatagacacccgccaacacgccaggctaatgtttttgtatttttaatagagatggggttttgccatgttggccaggctggtcttgaactcctgacctcaggtgatccgcccgcctcggcctcccaaagtgctgggattacagacgtgagccaccactcccggcccatagaaggttttttgctggataatttgtaacttttctaattgggaaaaaattcctattaatcacttaaaaatttttttttgtattttgtgttattgattatatacaaaggagactttttttttgagataacactcaaatagtattctcttcttttgaaaattttatttttatctgaaaataacagttgatctgaaataaaaaggggagacctattagaatgagagtagccaaggaaagagttactaggtaataagcttcactttttgtgttctaattgtttttgagatataaagaccctgaaaaagcccattttagaacctgtttaataagagcaaatataggggaaaatctttgaaatgaaagctacaaatacatgtgagaagaaaaaaatggatttttttagcaaataattaactaagcttctaaatgcctagctccctcccccaaaggcgctttcccccgatggaggcacaggcttctgtctcggatgtttggcgcacgtgagtttgtatgagtttgtaccggagtgaccccggcagccactgcccacctcccctctacccaggggcctgaaaagaggggctgccctcctgcgccaaggcagacacaagctgcgggctgtgcggtcctagtagtgtgacgtttcagttaatagtggtggtcttattttcaactatgctttcattcagtcagtctctgttgactaaatacgacgaaaattcatactttatgcaggagatttctaaaaatttaatgtttattaatagtttatgaatatcaagatacctcattgaatccctaaatttaaaagcagtccagtaaaaggttaactgtataaagaatctatgactttttgagggaagtgtgatatattaacaaatataaccaattctaaatttgttttagctctaacctcatcaaaccaaaggcacagatttgtgtacaatatacccattgaatgtatatcctgagaaaaattggggccaaagaagcaggaaaatctcaaagctctaatggcagcataaatcaaagaatttcacaggctagtgtttttatccatagccattgctcccttgtcaagtgtctcacaaggacatggaagaatgtgttatgttcatcttgtaatcatagcaaaaagtctgcaaaccccagggtcaagcctgctctgccacagggttggatggtgaccttgggcaagtccctggggctggctaggcctccacttgtccatctgtgaaatgaaaggatcagcctggacagccctctaaactcccttacagctctcagcctaagagcgcagcactgaacagcctcatcattccacttttcatgggaaatatatttcacaccattgcctttgtgtagagaaatatttcttttcctgtgttaatgagctatgtactgaatataaaccagtgcatttaaagtaatatcttttgtgcacctctaaatgtgtttggaattgtgtttgttctcatagaatatacaaaagtactgattctaggtaagaaggagtctccacgggtgtgccctgctcagctggatgtccatgagaacagccatgaaataagtcactacttgtccccaaaaccacaggaatatatacctaggtcacctcaaattcctgagtgtgctctgccatgttacacggtcttcaaattgaaaaggtttcttgaaaaggaaagtttggcccagcaactggagaaggagtccatggtgtcgctgtgtgcctgtatcatttggccaagtcaatggttgtaagcaaagttagtggagacaaaaatgtgtccaaaatgtcgtttgagttcctgggatttctgtaatagcacacaactcagaactcttcagcatttgtgtgattccttacctctggctgataaaactctaatgggttgtggcttactttgtttccattttctttggctttgtgcaatttttgtgtaactttacttgtacctatattttctgtttacagttctttttaaggggaggggtagggttctaagatcttgttgtttattgtagataaaaattttttcgtgttgtagaaaagcatgggttatgcgtttgactgaaaaagacactgtattatttaccaaaggggtattgtttttgcatttgtttataaatgcattattttggtactgtaaatttggacataatttctgagtttattactactggcattttctttttcccttttttttttttttaaccgtaagtgcacgatgcaggtgcataggccccagaccaaactagaccaccagcatgttcatgtccagacctcggcagtggcgtgcactgcttgtgcacctcagttcctccagtgttggtttgtttgttttttaattcagcatcctgctggttttactttccaagcaagatctgttgcgactcccaaatgcgttttaatgagctcatccttatttgcctttcttcttacgtattttgtgtattagattgtgcaggagatattctagaaggcattaatggtttgcattcaaaacgatgtggtttgtccaagttattttctgtctttattactgagacggattaatctccttatttttttcttgatgatttgaagttgtaagagttgtccagctattgcttaataaaattttgcagatcaaaaaa

SEQ ID NO: 195802 - DNA, 804 bp, Homo sapiens
  Payload ID: 18642
  Gene Name: tubby like protein 4
  ENST ID: ENST00000613390
  CDS Start-End: 1-650
gtccccttctgaagagtgccatggtcaagttctacaatgttcgtggggagcacatcttcacactggacactctcgtgcagcgccccatcatctccatctgctggggtcaccgggattcgaggctgttgatggcatcaggaccagccctgtacgtggtgcgtgtggagcaccgggtgtccagcctgcagctgctgtgccagcaggccatcgccagcaccttgcgtgaggacaaggacgtcagcaagctgactctgcccccccgcctctgctcctacctctccactgccttcatccccaccatcaagcccccaattccagatccgaacaacatgagagactttgtcagctacccatcagccggcaacgagcggctgcactgcaccatgaagcgcacagaggacgacccggaggtgggcggcccgtgctacacgctctacctggagtacctgggcgggcttgtgcccatcctcaaagggcggcgcatcagcaagctgcggccagagttcgtcatcatggacccgcggacagatagcaaaccaggatcagcattgaggcccgcaagtcacccaagctgccccgggctgctcaggagctctcccggtccccacggttgcccctgcgcaagccctctgtgggctcgcccagcctgactcggagagagtttccttttgaagacatcactcagcacaactatcttgctcaggtcacgtctaatatctggggaaccaaatttaagattgtgggcttggctgctttcctgccaaccaacctcggtgcagtaatctataaaaccagcctcctgca

SEQ ID NO: 195803 - DNA, 8604 bp, Homo sapiens
  Payload ID: 18643
  Gene Name: tuberous sclerosis 1
  Uniprot ID: Q92574
  ENST ID: ENST00000298552
  CDS Start-End: 223-3717
gtgctgtacgtccaagatggcggcgccctgtaggctggagggactgtgaggtaaacagctgagggggaggagacggtggtgaccatgaaagacaccaggttgacagcactggaaactgaagtaccagttgtcgctagaacagtttggtagtggccccaatgaagaaccttcagaacctgtagcacacgtcctggagccagcacagcgccttcgagcgagagaatggcccaacaagcaaatgtcggggagcttcttgccatgctggactcccccatgctgggtgtgcgggacgacgtgacagctgtctttaaagagaacctcaattctgaccgtggccctatgcttgtaaacaccttggtggattattacctggaaaccagctctcagccggcattgcacatcctgaccaccttgcaagagccacatgacaagcacctcttggacaggattaacgaatatgtgggcaaagccgccactcgtttatccatcctctcgttactgggtcatgtcataagactgcagccatcttggaagcataagctctctcaagcacctcttttgccttctttactaaaatgtctcaagatggacactgacgtcgttgtcctcacaacaggcgtcttggtgttgataaccatgctaccaatgattccacagtctgggaaacagcatcttcttgatttctttgacatttttggccgtctgtcatcatggtgcctgaagaaaccaggccacgtggcggaagtctatctcgtccatctccatgccagtgtgtacgcactctttcatcgcctttatggaatgtacccttgcaacttcgtctcctttttgcgttctcattacagtatgaaagaaaacctggagacttttgaagaagtggtcaagccaatgatggagcatgtgcgaattcatccggaattagtgactggatccaaggaccatgaactggaccctcgaaggtggaagagattagaaactcatgatgttgtgatcgagtgtgccaaaatctctctggatcccacagaagcctcatatgaagatggctattctgtgtctcaccaaatctcagcccgctttcctcatcgttcagccgatgtcaccaccagcccttatgctgacacacagaatagctatgggtgtgctacttctaccccttactccacgtctcggctgatgttgttaaatatgccagggcagctacctcagactctgagttccccatcgacacggctgataactgaaccaccacaagctactctttggagcccatctatggtttgtggtatgaccactcctccaacttctcctggaaatgtcccacctgatctgtcacacccttacagtaaagtctttggtacaactgcaggtggaaaaggaactcctctgggaaccccagcaacctctcctcctccagccccactctgtcattcggatgactacgtgcacatttcactcccccaggccacagtcacaccccccaggaaggaagagagaatggattctgcaagaccatgtctacacagacaacaccatcttctgaatgacagaggatcagaagagccacctggcagcaaaggttctgtcactctaagtgatcttccagggtttttaggtgatctggcctctgaagaagatagtattgaaaaagataaagaagaagctgcaatatctagagaactttctgagatcaccacagcagaggcagagcctgtggttcctcgaggaggctttgactctcccttttaccgagacagtctcccaggttctcagcggaagacccactcggcagcctccagttctcagggcgccagcgtgaaccctgagcctttacactcctccctggacaagcttgggcctgacacaccaaagcaagcctttactcccatagacctgccctgcggcagtgctgatgaaagccctgcgggagacagggaatgccagacttctttggagaccagtatcttcactcccagtccttgtaaaattccacctccgacgagagtgggctttggaagcgggcagcctcccccgtatgatcatctttttgaggtggcattgccaaagacagcccatcattttgtcatcaggaagactgaggagctgttaaagaaagcaaaaggaaacacagaggaagatggtgtgccctctacctccccaatggaagtgctggacagactgatacagcagggagcagacgcgcacagcaaggagctgaacaagttgcctttacccagcaagtctgtcgactggacccactttggaggctctcctccttcagatgagatccgcaccctccgagaccagttgcttttactgcacaaccagttactctatgagcgttttaagaggcagcagcatgccctccggaacaggcggctcctccgcaaggtgatcaaagcagcagctctggaggaacataatgctgccatgaaagatcagttgaagttacaagagaaggacatccagatgtggaaggttagtctgcagaaagaacaagctagatacaatcagctccaggagcagcgtgacactatggtaaccaagctccacagccagatcagacagctgcagcatgaccgagaggaattctacaaccagagccaggaattacagacgaagctggaggactgcaggaacatgattgcggagctgcggatagaactgaagaaggccaacaacaaggtgtgtcacactgagctgctgctcagtcaggtttcccaaaagctctcaaacagtgagtcggtccagcagcagatggagttcttgaacaggcagctgttggttcttggggaggtcaacgagctctatttggaacaactgcagaacaagcactcagataccacaaaggaagtagaaatgatgaaagccgcctatcggaaagagctagaaaaaaacagaagccatgttctccagcagactcagaggcttgatacctcccaaaaacggattttggaactggaatctcacctggccaagaaagaccaccttcttttggaacagaagaaatatctagaggatgtcaaactccaggcaagaggacagctgcaggccgcagagagcaggtatgaggctcagaaaaggataacccaggtgtttgaattggagatcttagatttatatggcaggttggagaaagatggcctcctgaaaaaacttgaagaagaaaaagcagaagcagctgaagcagcagaagaaaggcttgactgttgtaatgacgggtgctcagattccatggtagggcacaatgaagaggcatctggccacaacggtgagaccaagacccccaggcccagcagcgcccggggcagtagtggaagcagaggtggtggaggcagcagcagcagcagcagcgagctttctaccccagagaaacccccacaccagagggcaggcccattcagcagtcggtgggagacgactatgggagaagcgtctgccagcatccccaccactgtgggctcacttcccagttcaaaaagcttcctgggtatgaaggctcgagagttatttcgtaataagagcgagagccagtgtgatgaggacggcatgaccagtagcctttctgagagcctaaagacagaactgggcaaagacttgggtgtggaagccaagattcccctgaacctagatggccctcacccgtctcccccgaccccggacagtgttggacagctacatatcatggactacaatgagactcatcatgaacacagctaaggaatgatggtcaatcagtgttaacttgcatattgttggcacagaacaggaggtgtgaatgcacgtttcaaagctttcctgtttccagggtctgagtgcaagttcatgtgtggaaatgggacggaggtcctttggacagctgactgaatgcagaacggtttttggatctggcattgaaatgcctcttgaccttcccctccacccgccctaaccccctctcatttacctcgcagtgtgttctaatccaagggccagttggtgttcctcagtagctttactttcttcctttcccccccaaatggttgcgtcctttgaacctgtgcaatatgaggccaaatttaatctttgagtctaacacaccactttctgctttcccgaagttcagataactgggttggctctcaattagaccaggtagtttgttgcattgcaggtaagtctggttttgtcccttccaggaggacatagcctgcaaagctggttgtctttacatgaaagcgtttacatgagactttccgactgcttttttgattctgaagttcagcatctaaagcagcaggtctagaagaacaacggtttattcatacttgcattcttttggcagttctgataagcttcctagaaagttctgtgtaaacagaagcctgtttcagaaatctggagctggcactgtggagaccacacaccctttgggaaagctcttgtctcttcttcccccactacctcttatttatttggtgtttgcttgaatgctggtactattgtgaccacaggctggtgtgtaggtggtaaaacctgttctccataggagggaaggagcagtcactgggagaggttacccgagaagcacttgagcatgaggaactgcacctttaggccatctcagcttgctgggccttttgttaaacccttctgtctactggcctccctttgtgtgcatacgcctcttgttcatgtcagcttatatgtgacactgcagcagaaaggctctgaaggtccaaagagtttctgcaaagtgtatgtgaccatcatttcccaggccattagggttgcctcactgtagcaggttctaggctaccagaagaggggcagctttttcataccaattccaactttcaggggctgactctccagggagctgatgtcatcacactctccatgttagtaatggcagagcagtctaaacagagtccgggagaatgctggcaaaggctggctgtgtatacccactaggctgccccacgtgctcccgagagatgacactagtcagaaaattggcagtggcagagaatccaaactcaacaagtgctcctgaaagaaacgctagaagcctaagaactgtggtctggtgttccagctgaggcagggggatttggtaggaaggagccagtgaacttggctttcctgtttctatctttcattaaaaagaatagaaggattcagtcataaagaggtaaaaaactgtcacggtacgaaatcttagtgcccacggaggcctcgagcagagagaatgaaagtcttttttttttttttttttttttagcatggcaataaatattctagcatccctaactaaaggggactagacagttagagactctgtcaccctagctataccagcagaaaacctgttcaggcaggctttctgggtgtgactgattcccagcctgtggcagggcgtggtcccaactactcagcctagcacaggctggcagttggtactgaattgtcagatgtggagtattagtgacaccacacatttaattcagctttgtccaaaggaaagcttaaaacccaatacagtctagtttcctggttccgttttagaaaaggaaaacgtgaacaaacttagaaagggaaggaaatcccatcagtgaatcctgaaactggttttaagtgctttccttctcctcatgcccaagagatctgtgccatagaacaagataccaggcacttaaagccttttcctgaattggaaaggaaaagaggcccaagtgcaaaagaaaaaacattttagaaacggacagcttataaaaataaagggaagaaaggaggcagcatggagagaggcctgtgctagaagctccatggacgtgtctgcacagggtcctcagctcatccatgcggcctgggtgtccttttactcagctttataacaaatgtggctccaagctcaggtgcctttgagttctaggaggctgtgggttttattcaactacggttgggagaatgagacctggagtcatgttgaaggtgcccaacctaaaaatgtaggctttcatgttgcaaagaactccagagtcagtagttaggtttggtttggttttggacatgataaacctgccaagagtcaacaggtcacttgatcatgctgcagtgggtagttctaaggatggaaaggtgacagtattactctcgagaggcaattcagtcctgggcaaaggtattagtacaataagcgttaagggcagagtctaccttgaaaccaattaagcagcttggtattcataaatattgggattggatggcctccatccagaaatcactatgggtgagcatacctgtctcagctgtttggccaatgtgcataacctactcggatccccacctgacactaaccagagtcagcacaggccccgaggagcccgaagtctgctgctgtgcagcatggaattcctttaaaaaggtgcactacagttttagcggggagggggataggaagacgcagagcaaatgagctccggagtccctgcaggtgaataaacacacagatctgcatctgatagaactttgatggattttcaaaaagccgttgacaaggctctgctatacagtctataaaaattgttattatgggattggaagaaacacgtggtcatgaatagaaaaaaaacaaacccaaaggtaggaaggtcaaggtcatttcttagatggagaagttgtgaaagatgtccttggagatgagttttaggaccagcattactaaggcaggtgggcagacagtgacctctctaggtgtgtccacagagtttttcaggagagaaaactgcctgacctttgggactaagctgcggaatcttcttactaagcttgaagagtggagaggcgagaggtgagctactttgtgagccaaagcttatgtgacatggttggggaaacagtccaaactgttctgagaaggtgaactgttacgacccaggacaattagaaaaattcacccaccatgccgcacattactgggtaaaagcagggcagcagggaacaaaactccagactcttgggccgtccccatttgcaacagcacacatagtttctggtatatttgttgggaaagataaaactctagcagttgttgaggggaggatgtataaaatggtcatggggatgaaaggatctctgagaccacagaggctcagactcactgttaagaatagaaaactgggtatgcgtttcatgtagccagcagaactgaagtgtgctgtgacaagccaatgtgaatttctaccaaatagtagagcataccacttgaagaaggaaagaaccgaagagcaaacaaaagttctgcgtaatgagactcaccttttctcgctgaaagcactaagaggtgggaggaggcctgcacaggctggaggagggtttgggcagagcgaagacccggccaggaccttggtgagatggggtgccgcccacctcctgcggatactcttggagagttgttcccccagggggctctgccccacctggagaaggaagctgcctggtgtggagtgactcaaatcagtatacctatctgctgcaccttcactctccagggtacatgctttaaaaccgacccgcaacaagtattggaaaaatgtatccagtctgaagatgtttgtgtatctgtttacatccagagttctgtgacacatgccccccagattgctgcaaagatcccaaggcattgattgcacttgattaagcttttgtctgtaggtgaaagaacaagtttaggtcgaggactggcccctaggctgctgctgtgacccttgtcccatgtggcttgtttgcctgtccgggactcttcgatgtgcccaggggagcgtgttcctgtctcttccatgccgtcctgcagtccttatctgctcgcctgagggaagagtagctgtagctacaagggaagcctgcctggaagagccgagcacctgtgcccatggcttctggtcatgaaacgagttaatgatggcagaggagcttcctccccacttcgcagcgccacattatccatcctctgagataagtaggctggtttaaccattggaatggacctttcagtggaaaccctgagagtctgagaacccccagaccaacccttccctccctttccccacctcttacagtgtttggacaggagggtatggtgctgctctgtgtagcaagtactttggcttatgaaagaggcagccacgcattttgcactaggaagaatcagtaatcacttttcagaagacttctatggaccacaaatatattacggaggaacagattttgctaagacataatctagttttataactcaatcatgaatgaaccatgtgtggcaaacttgcagtttaaaggggtcccatcagtgaaagaaactgattttttttaacggactgcttttagttaaattgaagaaagtcagctcttgtcaaaaggtctaaactttcccgcctcaatcctaaaagcatgtcaacaatccacatcagatgccataaatatgaactgcaggataaaatggtacaatcttagtgaatgggaattggaatcaaaagagtttgctgtccttcttagaatgttctaaaatgtcaaggcagttgcttgtgtttaactgtgaacaaataaaaatttattgttttgcactac

SEQ ID NO: 195804 - DNA, 1507 bp, Homo sapiens
  Payload ID: 18643
  Gene Name: tuberous sclerosis 1
  ENST ID: ENST00000403810
  CDS Start-End: 235-1335
acgacgggggaggtgctgtacgtccaagatggcggcgccctgtaggctggagggactgtgaggtaaacagctgagggggaggagacggtggtgaccatgaaagacaccaggttgacagcactggaaactgaagtaccagttgtcgctagaacagtttggtagtggccccaatgaagaaccttcagaacctgtagcacacgtcctggagccagcacagcgccttcgagcgagagaatggcccaacaagcaaatgtcggggagcttcttgccatgctggactcccccatgctgggtgtgcgggacgacgtgacagctgtctttaaagagaacctcaattctgaccgtggccctatgcttgtaaacaccttggtggattattacctggaaaccagctctcagccggcattgcacatcctgaccaccttgcaagagccacatgacaagcacctcttggacaggattaacgaatatgtgggcaaagccgccactcgtttatccatcctctcgttactgggtcatgtcataagactgcagccatcttggaagcataagctctctcaagcacctcttttgccttctttactaaaatgtctcaagatggacactgacgtcgttgtcctcacaacaggcgtcttggtgttgataaccatgctaccaatgattccacagtctgggaaacagcatcttcttgatttctttgacatttttggccgtctgtcatcatggtgcctgaagaaaccaggccacgtggcggaagtctatctcgtccatctccatgccagtgtgtacgcactctttcatcgcctttatggaatgtacccttgcaacttcgtctcctttttgcgttctcattacagtatgaaagaaaacctggagacttttgaagaagtggtcaagccaatgatggagcatgtgcgaattcatccggaattagtgactggatccaaggaccatgaactggaccctcgaaggtggaagagattagaaactcatgatgttgtgatcgagtgtgccaaaatctctctggatcccacagaagcctcatatgaagatggctattctgtgtctcaccaaatctcagcccgctttcctcatcgttcagccgatgtcaccaccagcccttatgctgacacacagaatagctatgggtgtgctacttctaccccttactccacgtctcggctgatgttgttaaatatgccagggcagctacctcagactctgagttccccatcgacacggctgataactgaaccaccacaagtatggtgtcaactagtgtgcctgctctctcctctgctttctggtgaagctgaccctttgggtcagatttagtatgtggttgggaaaatttcacactgctcatttcaggagtcacttttaaggatccatgatattagcaaagaaagttactgttgcctcttagattcatcttgaagtcttgatttacaaaatgcaacttgtttcttgatacgcttttaataagatgcctttttctagatgaaaa

SEQ ID NO: 195805 - DNA, 8463 bp, Homo sapiens
  Payload ID: 18643
  Gene Name: tuberous sclerosis 1
  Uniprot ID: Q92574
  ENST ID: ENST00000440111
  CDS Start-End: 84-3578
cagtttggtagtggccccaatgaagaaccttcagaacctgtagcacacgtcctggagccagcacagcgccttcgagcgagagaatggcccaacaagcaaatgtcggggagcttcttgccatgctggactcccccatgctgggtgtgcgggacgacgtgacagctgtctttaaagagaacctcaattctgaccgtggccctatgcttgtaaacaccttggtggattattacctggaaaccagctctcagccggcattgcacatcctgaccaccttgcaagagccacatgacaagcacctcttggacaggattaacgaatatgtgggcaaagccgccactcgtttatccatcctctcgttactgggtcatgtcataagactgcagccatcttggaagcataagctctctcaagcacctcttttgccttctttactaaaatgtctcaagatggacactgacgtcgttgtcctcacaacaggcgtcttggtgttgataaccatgctaccaatgattccacagtctgggaaacagcatcttcttgatttctttgacatttttggccgtctgtcatcatggtgcctgaagaaaccaggccacgtggcggaagtctatctcgtccatctccatgccagtgtgtacgcactctttcatcgcctttatggaatgtacccttgcaacttcgtctcctttttgcgttctcattacagtatgaaagaaaacctggagacttttgaagaagtggtcaagccaatgatggagcatgtgcgaattcatccggaattagtgactggatccaaggaccatgaactggaccctcgaaggtggaagagattagaaactcatgatgttgtgatcgagtgtgccaaaatctctctggatcccacagaagcctcatatgaagatggctattctgtgtctcaccaaatctcagcccgctttcctcatcgttcagccgatgtcaccaccagcccttatgctgacacacagaatagctatgggtgtgctacttctaccccttactccacgtctcggctgatgttgttaaatatgccagggcagctacctcagactctgagttccccatcgacacggctgataactgaaccaccacaagctactctttggagcccatctatggtttgtggtatgaccactcctccaacttctcctggaaatgtcccacctgatctgtcacacccttacagtaaagtctttggtacaactgcaggtggaaaaggaactcctctgggaaccccagcaacctctcctcctccagccccactctgtcattcggatgactacgtgcacatttcactcccccaggccacagtcacaccccccaggaaggaagagagaatggattctgcaagaccatgtctacacagacaacaccatcttctgaatgacagaggatcagaagagccacctggcagcaaaggttctgtcactctaagtgatcttccagggtttttaggtgatctggcctctgaagaagatagtattgaaaaagataaagaagaagctgcaatatctagagaactttctgagatcaccacagcagaggcagagcctgtggttcctcgaggaggctttgactctcccttttaccgagacagtctcccaggttctcagcggaagacccactcggcagcctccagttctcagggcgccagcgtgaaccctgagcctttacactcctccctggacaagcttgggcctgacacaccaaagcaagcctttactcccatagacctgccctgcggcagtgctgatgaaagccctgcgggagacagggaatgccagacttctttggagaccagtatcttcactcccagtccttgtaaaattccacctccgacgagagtgggctttggaagcgggcagcctcccccgtatgatcatctttttgaggtggcattgccaaagacagcccatcattttgtcatcaggaagactgaggagctgttaaagaaagcaaaaggaaacacagaggaagatggtgtgccctctacctccccaatggaagtgctggacagactgatacagcagggagcagacgcgcacagcaaggagctgaacaagttgcctttacccagcaagtctgtcgactggacccactttggaggctctcctccttcagatgagatccgcaccctccgagaccagttgcttttactgcacaaccagttactctatgagcgttttaagaggcagcagcatgccctccggaacaggcggctcctccgcaaggtgatcaaagcagcagctctggaggaacataatgctgccatgaaagatcagttgaagttacaagagaaggacatccagatgtggaaggttagtctgcagaaagaacaagctagatacaatcagctccaggagcagcgtgacactatggtaaccaagctccacagccagatcagacagctgcagcatgaccgagaggaattctacaaccagagccaggaattacagacgaagctggaggactgcaggaacatgattgcggagctgcggatagaactgaagaaggccaacaacaaggtgtgtcacactgagctgctgctcagtcaggtttcccaaaagctctcaaacagtgagtcggtccagcagcagatggagttcttgaacaggcagctgttggttcttggggaggtcaacgagctctatttggaacaactgcagaacaagcactcagataccacaaaggaagtagaaatgatgaaagccgcctatcggaaagagctagaaaaaaacagaagccatgttctccagcagactcagaggcttgatacctcccaaaaacggattttggaactggaatctcacctggccaagaaagaccaccttcttttggaacagaagaaatatctagaggatgtcaaactccaggcaagaggacagctgcaggccgcagagagcaggtatgaggctcagaaaaggataacccaggtgtttgaattggagatcttagatttatatggcaggttggagaaagatggcctcctgaaaaaacttgaagaagaaaaagcagaagcagctgaagcagcagaagaaaggcttgactgttgtaatgacgggtgctcagattccatggtagggcacaatgaagaggcatctggccacaacggtgagaccaagacccccaggcccagcagcgcccggggcagtagtggaagcagaggtggtggaggcagcagcagcagcagcagcgagctttctaccccagagaaacccccacaccagagggcaggcccattcagcagtcggtgggagacgactatgggagaagcgtctgccagcatccccaccactgtgggctcacttcccagttcaaaaagcttcctgggtatgaaggctcgagagttatttcgtaataagagcgagagccagtgtgatgaggacggcatgaccagtagcctttctgagagcctaaagacagaactgggcaaagacttgggtgtggaagccaagattcccctgaacctagatggccctcacccgtctcccccgaccccggacagtgttggacagctacatatcatggactacaatgagactcatcatgaacacagctaaggaatgatggtcaatcagtgttaacttgcatattgttggcacagaacaggaggtgtgaatgcacgtttcaaagctttcctgtttccagggtctgagtgcaagttcatgtgtggaaatgggacggaggtcctttggacagctgactgaatgcagaacggtttttggatctggcattgaaatgcctcttgaccttcccctccacccgccctaaccccctctcatttacctcgcagtgtgttctaatccaagggccagttggtgttcctcagtagctttactttcttcctttcccccccaaatggttgcgtcctttgaacctgtgcaatatgaggccaaatttaatctttgagtctaacacaccactttctgctttcccgaagttcagataactgggttggctctcaattagaccaggtagtttgttgcattgcaggtaagtctggttttgtcccttccaggaggacatagcctgcaaagctggttgtctttacatgaaagcgtttacatgagactttccgactgcttttttgattctgaagttcagcatctaaagcagcaggtctagaagaacaacggtttattcatacttgcattcttttggcagttctgataagcttcctagaaagttctgtgtaaacagaagcctgtttcagaaatctggagctggcactgtggagaccacacaccctttgggaaagctcttgtctcttcttcccccactacctcttatttatttggtgtttgcttgaatgctggtactattgtgaccacaggctggtgtgtaggtggtaaaacctgttctccataggagggaaggagcagtcactgggagaggttacccgagaagcacttgagcatgaggaactgcacctttaggccatctcagcttgctgggccttttgttaaacccttctgtctactggcctccctttgtgtgcatacgcctcttgttcatgtcagcttatatgtgacactgcagcagaaaggctctgaaggtccaaagagtttctgcaaagtgtatgtgaccatcatttcccaggccattagggttgcctcactgtagcaggttctaggctaccagaagaggggcagctttttcataccaattccaactttcaggggctgactctccagggagctgatgtcatcacactctccatgttagtaatggcagagcagtctaaacagagtccgggagaatgctggcaaaggctggctgtgtatacccactaggctgccccacgtgctcccgagagatgacactagtcagaaaattggcagtggcagagaatccaaactcaacaagtgctcctgaaagaaacgctagaagcctaagaactgtggtctggtgttccagctgaggcagggggatttggtaggaaggagccagtgaacttggctttcctgtttctatctttcattaaaaagaatagaaggattcagtcataaagaggtaaaaaactgtcacggtacgaaatcttagtgcccacggaggcctcgagcagagagaatgaaagtcttttttttttttttttttttttagcatggcaataaatattctagcatccctaactaaaggggactagacagttagagactctgtcaccctagctataccagcagaaaacctgttcaggcaggctttctgggtgtgactgattcccagcctgtggcagggcgtggtcccaactactcagcctagcacaggctggcagttggtactgaattgtcagatgtggagtattagtgacaccacacatttaattcagctttgtccaaaggaaagcttaaaacccaatacagtctagtttcctggttccgttttagaaaaggaaaacgtgaacaaacttagaaagggaaggaaatcccatcagtgaatcctgaaactggttttaagtgctttccttctcctcatgcccaagagatctgtgccatagaacaagataccaggcacttaaagccttttcctgaattggaaaggaaaagaggcccaagtgcaaaagaaaaaacattttagaaacggacagcttataaaaataaagggaagaaaggaggcagcatggagagaggcctgtgctagaagctccatggacgtgtctgcacagggtcctcagctcatccatgcggcctgggtgtccttttactcagctttataacaaatgtggctccaagctcaggtgcctttgagttctaggaggctgtgggttttattcaactacggttgggagaatgagacctggagtcatgttgaaggtgcccaacctaaaaatgtaggctttcatgttgcaaagaactccagagtcagtagttaggtttggtttggttttggacatgataaacctgccaagagtcaacaggtcacttgatcatgctgcagtgggtagttctaaggatggaaaggtgacagtattactctcgagaggcaattcagtcctgggcaaaggtattagtacaataagcgttaagggcagagtctaccttgaaaccaattaagcagcttggtattcataaatattgggattggatggcctccatccagaaatcactatgggtgagcatacctgtctcagctgtttggccaatgtgcataacctactcggatccccacctgacactaaccagagtcagcacaggccccgaggagcccgaagtctgctgctgtgcagcatggaattcctttaaaaaggtgcactacagttttagcggggagggggataggaagacgcagagcaaatgagctccggagtccctgcaggtgaataaacacacagatctgcatctgatagaactttgatggattttcaaaaagccgttgacaaggctctgctatacagtctataaaaattgttattatgggattggaagaaacacgtggtcatgaatagaaaaaaaacaaacccaaaggtaggaaggtcaaggtcatttcttagatggagaagttgtgaaagatgtccttggagatgagttttaggaccagcattactaaggcaggtgggcagacagtgacctctctaggtgtgtccacagagtttttcaggagagaaaactgcctgacctttgggactaagctgcggaatcttcttactaagcttgaagagtggagaggcgagaggtgagctactttgtgagccaaagcttatgtgacatggttggggaaacagtccaaactgttctgagaaggtgaactgttacgacccaggacaattagaaaaattcacccaccatgccgcacattactgggtaaaagcagggcagcagggaacaaaactccagactcttgggccgtccccatttgcaacagcacacatagtttctggtatatttgttgggaaagataaaactctagcagttgttgaggggaggatgtataaaatggtcatggggatgaaaggatctctgagaccacagaggctcagactcactgttaagaatagaaaactgggtatgcgtttcatgtagccagcagaactgaagtgtgctgtgacaagccaatgtgaatttctaccaaatagtagagcataccacttgaagaaggaaagaaccgaagagcaaacaaaagttctgcgtaatgagactcaccttttctcgctgaaagcactaagaggtgggaggaggcctgcacaggctggaggagggtttgggcagagcgaagacccggccaggaccttggtgagatggggtgccgcccacctcctgcggatactcttggagagttgttcccccagggggctctgccccacctggagaaggaagctgcctggtgtggagtgactcaaatcagtatacctatctgctgcaccttcactctccagggtacatgctttaaaaccgacccgcaacaagtattggaaaaatgtatccagtctgaagatgtttgtgtatctgtttacatccagagttctgtgacacatgccccccagattgctgcaaagatcccaaggcattgattgcacttgattaagcttttgtctgtaggtgaaagaacaagtttaggtcgaggactggcccctaggctgctgctgtgacccttgtcccatgtggcttgtttgcctgtccgggactcttcgatgtgcccaggggagcgtgttcctgtctcttccatgccgtcctgcagtccttatctgctcgcctgagggaagagtagctgtagctacaagggaagcctgcctggaagagccgagcacctgtgcccatggcttctggtcatgaaacgagttaatgatggcagaggagcttcctccccacttcgcagcgccacattatccatcctctgagataagtaggctggtttaaccattggaatggacctttcagtggaaaccctgagagtctgagaacccccagaccaacccttccctccctttccccacctcttacagtgtttggacaggagggtatggtgctgctctgtgtagcaagtactttggcttatgaaagaggcagccacgcattttgcactaggaagaatcagtaatcacttttcagaagacttctatggaccacaaatatattacggaggaacagattttgctaagacataatctagttttataactcaatcatgaatgaaccatgtgtggcaaacttgcagtttaaaggggtcccatcagtgaaagaaactgattttttttaacggactgcttttagttaaattgaagaaagtcagctcttgtcaaaaggtctaaactttcccgcctcaatcctaaaagcatgtcaacaatccacatcagatgccataaatatgaactgcaggataaaatggtacaatcttagtgaatgggaattggaatcaaaagagtttgctgtccttcttagaatgttctaaaatgtcaaggcagttgcttgtgtttaactgtgaacaaataaaaatttattgttttgcact

SEQ ID NO: 195806 - DNA, 8310 bp, Homo sapiens
  Payload ID: 18643
  Gene Name: tuberous sclerosis 1
  Uniprot ID: Q92574
  ENST ID: ENST00000545250
  CDS Start-End: 84-3425
cagtttggtagtggccccaatgaagaaccttcagaacctgtagcacacgtcctggagccagcacagcgccttcgagcgagagaatggcccaacaagcaaatgtcggggagcttcttgccatgctggactcccccatgctgggtgtgcgggacgacgtgacagctgtctttaaagagaacctcaattctgaccgtggccctatgcttgtaaacaccttggtggattattacctggaaaccagctctcagccggcattgcacatcctgaccaccttgcaagagccacatgacaagatggacactgacgtcgttgtcctcacaacaggcgtcttggtgttgataaccatgctaccaatgattccacagtctgggaaacagcatcttcttgatttctttgacatttttggccgtctgtcatcatggtgcctgaagaaaccaggccacgtggcggaagtctatctcgtccatctccatgccagtgtgtacgcactctttcatcgcctttatggaatgtacccttgcaacttcgtctcctttttgcgttctcattacagtatgaaagaaaacctggagacttttgaagaagtggtcaagccaatgatggagcatgtgcgaattcatccggaattagtgactggatccaaggaccatgaactggaccctcgaaggtggaagagattagaaactcatgatgttgtgatcgagtgtgccaaaatctctctggatcccacagaagcctcatatgaagatggctattctgtgtctcaccaaatctcagcccgctttcctcatcgttcagccgatgtcaccaccagcccttatgctgacacacagaatagctatgggtgtgctacttctaccccttactccacgtctcggctgatgttgttaaatatgccagggcagctacctcagactctgagttccccatcgacacggctgataactgaaccaccacaagctactctttggagcccatctatggtttgtggtatgaccactcctccaacttctcctggaaatgtcccacctgatctgtcacacccttacagtaaagtctttggtacaactgcaggtggaaaaggaactcctctgggaaccccagcaacctctcctcctccagccccactctgtcattcggatgactacgtgcacatttcactcccccaggccacagtcacaccccccaggaaggaagagagaatggattctgcaagaccatgtctacacagacaacaccatcttctgaatgacagaggatcagaagagccacctggcagcaaaggttctgtcactctaagtgatcttccagggtttttaggtgatctggcctctgaagaagatagtattgaaaaagataaagaagaagctgcaatatctagagaactttctgagatcaccacagcagaggcagagcctgtggttcctcgaggaggctttgactctcccttttaccgagacagtctcccaggttctcagcggaagacccactcggcagcctccagttctcagggcgccagcgtgaaccctgagcctttacactcctccctggacaagcttgggcctgacacaccaaagcaagcctttactcccatagacctgccctgcggcagtgctgatgaaagccctgcgggagacagggaatgccagacttctttggagaccagtatcttcactcccagtccttgtaaaattccacctccgacgagagtgggctttggaagcgggcagcctcccccgtatgatcatctttttgaggtggcattgccaaagacagcccatcattttgtcatcaggaagactgaggagctgttaaagaaagcaaaaggaaacacagaggaagatggtgtgccctctacctccccaatggaagtgctggacagactgatacagcagggagcagacgcgcacagcaaggagctgaacaagttgcctttacccagcaagtctgtcgactggacccactttggaggctctcctccttcagatgagatccgcaccctccgagaccagttgcttttactgcacaaccagttactctatgagcgttttaagaggcagcagcatgccctccggaacaggcggctcctccgcaaggtgatcaaagcagcagctctggaggaacataatgctgccatgaaagatcagttgaagttacaagagaaggacatccagatgtggaaggttagtctgcagaaagaacaagctagatacaatcagctccaggagcagcgtgacactatggtaaccaagctccacagccagatcagacagctgcagcatgaccgagaggaattctacaaccagagccaggaattacagacgaagctggaggactgcaggaacatgattgcggagctgcggatagaactgaagaaggccaacaacaaggtgtgtcacactgagctgctgctcagtcaggtttcccaaaagctctcaaacagtgagtcggtccagcagcagatggagttcttgaacaggcagctgttggttcttggggaggtcaacgagctctatttggaacaactgcagaacaagcactcagataccacaaaggaagtagaaatgatgaaagccgcctatcggaaagagctagaaaaaaacagaagccatgttctccagcagactcagaggcttgatacctcccaaaaacggattttggaactggaatctcacctggccaagaaagaccaccttcttttggaacagaagaaatatctagaggatgtcaaactccaggcaagaggacagctgcaggccgcagagagcaggtatgaggctcagaaaaggataacccaggtgtttgaattggagatcttagatttatatggcaggttggagaaagatggcctcctgaaaaaacttgaagaagaaaaagcagaagcagctgaagcagcagaagaaaggcttgactgttgtaatgacgggtgctcagattccatggtagggcacaatgaagaggcatctggccacaacggtgagaccaagacccccaggcccagcagcgcccggggcagtagtggaagcagaggtggtggaggcagcagcagcagcagcagcgagctttctaccccagagaaacccccacaccagagggcaggcccattcagcagtcggtgggagacgactatgggagaagcgtctgccagcatccccaccactgtgggctcacttcccagttcaaaaagcttcctgggtatgaaggctcgagagttatttcgtaataagagcgagagccagtgtgatgaggacggcatgaccagtagcctttctgagagcctaaagacagaactgggcaaagacttgggtgtggaagccaagattcccctgaacctagatggccctcacccgtctcccccgaccccggacagtgttggacagctacatatcatggactacaatgagactcatcatgaacacagctaaggaatgatggtcaatcagtgttaacttgcatattgttggcacagaacaggaggtgtgaatgcacgtttcaaagctttcctgtttccagggtctgagtgcaagttcatgtgtggaaatgggacggaggtcctttggacagctgactgaatgcagaacggtttttggatctggcattgaaatgcctcttgaccttcccctccacccgccctaaccccctctcatttacctcgcagtgtgttctaatccaagggccagttggtgttcctcagtagctttactttcttcctttcccccccaaatggttgcgtcctttgaacctgtgcaatatgaggccaaatttaatctttgagtctaacacaccactttctgctttcccgaagttcagataactgggttggctctcaattagaccaggtagtttgttgcattgcaggtaagtctggttttgtcccttccaggaggacatagcctgcaaagctggttgtctttacatgaaagcgtttacatgagactttccgactgcttttttgattctgaagttcagcatctaaagcagcaggtctagaagaacaacggtttattcatacttgcattcttttggcagttctgataagcttcctagaaagttctgtgtaaacagaagcctgtttcagaaatctggagctggcactgtggagaccacacaccctttgggaaagctcttgtctcttcttcccccactacctcttatttatttggtgtttgcttgaatgctggtactattgtgaccacaggctggtgtgtaggtggtaaaacctgttctccataggagggaaggagcagtcactgggagaggttacccgagaagcacttgagcatgaggaactgcacctttaggccatctcagcttgctgggccttttgttaaacccttctgtctactggcctccctttgtgtgcatacgcctcttgttcatgtcagcttatatgtgacactgcagcagaaaggctctgaaggtccaaagagtttctgcaaagtgtatgtgaccatcatttcccaggccattagggttgcctcactgtagcaggttctaggctaccagaagaggggcagctttttcataccaattccaactttcaggggctgactctccagggagctgatgtcatcacactctccatgttagtaatggcagagcagtctaaacagagtccgggagaatgctggcaaaggctggctgtgtatacccactaggctgccccacgtgctcccgagagatgacactagtcagaaaattggcagtggcagagaatccaaactcaacaagtgctcctgaaagaaacgctagaagcctaagaactgtggtctggtgttccagctgaggcagggggatttggtaggaaggagccagtgaacttggctttcctgtttctatctttcattaaaaagaatagaaggattcagtcataaagaggtaaaaaactgtcacggtacgaaatcttagtgcccacggaggcctcgagcagagagaatgaaagtcttttttttttttttttttttttagcatggcaataaatattctagcatccctaactaaaggggactagacagttagagactctgtcaccctagctataccagcagaaaacctgttcaggcaggctttctgggtgtgactgattcccagcctgtggcagggcgtggtcccaactactcagcctagcacaggctggcagttggtactgaattgtcagatgtggagtattagtgacaccacacatttaattcagctttgtccaaaggaaagcttaaaacccaatacagtctagtttcctggttccgttttagaaaaggaaaacgtgaacaaacttagaaagggaaggaaatcccatcagtgaatcctgaaactggttttaagtgctttccttctcctcatgcccaagagatctgtgccatagaacaagataccaggcacttaaagccttttcctgaattggaaaggaaaagaggcccaagtgcaaaagaaaaaacattttagaaacggacagcttataaaaataaagggaagaaaggaggcagcatggagagaggcctgtgctagaagctccatggacgtgtctgcacagggtcctcagctcatccatgcggcctgggtgtccttttactcagctttataacaaatgtggctccaagctcaggtgcctttgagttctaggaggctgtgggttttattcaactacggttgggagaatgagacctggagtcatgttgaaggtgcccaacctaaaaatgtaggctttcatgttgcaaagaactccagagtcagtagttaggtttggtttggttttggacatgataaacctgccaagagtcaacaggtcacttgatcatgctgcagtgggtagttctaaggatggaaaggtgacagtattactctcgagaggcaattcagtcctgggcaaaggtattagtacaataagcgttaagggcagagtctaccttgaaaccaattaagcagcttggtattcataaatattgggattggatggcctccatccagaaatcactatgggtgagcatacctgtctcagctgtttggccaatgtgcataacctactcggatccccacctgacactaaccagagtcagcacaggccccgaggagcccgaagtctgctgctgtgcagcatggaattcctttaaaaaggtgcactacagttttagcggggagggggataggaagacgcagagcaaatgagctccggagtccctgcaggtgaataaacacacagatctgcatctgatagaactttgatggattttcaaaaagccgttgacaaggctctgctatacagtctataaaaattgttattatgggattggaagaaacacgtggtcatgaatagaaaaaaaacaaacccaaaggtaggaaggtcaaggtcatttcttagatggagaagttgtgaaagatgtccttggagatgagttttaggaccagcattactaaggcaggtgggcagacagtgacctctctaggtgtgtccacagagtttttcaggagagaaaactgcctgacctttgggactaagctgcggaatcttcttactaagcttgaagagtggagaggcgagaggtgagctactttgtgagccaaagcttatgtgacatggttggggaaacagtccaaactgttctgagaaggtgaactgttacgacccaggacaattagaaaaattcacccaccatgccgcacattactgggtaaaagcagggcagcagggaacaaaactccagactcttgggccgtccccatttgcaacagcacacatagtttctggtatatttgttgggaaagataaaactctagcagttgttgaggggaggatgtataaaatggtcatggggatgaaaggatctctgagaccacagaggctcagactcactgttaagaatagaaaactgggtatgcgtttcatgtagccagcagaactgaagtgtgctgtgacaagccaatgtgaatttctaccaaatagtagagcataccacttgaagaaggaaagaaccgaagagcaaacaaaagttctgcgtaatgagactcaccttttctcgctgaaagcactaagaggtgggaggaggcctgcacaggctggaggagggtttgggcagagcgaagacccggccaggaccttggtgagatggggtgccgcccacctcctgcggatactcttggagagttgttcccccagggggctctgccccacctggagaaggaagctgcctggtgtggagtgactcaaatcagtatacctatctgctgcaccttcactctccagggtacatgctttaaaaccgacccgcaacaagtattggaaaaatgtatccagtctgaagatgtttgtgtatctgtttacatccagagttctgtgacacatgccccccagattgctgcaaagatcccaaggcattgattgcacttgattaagcttttgtctgtaggtgaaagaacaagtttaggtcgaggactggcccctaggctgctgctgtgacccttgtcccatgtggcttgtttgcctgtccgggactcttcgatgtgcccaggggagcgtgttcctgtctcttccatgccgtcctgcagtccttatctgctcgcctgagggaagagtagctgtagctacaagggaagcctgcctggaagagccgagcacctgtgcccatggcttctggtcatgaaacgagttaatgatggcagaggagcttcctccccacttcgcagcgccacattatccatcctctgagataagtaggctggtttaaccattggaatggacctttcagtggaaaccctgagagtctgagaacccccagaccaacccttccctccctttccccacctcttacagtgtttggacaggagggtatggtgctgctctgtgtagcaagtactttggcttatgaaagaggcagccacgcattttgcactaggaagaatcagtaatcacttttcagaagacttctatggaccacaaatatattacggaggaacagattttgctaagacataatctagttttataactcaatcatgaatgaaccatgtgtggcaaacttgcagtttaaaggggtcccatcagtgaaagaaactgattttttttaacggactgcttttagttaaattgaagaaagtcagctcttgtcaaaaggtctaaactttcccgcctcaatcctaaaagcatgtcaacaatccacatcagatgccataaatatgaactgcaggataaaatggtacaatcttagtgaatgggaattggaatcaaaagagtttgctgtccttcttagaatgttctaaaatgtcaaggcagttgcttgtgtttaactgtgaacaaataaaaatttattgttttgcact

SEQ ID NO: 195807 - DNA, 6156 bp, Homo sapiens
  Payload ID: 18644
  Gene Name: tuberous sclerosis 2
  Uniprot ID: P49815
  ENST ID: ENST00000219476
  CDS Start-End: 631-6054
cgttttcttgcttggggcgaaagggggcagcggagcggagcgcccgaaacccagcccctgcggaccgcaatctttgggaaaaaggcgcaaggtgggaacgcagggccgcacgtgggaaccgttcgcggctgccgggtttgcagcccctgcccgcgcagctgggagccgcaggaggcggcccgggactccagcctgcagcccctatcccgcctcctcccacgctccagccacggcgcggcgctacctgctgcagcctctcttctccggagaggcccgggctcctccctacacccccgcggcccagccccgggtcccaggctccggctccgggtcagcatcctcgcgctcaaggcggtcatgccggactcctgcggactacacatcccggcggcccatgcggccccgtcacgtgatgcaaggatcgccggcctttccgccagagggcggcacagaactacaactcccagcaagctcccaaggcggccctccgcgcaatgccgctaccggaagtgcgggtcgcgcttccggcggcgtcccggggccaggggggtgcgcctttctccgcgtcggggcggcccggagcgcggtggcgcggcgcgggaggggttttctggtgcgtcctggtccaccatggccaaaccaacaagcaaagattcaggcttgaaggagaagtttaagattctgttgggactgggaacaccgaggccaaatcccaggtctgcagagggtaaacagacggagtttatcatcaccgcggaaatactgagagaactgagcatggaatgtggcctcaacaatcgcatccggatgatagggcagatttgtgaagtcgcaaaaaccaagaaatttgaagagcacgcagtggaagcactctggaaggcggtcgcggatctgttgcagccggagcggccgctggaggcccggcacgcggtgctggctctgctgaaggccatcgtgcaggggcagggcgagcgtttgggggtcctcagagccctcttctttaaggtcatcaaggattacccttccaacgaagaccttcacgaaaggctggaggttttcaaggccctcacagacaatgggagacacatcacctacttggaggaagagctggctgactttgtcctgcagtggatggatgttggcttgtcctcggaattccttctggtgctggtgaacttggtcaaattcaatagctgttacctcgacgagtacatcgcaaggatggttcagatgatctgtctgctgtgcgtccggaccgcgtcctctgtggacatagaggtctccctgcaggtgctggacgccgtggtctgctacaactgcctgccggctgagagcctcccgctgttcatcgttaccctctgtcgcaccatcaacgtcaaggagctctgcgagccttgctggaagctgatgcggaacctccttggcacccacctgggccacagcgccatctacaacatgtgccacctcatggaggacagagcctacatggaggacgcgcccctgctgagaggagccgtgttttttgtgggcatggctctctggggagcccaccggctctattctctcaggaactcgccgacatctgtgttgccatcattttaccaggccatggcatgtccgaacgaggtggtgtcctatgagatcgtcctgtccatcaccaggctcatcaagaagtataggaaggagctccaggtggtggcgtgggacattctgctgaacatcatcgaacggctccttcagcagctccagaccttggacagcccggagctcaggaccatcgtccatgacctgttgaccacggtggaggagctgtgtgaccagaacgagttccacgggtctcaggagagatactttgaactggtggagagatgtgcggaccagaggcctgagtcctccctcctgaacctgatctcctatagagcgcagtccatccacccggccaaggacggctggattcagaacctgcaggcgctgatggagagattcttcaggagcgagtcccgaggcgccgtgcgcatcaaggtgctggacgtgctgtcctttgtgctgctcatcaacaggcagttctatgaggaggagctgattaactcagtggtcatctcgcagctctcccacatccccgaggataaagaccaccaggtccgaaagctggccacccagttgctggtggacctggcagagggctgccacacacaccacttcaacagcctgctggacatcatcgagaaggtgatggcccgctccctctccccacccccggagctggaagaaagggatgtggccgcatactcggcctccttggaggatgtgaagacagccgtcctggggcttctggtcatccttcagaccaagctgtacaccctgcctgcaagccacgccacgcgtgtgtatgagatgctggtcagccacattcagctccactacaagcacagctacaccctgccaatcgcgagcagcatccggctgcaggcctttgacttcctgttgctgctgcgggccgactcactgcaccgcctgggcctgcccaacaaggatggagtcgtgcggttcagcccctactgcgtctgcgactacatggagccagagagaggctctgagaagaagaccagcggccccctttctcctcccacagggcctcctggcccggcgcctgcaggccccgccgtgcggctggggtccgtgccctactccctgctcttccgcgtcctgctgcagtgcttgaagcaggagtctgactggaaggtgctgaagctggttctgggcaggctgcctgagtccctgcgctataaagtgctcatctttacttccccttgcagtgtggaccagctgtgctctgctctctgctccatgctttcaggcccaaagacactggagcggctccgaggcgccccagaaggcttctccagaactgacttgcacctggccgtggttccagtgctgacagcattaatctcttaccataactacctggacaaaaccaaacagcgcgagatggtctactgcctggagcagggcctcatccaccgctgtgccagccagtgcgtcgtggccttgtccatctgcagcgtggagatgcctgacatcatcatcaaggcgctgcctgttctggtggtgaagctcacgcacatctcagccacagccagcatggccgtcccactgctggagttcctgtccactctggccaggctgccgcacctctacaggaactttgccgcggagcagtatgccagtgtgttcgccatctccctgccgtacaccaacccctccaagtttaatcagtacatcgtgtgtctggcccatcacgtcatagccatgtggttcatcaggtgccgcctgcccttccggaaggattttgtccctttcatcactaagggcctgcggtccaatgtcctcttgtcttttgatgacacccccgagaaggacagcttcagggcccggagtactagtctcaacgagagacccaagagtctgaggatagccagaccccccaaacaaggcttgaataactctccacccgtgaaagaattcaaggagagctctgcagccgaggccttccggtgccgcagcatcagtgtgtctgaacatgtggtccgcagcaggatacagacgtccctcaccagtgccagcttggggtctgcagatgagaactccgtggcccaggctgacgatagcctgaaaaacctccacctggagctcacggaaacctgtctggacatgatggctcgatacgtcttctccaacttcacggctgtcccgaagaggtctcctgtgggcgagttcctcctagcgggtggcaggaccaaaacctggctggttgggaacaagcttgtcactgtgacgacaagcgtgggaaccgggacccggtcgttactaggcctggactcgggggagctgcagtccggcccggagtcgagctccagccccggggtgcatgtgagacagaccaaggaggcgccggccaagctggagtcccaggctgggcagcaggtgtcccgtggggcccgggatcgggtccgttccatgtcggggggccatggtcttcgagttggcgccctggacgtgccggcctcccagttcctgggcagtgccacttctccaggaccacggactgcaccagccgcgaaacctgagaaggcctcagctggcacccgggttcctgtgcaggagaagacgaacctggcggcctatgtgcccctgctgacccagggctgggcggagatcctggtccggaggcccacagggaacaccagctggctgatgagcctggagaacccgctcagccctttctcctcggacatcaacaacatgcccctgcaggagctgtctaacgccctcatggcggctgagcgcttcaaggagcaccgggacacagccctgtacaagtcactgtcggtgccggcagccagcacggccaaaccccctcctctgcctcgctccaacacagtggcctctttctcctccctgtaccagtccagctgccaaggacagctgcacaggagcgtttcctgggcagactccgccgtggtcatggaggagggaagtccgggcgaggttcctgtgctggtggagcccccagggttggaggacgttgaggcagcgctaggcatggacaggcgcacggatgcctacagcaggtcgtcctcagtctccagccaggaggagaagtcgctccacgcggaggagctggttggcaggggcatccccatcgagcgagtcgtctcctcggagggtggccggccctctgtggacctctccttccagccctcgcagcccctgagcaagtccagctcctctcccgagctgcagactctgcaggacatcctcggggaccctggggacaaggccgacgtgggccggctgagccctgaggttaaggcccggtcacagtcagggaccctggacggggaaagtgctgcctggtcggcctcgggcgaagacagtcggggccagcccgagggtcccttgccttccagctccccccgctcgcccagtggcctccggccccgaggttacaccatctccgactcggccccatcacgcaggggcaagagagtagagagggacgccttaaagagcagagccacagcctccaatgcagagaaagtgccaggcatcaaccccagtttcgtgttcctgcagctctaccattcccccttctttggcgacgagtcaaacaagccaatcctgctgcccaatgagtcacagtcctttgagcggtcggtgcagctcctcgaccagatcccatcatacgacacccacaagatcgccgtcctgtatgttggagaaggccagagcaacagcgagctcgccatcctgtccaatgagcatggctcctacaggtacacggagttcctgacgggcctgggccggctcatcgagctgaaggactgccagccggacaaggtgtacctgggaggcctggacgtgtgtggtgaggacggccagttcacctactgctggcacgatgacatcatgcaagccgtcttccacatcgccaccctgatgcccaccaaggacgtggacaagcaccgctgcgacaagaagcgccacctgggcaacgactttgtgtccattgtctacaatgactccggtgaggacttcaagcttggcaccatcaagggccagttcaactttgtccacgtgatcgtcaccccgctggactacgagtgcaacctggtgtccctgcagtgcaggaaagacatggagggccttgtggacaccagcgtggccaagatcgtgtctgaccgcaacctgcccttcgtggcccgccagatggccctgcacgcaaatatggcctcacaggtgcatcatagccgctccaaccccaccgatatctacccctccaagtggattgcccggctccgccacatcaagcggctccgccagcggatctgcgaggaagccgcctactccaaccccagcctacctctggtgcaccctccgtcccatagcaaagcccctgcacagactccagccgagcccacacctggctatgaggtgggccagcggaagcgcctcatctcctcggtggaggacttcaccgagtttgtgtgaggccggggccctccctcctgcactggccttggacggtattgcctgtcagtgaaataaataaagtcctgaccccagtgcacagacatagaggcacagattgca

SEQ ID NO: 195808 - DNA, 5532 bp, Homo sapiens
  Payload ID: 18644
  Gene Name: tuberous sclerosis 2
  Uniprot ID: P49815
  ENST ID: ENST00000350773
  CDS Start-End: 76-5430
ctttctccgcgtcggggcggcccggagcgcggtggcgcggcgcgggaggggttttctggtgcgtcctggtccaccatggccaaaccaacaagcaaagattcaggcttgaaggagaagtttaagattctgttgggactgggaacaccgaggccaaatcccaggtctgcagagggtaaacagacggagtttatcatcaccgcggaaatactgagagaactgagcatggaatgtggcctcaacaatcgcatccggatgatagggcagatttgtgaagtcgcaaaaaccaagaaatttgaagagcacgcagtggaagcactctggaaggcggtcgcggatctgttgcagccggagcggccgctggaggcccggcacgcggtgctggctctgctgaaggccatcgtgcaggggcagggcgagcgtttgggggtcctcagagccctcttctttaaggtcatcaaggattacccttccaacgaagaccttcacgaaaggctggaggttttcaaggccctcacagacaatgggagacacatcacctacttggaggaagagctggctgactttgtcctgcagtggatggatgttggcttgtcctcggaattccttctggtgctggtgaacttggtcaaattcaatagctgttacctcgacgagtacatcgcaaggatggttcagatgatctgtctgctgtgcgtccggaccgcgtcctctgtggacatagaggtctccctgcaggtgctggacgccgtggtctgctacaactgcctgccggctgagagcctcccgctgttcatcgttaccctctgtcgcaccatcaacgtcaaggagctctgcgagccttgctggaagctgatgcggaacctccttggcacccacctgggccacagcgccatctacaacatgtgccacctcatggaggacagagcctacatggaggacgcgcccctgctgagaggagccgtgttttttgtgggcatggctctctggggagcccaccggctctattctctcaggaactcgccgacatctgtgttgccatcattttaccaggccatggcatgtccgaacgaggtggtgtcctatgagatcgtcctgtccatcaccaggctcatcaagaagtataggaaggagctccaggtggtggcgtgggacattctgctgaacatcatcgaacggctccttcagcagctccagaccttggacagcccggagctcaggaccatcgtccatgacctgttgaccacggtggaggagctgtgtgaccagaacgagttccacgggtctcaggagagatactttgaactggtggagagatgtgcggaccagaggcctgagtcctccctcctgaacctgatctcctatagagcgcagtccatccacccggccaaggacggctggattcagaacctgcaggcgctgatggagagattcttcaggagcgagtcccgaggcgccgtgcgcatcaaggtgctggacgtgctgtcctttgtgctgctcatcaacaggcagttctatgaggaggagctgattaactcagtggtcatctcgcagctctcccacatccccgaggataaagaccaccaggtccgaaagctggccacccagttgctggtggacctggcagagggctgccacacacaccacttcaacagcctgctggacatcatcgagaaggtgatggcccgctccctctccccacccccggagctggaagaaagggatgtggccgcatactcggcctccttggaggatgtgaagacagccgtcctggggcttctggtcatccttcagaccaagctgtacaccctgcctgcaagccacgccacgcgtgtgtatgagatgctggtcagccacattcagctccactacaagcacagctacaccctgccaatcgcgagcagcatccggctgcaggcctttgacttcctgttgctgctgcgggccgactcactgcaccgcctgggcctgcccaacaaggatggagtcgtgcggttcagcccctactgcgtctgcgactacatggagccagagagaggctctgagaagaagaccagcggccccctttctcctcccacagggcctcctggcccggcgcctgcaggccccgccgtgcggctggggtccgtgccctactccctgctcttccgcgtcctgctgcagtgcttgaagcaggagtctgactggaaggtgctgaagctggttctgggcaggctgcctgagtccctgcgctataaagtgctcatctttacttccccttgcagtgtggaccagctgtgctctgctctctgctccatgctttcaggcccaaagacactggagcggctccgaggcgccccagaaggcttctccagaactgacttgcacctggccgtggttccagtgctgacagcattaatctcttaccataactacctggacaaaaccaaacagcgcgagatggtctactgcctggagcagggcctcatccaccgctgtgccagccagtgcgtcgtggccttgtccatctgcagcgtggagatgcctgacatcatcatcaaggcgctgcctgttctggtggtgaagctcacgcacatctcagccacagccagcatggccgtcccactgctggagttcctgtccactctggccaggctgccgcacctctacaggaactttgccgcggagcagtatgccagtgtgttcgccatctccctgccgtacaccaacccctccaagtttaatcagtacatcgtgtgtctggcccatcacgtcatagccatgtggttcatcaggtgccgcctgcccttccggaaggattttgtccctttcatcactaagggcctgcggtccaatgtcctcttgtcttttgatgacacccccgagaaggacagcttcagggcccggagtactagtctcaacgagagacccaagagtctgaggatagccagaccccccaaacaaggcttgaataactctccacccgtgaaagaattcaaggagagctctgcagccgaggccttccggtgccgcagcatcagtgtgtctgaacatgtggtccgcagcaggatacagacgtccctcaccagtgccagcttggggtctgcagatgagaactccgtggcccaggctgacgatagcctgaaaaacctccacctggagctcacggaaacctgtctggacatgatggctcgatacgtcttctccaacttcacggctgtcccgaagaggtctcctgtgggcgagttcctcctagcgggtggcaggaccaaaacctggctggttgggaacaagcttgtcactgtgacgacaagcgtgggaaccgggacccggtcgttactaggcctggactcgggggagctgcagtccggcccggagtcgagctccagccccggggtgcatgtgagacagaccaaggaggcgccggccaagctggagtcccaggctgggcagcaggtgtcccgtggggcccgggatcgggtccgttccatgtcggggggccatggtcttcgagttggcgccctggacgtgccggcctcccagttcctgggcagtgccacttctccaggaccacggactgcaccagccgcgaaacctgagaaggcctcagctggcacccgggttcctgtgcaggagaagacgaacctggcggcctatgtgcccctgctgacccagggctgggcggagatcctggtccggaggcccacagggaacaccagctggctgatgagcctggagaacccgctcagccctttctcctcggacatcaacaacatgcccctgcaggagctgtctaacgccctcatggcggctgagcgcttcaaggagcaccgggacacagccctgtacaagtcactgtcggtgccggcagccagcacggccaaaccccctcctctgcctcgctccaacacagactccgccgtggtcatggaggagggaagtccgggcgaggttcctgtgctggtggagcccccagggttggaggacgttgaggcagcgctaggcatggacaggcgcacggatgcctacagcaggtcgtcctcagtctccagccaggaggagaagtcgctccacgcggaggagctggttggcaggggcatccccatcgagcgagtcgtctcctcggagggtggccggccctctgtggacctctccttccagccctcgcagcccctgagcaagtccagctcctctcccgagctgcagactctgcaggacatcctcggggaccctggggacaaggccgacgtgggccggctgagccctgaggttaaggcccggtcacagtcagggaccctggacggggaaagtgctgcctggtcggcctcgggcgaagacagtcggggccagcccgagggtcccttgccttccagctccccccgctcgcccagtggcctccggccccgaggttacaccatctccgactcggccccatcacgcaggggcaagagagtagagagggacgccttaaagagcagagccacagcctccaatgcagagaaagtgccaggcatcaaccccagtttcgtgttcctgcagctctaccattcccccttctttggcgacgagtcaaacaagccaatcctgctgcccaatgagtcacagtcctttgagcggtcggtgcagctcctcgaccagatcccatcatacgacacccacaagatcgccgtcctgtatgttggagaaggccagagcaacagcgagctcgccatcctgtccaatgagcatggctcctacaggtacacggagttcctgacgggcctgggccggctcatcgagctgaaggactgccagccggacaaggtgtacctgggaggcctggacgtgtgtggtgaggacggccagttcacctactgctggcacgatgacatcatgcaagccgtcttccacatcgccaccctgatgcccaccaaggacgtggacaagcaccgctgcgacaagaagcgccacctgggcaacgactttgtgtccattgtctacaatgactccggtgaggacttcaagcttggcaccatcaagggccagttcaactttgtccacgtgatcgtcaccccgctggactacgagtgcaacctggtgtccctgcagtgcaggaaagacatggagggccttgtggacaccagcgtggccaagatcgtgtctgaccgcaacctgcccttcgtggcccgccagatggccctgcacgcaaatatggcctcacaggtgcatcatagccgctccaaccccaccgatatctacccctccaagtggattgcccggctccgccacatcaagcggctccgccagcggatctgcgaggaagccgcctactccaaccccagcctacctctggtgcaccctccgtcccatagcaaagcccctgcacagactccagccgagcccacacctggctatgaggtgggccagcggaagcgcctcatctcctcggtggaggacttcaccgagtttgtgtgaggccggggccctccctcctgcactggccttggacggtattgcctgtcagtgaaataaataaagtcctgaccccagtgcacagacatagaggcacagattgca

SEQ ID NO: 195809 - DNA, 5264 bp, Homo sapiens
  Payload ID: 18644
  Gene Name: tuberous sclerosis 2
  Uniprot ID: P49815
  ENST ID: ENST00000382538
  CDS Start-End: 96-5174
gtcgcgcttccggcggcgtcccggggccaggggggtgcgcctttctccgcgtcggggcggcccggagcgcggtggcgcggcgcggggaactgagcatggaatgtggcctcaacaatcgcatccggatgatagggcagatttgtgaagtcgcaaaaaccaagaaatttgaagagcacgcagtggaagcactctggaaggcggtcgcggatctgttgcagccggagcggccgctggaggcccggcacgcggtgctggctctgctgaaggccatcgtgcaggggcagggcgagcgtttgggggtcctcagagccctcttctttaaggtcatcaaggattacccttccaacgaagaccttcacgaaaggctggaggttttcaaggccctcacagacaatgggagacacatcacctacttggaggaagagctggctgactttgtcctgcagtggatggatgttggcttgtcctcggaattccttctggtgctggtgaacttggtcaaattcaatagctgttacctcgacgagtacatcgcaaggatggttcagatgatctgtctgctgtgcgtccggaccgcgtcctctgtggacatagaggtctccctgcaggtgctggacgccgtggtctgctacaactgcctgccggctgagagcctcccgctgttcatcgttaccctctgtcgcaccatcaacgtcaaggagctctgcgagccttgctggaagctgatgcggaacctccttggcacccacctgggccacagcgccatctacaacatgtgccacctcatggaggacagagcctacatggaggacgcgcccctgctgagaggagccgtgttttttgtgggcatggctctctggggagcccaccggctctattctctcaggaactcgccgacatctgtgttgccatcattttaccaggccatggcatgtccgaacgaggtggtgtcctatgagatcgtcctgtccatcaccaggctcatcaagaagtataggaaggagctccaggtggtggcgtgggacattctgctgaacatcatcgaacggctccttcagcagctccagaccttggacagcccggagctcaggaccatcgtccatgacctgttgaccacggtggaggagctgtgtgaccagaacgagttccacgggtctcaggagagatactttgaactggtggagagatgtgcggaccagaggcctgagtcctccctcctgaacctgatctcctatagagcgcagtccatccacccggccaaggacggctggattcagaacctgcaggcgctgatggagagattcttcaggagcgagtcccgaggcgccgtgcgcatcaaggtgctggacgtgctgtcctttgtgctgctcatcaacaggcagttctatgaggaggagctgattaactcagtggtcatctcgcagctctcccacatccccgaggataaagaccaccaggtccgaaagctggccacccagttgctggtggacctggcagagggctgccacacacaccacttcaacagcctgctggacatcatcgagaaggtgatggcccgctccctctccccacccccggagctggaagaaagggatgtggccgcatactcggcctccttggaggatgtgaagacagccgtcctggggcttctggtcatccttcagaccaagctgtacaccctgcctgcaagccacgccacgcgtgtgtatgagatgctggtcagccacattcagctccactacaagcacagctacaccctgccaatcgcgagcagcatccggctgcaggcctttgacttcctgttgctgctgcgggccgactcactgcaccgcctgggcctgcccaacaaggatggagtcgtgcggttcagcccctactgcgtctgcgactacatggagccagagagaggctctgagaagaagaccagcggccccctttctcctcccacagggcctcctggcccggcgcctgcaggccccgccgtgcggctggggtccgtgccctactccctgctcttccgcgtcctgctgcagtgcttgaagcaggagtctgactggaaggtgctgaagctggttctgggcaggctgcctgagtccctgcgctataaagtgctcatctttacttccccttgcagtgtggaccagctgtgctctgctctctgctccatgctttcaggcccaaagacactggagcggctccgaggcgccccagaaggcttctccagaactgacttgcacctggccgtggttccagtgctgacagcattaatctcttaccataactacctggacaaaaccaaacagcgcgagatggtctactgcctggagcagggcctcatccaccgctgtgccagccagtgcgtcgtggccttgtccatctgcagcgtggagatgcctgacatcatcatcaaggcgctgcctgttctggtggtgaagctcacgcacatctcagccacagccagcatggccgtcccactgctggagttcctgtccactctggccaggctgccgcacctctacaggaactttgccgcggagcagtatgccagtgtgttcgccatctccctgccgtacaccaacccctccaagtttaatcagtacatcgtgtgtctggcccatcacgtcatagccatgtggttcatcaggtgccgcctgcccttccggaaggattttgtccctttcatcactaagggcctgcggtccaatgtcctcttgtcttttgatgacacccccgagaaggacagcttcagggcccggagtactagtctcaacgagagacccaagagcaggatacagacgtccctcaccagtgccagcttggggtctgcagatgagaactccgtggcccaggctgacgatagcctgaaaaacctccacctggagctcacggaaacctgtctggacatgatggctcgatacgtcttctccaacttcacggctgtcccgaagaggtctcctgtgggcgagttcctcctagcgggtggcaggaccaaaacctggctggttgggaacaagcttgtcactgtgacgacaagcgtgggaaccgggacccggtcgttactaggcctggactcgggggagctgcagtccggcccggagtcgagctccagccccggggtgcatgtgagacagaccaaggaggcgccggccaagctggagtcccaggctgggcagcaggtgtcccgtggggcccgggatcgggtccgttccatgtcggggggccatggtcttcgagttggcgccctggacgtgccggcctcccagttcctgggcagtgccacttctccaggaccacggactgcaccagccgcgaaacctgagaaggcctcagctggcacccgggttcctgtgcaggagaagacgaacctggcggcctatgtgcccctgctgacccagggctgggcggagatcctggtccggaggcccacagggaacaccagctggctgatgagcctggagaacccgctcagccctttctcctcggacatcaacaacatgcccctgcaggagctgtctaacgccctcatggcggctgagcgcttcaaggagcaccgggacacagccctgtacaagtcactgtcggtgccggcagccagcacggccaaaccccctcctctgcctcgctccaacacagactccgccgtggtcatggaggagggaagtccgggcgaggttcctgtgctggtggagcccccagggttggaggacgttgaggcagcgctaggcatggacaggcgcacggatgcctacagcaggtcgtcctcagtctccagccaggaggagaagtcgctccacgcggaggagctggttggcaggggcatccccatcgagcgagtcgtctcctcggagggtggccggccctctgtggacctctccttccagccctcgcagcccctgagcaagtccagctcctctcccgagctgcagactctgcaggacatcctcggggaccctggggacaaggccgacgtgggccggctgagccctgaggttaaggcccggtcacagtcagggaccctggacggggaaagtgctgcctggtcggcctcgggcgaagacagtcggggccagcccgagggtcccttgccttccagctccccccgctcgcccagtggcctccggccccgaggttacaccatctccgactcggccccatcacgcaggggcaagagagtagagagggacgccttaaagagcagagccacagcctccaatgcagagaaagtgccaggcatcaaccccagtttcgtgttcctgcagctctaccattcccccttctttggcgacgagtcaaacaagccaatcctgctgcccaatgagtcacagtcctttgagcggtcggtgcagctcctcgaccagatcccatcatacgacacccacaagatcgccgtcctgtatgttggagaaggccagagcaacagcgagctcgccatcctgtccaatgagcatggctcctacaggtacacggagttcctgacgggcctgggccggctcatcgagctgaaggactgccagccggacaaggtgtacctgggaggcctggacgtgtgtggtgaggacggccagttcacctactgctggcacgatgacatcatgcaagccgtcttccacatcgccaccctgatgcccaccaaggacgtggacaagcaccgctgcgacaagaagcgccacctgggcaacgactttgtgtccattgtctacaatgactccggtgaggacttcaagcttggcaccatcaagggccagttcaactttgtccacgtgatcgtcaccccgctggactacgagtgcaacctggtgtccctgcagtgcaggaaagacatggagggccttgtggacaccagcgtggccaagatcgtgtctgaccgcaacctgcccttcgtggcccgccagatggccctgcacgcaaatatggcctcacaggtgcatcatagccgctccaaccccaccgatatctacccctccaagtggattgcccggctccgccacatcaagcggctccgccagcggatctgcgaggaagccgcctactccaaccccagcctacctctggtgcaccctccgtcccatagcaaagcccctgcacagactccagccgagcccacacctggctatgaggtgggccagcggaagcgcctcatctcctcggtggaggacttcaccgagtttgtgtgaggccggggccctccctcctgcactggccttggacggtattgcctgtcagtgaaataaataaagtcctgaccccagtgcacagacatagag

SEQ ID NO: 195810 - DNA, 5421 bp, Homo sapiens
  Payload ID: 18644
  Gene Name: tuberous sclerosis 2
  Uniprot ID: P49815
  ENST ID: ENST00000401874
  CDS Start-End: 107-5329
ccggcggcgtcccggggccaggggggtgcgcctttctccgcgtcggggcggcccggagcgcggtggcgcggcgcgggaggggttttctggtgcgtcctggtccaccatggccaaaccaacaagcaaagattcaggcttgaaggagaagtttaagattctgttgggactgggaacaccgaggccaaatcccaggtctgcagagggtaaacagacggagtttatcatcaccgcggaaatactgagagaactgagcatggaatgtggcctcaacaatcgcatccggatgatagggcagatttgtgaagtcgcaaaaaccaagaaatttgaagagcacgcagtggaagcactctggaaggcggtcgcggatctgttgcagccggagcggccgctggaggcccggcacgcggtgctggctctgctgaaggccatcgtgcaggggcagggcgagcgtttgggggtcctcagagccctcttctttaaggtcatcaaggattacccttccaacgaagaccttcacgaaaggctggaggttttcaaggccctcacagacaatgggagacacatcacctacttggaggaagagctggctgactttgtcctgcagtggatggatgttggcttgtcctcggaattccttctggtgctggtgaacttggtcaaattcaatagctgttacctcgacgagtacatcgcaaggatggttcagatgatctgtctgctgtgcgtccggaccgcgtcctctgtggacatagaggtctccctgcaggtgctggacgccgtggtctgctacaactgcctgccggctgagagcctcccgctgttcatcgttaccctctgtcgcaccatcaacgtcaaggagctctgcgagccttgctggaagctgatgcggaacctccttggcacccacctgggccacagcgccatctacaacatgtgccacctcatggaggacagagcctacatggaggacgcgcccctgctgagaggagccgtgttttttgtgggcatggctctctggggagcccaccggctctattctctcaggaactcgccgacatctgtgttgccatcattttaccaggccatggcatgtccgaacgaggtggtgtcctatgagatcgtcctgtccatcaccaggctcatcaagaagtataggaaggagctccaggtggtggcgtgggacattctgctgaacatcatcgaacggctccttcagcagctccagaccttggacagcccggagctcaggaccatcgtccatgacctgttgaccacggtggaggagctgtgtgaccagaacgagttccacgggtctcaggagagatactttgaactggtggagagatgtgcggaccagaggcctgagtcctccctcctgaacctgatctcctatagagcgcagtccatccacccggccaaggacggctggattcagaacctgcaggcgctgatggagagattcttcaggagcgagtcccgaggcgccgtgcgcatcaaggtgctggacgtgctgtcctttgtgctgctcatcaacaggcagttctatgaggaggagctgattaactcagtggtcatctcgcagctctcccacatccccgaggataaagaccaccaggtccgaaagctggccacccagttgctggtggacctggcagagggctgccacacacaccacttcaacagcctgctggacatcatcgagaaggtgatggcccgctccctctccccacccccggagctggaagaaagggatgtggccgcatactcggcctccttggaggatgtgaagacagccgtcctggggcttctggtcatccttcagaccaagctgtacaccctgcctgcaagccacgccacgcgtgtgtatgagatgctggtcagccacattcagctccactacaagcacagctacaccctgccaatcgcgagcagcatccggctgcaggcctttgacttcctgttgctgctgcgggccgactcactgcaccgcctgggcctgcccaacaaggatggagtcgtgcggttcagcccctactgcgtctgcgactacatggagccagagagaggctctgagaagaagaccagcggccccctttctcctcccacagggcctcctggcccggcgcctgcaggccccgccgtgcggctggggtccgtgccctactccctgctcttccgcgtcctgctgcagtgcttgaagcaggagtctgactggaaggtgctgaagctggttctgggcaggctgcctgagtccctgcgctataaagtgctcatctttacttccccttgcagtgtggaccagctgtgctctgctctctgctccatgctttcaggcccaaagacactggagcggctccgaggcgccccagaaggcttctccagaactgacttgcacctggccgtggttccagtgctgacagcattaatctcttaccataactacctggacaaaaccaaacagcgcgagatggtctactgcctggagcagggcctcatccaccgctgtgccagccagtgcgtcgtggccttgtccatctgcagcgtggagatgcctgacatcatcatcaaggcgctgcctgttctggtggtgaagctcacgcacatctcagccacagccagcatggccgtcccactgctggagttcctgtccactctggccaggctgccgcacctctacaggaactttgccgcggagcagtatgccagtgtgttcgccatctccctgccgtacaccaacccctccaagtttaatcagtacatcgtgtgtctggcccatcacgtcatagccatgtggttcatcaggtgccgcctgcccttccggaaggattttgtccctttcatcactaagggcctgcggtccaatgtcctcttgtcttttgatgacacccccgagaaggacagcttcagggcccggagtactagtctcaacgagagacccaagaggatacagacgtccctcaccagtgccagcttggggtctgcagatgagaactccgtggcccaggctgacgatagcctgaaaaacctccacctggagctcacggaaacctgtctggacatgatggctcgatacgtcttctccaacttcacggctgtcccgaagaggtctcctgtgggcgagttcctcctagcgggtggcaggaccaaaacctggctggttgggaacaagcttgtcactgtgacgacaagcgtgggaaccgggacccggtcgttactaggcctggactcgggggagctgcagtccggcccggagtcgagctccagccccggggtgcatgtgagacagaccaaggaggcgccggccaagctggagtcccaggctgggcagcaggtgtcccgtggggcccgggatcgggtccgttccatgtcggggggccatggtcttcgagttggcgccctggacgtgccggcctcccagttcctgggcagtgccacttctccaggaccacggactgcaccagccgcgaaacctgagaaggcctcagctggcacccgggttcctgtgcaggagaagacgaacctggcggcctatgtgcccctgctgacccagggctgggcggagatcctggtccggaggcccacagggaacaccagctggctgatgagcctggagaacccgctcagccctttctcctcggacatcaacaacatgcccctgcaggagctgtctaacgccctcatggcggctgagcgcttcaaggagcaccgggacacagccctgtacaagtcactgtcggtgccggcagccagcacggccaaaccccctcctctgcctcgctccaacacagactccgccgtggtcatggaggagggaagtccgggcgaggttcctgtgctggtggagcccccagggttggaggacgttgaggcagcgctaggcatggacaggcgcacggatgcctacagcaggtcgtcctcagtctccagccaggaggagaagtcgctccacgcggaggagctggttggcaggggcatccccatcgagcgagtcgtctcctcggagggtggccggccctctgtggacctctccttccagccctcgcagcccctgagcaagtccagctcctctcccgagctgcagactctgcaggacatcctcggggaccctggggacaaggccgacgtgggccggctgagccctgaggttaaggcccggtcacagtcagggaccctggacggggaaagtgctgcctggtcggcctcgggcgaagacagtcggggccagcccgagggtcccttgccttccagctccccccgctcgcccagtggcctccggccccgaggttacaccatctccgactcggccccatcacgcaggggcaagagagtagagagggacgccttaaagagcagagccacagcctccaatgcagagaaagtgccaggcatcaaccccagtttcgtgttcctgcagctctaccattcccccttctttggcgacgagtcaaacaagccaatcctgctgcccaatgagtcacagtcctttgagcggtcggtgcagctcctcgaccagatcccatcatacgacacccacaagatcgccgtcctgtatgttggagaaggccagagcaacagcgagctcgccatcctgtccaatgagcatggctcctacaggtacacggagttcctgacgggcctgggccggctcatcgagctgaaggactgccagccggacaaggtgtacctgggaggcctggacgtgtgtggtgaggacggccagttcacctactgctggcacgatgacatcatgcaagccgtcttccacatcgccaccctgatgcccaccaaggacgtggacaagcaccgctgcgacaagaagcgccacctgggcaacgactttgtgtccattgtctacaatgactccggtgaggacttcaagcttggcaccatcaagggccagttcaactttgtccacgtgatcgtcaccccgctggactacgagtgcaacctggtgtccctgcagtgcaggaaagacatggagggccttgtggacaccagcgtggccaagatcgtgtctgaccgcaacctgcccttcgtggcccgccagatggccctgcacgcaaatatggcctcacaggtgcatcatagccgctccaaccccaccgatatctacccctccaagtggattgcccggctccgccacatcaagcggctccgccagcggatctgcgaggaagccgcctactccaaccccagcctacctctggtgcaccctccgtcccatagcaaagcccctgcacagactccagccgagcccacacctggctatgaggtgggccagcggaagcgcctcatctcctcggtggaggacttcaccgagtttgtgtgaggccggggccctccctcctgcactggccttggacggtattgcctgtcagtgaaataaataaagtcctgaccccagtgcacagacatagaggc

SEQ ID NO: 195811 - DNA, 374 bp, Homo sapiens
  Payload ID: 18644
  Gene Name: tuberous sclerosis 2
  ENST ID: ENST00000432909
  CDS Start-End: 1-374
aggccatcgtgcaggggcaggtaaggcccagggcgacgctgggatgggtgacgtcaggctgcccactgactgtcctgtccctgctgggccgtgtttggactcctgcctcgggcgagcgtttgggggtcctcagagccctcttctttaaggtcatcaaggattacccttccaacgaagaccttcacgaaaggctggaggttttcaaggccctcacagacaatgggagacacatcacctacttggaggaagagctggctgactttgtcctgcagtggatggatgttggcttgtcctcggaattccttctggtgctggtgaacttggtcaaattcaatagctgttacctcgacgagtacatcgcaaggatggttcag

SEQ ID NO: 195812 - DNA, 5287 bp, Homo sapiens
  Payload ID: 18644
  Gene Name: tuberous sclerosis 2
  Uniprot ID: P49815
  ENST ID: ENST00000439673
  CDS Start-End: 82-5196
gtgcgcctttctccgcgtcggggcggcccggagcgcggtggcgcggcgcgggaggggttttctggtgcgtcctggtccaccatggccaaaccaacaagcaaagattcaggcttgaaggagaagtttaagattctgttgggactgggaacaccgaggccaaatcccaggtctgcagagggtaaacagacggagtttatcatcaccgcggaaatactgagagaactgagcatggaatgtggcctcaacaatcgcatccggatgatagggcagatttgtgaagtcgcaaaaaccaagaaatttgaagagggcgagcgtttgggggtcctcagagccctcttctttaaggtcatcaaggattacccttccaacgaagaccttcacgaaaggctggaggttttcaaggccctcacagacaatgggagacacatcacctacttggaggaagagctggctgactttgtcctgcagtggatggatgttggcttgtcctcggaattccttctggtgctggtgaacttggtcaaattcaatagctgttacctcgacgagtacatcgcaaggatggttcagatgatctgtctgctgtgcgtccggaccgcgtcctctgtggacatagaggtctccctgcaggtgctggacgccgtggtctgctacaactgcctgccggctgagagcctcccgctgttcatcgttaccctctgtcgcaccatcaacgtcaaggagctctgcgagccttgctggaagctgatgcggaacctccttggcacccacctgggccacagcgccatctacaacatgtgccacctcatggaggacagagcctacatggaggacgcgcccctgctgagaggagccgtgttttttgtgggcatggctctctggggagcccaccggctctattctctcaggaactcgccgacatctgtgttgccatcattttaccaggccatggcatgtccgaacgaggtggtgtcctatgagatcgtcctgtccatcaccaggctcatcaagaagtataggaaggagctccaggtggtggcgtgggacattctgctgaacatcatcgaacggctccttcagcagctccagaccttggacagcccggagctcaggaccatcgtccatgacctgttgaccacggtggaggagctgtgtgaccagaacgagttccacgggtctcaggagagatactttgaactggtggagagatgtgcggaccagaggcctgagtcctccctcctgaacctgatctcctatagagcgcagtccatccacccggccaaggacggctggattcagaacctgcaggcgctgatggagagattcttcaggagcgagtcccgaggcgccgtgcgcatcaaggtgctggacgtgctgtcctttgtgctgctcatcaacaggcagttctatgaggaggagctgattaactcagtggtcatctcgcagctctcccacatccccgaggataaagaccaccaggtccgaaagctggccacccagttgctggtggacctggcagagggctgccacacacaccacttcaacagcctgctggacatcatcgagaaggtgatggcccgctccctctccccacccccggagctggaagaaagggatgtggccgcatactcggcctccttggaggatgtgaagacagccgtcctggggcttctggtcatccttcagaccaagctgtacaccctgcctgcaagccacgccacgcgtgtgtatgagatgctggtcagccacattcagctccactacaagcacagctacaccctgccaatcgcgagcagcatccggctgcaggcctttgacttcctgttgctgctgcgggccgactcactgcaccgcctgggcctgcccaacaaggatggagtcgtgcggttcagcccctactgcgtctgcgactacatggagccagagagaggctctgagaagaagaccagcggccccctttctcctcccacagggcctcctggcccggcgcctgcaggccccgccgtgcggctggggtccgtgccctactccctgctcttccgcgtcctgctgcagtgcttgaagcaggagtctgactggaaggtgctgaagctggttctgggcaggctgcctgagtccctgcgctataaagtgctcatctttacttccccttgcagtgtggaccagctgtgctctgctctctgctccatgctttcaggcccaaagacactggagcggctccgaggcgccccagaaggcttctccagaactgacttgcacctggccgtggttccagtgctgacagcattaatctcttaccataactacctggacaaaaccaaacagcgcgagatggtctactgcctggagcagggcctcatccaccgctgtgccagccagtgcgtcgtggccttgtccatctgcagcgtggagatgcctgacatcatcatcaaggcgctgcctgttctggtggtgaagctcacgcacatctcagccacagccagcatggccgtcccactgctggagttcctgtccactctggccaggctgccgcacctctacaggaactttgccgcggagcagtatgccagtgtgttcgccatctccctgccgtacaccaacccctccaagtttaatcagtacatcgtgtgtctggcccatcacgtcatagccatgtggttcatcaggtgccgcctgcccttccggaaggattttgtccctttcatcactaagggcctgcggtccaatgtcctcttgtcttttgatgacacccccgagaaggacagcttcagggcccggagtactagtctcaacgagagacccaagagcaggatacagacgtccctcaccagtgccagcttggggtctgcagatgagaactccgtggcccaggctgacgatagcctgaaaaacctccacctggagctcacggaaacctgtctggacatgatggctcgatacgtcttctccaacttcacggctgtcccgaagaggtctcctgtgggcgagttcctcctagcgggtggcaggaccaaaacctggctggttgggaacaagcttgtcactgtgacgacaagcgtgggaaccgggacccggtcgttactaggcctggactcgggggagctgcagtccggcccggagtcgagctccagccccggggtgcatgtgagacagaccaaggaggcgccggccaagctggagtcccaggctgggcagcaggtgtcccgtggggcccgggatcgggtccgttccatgtcggggggccatggtcttcgagttggcgccctggacgtgccggcctcccagttcctgggcagtgccacttctccaggaccacggactgcaccagccgcgaaacctgagaaggcctcagctggcacccgggttcctgtgcaggagaagacgaacctggcggcctatgtgcccctgctgacccagggctgggcggagatcctggtccggaggcccacagggaacaccagctggctgatgagcctggagaacccgctcagccctttctcctcggacatcaacaacatgcccctgcaggagctgtctaacgccctcatggcggctgagcgcttcaaggagcaccgggacacagccctgtacaagtcactgtcggtgccggcagccagcacggccaaaccccctcctctgcctcgctccaacacagactccgccgtggtcatggaggagggaagtccgggcgaggttcctgtgctggtggagcccccagggttggaggacgttgaggcagcgctaggcatggacaggcgcacggatgcctacagcaggtcgtcctcagtctccagccaggaggagaagtcgctccacgcggaggagctggttggcaggggcatccccatcgagcgagtcgtctcctcggagggtggccggccctctgtggacctctccttccagccctcgcagcccctgagcaagtccagctcctctcccgagctgcagactctgcaggacatcctcggggaccctggggacaaggccgacgtgggccggctgagccctgaggttaaggcccggtcacagtcagggaccctggacggggaaagtgctgcctggtcggcctcgggcgaagacagtcggggccagcccgagggtcccttgccttccagctccccccgctcgcccagtggcctccggccccgaggttacaccatctccgactcggccccatcacgcaggggcaagagagtagagagggacgccttaaagagcagagccacagcctccaatgcagagaaagtgccaggcatcaaccccagtttcgtgttcctgcagctctaccattcccccttctttggcgacgagtcaaacaagccaatcctgctgcccaatgagtcacagtcctttgagcggtcggtgcagctcctcgaccagatcccatcatacgacacccacaagatcgccgtcctgtatgttggagaaggccagagcaacagcgagctcgccatcctgtccaatgagcatggctcctacaggtacacggagttcctgacgggcctgggccggctcatcgagctgaaggactgccagccggacaaggtgtacctgggaggcctggacgtgtgtggtgaggacggccagttcacctactgctggcacgatgacatcatgcaagccgtcttccacatcgccaccctgatgcccaccaaggacgtggacaagcaccgctgcgacaagaagcgccacctgggcaacgactttgtgtccattgtctacaatgactccggtgaggacttcaagcttggcaccatcaagggccagttcaactttgtccacgtgatcgtcaccccgctggactacgagtgcaacctggtgtccctgcagtgcaggaaagacatggagggccttgtggacaccagcgtggccaagatcgtgtctgaccgcaacctgcccttcgtggcccgccagatggccctgcacgcaaatatggcctcacaggtgcatcatagccgctccaaccccaccgatatctacccctccaagtggattgcccggctccgccacatcaagcggctccgccagcggatctgcgaggaagccgcctactccaaccccagcctacctctggtgcaccctccgtcccatagcaaagcccctgcacagactccagccgagcccacacctggctatgaggtgggccagcggaagcgcctcatctcctcggtggaggacttcaccgagtttgtgtgaggccggggccctccctcctgcactggccttggacggtattgcctgtcagtgaaataaataaagtcctgaccccagtgcacagacatagagg

SEQ ID NO: 195813 - DNA, 5073 bp, Homo sapiens
  Payload ID: 18644
  Gene Name: tuberous sclerosis 2
  ENST ID: ENST00000439117
  CDS Start-End: 63-389
ggggcggcccggagcgcggtggcgcggcgcgggaggggttttctggtgcgtcctggtccaccatggccaaaccaacaagcaaagattcaggcttgaaggagaagtttaagattctgttgggactgggaacaccgaggccaaatcccaggtctgcagagggtaaacagacggagtttatcatcaccgcggaaatactgagagaactgagcatggaatgtggcctcaacaatcgcatccggatgatagggcagatttgtgaagtcgcaaaaaccaagaaatttgaagaggatgatctgtctgctgtgcgtccggaccgcgtcctctgtggacatagaggtctccctgcaggtgctggacgccgtggtctgctacaactgcctgccggctgagagcctcccgctgttcatcgttaccctctgtcgcaccatcaacgtcaaggagctctgcgagccttgctggaagctgatgcggaacctccttggcacccacctgggccacagcgccatctacaacatgtgccacctcatggaggacagagcctacatggaggacgcgcccctgctgagaggagccgtgttttttgtgggcatggctctctggggagcccaccggctctattctctcaggaactcgccgacatctgtgttgccatcattttaccaggccatggcatgtccgaacgaggtggtgtcctatgagatcgtcctgtccatcaccaggctcatcaagaagtataggaaggagctccaggtggtggcgtgggacattctgctgaacatcatcgaacggctccttcagcagctccagaccttggacagcccggagctcaggaccatcgtccatgacctgttgaccacggtggaggagctgtgtgaccagaacgagttccacgggtctcaggagagatactttgaactggtggagagatgtgcggaccagaggcctgagtcctccctcctgaacctgatctcctatagagcgcagtccatccacccggccaaggacggctggattcagaacctgcaggcgctgatggagagattcttcaggagcgagtcccgaggcgccgtgcgcatcaaggtgctggacgtgctgtcctttgtgctgctcatcaacaggcagttctatgaggaggagctgattaactcagtggtcatctcgcagctctcccacatccccgaggataaagaccaccaggtccgaaagctggccacccagttgctggtggacctggcagagggctgccacacacaccacttcaacagcctgctggacatcatcgagaaggtgatggcccgctccctctccccacccccggagctggaagaaagggatgtggccgcatactcggcctccttggaggatgtgaagacagccgtcctggggcttctggtcatccttcagaccaagctgtacaccctgcctgcaagccacgccacgcgtgtgtatgagatgctggtcagccacattcagctccactacaagcacagctacaccctgccaatcgcgagcagcatccggctgcaggcctttgacttcctgttgctgctgcgggccgactcactgcaccgcctgggcctgcccaacaaggatggagtcgtgcggttcagcccctactgcgtctgcgactacatggagccagagagaggctctgagaagaagaccagcggccccctttctcctcccacagggcctcctggcccggcgcctgcaggccccgccgtgcggctggggtccgtgccctactccctgctcttccgcgtcctgctgcagtgcttgaagcaggagtctgactggaaggtgctgaagctggttctgggcaggctgcctgagtccctgcgctataaagtgctcatctttacttccccttgcagtgtggaccagctgtgctctgctctctgctccatgctttcaggcccaaagacactggagcggctccgaggcgccccagaaggcttctccagaactgacttgcacctggccgtggttccagtgctgacagcattaatctcttaccataactacctggacaaaaccaaacagcgcgagatggtctactgcctggagcagggcctcatccaccgctgtgccagccagtgcgtcgtggccttgtccatctgcagcgtggagatgcctgacatcatcatcaaggcgctgcctgttctggtggtgaagctcacgcacatctcagccacagccagcatggccgtcccactgctggagttcctgtccactctggccaggctgccgcacctctacaggaactttgccgcggagcagtatgccagtgtgttcgccatctccctgccgtacaccaacccctccaagtttaatcagtacatcgtgtgtctggcccatcacgtcatagccatgtggttcatcaggtgccgcctgcccttccggaaggattttgtccctttcatcactaagggcctgcggtccaatgtcctcttgtcttttgatgacacccccgagaaggacagcttcagggcccggagtactagtctcaacgagagacccaagaggatacagacgtccctcaccagtgccagcttggggtctgcagatgagaactccgtggcccaggctgacgatagcctgaaaaacctccacctggagctcacggaaacctgtctggacatgatggctcgatacgtcttctccaacttcacggctgtcccgaagaggtctcctgtgggcgagttcctcctagcgggtggcaggaccaaaacctggctggttgggaacaagcttgtcactgtgacgacaagcgtgggaaccgggacccggtcgttactaggcctggactcgggggagctgcagtccggcccggagtcgagctccagccccggggtgcatgtgagacagaccaaggaggcgccggccaagctggagtcccaggctgggcagcaggtgtcccgtggggcccgggatcgggtccgttccatgtcggggggccatggtcttcgagttggcgccctggacgtgccggcctcccagttcctgggcagtgccacttctccaggaccacggactgcaccagccgcgaaacctgagaaggcctcagctggcacccgggttcctgtgcaggagaagacgaacctggcggcctatgtgcccctgctgacccagggctgggcggagatcctggtccggaggcccacagggaacaccagctggctgatgagcctggagaacccgctcagccctttctcctcggacatcaacaacatgcccctgcaggagctgtctaacgccctcatggcggctgagcgcttcaaggagcaccgggacacagccctgtacaagtcactgtcggtgccggcagccagcacggccaaaccccctcctctgcctcgctccaacacagtggcctctttctcctccctgtaccagtccagctgccaaggacagctgcacaggagcgtttcctgggcagactccgccgtggtcatggaggagggaagtccgggcgaggttcctgtgctggtggagcccccagggttggaggacgttgaggcagcgctaggcatggacaggcgcacggatgcctacagcaggtcgtcctcagtctccagccaggaggagaagtcgctccacgcggaggagctggttggcaggggcatccccatcgagcgagtcgtctcctcggagggtggccggccctctgtggacctctccttccagccctcgcagcccctgagcaagtccagctcctctcccgagctgcagactctgcaggacatcctcggggaccctggggacaaggccgacgtgggccggctgagccctgaggttaaggcccggtcacagtcagggaccctggacggggaaagtgctgcctggtcggcctcgggcgaagacagtcggggccagcccgagggtcccttgccttccagctccccccgctcgcccagtggcctccggccccgaggttacaccatctccgactcggccccatcacgcaggggcaagagagtagagagggacgccttaaagagcagagccacagcctccaatgcagagaaagtgccaggcatcaaccccagtttcgtgttcctgcagctctaccattcccccttctttggcgacgagtcaaacaagccaatcctgctgcccaatgagtcacagtcctttgagcggtcggtgcagctcctcgaccagatcccatcatacgacacccacaagatcgccgtcctgtatgttggagaaggccagagcaacagcgagctcgccatcctgtccaatgagcatggctcctacaggtacacggagttcctgacgggcctgggccggctcatcgagctgaaggactgccagccggacaaggtgtacctgggaggcctggacgtgtgtggtgaggacggccagttcacctactgctggcacgatgacatcatgcaagccgtcttccacatcgccaccctgatgcccaccaaggacgtggacaagcaccgctgcgacaagaagcgccacctgggcaacgactttgtgtccattgtctacaatgactccggtgaggacttcaagcttggcaccatcaagggccagttcaactttgtccacgtgatcgtcaccccgctggactacgagtgcaacctggtgtccctgcagtgcaggaaagacatggagggccttgtggacaccagcgtggccaagatcgtgtctgaccgcaacctgcccttcgtggcccgccagatggccctgcacgcaaatatggcctcacaggtgcatcatagccgctccaaccccaccgatatctacccctccaagtggattgcccggctccgccacatcaagcggctccgccagcggatctgcgaggaagccgcctactccaaccccagcctacctctggtgcaccctccgtcccatagcaaagcccctgcacagactccagccgagcccacacctggctatgaggtgggccagcggaagcgcctcatctcctcggtggaggacttcaccgagtttgtgtgaggccggggccctccctcctgcactggccttggacggtattgcctgtcagtgaaataaataaagtcctgaccccagtgcacagacatagaggca

SEQ ID NO: 195814 - DNA, 5434 bp, Homo sapiens
  Payload ID: 18644
  Gene Name: tuberous sclerosis 2
  ENST ID: ENST00000568454
  CDS Start-End: 69-5324
agttttaagtcatggcgggtgcgaacgggtctctgctgcaggcggctccgtgacagctcctgcttcacatggaggggttttctggtgcgtcctggtccaccatggccaaaccaacaagcaaagattcaggcttgaaggagaagtttaagattctgttgggactgggaacaccgaggccaaatcccaggtctgcagagggtaaacagacggagtttatcatcaccgcggaaatactgagagaactgagcatggaatgtggcctcaacaatcgcatccggatgatagggcagatttgtgaagtcgcaaaaaccaagaaatttgaagagcacgcagtggaagcactctggaaggcggtcgcggatctgttgcagccggagcggccgctggaggcccggcacgcggtgctggctctgctgaaggccatcgtgcaggggcagggcgagcgtttgggggtcctcagagccctcttctttaaggtcatcaaggattacccttccaacgaagaccttcacgaaaggctggaggttttcaaggccctcacagacaatgggagacacatcacctacttggaggaagagctggctgactttgtcctgcagtggatggatgttggcttgtcctcggaattccttctggtgctggtgaacttggtcaaattcaatagctgttacctcgacgagtacatcgcaaggatggttcagatgatctgtctgctgtgcgtccggaccgcgtcctctgtggacatagaggtctccctgcaggtgctggacgccgtggtctgctacaactgcctgccggctgagagcctcccgctgttcatcgttaccctctgtcgcaccatcaacgtcaaggagctctgcgagccttgctggaagctgatgcggaacctccttggcacccacctgggccacagcgccatctacaacatgtgccacctcatggaggacagagcctacatggaggacgcgcccctgctgagaggagccgtgttttttgtgggcatggctctctggggagcccaccggctctattctctcaggaactcgccgacatctgtgttgccatcattttaccaggccatggcatgtccgaacgaggtggtgtcctatgagatcgtcctgtccatcaccaggctcatcaagaagtataggaaggagctccaggtggtggcgtgggacattctgctgaacatcatcgaacggctccttcagcagctccagaccttggacagcccggagctcaggaccatcgtccatgacctgttgaccacggtggaggagctgtgtgaccagaacgagttccacgggtctcaggagagatactttgaactggtggagagatgtgcggaccagaggcctgagtcctccctcctgaacctgatctcctatagagcgcagtccatccacccggccaaggacggctggattcagaacctgcaggcgctgatggagagattcttcaggagcgagtcccgaggcgccgtgcgcatcaaggtgctggacgtgctgtcctttgtgctgctcatcaacaggcagttctatgaggaggagctgattaactcagtggtcatctcgcagctctcccacatccccgaggataaagaccaccaggtccgaaagctggccacccagttgctggtggacctggcagagggctgccacacacaccacttcaacagcctgctggacatcatcgagaaggtgatggcccgctccctctccccacccccggagctggaagaaagggatgtggccgcatactcggcctccttggaggatgtgaagacagccgtcctggggcttctggtcatccttcagaccaagctgtacaccctgcctgcaagccacgccacgcgtgtgtatgagatgctggtcagccacattcagctccactacaagcacagctacaccctgccaatcgcgagcagcatccggctgcaggcctttgacttcctgttgctgctgcgggccgactcactgcaccgcctgggcctgcccaacaaggatggagtcgtgcggttcagcccctactgcgtctgcgactacatggagccagagagaggctctgagaagaagaccagcggccccctttctcctcccacagggcctcctggcccggcgcctgcaggccccgccgtgcggctggggtccgtgccctactccctgctcttccgcgtcctgctgcagtgcttgaagcaggagtctgactggaaggtgctgaagctggttctgggcaggctgcctgagtccctgcgctataaagtgctcatctttacttccccttgcagtgtggaccagctgtgctctgctctctgctccatgctttcaggcccaaagacactggagcggctccgaggcgccccagaaggcttctccagaactgacttgcacctggccgtggttccagtgctgacagcattaatctcttaccataactacctggacaaaaccaaacagcgcgagatggtctactgcctggagcagggcctcatccaccgctgtgccagccagtgcgtcgtggccttgtccatctgcagcgtggagatgcctgacatcatcatcaaggcgctgcctgttctggtggtgaagctcacgcacatctcagccacagccagcatggccgtcccactgctggagttcctgtccactctggccaggctgccgcacctctacaggaactttgccgcggagcagtatgccagtgtgttcgccatctccctgccgtacaccaacccctccaagtttaatcagtacatcgtgtgtctggcccatcacgtcatagccatgtggttcatcaggtgccgcctgcccttccggaaggattttgtccctttcatcactaagggcctgcggtccaatgtcctcttgtcttttgatgacacccccgagaaggacagcttcagggcccggagtactagtctcaacgagagacccaagaggatacagacgtccctcaccagtgccagcttggggtctgcagatgagaactccgtggcccaggctgacgatagcctgaaaaacctccacctggagctcacggaaacctgtctggacatgatggctcgatacgtcttctccaacttcacggctgtcccgaagaggtctcctgtgggcgagttcctcctagcgggtggcaggaccaaaacctggctggttgggaacaagcttgtcactgtgacgacaagcgtgggaaccgggacccggtcgttactaggcctggactcgggggagctgcagtccggcccggagtcgagctccagccccggggtgcatgtgagacagaccaaggaggcgccggccaagctggagtcccaggctgggcagcaggtgtcccgtggggcccgggatcgggtccgttccatgtcggggggccatggtcttcgagttggcgccctggacgtgccggcctcccagttcctgggcagtgccacttctccaggaccacggactgcaccagccgcgaaacctgagaaggcctcagctggcacccgggttcctgtgcaggagaagacgaacctggcggcctatgtgcccctgctgacccagggctgggcggagatcctggtccggaggcccacagggaacaccagctggctgatgagcctggagaacccgctcagccctttctcctcggacatcaacaacatgcccctgcaggagctgtctaacgccctcatggcggctgagcgcttcaaggagcaccgggacacagccctgtacaagtcactgtcggtgccggcagccagcacggccaaaccccctcctctgcctcgctccaacacagactccgccgtggtcatggaggagggaagtccgggcgaggttcctgtgctggtggagcccccagggttggaggacgttgaggcagcgctaggcatggacaggcgcacggatgcctacagcaggtcgtcctcagtctccagccaggaggagaagtcgctccacgcggaggagctggttggcaggggcatccccatcgagcgagtcgtctcctcggagggtggccggccctctgtggacctctccttccagccctcgcagcccctgagcaagtccagctcctctcccgagctgcagactctgcaggacatcctcggggaccctggggacaaggccgacgtgggccggctgagccctgaggttaaggcccggtcacagtcagggaccctggacggggaaagtgctgcctggtcggcctcgggcgaagacagtcggggccagcccgagggtcccttgccttccagctccccccgctcgcccagtggcctccggccccgaggttacaccatctccgactcggccccatcacgcaggggcaagagagtagagagggacgccttaaagagcagagccacagcctccaatgcagagaaagtgccaggcatcaaccccagtttcgtgttcctgcagctctaccattcccccttctttggcgacgagtcaaacaagccaatcctgctgcccaatgagtcacagtcctttgagcggtcggtgcagctcctcgaccagatcccatcatacgacacccacaagatcgccgtcctgtatgttggagaaggccagagcaacagcgagctcgccatcctgtccaatgagcatggctcctacaggtacacggagttcctgacgggcctgggccggctcatcgagctgaaggactgccagccggacaaggtgtacctgggaggcctggacgtgtgtggtgaggacggccagttcacctactgctggcacgatgacatcatgcaagccgtcttccacatcgccaccctgatgcccaccaaggacgtggacaagcaccgctgcgacaagaagcgccacctgggcaacgactttgtgtccattgtctacaatgactccggtgaggacttcaagcttggcaccatcaagggccagttcaactttgtccacgtgatcgtcaccccgctggactacgagtgcaacctggtgtccctgcagtgcaggaaagacatggagggccttgtggacaccagcgtggccaagatcgtgtctgaccgcaacctgcccttcgtggcccgccagatggccctgcacgcaaatatggcctcacaggtgcatcatagccgctccaaccccaccgatatctacccctccaagtggattgcccggctccgccacatcaagcggctccgccagcggatctgcgaggaagccgcctactccaaccccagcctacctctggtgcaccctccgtcccatagcaaagcccctgcacagactccagccgagcccacacctggctatgaggtgggccagcggaagcgcctcatctcctcggtggaggacttcaccgagtttgtgtgaggccggggccctccctcctgcactggccttggacggtattgcctgtcagtgaaataaataaagtcctgaccccagtgcacagacatagaggcacagattgcagtcagaca

SEQ ID NO: 195815 - DNA, 590 bp, Homo sapiens
  Payload ID: 18644
  Gene Name: tuberous sclerosis 2
  ENST ID: ENST00000467949
  CDS Start-End: 1-590
agtgctgccgggactgagctcggtgctccctgcaggatgatctgtctgctgtgcgtccggaccgcgtcctctgtggacatagaggtctccctgcaggtgctggacgccgtggtctgctacaactgcctgccggctgagagcctcccgctgttcatcgttaccctctgtcgcaccatcaacgtcaaggagctctgcgagccttgctggaagctgatgcggaacctccttggcacccacctgggccacagcgccatctacaacatgtgccacctcatggaggacagagcctacatggaggacgcgcccctgctgagaggagccgtgttttttgtgggcatggctctctggggagcccaccggctctattctctcaggaactcgccgacatctgtgttgccatcattttaccaggagtcctccctcctgaacctgatctcctatagagcgcagtccatccacccggccaaggacggctggattcagaacctgcaggcgctgatggagagattcttcaggagcgagtcccgaggcgccgtgcgcatcaaggtgctggacgtgctgtcctttgtgctgctcatcaacaggcagtt

SEQ ID NO: 195816 - DNA, 1687 bp, Homo sapiens
  Payload ID: 18644
  Gene Name: tuberous sclerosis 2
  ENST ID: ENST00000569110
  CDS Start-End: 1-1606
gctttgggacctcccaccctctctccttagcgtccccagctgtgggtctggcttggagttggaggactccgccgtggtcatggaggagggaagtccgggcgaggttcctgtgctggtggagcccccagggttggaggacgttgaggcagcgctaggcatggacaggcgcacggatgcctacagcaggtcgtcctcagtctccagccaggaggagaagtcgctccacgcggaggagctggttggcaggggcatccccatcgagcgagtcgtctcctcggagggtggccggccctctgtggacctctccttccagccctcgcagcccctgagcaagtccagctcctctcccgagctgcagactctgcaggacatcctcggggaccctggggacaaggccgacgtgggccggctgagccctgaggttaaggcccggtcacagtcagggaccctggacggggaaagtgctgcctggtcggcctcgggcgaagacagtcggggccagcccgagggtcccttgccttccagctccccccgctcgcccagtggcctccggccccgaggttacaccatctccgactcggccccatcacgcaggggcaagagagtagagagggacgccttaaagagcagagccacagcctccaatgcagagaaagtgccaggcatcaaccccagtttcgtgttcctgcagctctaccattcccccttctttggcgacgagtcaaacaagccaatcctgctgcccaatgagtcacagtcctttgagcggtcggtgcagctcctcgaccagatcccatcatacgacacccacaagatcgccgtcctgtatgttggagaaggccagagcaacagcgagctcgccatcctgtccaatgagcatggctcctacaggtacacggagttcctgacgggcctgggccggctcatcgagctgaaggactgccagccggacaaggtgtacctgggaggcctggacgtgtgtggtgaggacggccagttcacctactgctggcacgatgacatcatgcaagccgtcttccacatcgccaccctgatgcccaccaaggacgtggacaagcaccgctgcgacaagaagcgccacctgggcaacgactttgtgtccattgtctacaatgactccggtgaggacttcaagcttggcaccatcaagggccagttcaactttgtccacgtgatcgtcaccccgctggactacgagtgcaacctggtgtccctgcagtgcaggaaagacatggagggccttgtggacaccagcgtggccaagatcgtgtctgaccgcaacctgcccttcgtggcccgccagatggccctgcacgcaaatatggcctcacaggtgcatcatagccgctccaaccccaccgatatctacccctccaagtggattgcccggctccgccacatcaagcggctccgccagcggatctgcgaggaagccgcctactccaaccccagcctacctctggtgcaccctccgtcccatagcaaagcccctgcacagactccagccgagcccacacctggctatgaggtgggccagcggaagcgcctcatctcctcggtggaggacttcaccgagtttgtgtgaggccggggccctccctcctgcactggccttggacggtattgcctgtcagtgaaataaataaagtcctgaccccagtgcaca

SEQ ID NO: 195817 - DNA, 542 bp, Homo sapiens
  Payload ID: 18644
  Gene Name: tuberous sclerosis 2
  ENST ID: ENST00000568566
  CDS Start-End: 1-93
atctcctatagagcgcagtccatccacccggccaaggacggctggattcagaacctgcaggcgctgatggagagattcttcaggaggagctgattaactcagtggtcatctcgcagctctcccacatccccgaggataaagaccaccaggtccgaaagctggccacccagttgctggtggacctggcagagggctgccacacacaccacttcaacagcctgctggacatcatcgagaaggtgatggcccgctccctctccccacccccggagctggaagaaagggatgtggccgcatactcggcctccttggaggatgtgaagacagccgtcctggggcttctggtcatccttcagaccaagctgtacaccctgcctgcaagccacgccacgcgtgtgtatgagatgctggtcagccacattcagctccactacaagcacagctacaccctgccaatcgcgagcagcatccggctgcaggcctttgacttcctgttgctgctgcgggccgactcactgcaccgcctgggcctgcccaacaag

SEQ ID NO: 195818 - DNA, 577 bp, Homo sapiens
  Payload ID: 18644
  Gene Name: tuberous sclerosis 2
  ENST ID: ENST00000471143
  CDS Start-End: 1-97
tttcatcactaaggtgggctcagggccggtgaaggctgtgtctctcggtaggccagggcttgctttgcccttggctgtccatggtcgggcagagtgacagggcctgcggtccaatgtcctcttgtcttttgatgacacccccgagaaggacagcttcagggcccggagtactagtctcaacgagagacccaagaggatacagacgtccctcaccagtgccagcttggggtctgcagatgagaactccgtggcccaggctgacgatagcctgaaaaacctccacctggagctcacggaaacctgtctggacatgatggctcgatacgtcttctccaacttcacggctgtcccgaagaggtctcctgtgggcgagttcctcctagcgggtggcaggaccaaaacctggctggttgggaacaagcttgtcactgtgacgacaagcgtgggaaccgggacccggtcgttactaggcctggactcgggggagctgcagtccggcccggagtcgagctccagccccggggtgcatgtgagacagaccaaggaggcgccggccaagctggagtcccaggctggg

SEQ ID NO: 195819 - DNA, 563 bp, Homo sapiens
  Payload ID: 18644
  Gene Name: tuberous sclerosis 2
  ENST ID: ENST00000483020
  CDS Start-End: 1-108
gattttgtccctttcatcactaaggtgggctcagggccggtgaaggctgtgtctctcggtaggccagggcttgctttgcccttggctgtccatggtcgggcagagtgacagggcctgcggtccaatgtcctcttgtcttttgatgacacccccgagaaggacagcttcagggcccggagtactagtctcaacgagagacccaagagcaggatacagacgtccctcaccagtgccagcttggggtctgcagatgagaactccgtggcccaggctgacgatagcctgaaaaacctccacctggagctcacggaaacctgtctggacatgatggctcgatacgtcttctccaacttcacggctgtcccgaagaggtctcctgtgggcgagttcctcctagcgggtggcaggaccaaaacctggctggttgggaacaagcttgtcactgtgacgacaagcgtgggaaccgggacccggtcgttactaggcctggactcgggggagctgcagtccggcccggagtcgagctccagccccggggtgcatgtgagacagaccaaggaggc

SEQ ID NO: 195820 - DNA, 2301 bp, Homo sapiens
  Payload ID: 18645
  Gene Name: tubulin folding cofactor A
  Uniprot ID: O75347
  ENST ID: ENST00000306388
  CDS Start-End: 31-420
gcccctccttctcgcggcgctcgagggaccatggccgatcctcgcgtgagacagatcaagatcaagaccggcgtggtgaagcggttggtcaaagaaaaagtgatgtatgaaaaagaggcaaaacaacaagaagaaaagattgaaaaaatgagagctgaagacggtgaaaattatgacattaaaaagcaggcagagatcctacaagaatccaggatgatgatcccagattgccagcgcaggttggaagccgcatatttggatcttcaacggatactagtaagcaaagacttctgtgtcatgtttaaattttttttttcaatccaatacatggaaagccaaaagtttaaatatttaacactgagaactagttggcagtatttcttattcacttgccctttataccgctatattttaaaataattaatggagtttaaattgtgttttgaattatgcctccagtaaaagtactgttttctagcatgtttgttcagtttattaaaatttagctagttaaatttatttaagttatgatagtaccagtattgtccagcaatgtcttgattatttggttttcatacataaagatcttttgagacattgaggatgagttgactgattaaaattttaaaagatctaatgtttcaaaagaatttgggatcttattaaaaggatcttgaattctttcacattcaaacctagatcagtttgagagggggaaaaaacctggtaatctatgtagtcccctcatactaacttggagctgaataacacttatacttgctggtataaatgccttgtgatacagaaggtagataaagcaggaaataataactgttaaaatactatctaagacaggaagcatcatttgtatttcttgacagtttaaatgcttttttctctcatgaatctagtagctgagaaagtaatagaaattgcttggaaaaaaataatgttggccgccaggtgcagtggctcatgcctgtaatcccagcactttgggaggctgaggtgggtggatcacgagtcaggagttcaagaccagcctgaccaacatggtgaaatcctgtctctactaaaaataccaaaataataataataataataatgtatttggatgatatatttgtatgtgaagatgtattcaacaatatctctgcccttgaagagcttgtatttactaacagagaacaaagatgtgtttaaggtataacatggaggtttaagaaattcttacgtatagtttgagctaagcaaattctcagtcgttttgctttcagttttcatattaaatacacacatactttatttcctctactgtttgtatatctccatcttttattgacctgacataaattgctaaccatagcttcatttaaaaatcaaacaaaatttcctgtgtactttagataatattatttcatttgtctgttatcattacaatatattagtaaaagttgcctgtatatcagtattatggaaaaactcaatctttaaatatcagaaaatgaaagatgtattttgtttcctttagtgtagggtatgtaatacccattagcaagcaggcaattcatttgtttaattcaaagattatatttaactctgttgtgacatcagaagccttctttgtcattgtgaatagtcagtggattattttggcctgaatgctgtcatatatgtaacatgttagtaaatcttcctttttacttttctcttttgtatgatgatgatgggtcaacaaaatgagaataaactttttctgaggtttttatttaattaatgctggtagctttagaagactgttattcacttattttatgagaatatatacagtgaaacaaaaccaccagttatttcttcctttccttgtaaagaaggaacagaatgtgggaaacctgtggaattacaatatatttagatgaggcttgggattttttacttttaattttttagttattaacattaatggtttgtaatatttgagtaaataacaaagtactgaaacttgaaaaggataaacttaatttttattgtatttcattttaggaaaatgaaaaagacttggaagaagctgaggaatataaagaagcacgtttagtactggattcagtgaagttagaagcctgaaacttttctcgtatggggtggtttttgcattaaatcctggggtccattttacaatccattatttttgaccactgctatgtgttcaagtagtatgagaatgtgattgtttttatctggttacatatatatttctttgtctaatttaatatgtcaaataaatgagttcatctaataaaa

SEQ ID NO: 195821 - DNA, 683 bp, Homo sapiens
  Payload ID: 18645
  Gene Name: tubulin folding cofactor A
  Uniprot ID: O75347
  ENST ID: ENST00000380377
  CDS Start-End: 105-431
gcatgcgcgccggcgaccacgcctaaatagccgcagcctctgcgcgtcgccctccacggttaccccggctctccgcccctccttctcgcggcgctcgagggaccatggccgatcctcgcgtgagacagatcaagatcaagaccggcgtggtgaagcggttggtcaaagaaaaagtgatgtatgaaaaagaggcaaaacaacaagaagaaaagattgaaaaaatgagagctgaagacggtgaaaattatgacattaaaaagcaggcagagatcctacaagaatccaggatgatgatcccagattgccagcgcaggttggaagccgcatatttggatcttcaacggatactagaaaatgaaaaagacttggaagaagctgaggaatataaagaagcacgtttagtactggattcagtgaagttagaagcctgaaacttttctcgtatggggtggtttttgcattaaatcctggggtccattttacaatccattatttttgaccactgctatgtgttcaagtagtatgagaatgtgattgtttttatctggttacatatatatttctttgtctaatttaatatgtcaaataaatgagttcatctaataaaattgtttattttatactttacaaaatttttaaattaaccttttatcattaaaccacatagactttatgacagagaa

SEQ ID NO: 195822 - DNA, 157 bp, Homo sapiens
  Payload ID: 18645
  Gene Name: tubulin folding cofactor A
  ENST ID: ENST00000520039
  CDS Start-End: 18-98
gcggcgctcgagggaccatggccgatcctcgcgtgagacagatcaagatcaagaccggcgtggtgaagcggcagagatcctacaagaatccaggatgatgatcccagattgccagcgcaggttggaagccgcatatttggatcttcaacggatacta

SEQ ID NO: 195823 - DNA, 545 bp, Homo sapiens
  Payload ID: 18645
  Gene Name: tubulin folding cofactor A
  ENST ID: ENST00000517679
  CDS Start-End: 9-368
tagggattatgttgacaaggacttcctggtttcatggcttcttttcttggttttcgtcttcaatttgctggagtacattaagtaaatttctcaggttggtcaaagaaaaagtgatgtatgaaaaagaggcaaaacaacaagaagaaaagattgaaaaaatgagagctgaagacggtgaaaattatgacattaaaaagcaggcagagatcctacaagaatccaggatgatgatcccagattgccagcgcaggttggaagccgcatatttggatcttcaacggatactagaaaatgaaaaagacttggaagaagctgaggaatataaagaagcacgtttagtactggattcagtgaagttagaagcctgaaacttttctcgtatggggtggtttttgcattaaatcctggggtccattttacaatccattatttttgaccactgctatgtgttcaagtagtatgagaatgtgattgtttttatctggttacatatatatttctttgtctaatttaatatgtcaaataaatgagttcatctaataaaa

SEQ ID NO: 195824 - DNA, 446 bp, Homo sapiens
  Payload ID: 18645
  Gene Name: tubulin folding cofactor A
  ENST ID: ENST00000520361
  CDS Start-End: 37-276
ctctccgcccctccttctcgcggcgctcgagggaccatggccgatcctcgcgtgagacagatcaagatcaagaccggcgtggtgaagcggttggtcaaagaaaaagtgatgtatgaaaaagaggcaaaacaacaagaagaaaagattgaaaaaatgagagctgaagacggtgaaaattatgacattaaaaagcaggaaaatgaaaaagacttggaagaagctgaggaatataaagaagcacgtttagtactggattcagtgaagttagaagcctgaaacttttctcgtatggggtggtttttgcattaaatcctggggtccattttacaatccattatttttgaccactgctatgtgttcaagtagtatgagaatgtgattgtttttatctggttacatatatatttctttgtctaatttaatatgtcaaataaatgagttcatct

SEQ ID NO: 195825 - DNA, 435 bp, Homo sapiens
  Payload ID: 18645
  Gene Name: tubulin folding cofactor A
  ENST ID: ENST00000522370
  CDS Start-End: 167-421
aggtgcgcaagtttatttcagcctgcaaacgtgcttctgtggccctcagcgggacggagaaccaggcggttgcggcaaaaagagcttgggatttcaaggcaggattttctccaggcctagaaaggagaagcctctgcccagagaaaggttggtcaaagaaaaagtgatgtatgaaaaagaggcaaaacaacaagaagaaaagattgaaaaaatgagagctgaagacggtgaaaattatgacattaaaaagcaggcagagatcctacaagaatccaggatgatgatcccagattgccagcgcaggttggaagccgcatatttggatcttcaacggatactagaaaatgaaaaagacttggaagaagctgaggaatataaagaagcacgtttagtactggattcagtgaagttagaagcctgaaacttttctcgtat

SEQ ID NO: 195826 - DNA, 551 bp, Homo sapiens
  Payload ID: 18645
  Gene Name: tubulin folding cofactor A
  ENST ID: ENST00000518338
  CDS Start-End: 5-400
gaccatggccgatcctcgcgtgagacagatcaagatcaagaccggcgtggtgaagcggttggtcaaagaaaaagtgatgtatgaaaaagaggcaaaacaacaagaagaaaagattgaaaaaatgagagctgaagacggtgaaaattatgacattaaaaagcaggctggtcttcaactcctggcctccagtgatcctcccaccccagcctctcagagtcctgggatgataagcgcagagatcctacaagaatccaggatgatgatcccagattgccagcgcaggttggaagccgcatatttggatcttcaacggatactagaaaatgaaaaagacttggaagaagctgaggaatataaagaagcacgtttagtactggattcagtgaagttagaagcctgaaacttttctcgtatggggtggtttttgcattaaatcctggggtccattttacaatccattatttttgaccactgctatgtgttcaagtagtatgagaatgtgattgtttttatctggttacatatatatttctttgtctaatttaatatgt

SEQ ID NO: 195827 - DNA, 1473 bp, Homo sapiens
  Payload ID: 18646
  Gene Name: tubulin folding cofactor B
  Uniprot ID: Q99426
  ENST ID: ENST00000221855
  CDS Start-End: 576-1310
gccgcctcgggctcggctctctccgcgcagaggtttcatggcttgcttcaatcttttgatatcttagagtaattgcttccaatttttgggcatcgccgcctcagtttacagaatagtatggatctggtgccagagccgggaaaacgatgcgcatcgtaaaccgcaaaacactgagcatccaggacagaagccaaggcgcttggcttggttgaaggccagtgcgcatgcgcgagtttacccttcgcggactgggcgagctcttgccactcctacctccgggcttcagtcttcgccgcctgttctggtcctttcccgggccgctattggaagaaccgtgaactatggaaggcccctctggattggctgggctggcccaagagtaaggagagccctcttcctggcggtggggaagggacggcggcgattggcggacgctcctggcaggagagcgcggattggtcaggcacggagcaggaggcggggctgatagcccagcagcagcagcggcggcggcggctgcggagcgggtgtgaggcggctggaccgcgctgcaggcatccgcagggcgcggcaagatggaggtgacgggggtgtcggcacccacggtgaccgttttcatcagcagctccctcaacaccttccgctccgagaagcgatacagccgcagcctcaccatcgctgagttcaagtgtaaactggagttgctggtgggcagccctgcttcctgcatggaactggagctgtatggagttgacgacaagttctacagcaagctggatcaagaggatgcgctcctgggctcctaccctgtagatgacggctgccgcatccacgtcattgaccacagtggcgcccgccttggtgagtatgaggacgtgtcccgggtggagaagtacacgatctcacaagaagcctacgaccagaggcaagacacggtccgctctttcctgaagcgcagcaagctcggccggtacaacgaggaggagcgggctcagcaggaggccgaggccgcccagcgcctggccgaggagaaggcccaggccagctccatccccgtgggcagccgctgtgaggtgcgggcggcgggacaatcccctcgccggggcaccgtcatgtatgtaggtctcacagatttcaagcctggctactggattggtgtccgctatgatgagccactggggaaaaatgatggcagtgtgaatgggaaacgctacttcgaatgccaggccaagtatggcgcctttgtcaagccagcagtcgtgacggtgggggacttcccggaggaggactacgggttggacgagatatgacacctaaggaattcccctgcttcagctcctagctcagccactgactgcccctcctgtgtgtgcccatggcccttttctcctgaccccattttaattttattcattttttcctttgccattgatttttgagactcatgcattaaattcactagaaacccagaaa

SEQ ID NO: 195828 - DNA, 724 bp, Homo sapiens
  Payload ID: 18646
  Gene Name: tubulin folding cofactor B
  ENST ID: ENST00000589996
  CDS Start-End: 43-618
ggcggctggaccgcgctgcaggcatccgcagggcgcggcaagatggaggtgacgggggtgtcggcacccacggtgaccgttttcatcagcagctccctcaacaccttccgctccgagaagcgatacagccgcagcctcaccatcgctgagttcaagtgtaaactggagttgctggtgggcagccctgcttcctgcatggaactggagctgtatggagttgacgacaagttctacagcaagctggatcaagaggatgcgctcctgggctcctaccctgtagatgacggctgccgcatccacgtcattgaccacagtggcgcccgccttggtgagtatgaggacgtgtcccgggtggagaagtacacgatctcacaagaagcctacgaccagaggcaagacacggtccgctctttcctgaagcgcagcaagctcggccggtacaacgaggaggagcgggctcagcaggaggccgaggccgcccagcgcctggccgaggagaaggcccaggccagctccatccccgtgggcagccgctgtgaggtctcacagatttcaagcctggctactggattggtgtccgctatgatgagccactggggaaaaatgatggcagtgtgaatgggaaacgctacttcgaatgccaggccaagtatggcgcctttgtcaagccagcagtcgtgacggtgggggacttcccggaggaggactacgggttggacgagat

SEQ ID NO: 195829 - DNA, 399 bp, Homo sapiens
  Payload ID: 18646
  Gene Name: tubulin folding cofactor B
  ENST ID: ENST00000591296
  CDS Start-End: 1-399
tccctcaacaccttccgctccgagaagcgatacagccgcagcctcaccatcgctgagttcaagtgtaaactggagttgctggtgggcagccctgcttcctgcatggaactggagctgtatggagttgacgacaagttctacagcaagctggatcaagaggatgcgctcctgggctcctaccctgtagatgacggctgccgcatccacagtcttgctctgtctcccaggctggcgtgcagtggcatgatctcggctcactgcaacctccgcctccccggttcaagcgattctcctgcctcagcctcccgagtaggtgggattacagatgcccgccactacaccagggtcattgaccacagtggcgcccgccttggtgagtatgaggacgtgtcccgggtg

SEQ ID NO: 195830 - DNA, 776 bp, Homo sapiens
  Payload ID: 18646
  Gene Name: tubulin folding cofactor B
  ENST ID: ENST00000588385
  CDS Start-End: 268-776
cgcggcggggcgggtccggagagaactcgagagtgcagagatgagggccgggtccagcgaaaaatccgacggtccagagggcgggggcaagaggcgaggggctggattgcggccccgtgcgtcctgactggggggtcttttggaggaaaagggacgtggcgatggtcattgatgcaaggggcggggcctccgtggcctccttcttctcaccctgcctcctcctcacagtgtaaactggagttgctggtgggcagccctgcttcctgcatggaactggagctgtatggagttgacgacaagttctacagcaagctggatcaagaggatgcgctcctgggctcctaccctgtagatgacggctgccgcatccacgtcattgaccacagtggcgcccgccttggtgagtatgaggacgtgtcccgggtggagaagtacacgatctcacaagaagcctacgaccagaggcaagacacggtccgctctttcctgaagcgcagcaagctcggccggtacaacgaggaggagcgggctcagcaggaggccgaggccgcccagcgcctggccgaggagaaggcccaggccagctccatccccgtgggcagccgctgtgaggtgcgggcggcgggacaatcccctcgccggggcaccgtcatgtatgtaggtctcacagatttcaagcctggctactggattggtgtccgctatgatgagccactggggaaaaatgatggcagtgtgaatgggaaacgctacttcgaatgccaggccaagtatgg

SEQ ID NO: 195831 - DNA, 875 bp, Homo sapiens
  Payload ID: 18646
  Gene Name: tubulin folding cofactor B
  Uniprot ID: Q99426
  ENST ID: ENST00000585746
  CDS Start-End: 131-712
ctcgagagtgcagagatgagggccgggtccagcgaaaaatccgacggtccagagggcgggggcaagaggcgaggggctggattgcggcccctgtaaactggagttgctggtgggcagccctgcttcctgcatggaactggagctgtatggagttgacgacaagttctacagcaagctggatcaagaggatgcgctcctgggctcctaccctgtagatgacggctgccgcatccacgtcattgaccacagtggcgcccgccttggtgagtatgaggacgtgtcccgggtggagaagtacacgatctcacaagaagcctacgaccagaggcaagacacggtccgctctttcctgaagcgcagcaagctcggccggtacaacgaggaggagcgggctcagcaggaggccgaggccgcccagcgcctggccgaggagaaggcccaggccagctccatccccgtgggcagccgctgtgaggtgcgggcggcgggacaatcccctcgccggggcaccgtcatgtatgtaggtctcacagatttcaagcctggctactggattggtgtccgctatgatgagccactggggaaaaatgatggcagtgtgaatgggaaacgctacttcgaatgccaggccaagtatggcgcctttgtcaagccagcagtcgtgacggtgggggacttcccggaggaggactacgggttggacgagatatgacacctaaggaattcccctgcttcagctcctagctcagccactgactgcccctcctgtgtgtgcccatggcccttttctcctgaccccattttaattttattcattttttcctttgccattgatttttgagactcatgcattaaattcactagaaacccagaaa

SEQ ID NO: 195832 - DNA, 597 bp, Homo sapiens
  Payload ID: 18646
  Gene Name: tubulin folding cofactor B
  ENST ID: ENST00000589624
  CDS Start-End: 259-396
gcgggtccggagagaactcgagagtgcagagatgagggccgggtccagcgaaaaatccgacggtccagagggcgggggcaagaggcgaggggctggattgcggccccgtgcgtcctgactggggggtcttttggaggaaaagggacgtggcgatggtcattgatgcaaggggcggggcctccgtggcctccttcttctcaccctgcctcctcctcacagtgtaaactggagttgctggtgggcagccctgcttcctgcatggaactggagctgtatggagttgacgacaagttctacagcaagctggatcaagaggatgcgctcctgggctcctaccctgtagatgacggctgccgcatccacaaattagctgggcgtggtggcagatgcctgtaatcctagctactcaggaggctgaggcaggaggatcacttgaacccaggagctggaagttgcagtgagctgagatcacaccactgcactccagtttggatgatagagtcattgaccacagtggcgcccgccttggtgagtatgaggacgtgtcccgggtggagaagtacacgatctcacaagaagcctacgaccagaggcaag

SEQ ID NO: 195833 - DNA, 466 bp, Homo sapiens
  Payload ID: 18646
  Gene Name: tubulin folding cofactor B
  ENST ID: ENST00000586868
  CDS Start-End: 9-191
cttcctgcatggaactggagctgtatggagttgacgacaagttctacagcaagctggatcaagaggatgcgctcctgggctcctaccctgtagatgacggctgccgcatccacgtctcacagatttcaagcctggctactggattggtgtccgctatgatgagccactggggaaaaatgatggcagtgtgaatgggaaacgctacttcgaatgccaggccaagtatggcgcctttgtcaagccagcagtcgtgacggtgggggacttcccggaggaggactacgggttggacgagatatgacacctaaggaattcccctgcttcagctcctagctcagccactgactgcccctcctgtgtgtgcccatggcccttttctcctgaccccattttaattttattcattttttcctttgccattgatttttgagactcatgcattaaattcactagaaacccagaaagt

SEQ ID NO: 195834 - DNA, 413 bp, Homo sapiens
  Payload ID: 18646
  Gene Name: tubulin folding cofactor B
  ENST ID: ENST00000629269
  CDS Start-End: 276-413
gattggtcaggcacggagcaggaggcggggctgatagcccagcagcagcagcggcggcggcggctgcggagcgggtgtgaggcggctggaccgcgctgcaggcatccgcagggcgcggcaagatggaggtgacgggggtgtcggcacccacggtgaccgttttcatcagcagctccctcaacaccttccgctccgagaagcgatacagccgcagcctcaccatcgctgagttcaagtgtaaactggagttgctggtgggcagccctgcttcctgcatggaactggagctgtatggagttgacgacaagttctacagcaagctggatcaagaggatgcgctcctgggctcctaccctgtagatgacggctgccgcatccacaaattagctgggcgtggtggcagatgcctgtaa

SEQ ID NO: 195835 - DNA, 1616 bp, Homo sapiens
  Payload ID: 18647
  Gene Name: tubulin folding cofactor C
  Uniprot ID: Q15814
  ENST ID: ENST00000372876
  CDS Start-End: 24-1064
gagagaggaagcttgaagccaatatggagtccgtcagttgctccgctgctgctgtcaggaccggagacatggagtcccagcgggacctgagcctggtgcctgagcggcttcagagacgcgaacaagaacggcagctggaagttgaaaggcggaaacaaaagcggcagaaccaggaggtagagaaggagaacagccactttttcgtcgccacctttgttcgggagcgagcggccgtggaagagcttctggagcgcgcggagtcggtcgagcggctggaggaggcggcctctcggctccaggggctgcagaaactaatcaacgactcagtttttttcctagccgcttacgacctgcggcagggacaagaggcgctggcgcggctgcaggcggccttggccgagcggcgccgggggctgcagcccaagaagcgtttcgctttcaagacccggggaaaggatgctgcttcgtctaccaaagtagacgcggctcctggcatccccccggcagttgaaagcatacaggactccccgctgcccaagaaggcggaaggagacctcggccccagctgggtctgcggtttctccaacctggagtcccaagtcttggagaagagagccagcgagttgcaccagcgcgacgttcttttgaccgaactgagcaactgcacggtcagactgtatggaaatcccaacaccctgcggctaaccaaggcccacagctgcaagctgctctgcggtccggtgtctacctctgttttcctggaggactgcagtgactgcgtgctggcagtggcctgccaacagctccgcatacacagtacgaaagacacccgcatcttcctgcaggtgaccagcagggccatcgtggaggactgcagtgggatccagttcgccccttacacctggagctacccggagatcgacaaggacttcgagagctctggtttagataggagcaaaaataactggaacgatgttgacgattttaactggctggcccgggatatggcctccccaaactggagtattcttcctgaagaggagcgaaatatccagtgggactaagcagttgtcactctgttcttcactcctaccaaatactttccacgttggactttcccccttattgggtctcgaagtttacttattgtcacactgtgtatgttttcagcattttaaggctagagattgtaatgggctcctacttgtaatttccattaaattcgtaacaggtataacactaaagcatttttgctattttcgtcatgcctttgagactgagtcttactccgtcccccagcgtggtggcgcgctgggattacaggcgcgcgccaccacgcgaacttgtatttttagtagagacggggtttcgccatgttgtccgggctgctctcgaactcctgacctcaggtgatccacccgcttcagcttcccaaagtgctggcattacaggcgtgagccaccacgccagggctttatttatttatttttaccacaatagtttgaagcagtaagggggaaggagggtgattatattgctttgtaatggtttgtgatacttgaaacatcacggtgcataataaagtaggtctgcagtaaatacatgggtttgtttgg

SEQ ID NO: 195836 - DNA, 7168 bp, Homo sapiens
  Payload ID: 18648
  Gene Name: tubulin folding cofactor D
  Uniprot ID: Q9BTW9
  ENST ID: ENST00000355528
  CDS Start-End: 131-3709
ggccagcgtcggttgccgccttagcgggcgcctccttttcatccctcatccttcatccctggctttcgcgctctagcggagtgggatctgcgaacacgtgaggcgggggcgcggtccccaggctgccgagatggccctgagcgacgaaccggccgcgggcggccccgaggaggaggcggaggacgagacactggcctttggcgcggcgctggaagcgttcggcgagagcgcggagacccgggcgctgctgggccgcctgcgggaggtgcacggcggcggcgcggagcgcgaggtggccctggagcggttccgcgtaataatggacaaataccaggagcagcctcatctgttggacccgcaccttgaatggatgatgaacttgttgttggacatagtgcaagatcagacatctccagcttcccttgtacatctggcttttaaatttctttacatcatcaccaaggttcgaggctataaaacatttcttcgtttatttcctcatgaagttgccgatgtagagcctgttttagatttggtcacaattcagaatcccaaggaccatgaagcttgggaaacccgctacatgcttttgctctggctctccgtgacctgcctgatcccttttgatttttctcgccttgacgggaacctcctcacccagcctgggcaagcacgaatgtccataatggaccgtattctccaaatagcagagtcctacttgattgtcagtgacaaggcccgagatgcagctgctgtccttgtgtccagatttatcacacgtcctgatgtcaagcaaagcaagatggctgagttcctggactggagcctgtgcaatctggcccgttcctccttccagaccatgcagggggtcatcaccatggatgggacgctgcaggccctggcacaaatatttaaacatggaaaacgtgaagactgtttgccctatgctgccactgtcctcaggtgcctcgatggctgcagactccctgagagcaaccagaccctgctgcggaagctgggggtgaagcttgtgcagcgactggggctgacattcctgaagccgaaggtggcagcatggaggtaccagcgtggctgccgatctttggctgcaaatctgcagctcctcactcagggtcagagtgagcagaagccactcatcctgaccgaagatgacgacgaagatgacgacgtcccagagggggtggagcgtgtgatagagcagctgctggtcgggctgaaggacaaggacacggtcgtgcggtggtctgcagccaagggcatcggtaggatggctggcaggcttcccagagccctggcggatgatgtggtcgggtctgtgctggactgcttcagtttccaggagactgacaaggcgtggcatgggggatgtctggcgctggcagagctgggcaggagaggcctgttgctgccgtctcgactcgtggatgttgtcgccgtgatcctgaaggcgctgacctacgacgagaagcggggtgcctgcagcgtgggcaccaacgtcagggacgccgcctgctacgtgtgctgggccttcgcgcgtgcctatgagcctcaggagctgaagccctttgtgactgcaatctcgagtgcactggtgattgctgcggtgtttgaccgagacataaactgcagaagagcagcctctgccgccttccaggagaatgtggggagacagggcactttccctcatggtattgatattttgaccacagctgactattttgccgtcggtaacagatccaactgtttcctggttataagtgtgtttattgccggctttcctgagtacacgcagccaatgatagaccacctggttaccatgaagatcagccactgggatggggtcatccgagagttggctgcgagggcgctgcacaacctggcccagcaggcacccgagttcagcgccacgcaagtcttcccgaggctgctgtccatgacactgagtccagatcttcacatgaggcatgggtcgattctcgcctgcgcagaagttgcttacgccttgtacaaacttgcagcccaagagaacaggcccgtcacggaccatctggacgagcaggcagtgcagggcctgaagcagattcaccagcagctctatgatcgtcagttatacaggggtctgggaggacagctcatgagacaagcagtgtgtgttttaatagaaaagttgtcactttccaaaatgccctttagaggtgacaccgtaattgatggttggcaatggctgataaatgacactttgagacatctccatctcatctcaagtcactcccgccagcagatgaaggatgcagcagtctcggccctggctgctctatgcagtgaatattacatgaaggagccgggggaggcagatcccgcaattcaggaggagctgatcacgcagtacctggctgagcttcggaaccccgaggagatgactcgctgtggcttctcgttggccttgggcgcccttccaggcttccttctgaaaggccggctccagcaggttctcacaggtttaagagcagttacccacacttcccccgaggacgtaagttttgctgagtccaggagagacggcttgaaggccattgcgaggatttgccagactgttggtgtgaaagcaggagccccagacgaagctgtgtgcggagagaatgtttcccagatttactgtgcgctgctgggctgcatggacgactacaccacggacagcagaggggacgtgggcacctgggtccgcaaggccgccatgaccagtctgatggatctgacacttctgctggctcggagccagcctgagctgatcgaggcccatacctgtgagcgcatcatgtgctgtgtggcccagcaggccagtgagaagattgaccgtttccgtgctcacgccgccagcgtgttcctgacgctcctgcactttgacagccctcccatcccccacgtgccccaccgaggagaactggaaaagctgtttcccaggtccgatgtggcctccgtgaactggagtgcaccttcccaggccttcccacgcatcacccagctccttgggctgcccacctaccgctaccacgtcctgctggggctagtcgtgtccctgggcggcttgacggagtcgacgatccggcactccacccagagcctctttgagtacatgaagggcattcagagcgacccgcaggccctgggcagcttcagcgggacccttctgcagatctttgaggacaaccttctgaatgagagggtgtccgtgccgctgctgaagacgctggaccacgtgctcacccacggctgcttcgacatcttcaccacggaggaggaccacccctttgctgtgaagttgcttgcgctctgtaagaaagaaatcaagaattcaaaagatatccagaagctcctgtcaggcatcgcagtgttctgcgagatggtgcagttccccggcgacgtgaggaggcaggccctcctgcagctgtgtctgctcctctgccaccgtttcccgctgatccggaagaccacggccagccaggtgtacgagacattgctcacctacagtgacgtcgtgggcgcggatgtgctggacgaggtggtgactgtgctcagtgacactgcgtgggacgcggagcttgcagtggtgagagagcagcgcaaccgtctgtgtgaccttctgggcgtacccaggccccagctggtgccccagcctggtgcctgctgaagccagtcctggagcccatacctcacccctgcctggtgaggatgtcttgttcctgagggaggccggtgtggaaagcctcgcacagtggtgcctccagctgttgaagggtagcgctggcccttggaggctggcactagctgacagcttttcctctctgcacctgcgctctggtgacttggggtggacgcctctgccttcacttgaacacaaatgtgcttcctataaaatcatgtaccaagaagttcctgccttttgtctctgagcctgatgtgtgtaggggtgatggaaaggctcactgcccaggggtcagccagaggggaggtgggctgcactcctcctgcctggagaccaggcccccttcttgcctggtgctgtccctgctgtgggagacgtctggccacaggcagtgccccacccagtcttggagagagatgaatgttaaatcagaggttcaaatgctagagaactgagaagccctggtggcaggcatggtctggagtgctgggcagatgctgtttctgggcccgtctgcctggtgggggtgctgtcctcccccctgtgcacacgtgagcatcgtgcatgtggcccctctgcagtgcaggagtcactgattgatgggtgtgccgaccagcagcttcacaaatgtctgctgcaaggggaatcgtcagagtccaatgtgtgcctctacagtaatgtcggaaataaataccattcttgaaataattacactgtcttaggagagcctgggcagagtccacacttgggtttttaggcaaagggcaggaggctacctttgtctctgtgtctgagctcgtgctgatccatcccaaagctggtgaggggaacgtgtataaaaatttcactgtggtagcaacccacacccatctctgggacctgtgctgtgctcatagggcttgaggtgcagaaccacggccagcagcaccaaagcagccccaggtgtggccactcagaggcccaagggcttgggtgagcaaccctttccctatgtgaggagcccaggggtgccatgtgcgtggtgtagattagggtggctccctggcctgctctcaggtggggatggggcctggacacaggaacatgggcaggccgagaactgggaggtgccaccgcatctgtgaggcttgtgaggtcaccaggaccacaagaccaggactgtgacagtccgtgctgtgtgtttagcagacagctcttcacgggatgtgtgtgacgacctggccacacaggagtgtggggttaacacactactgttgttgtgtttgacctggtggccaatggtctttataccctaaaagagccttgggttacatttttacgagatttaaatattttattccaacctgtgtaataggggtctcctcctccttgaactgtcccgattggctggggtcacgtggtgagggtcctgggtgaccaggcctagccttggccacatgagtccacacagtggaaaaggcttggctcctgtggtcggcacacacgagactctggttgcgcctgctgggtgtggaacaggcgcaccatcgccatgcctgcagctcacaaagctcctgctggcctgggatgcactgaggatggaaggaacaagtggcttctgagaaaaacatgatgaactgttcttagtgcaattaaaagaagattccagataaatggcattttaagacatggaggcaggtcgattacccacccagacccatcagtgacactatgtggcaaagcagttcttcttttaatgtcggtctaacttagcaacccgaggaaagtggatcactccactggccactgcctctttcccactggatcccatccatcactggggcacttgtgctcaccagacacctggtggcctggaaagccctctttcagcagccgtttctggagcccaccagggtccaggtgatagagtttggcaaggaaccccttgctcacatgatagctggggcagacaatagcaaatgaacaagcaagcaccatcaaggcaggcaacactgagtgctatgaacaaagataaagtgggcaatggaatggcatgttgggtgttgactccgagaaggtgttcagaaaacctctctgaaggggcagcatttgggcagaggtccagactgtgtccaatggcagaaaagagaatgcttgtggtcccagaagtggagcaagctttgtgagtttagagagcagcaagaagccagtatccctgggaccggggagctgatgtgggatttgtgtacccacaaacacgttctaggtgctaaccagaaaccctccatgtgagagcagagaccttggagatcctgagggtttctgctgagccctggaatctagtcacgctattttgatagcagaatggatgagagaatttaaggcccagggccagatctaatggaccactatataaagctgggaccctaaataagtctttttcaaaggaacagcagcaagactcttatctcaatctatctcccctgaagtggcctgaattaatactacctgtatgatccccaaaactcctaaagtggaaaatttgattgacttggccctgaccagtggtattcccagacaagggcagaagatgcaaatacaaaacctctctggtagaatgtaggctataatatgagtacatttttgaaaagggctagaaatgatcaagaagagattagaaaaaaacagagcccctagaaatgtaagaagtgaaatgaaaagctcaatggatagcttagacacagctgaagagagaattagaaaactggaagatctgaaaacattatccagagaactggaagatatgacagcaacatcaagagacattgaagaatgtctaacctttgggtaattggggtctcagaatgaaatgaaatgatgcagatattccatactgacatgcaacagtccccagatacagaagcctaacagtctcacatttagacctgccacagtgaaactgcagaactgtaagaaggacagagtgatataaacgactaccaatttcccagcagcagcactggagttgagcagtgagtagaccaaggtcttcattatgctgagagaaaatagctgtcaagttgcttgaattgtgcccacagcataacattaaagaagagaacaaaattaagtcatttagataaaaatatgccattcttatctgtttggttttttaatcttggcttaatatttggggttgagtcatttgttttgagagctgtcctgtttattgcagggtgttcagcaacatcccagatggaagcagcatccccctacccagctgtgacaaaaagaaaaaaaaatgtctccagacactgccaaatatcttctgggggtgcccctggttgagaaccactgctttagtggataaactttaggcaggagggaaatgatcgcagttggatagttggaggaatgtggagcaagggaagcaataaactgtgaccataaaaacatagaaagatg

SEQ ID NO: 195837 - DNA, 3975 bp, Homo sapiens
  Payload ID: 18648
  Gene Name: tubulin folding cofactor D
  ENST ID: ENST00000539345
  CDS Start-End: 37-3729
cacgtgaggcgggggcgcggtccccaggctgccgagatggccctgagcgacgaaccggccgcgggcggccccgaggaggaggcggaggacgagacactggcctttggcgcggcgctggaagcgttcggcgagagcgcggagacccgggcgctgctgggccgcctgcgggaggtgcacggcggcggcgcggagcgcgaggtggccctggagcggttccgcgtaataatggacaaataccaggagcagcctcatctgttggacccgcaccttgaatggatgatgaacttgttgttggacatagtgcaagatcagacatctccagcttcccttgtacatctggcttttaaatttctttacatcatcaccaaggttcgaggctataaaacatttcttcgtttatttcctcatgaagttgccgatgtagagcctgttttagatttggtcacaattcagaatcccaaggaccatgaagcttgggaaacccgctacatgcttttgctctggctctccgtgacctgcctgatcccttttgatttttctcgccttgacgggaacctcctcacccagcctgggcaagcacgaatgtccataatggaccgtattctccaaatagcagagtcctacttgattgtcagtgacaaggcccgagatgcagctgctgtccttgtgtccagatttatcacacgtcctgatgtcaagcaaagcaagatggctgagttcctggactggagcctgtgcaatctggcccgttcctccttccagaccatgcagggggtcatcaccatggatgggacgctgcaggccctggcacaaatatttaaacatggaaaacgtgaagactgtttgccctatgctgccactgtcctcaggtgcctcgatggctgcagactccctgagagcaaccagaccctgctgcggaagctgggggtgaagcttgtgcagcgactggggctgacattcctgaagccgaaggtggcagcatggaggtaccagcgtggctgccgatctttggctgcaaatctgcagctcctcactcagggtcagagtgagcagaagccactcatcctgaccgaagatgacgacgaagatgacgacgtcccagagggggtggagcgtgtgatagagcagctgctggtcgggctgaaggacaaggacacggtcgtgcggtggtctgcagccaagggcatcggtaggatggctggcaggcttcccagagccctggcggatgatgtggtcgggtctgtgctggactgcttcagtttccaggagactgacaaggcgtggcatgggggatgtctggcgctggcagagctgggcaggagaggcctgttgctgccgtctcgactcgtggatgttgtcgccgtgatcctgaaggcgctgacctacgacgagaagcggggtgcctgcagcgtgggcaccaacgtcagggacgccgcctgctacgtgtgctgggccttcgcgcgtgcctatgagcctcaggagctgaagccctttgtgactgcaatctcgagtgcactggtgattgctgcggtgtttgaccgagacataaactgcagaagagcagcctctgccgccttccaggagaatgtggggagacagggcactttccctcatggtattgatattttgaccacagctgactattttgccgtcggtaacagatccaactgtttcctggttataagtgtgtttattgccggctttcctgagtacacgcagccaatgatagaccacctggttaccatgaagatcagccactgggatggggtcatccgagagttggctgcgagggcgctgcacaacctggcccagcaggcacccgagttcagcgccacgcaagtcttcccgaggctgctgtccatgacactgagtccagatcttcacatgaggcatgggtcgattctcgcctgcgcagaagttgcttacgccttgtacaaacttgcagcccaagagaacaggcccgtcacggaccatctggacgagcaggcagtgcagggcctgaagcagattcaccagcagctctatgatcgtcagttatacaggggtctgggaggacagctcatgagacaagcagtgtgtgttttaatagaaaagttgtcactttccaaaatgccctttagaggtgacaccgtaattgatggttggcaatggctgataaatgacactttgagacatctccatctcatctcaagtcactcccgccagcagatgaaggatgcagcagtctcggccctggctgctctatgcagtgaatattacatgaaggagccgggggaggcagatcccgcaattcaggaggagctgatcacgcagtacctggctgagcttcggaaccccgaggagatgactcgctgtggcttctcgttggccttgggcgcccttccaggcttccttctgaaaggccggctccagcaggttctcacaggtttaagagcagttacccacacttcccccgaggacgtaagttttgctgagtccaggagagacggcttgaaggccattgcgaggatttgccagactgttggtgtgaaagcaggagccccagacgaagctgtgtgcggagagaatgtttcccagatttactgtgcgctgctgggctgcatggacgactacaccacggacagcagaggggacgtgggcacctgggtccgcaaggccgccatgaccagtctgatggatctgacacttctgctggctcggagccagcctgagctgatcgaggcccatacctgtgagcgcatcatgtgctgtgtggcccagcaggccagtgagaagattgaccgtttccgtgctcacgccgccagcgtgttcctgacgctcctgcactttgacagccctcccatcccccacgtgccccaccgaggagaactggaaaagctgtttcccaggtccgatgtggcctccgtgaactggagtgcaccttcccaggccttcccacgcatcacccagctccttgggctgcccacctaccgctaccacgtcctgctggggctagtcgtgtccctgggcggcttgacggagtcgacgatccggcactccacccagagcctctttgagtacatgaagggcattcagagcgacccgcaggccctgggcagcttcagcgggacccttctgcagatctttgaggacaaccttctgaatgagagggtgtccgtgccgctgctgaagacgctggaccacgtgctcacccacggctgcttcgacatcttcaccacggaggaggaccacccctttgctgtgaagttgcttgcgctctgtaagaaagaaatcaagaattcaaaagatatccagaagctcctgtcaggcatcgcagttgactttccaagtgcgacactcgtgtgtgtaggcacagtgcagatgtacgcacacacacacctccggcttggggccccaggcccgcactgtgctcacggatctgctctgcccaggttctgcgagatggtgcagttccccggcgacgtgaggaggcaggccctcctgcagctgtgtctgctcctctgccaccgtttcccgctgatccggaagaccacggccagccaggtgtacgagacattgctcacctacagtgacgtcgtgggcgcggatgtgctggacgaggtggtgactgtgctcagtgacactgcgtgggacgcggagcttgcagtggtgagagagcagcgcaaccgtctgtgtgaccttctgggcgtacccaggccccagctggtgccccagcctggtgcctgctgaagccagtcctggagcccatacctcacccctgcctggtgaggatgtcttgttcctgagggaggccggtgtggaaagcctcgcacagtggtgcctccagctgttgaagggtagcgctggcccttggaggctggcactagctgacagcttttcctctctgcacctgcgctctggtgacttggggtggacgcctctgccttcacttgaacacaaatgtgcttcctataaaatcatgtaccaagaagttcc

SEQ ID NO: 195838 - DNA, 1509 bp, Homo sapiens
  Payload ID: 18648
  Gene Name: tubulin folding cofactor D
  ENST ID: ENST00000571316
  CDS Start-End: 1-714
gtgattgctgcggtgtttgaccgagacataaactgcagaagagcagcctctgccgccttccaggagaatgtggggagacagggcactttccctcatggtattgatattttgaccacagctgactattttgccgtcggtaacagatccaactgtttcctggttataagtgtgtttattgccggctttcctgagtacacgcagccaatgatagaccacctggttaccatgaagatcagccactgggatggggtcatccgagagttggctgcgagggcgctgcacaacctggcccagcaggcacccgagttcagcgccacgcaagtcttcccgaggctgctgtccatgacactgagtccagatcttcacatgaggcatgggtcgattctcgcctgcgcagaagttgcttacgccttgtacaaacttgcagcccaagagaacaggcccgtcacggaccatctggacgagcaggcagtgcagggcctgaagcagattcaccagcagctctatgatcgtcagttatacaggggtctgggaggacagctcatgagacaagcagacttggtcattgtccctcagatgcctccagagcacacggtgcaggggtgtcacctttccgacgtacccatgggtgcccggagttgcctccttagtgggatcaagaccatcccccacatgtcatggacagctggtgacctggtcgctcttggtgtttgagcagtaagtctgcacaggagccactgcccaccatgaaaggggggagttaaaggcgttccgaatccctttggccaacgacggagttgaaggtgttccgagtccccgtggccggcggcgacagagttgaaggcgtttggagtccccgtggctggcggtgatggagttgaaggcgttccgaatccccgtggccggtggtgacggagttgaaggcgttccgagtccctgtagctggcggcgatggagttgaatgcgttccgagtccccaggacgccattttggctgaatttcctttaccctcctgctccgtgaagcggggcccattggggaggtgctgctctgtaatctgctcttcttcttgaatgtgtggttagggcagccacattgatgtcccccaggctccagagtgaccgccccttaggggtcctgctgggcgttggccgctgttggccgcagggcaccgttggcctgtgcattgctgccacctacccatgatgggcagaattgtcacgagctcaggaggaaaccatggaaaaaccgcaggtcctggagcctccgtgtggttgtcgtgggcagctttccacgcgacgtgccctccctgggcgtgaggctgcatttgcacttagcggggagagggggaatgttgtgggttctagttgggctttttgatgatgatatttggaaagacttgagacaaagtagccaccctgtcctgtcccttcctcacccaccacacccactgctccccgctggcaggcactgcaggctgcacaagtaaccgtggaacctaaacactga

SEQ ID NO: 195839 - DNA, 979 bp, Homo sapiens
  Payload ID: 18648
  Gene Name: tubulin folding cofactor D
  ENST ID: ENST00000577051
  CDS Start-End: 1-783
gcccagcaggccagtgagaagattgaccgtttccgtgctcacgccgccagcgtgttcctgacgctcctgcactttgacagccctcccatcccccacgtgccccaccgaggagaactggaaaagctgtttcccaggtccgatgtggcctccgtgaactggagtgcaccttcccaggccttcccacgcatcacccagctccttgggctgcccacctaccgctaccacgtcctgctggggctagtcgtgtccctgggcggcttgacggagtcgacgatccggcactccacccagagcctctttgagtacatgaagggcattcagagcgacccgcaggccctgggcagcttcagcgggacccttctgcagatctttgaggacaaccttctgaatgagagccacccctttgctgtgaagttgcttgcgctctgtaagaaagaaatcaagaattcaaaagatatccagaagctcctgtcaggcatcgcagtgttctgcgagatggtgcagttccccggcgacgtgaggaggcaggccctcctgcagctgtgtctgctcctctgccaccgtttcccgctgatccggaagaccacggccagccaggtgtacgagacattgctcacctacagtgacgtcgtgggcgcggatgtgctggacgaggtggtgactgtgctcagtgacactgcgtgggacgcggagcttgcagtggtgagagagcagcgcaaccgtctgtgtgaccttctgggcgtacccaggccccagctggtgccccagcctggtgcctgctgaagccagtcctggagcccatacctcacccctgcctggtgaggatgtcttgttcctgagggaggccggtgtggaaagcctcgcacagtggtgcctccagctgttgaagggtagcgctggcccttggaggctggcactagctgacagcttttcctctctgcacctgcgctctggtgacttggggtggacgcctctgcct

SEQ ID NO: 195840 - DNA, 942 bp, Homo sapiens
  Payload ID: 18648
  Gene Name: tubulin folding cofactor D
  ENST ID: ENST00000576160
  CDS Start-End: 518-942
atcccagttgacttgaaattcaggttttgcttgtgaaagtagctggctggggcttctgttgatgacagtgctgtgtggacggcctggttcgctgggtgtgcctcacagacacaggacactttttagggttgcttttgaatgtgcctgagttgtcgccgtgatcctgaaggcgctgacctacgacgagaagcggggtgcctgcagcgtgggcaccaacgtcagggacgccgcctgctacgtgtgctgggccttcgcgcgtgcctatgagcctcaggagctgaagccctttgtgactgcaatctcgagtgcactggtgattgctgcggtgtttgaccgagacataaactgcagaagagcagcctctgccgccttccaggagaatgtggggagacagggcactttccctcatggtattgatattttgaccacagctgactattttgccgtcggtaacagatccaactgtttcctggttataagtgtgtttattgccggctttcctgagtacacgcagccaatgatagaccacctggttaccatgaagatcagccactgggatggggtcatccgagagttggctgcgagggcgctgcacaacctggcccagcaggcacccgagttcagcgccacgcaagtcttcccgaggctgctgtccatgacactgagtccagatcttcacatgaggcatgggtcgattctcgcctgcgcagaagttgcttacgccttgtacaaacttgcagcccaagagaacaggcccgtcacggaccatctggacgagcaggcagtgcagggcctgaagcagattcaccagcagctctatgatcgtcagttatacaggggtctgggaggacagctcatgagacaagcagtgtgtgttttaatagaaaagttgtcactttccaaaatgccctttagaggtgacaccgtaattgatggttggca

SEQ ID NO: 195841 - DNA, 702 bp, Homo sapiens
  Payload ID: 18648
  Gene Name: tubulin folding cofactor D
  ENST ID: ENST00000572953
  CDS Start-End: 69-702
ccccgacctgacccaggcctgctcgctctggtgtgcaccgacctgccagctttgtggcactttgtggcatggggctcaggccgatggagggcactttccctcatggtattgatattttgaccacagctgactattttgccgtcggtaacagatccaactgtttcctggttataagtgtgtttattgccggctttcctgagtacacgcagccaatgatagaccacctggttaccatgaagatcagccactgggatggggtcatccgagagttggctgcgagggcgctgcacaacctggcccagcaggcacccgagttcagcgccacgcaagtcttcccgaggctgctgtccatgacactgagtccagatcttcacatgaggcatgggtcgattctcgcctgcgcagaagttgcttacgccttgtacaaacttgcagcccaagagaacaggcccgtcacggaccatctggacgagcaggcagtgcagggcctgaagcagattcaccagcagctctatgatcgtcagttatacaggggtctgggaggacagctcatgagacaagcagtgtgtgttttaatagaaaagttgtcactttccaaaatgccctttagaggtgacaccgtaattgatggttggcaatggctgataaatgacactttgagacatctccatctcatctcaagtcactcccgccagcagatga

SEQ ID NO: 195842 - DNA, 879 bp, Homo sapiens
  Payload ID: 18648
  Gene Name: tubulin folding cofactor D
  ENST ID: ENST00000574422
  CDS Start-End: 147-879
gaagaaatgggcaaactggttttgaaagtaactgtgctgaattcccacccacaggcagtgagttctcgttcttccgcgtctcaccacctctccatgctgtcttttccagtgtgtttattgccggctttcctgagtacacgcagccaatgatagaccacctggttaccatgaagatcagccactgggatggggtcatccgagagttggctgcgagggcgctgcacaacctggcccagcaggcacccgagttcagcgccacgcaagtcttcccgaggctgctgtccatgacactgagtccagatcttcacatgaggcatgggtcgattctcgcctgcgcagaagttgcttacgccttgtacaaacttgcagcccaagagaacaggcccgtcacggaccatctggacgagcaggcagtgcagggcctgaagcagattcaccagcagctctatgatcgtcagttatacaggggtctgggaggacagctcatgagacaagcagtgtgtgttttaatagaaaagttgtcactttccaaaatgccctttagaggtgacaccgtaattgatggttggcaatggctgataaatgacactttgagacatctccatctcatctcaagtcactcccgccagcagatgaaggatgcagcagtctcggccctggctgctctatgcagtgaatattacatgaaggagccgggggaggcagatcccgcaattcaggaggagctgatcacgcagtacctggctgagcttcggaaccccgaggagatgactcgctgtggcttctcgttggccttgggcgcccttccaggcttccttctgaaaggccggctccagcaggttctcacaggtttaagagcagttacccacacttcccccg

SEQ ID NO: 195843 - DNA, 1380 bp, Homo sapiens
  Payload ID: 18648
  Gene Name: tubulin folding cofactor D
  ENST ID: ENST00000572794
  CDS Start-End: 1-206
cattgctcacctacagtgacgtcgtgggcgcggatgtgctggacgaggtggtgactgtgctcagtgacactgcgtgggacgcggagcttgcagtggtgagagagcagcgcaaccgtctgtgtgaccttctgggcgtacccaggccccagctggtgccccaggtaaccctgtcaccttcacagcatgaggtgcctgtgcttccctgagctctggaatgttctggggccagcggctgtgcttagcttctgccagcacgtccacacggcccgttccctcgtctcatgtcaggacccctgggattacgggaccagcagagctgccttctctggccactgcccacacctgtgggcccctgtggcatccaggccacttgctctggggcgtttggggggccggggagtgggtggagctggcaccagcttgatccaggctcctcatgcctggccctggggtctgtttgtgctccaagtgccaagagtgccaccctacccctcctcatctgcttcccatgagtggggccggggctgggtgagaggcccccagaagctgcccctgtgcacctcaccagcccgtcactcttctaaagtaacaaaaacaagtacctcagttctctcgggggctggggcccagggttgctgtgctgtctctctagttaccagggttggctccttcctctcagcctccttccggcaggaggttatatctgagagggaggaggagaaccatgtctagatacatgggggcagtggggatgggctgagcatcaggacacagcctcccccatttctgtgtgtgtaaaggctgaactcaacagcagactttggaattaaatgtgctttttacatttttattaggaaaaatttcaaacgtgtgaatgcaggttaagagcagtgcagtgaacctcccttcccgctccccagatggggtgcccttccgaggacacgttagtcatgagcacctgtcagccacatagctcaggctgccgggtgtgtgggaaacggcacaaatggtttcctgcaggaaccgtgtcagtccccacacagggcccagaggggtgagggtcccctggctgggaatggtgtgtgttggagctgaccagcctgagcttgtcttgtctcttcttcagcctggtgcctgctgaagccagtcctggagcccatacctcacccctgcctggtgaggatgtcttgttcctgagggaggccggtgtggaaagcctcgcacagtggtgcctccagctgttgaagggtagcgctggcccttggaggctggcactagctgacagcttttcctctctgcacctgcgctctggtgacttggggtggacgcctctgccttcacttgaacacaaatgtgcttcctataaaatcatgtaccaag

SEQ ID NO: 195844 - DNA, 850 bp, Homo sapiens
  Payload ID: 18648
  Gene Name: tubulin folding cofactor D
  ENST ID: ENST00000571712
  CDS Start-End: 498-850
gacggcctggttcgctgggtgtgcctcacagacacaggacactttttagggttgcttttgaatgtgcctgagttgtcgccgtgatcctgaaggcgctgacctacgacgagaagcggggtgcctgcagcgtgggcaccaacgtcagggacgccgcctgctacgtgtgctgggccttcgcgcgtgcctatgagcctcaggagctgaagccctttgtgactgcaatctcgagtgcactggtgattgctgcggtgtttgaccgagacataaactgcagaagagcagcctctgccgccttccaggagaatgtggggagacagggcactttccctcatggtattgatattttgaccacagctgactattttgccgtcggtaacagatccaactgtttcctggttataagggtcatccgagagttggctgcgagggcgctgcacaacctggcccagcaggcacccgagttcagcgccacgcaagtcttcccgaggctgctgtccatgacactgagtccagatcttcacatgaggcatgggtcgattctcgcctgcgcagaagttgcttacgccttgtacaaacttgcagcccaagagaacaggcccgtcacggaccatctggacgagcaggcagtgcagggcctgaagcagattcaccagcagctctatgatcgtcagttatacaggggtctgggaggacagctcatgagacaagcagtgtgtgttttaatagaaaagttgtcactttccaaaatgccctttagaggtgacaccgtaattgatggttggcaatggctgataaatgacactttgagacatctccatctcatctcaagtcactcccgccagcagatgaa

SEQ ID NO: 195845 - DNA, 827 bp, Homo sapiens
  Payload ID: 18648
  Gene Name: tubulin folding cofactor D
  ENST ID: ENST00000576996
  CDS Start-End: 425-827
ctcgggtggcagtgagcggacagcgagggggacagacacaggtggaaggaaccacgttgtcgccgtgatcctgaaggcgctgacctacgacgagaagcggggtgcctgcagcgtgggcaccaacgtcagggacgccgcctgctacgtgtgctgggccttcgcgcgtgcctatgagcctcaggagctgaagccctttgtgactgcaatctcgagtgcactggtgattgctgcggtgtttgaccgagacataaactgcagaagagcagcctctgccgccttccaggagaatgtggggagacagggcactttccctcatggtattgatattttgaccacagctgactattttgccgtcggtaacagatccaactgtttcctggttataagtgtgtttattgccggctttcctgagtacacgcagccaatgatagaccacctggttaccatgaagatcagccactgggatggggtcatccgagagttggctgcgagggcgctgcacaacctggcccagcaggcacccgagttcagcgccacgcaagtcttcccgaggctgctgtccatgacactgagtccagatcttcacatgaggcatgggtcgattctcgcctgcgcagaagttgcttacgccttgtacaaacttgcagcccaagagaacaggcccgtcacggaccatctggacgagcaggcagtgcagggcctgaagcagattcaccagcagctctatgatcgtcagttatacaggggtctgggaggacagctcatgagacaagcagtgtgtgttttaatagaaaagttgtcactttccaaaatgccctttagaggtg

SEQ ID NO: 195846 - DNA, 1059 bp, Homo sapiens
  Payload ID: 18648
  Gene Name: tubulin folding cofactor D
  ENST ID: ENST00000576760
  CDS Start-End: 290-1059
ttggctcagagctgggctggagtgaggcctgtgtctcttgggaccacagagagcggacagttgagacggtggaccagtctcaagataagagtctttatttcagatacagataagacgctgaacacgttttaagagggccgccttccaggagaatgtggggagacagggcactttccctcatggtattgatattttgaccacagctgactattttgccgtcggtaacagatccaactgtttcctggttataagtgtgtttattgccggctttcctgagtacacgcagccaatgatagaccacctggttaccatgaagatcagccactgggatggggtcatccgagagttggctgcgagggcgctgcacaacctggcccagcaggcacccgagttcagcgccacgcaagtcttcccgaggctgctgtccatgacactgagtccagatcttcacatgaggcatgggtcgattctcgcctgcgcagaagttgcttacgccttgtacaaacttgcagcccaagagaacaggcccgtcacggaccatctggacgagcaggcagtgcagggcctgaagcagattcaccagcagctctatgatcgtcagttatacaggggtctgggaggacagctcatgagacaagcagtgtgtgttttaatagaaaagttgtcactttccaaaatgccctttagaggtgacaccgtaattgatggttggcaatggctgataaatgacactttgagacatctccatctcatctcaagtcactcccgccagcagatgaaggatgcagcagtctcggccctggctgctctatgcagtgaatattacatgaaggagccgggggaggcagatcccgcaattcaggaggagctgatcacgcagtacctggctgagcttcggaaccccgaggagatgactcgctgtggcttctcgttggccttgggcgcccttccaggcttccttctgaaaggccggctccagcaggttctcacaggtttaagagcagttacccacacttcccccgaggacgtaagttttgctgagtccaggagagacggctt

SEQ ID NO: 195847 - DNA, 682 bp, Homo sapiens
  Payload ID: 18648
  Gene Name: tubulin folding cofactor D
  ENST ID: ENST00000572984
  CDS Start-End: 355-682
gaagtcctgtccctccttggggctggacacggtcccttgcccctgaactctagacgccctgcattgccctggtgctcccatgtcaagactggccgcggtcgtccatcccatggtttgtgaccctcccagcaacgctgtgaggaaggtgctgcagctggttctcagcattggcaggagcatggcgactcaggcagtcagtgtgccgccttccaggagaatgtggggagacagggcactttccctcatggtattgatattttgaccacagctgactattttgccgtcggtaacagatccaactgtttcctggttataagtgtgtttattgccggctttcctgagtacacgcagccaatgatagaccacctggttaccatgaagatcagccactgggatggggtcatccgagagttggctgcgagggcgctgcacaacctggcccagcaggcacccgagttcagcgccacgcaagtcttcccgaggctgctgtccatgacactgagtccagatcttcacatgaggcatgggtcgattctcgcctgcgcagaagttgcttacgccttgtacaaacttgcagcccaagagaacaggcccgtcacggaccatctggacgagcaggcagtgcagggcctgaagcagattcaccagcagctctatgatcgtcagttatacaggggtctgg

SEQ ID NO: 195848 - DNA, 867 bp, Homo sapiens
  Payload ID: 18648
  Gene Name: tubulin folding cofactor D
  ENST ID: ENST00000574975
  CDS Start-End: 113-867
ctgggctctggtccaggctttgtagaccgtgcaggcggctgcatccccgacctgacccaggcctgctcgctctggtgtgcaccgacctgccagctttgtggcactttgtggcatggggctcaggccgatggagggcactttccctcatggtattgatattttgaccacagctgactattttgccgtcggtaacagatccaactgtttcctggttataagggtcatccgagagttggctgcgagggcgctgcacaacctggcccagcaggcacccgagttcagcgccacgcaagtcttcccgaggctgctgtccatgacactgagtccagatcttcacatgaggcatgggtcgattctcgcctgcgcagaagttgcttacgccttgtacaaacttgcagcccaagagaacaggcccgtcacggaccatctggacgagcaggcagtgcagggcctgaagcagattcaccagcagctctatgatcgtcagttatacaggggtctgggaggacagctcatgagacaagcagtgtgtgttttaatagaaaagttgtcactttccaaaatgccctttagaggtgacaccgtaattgatggttggcaatggctgataaatgacactttgagacatctccatctcatctcaagtcactcccgccagcagatgaaggatgcagcagtctcggccctggctgctctatgcagtgaatattacatgaaggagccgggggaggcagatcccgcaattcaggaggagctgatcacgcagtacctggctgagcttcggaaccccgaggagatgactcgctgtggcttctcgttggccttgggcgcccttccaggcttccttctgaaaggccggctccagca

SEQ ID NO: 195849 - DNA, 1761 bp, Homo sapiens
  Payload ID: 18648
  Gene Name: tubulin folding cofactor D
  ENST ID: ENST00000633032
  CDS Start-End: 1-1515
gatgcagcagtctcggccctggctgctctatgcagtgaatattacatgaaggagccgggggaggcagatcccgcaattcaggaggagctgatcacgcagtacctggctgagcttcggaaccccgaggagatgactcgctgtggcttctcgttggccttgggcgcccttccaggcttccttctgaaaggccggctccagcaggttctcacaggtttaagagcagttacccacacttcccccgaggacgtaagttttgctgagtccaggagagacggcttgaaggccattgcgaggatttgccagactgttggtgtgaaagcaggagccccagacgaagctgtgtgcggagagaatgtttcccagatttactgtgcgctgctgggctgcatggacgactacaccacggacagcagaggggacgtgggcacctgggtccgcaaggccgccatgaccagtctgatggatctgacacttctgctggctcggagccagcctgagctgatcgaggcccatacctgtgagcgcatcatgtgctgtgtggcccagcaggccagtgagaagattgaccgtttccgtgctcacgccgccagcgtgttcctgacgctcctgcactttgacagccctcccatcccccacgtgccccaccgaggagaactggaaaagctgtttcccaggtccgacgtggcctccgtgaactggagtgcaccttcccaggccttcccacgcatcacccagctccttgggctgcccacctaccgctaccacgtcctgctggggctagtcgtgtccctgggcggcttgacggagtcgacgatccggcactccacccagagcctctttgagtacatgaagggcattcagagcgacccgcaggccctgggcagcttcagcgggacccttctgcagatctttgaggacaaccttctgaatgagagggtgtccgtgccgctgctgaagacgctggaccacgtgctcacccacggctgcttcgacatcttcaccacggaggaggaccacccctttgctgtgaagttgcttgcgctctgtaagaaagaaatcaagaattcaaaagatatccagaagctcctgtcaggcatcgcagttgactttccaagtgcgacactcgcgtgtgtaggcacagtgcagatgtgcgcacacacacacctccggcttggggccccaggcccgcactgtgctcacggatctgctctgcccaggttctgcgggatggtgcagttccccggcgacgtgaggaggcaggccctcctgcagctgtgtctgctcctctgccaccgtttcccgctgatccggaagaccacggccagccaggtgtacgagacattgctcacctacagtgacgtcgtgggcgcggatgtgctggacgaggtggtgactgtgctcagtgacactgcgtgggacgcggagcttgcagtggtgagagagcagcgcaaccgtctgtgtgaccttctgggcgtacccaggccccagctggtgccccagcctggtgcctgctgaagccagtcctggagcccatacctcacccctgcctggtgaggatgtcttgttcctgagggaggccggtgtggaaagcctcgcacagtggtgcctccagctgttgaagggtagcgctggcccttggaggctggcactagctgacagcttttcctctctgcacctgcgctctggtgacttggggtggacgcctctgccttcacttgaacacaaatgtgcttcctataaaatcatgtaccaagaagttcc

SEQ ID NO: 195850 - DNA, 278 bp, Homo sapiens
  Payload ID: 18648
  Gene Name: tubulin folding cofactor D
  ENST ID: ENST00000632081
  CDS Start-End: 1-278
gatgcagcagtctcggccctggctgctctatgcagtgaatattacatgaaggagccgggggaggcagatcccgcaattcaggaggagctgatcacgcagtacctggctgagcttcggaaccccgaggagatgactcgctgtggcttctcgttggccttgggcgcccttccaggcttccttctgaaaggccggctccagcaggttctcacaggtttaagagcagttacccacacttcccccgaggacgtaagttttgctgagtccaggagagacggctt

SEQ ID NO: 195851 - DNA, 4860 bp, Homo sapiens
  Payload ID: 18648
  Gene Name: tubulin folding cofactor D
  ENST ID: ENST00000633825
  CDS Start-End: 1-1401
gatgcagcagtctcggccctggctgctctatgcagtgaatattacatgaaggagccgggggaggcagatcccgcaattcaggaggagctgatcacgcagtacctggctgagcttcggaaccccgaggagatgactcgctgtggcttctcgttggccttgggcgcccttccaggcttccttctgaaaggccggctccagcaggttctcacaggtttaagagcagttacccacacttcccccgaggacgtaagttttgctgagtccaggagagacggcttgaaggccattgcgaggatttgccagactgttggtgtgaaagcaggagccccagacgaagctgtgtgcggagagaatgtttcccagatttactgtgcgctgctgggctgcatggacgactacaccacggacagcagaggggacgtgggcacctgggtccgcaaggccgccatgaccagtctgatggatctgacacttctgctggctcggagccagcctgagctgatcgaggcccatacctgtgagcgcatcatgtgctgtgtggcccagcaggccagtgagaagattgaccgtttccgtgctcacgccgccagcgtgttcctgacgctcctgcactttgacagccctcccatcccccacgtgccccaccgaggagaactggaaaagctgtttcccaggtccgacgtggcctccgtgaactggagtgcaccttcccaggccttcccacgcatcacccagctccttgggctgcccacctaccgctaccacgtcctgctggggctagtcgtgtccctgggcggcttgacggagtcgacgatccggcactccacccagagcctctttgagtacatgaagggcattcagagcgacccgcaggccctgggcagcttcagcgggacccttctgcagatctttgaggacaaccttctgaatgagagggtgtccgtgccgctgctgaagacgctggaccacgtgctcacccacggctgcttcgacatcttcaccacggaggaggaccacccctttgctgtgaagttgcttgcgctctgtaagaaagaaatcaagaattcaaaagatatccagaagctcctgtcaggcatcgcagtgttctgcgggatggtgcagttccccggcgacgtgaggaggcaggccctcctgcagctgtgtctgctcctctgccaccgtttcccgctgatccggaagaccacggccagccaggtgtacgagacattgctcacctacagtgacgtcgtgggcgcggatgtgctggacgaggtggtgactgtgctcagtgacactgcgtgggacgcggagcttgcagtggtgagagagcagcgcaaccgtctgtgtgaccttctgggcgtacccaggccccagctggtgccccagcctggtgcctgctgaagccagtcctggagcccatacctcacccctgcctggtgaggatgtcttgttcctgagggaggccggtgtggaaagcctcgcacagtggtgcctccagctgttgaagggtagcgctggcccttggaggctggcactagctgacagcttttcctctctgcacctgcgctctggtgacttggggtggacgcctctgccttcacttgaacacaaatgtgcttcctataaaatcatgtaccaagaagttcctgccttttgtctctgagcctgatgtgtgtaggggtgatggaaaggctcactgcccaggggtcagccagaggggaggtgggctgcactcctcctgcctggagaccaggcccccttcttgcctggtgctgtccctgctgtgggagacgtctggccacaggcagtgccccacccagtcttggagagagatgaatgttaaatcagaggttcaaatgctagagaactgagaagccctggtggcaggcatggtctggagtgctgggcagatgctgtttctgggcccgtctgcctggtgggggtgctgtcctcccccctgtgcacacgtgagcatcgtgcatgtggcccctctgcagtgcaggagtcactgattgatgggtgtgccgaccagcagcttcacaaatgtctgctgcaaggggaatcgtcagagtccaatgtgtgcctctacagtaatgtgggaaataaataccattcttgaaataattacactgtcttaggagagcctgggcagagtccacacttgggtttttaggcaaagggcaggaggctacctttgtctctgtgtctgagctcgtgctgatccatcccaaagctggtgaggggaacgtgtataaaaatttcactgtggtagcaacccacacccatctctgggacctgtgctgtgctcatagggcttgaggtgcagaaccacggccagcagcaccaaagcagccccaggtgtggccactcagaggcccaagggcttgggtgagcaaccctttccctatgtgaggagcccaggggtgccatgtgcgtggtgtagattagggtggctccctggcctgctctcaggtggggatggggcctggacacaggaacatgggcaggccaagaactgggaggtgccaccgcatctgtgaggcttgtgaggtcaccaggaccacaagaccaggactgtgacagtccgtgctgtgtgtttagcagacagctcttcacgggatgtgtgtgacgacctggccacacaggagtgtggggttaacacactactgttgttgtgtttgacctggtggccaatggtctttataccctaaaagagccttgggttacatttttacgagatttaaatattttattccaacctgtgtaataggggtctcctcctccttgaactgtcccgattggctggggtcacgtggtgagggtcctgggtgaccaggcctagccttggccacatgagtccacacagtggaaaaggcttggctcctgtggtcggcacacatgagactctggttgcgcctgctgggtgtggaacaggcgcaccatcgccatgcctgcagctcacaaagctcctgctggcctgggatgcactgaggatggaaggaacaagtggcttctgagaaaaacatgatgaactgttcttagtgcaattaaaagaagattccagataaatggcattttaagacatggaggcaggtcgattacccacccagacccatcagtgacactatgtggcaaagcagttcttcttttaatgtcggtctaacttagcaacccgaggaaagtggatcactccactggccactgcctctttcccactggatcccatccatcactggggcacttgtgctcaccagacacctggtggcctggaaagccctctttcagcagccgtttctggagcccaccagggtccaggtgatagagtttggcaaggaaccccttgctcacatgatagctggggcagacaatagcaaatgaacaagcaagcaccatcaaggcaggcaacactgagtgctatgaacaaagataaagtgggcaatggaatggcatgttgggtgttgactccgagaaggtgttcagaaaacctctctgaaggggcagcatttgggcagaggtccagactgtgtccaatggcagaaaagagaatgcttgtggtcccagaagtggagcaagctttgtgagtttagagagcagcaagaagccagtatccctgggaccggggagctgatgtgggatttgtgtacccacaaacacgttctaggtgctaaccagaaaccctccatgtgagagcagagaccttggagatcctgagggtttctgctgagccctggaatctagtcacgctattttgatagcagaatggatgagagaatttaaggcccagggccagatctaatggaccgctatataaagctgggaccctaaataagtctttttcaaaggaacagcagcaagactcttatctcaatctatctcccctgaagtggcctgaattaatactacctgtatgatccccaaaactcctaaagtggaaaatttgattgacttggccctgaccagtggtattcccagacaagggcagaagatgcaaatacaaaacctctctggtagaatgtaggctataatatgagtacatttttgaaaagggctagaaatgatcaagaagagattagaaaaaaacagagcccctagaaatgtaagaagtgaaatgaaaagctcaatggatagcttagacacagctgaagagagaattagaaaactggaagatctgaaaacattatccagagaactggaagatataacagcaacatcaagagacattgaagaatgtctaacctttgggtaattggggtctcagaatgaaatgaagtgatgcagatattccatactgacatgcaacagtccccagatacagaagcctaacagtctcacatttagacctgccacagtgaaactgcagaactgtaagaaggacagagtgatataaacgactaccaatttcccagcagcagcactggagttgagcagtgagtagaccaaggtcttcattatgctgagagaaaatagctgtcaagttgcttgaattgtgcccacagcataacattaaagaagagaacacaattaagtcatttagataaaaatatgccattcttatctgtttggttttttaatcttggcttaatatttggggttgagtcatttgttttgagagctgtcctgtttattgcagggtgttcagcaacatcccagatggaagcagcatccccctacccagctgtgacaaaaagaaaaaaaaatgtctccagacactgccaaatatcttctgggggtgcccctggttgagaaccactgctttagtggataaactttaggcaggagggaaatgatcgcagttggatagttggaggaatgtggagcaagggaagcaataaactgtgaccataaaaacatagaaagatg

SEQ ID NO: 195852 - DNA, 1383 bp, Homo sapiens
  Payload ID: 18648
  Gene Name: tubulin folding cofactor D
  ENST ID: ENST00000633959
  CDS Start-End: 1-206
cattgctcacctacagtgacgtcgtgggcgcggatgtgctggacgaggtggtgactgtgctcagtgacactgcgtgggacgcggagcttgcagtggtgagagagcagcgcaaccgtctgtgtgaccttctgggcgtacccaggccccagctggtgccccaggtaaccctgtcaccttcacagcatgaggtgcctgtgcttccctgagctctggaatgttctggggccagcggctgtgcttagcttctgccagcacgtccacacggcccgttccctcgtctcatgtcaggacccctgggattacgggaccagcagagctgccttctctggccactgcccacacctgtgggcccctgtggcatccaggccacttgctctggggcgtttggggggccggggagtgggtggagctggcaccagcttgatccaggctcctcatgcctggccctggggtctgtttgtgctccaagtgccaagagtgccaccctacccctcctcatctgcttcccatgagtggggccggggctgggtgagaggcccccagaagctgcccctgtgcacctcaccagcccgtcactcttcttctaaagtaacaaaaacaagtacctcagttctcacgggggctggggcccagggttgctgtgctgtctctctagttaccagggttggctccttcctctcagcctccttccggcaggaggttatatctgagagggaggaggagaaccatgtccagatacatgggggcagtggggatgggctgagcatcaggacacagcctcccccatttctgtgtgtgtaaaggctgaactcaacagcagactttggaattaaatgtgctttttacatttttattaggaaaaatttcaaacgtgtgaatgcaggttaagagcagtgcagtgaacctcccttcccgctccccagatggggtgcccttccgaggacacgttagtcatgagcacctgtcagccacatagctcaggctgccgggtgtgtgggaaacggcacaaatggtttcctgcaggaaccgtgtcagtccccacacagggcccagaggggtgagggtcccctggctgggaatggtgtgtgttggagctgaccagcctgagcttgtcttgtctcttcttcagcctggtgcctgctgaagccagtcctggagcccatacctcacccctgcctggtgaggatgtcttgttcctgagggaggccggtgtggaaagcctcgcacagtggtgcctccagctgttgaagggtagcgctggcccttggaggctggcactagctgacagcttttcctctctgcacctgcgctctggtgacttggggtggacgcctctgccttcacttgaacacaaatgtgcttcctataaaatcatgtaccaag

SEQ ID NO: 195853 - DNA, 979 bp, Homo sapiens
  Payload ID: 18648
  Gene Name: tubulin folding cofactor D
  ENST ID: ENST00000631706
  CDS Start-End: 1-783
gcccagcaggccagtgagaagattgaccgtttccgtgctcacgccgccagcgtgttcctgacgctcctgcactttgacagccctcccatcccccacgtgccccaccgaggagaactggaaaagctgtttcccaggtccgacgtggcctccgtgaactggagtgcaccttcccaggccttcccacgcatcacccagctccttgggctgcccacctaccgctaccacgtcctgctggggctagtcgtgtccctgggcggcttgacggagtcgacgatccggcactccacccagagcctctttgagtacatgaagggcattcagagcgacccgcaggccctgggcagcttcagcgggacccttctgcagatctttgaggacaaccttctgaatgagagccacccctttgctgtgaagttgcttgcgctctgtaagaaagaaatcaagaattcaaaagatatccagaagctcctgtcaggcatcgcagtgttctgcgggatggtgcagttccccggcgacgtgaggaggcaggccctcctgcagctgtgtctgctcctctgccaccgtttcccgctgatccggaagaccacggccagccaggtgtacgagacattgctcacctacagtgacgtcgtgggcgcggatgtgctggacgaggtggtgactgtgctcagtgacactgcgtgggacgcggagcttgcagtggtgagagagcagcgcaaccgtctgtgtgaccttctgggcgtacccaggccccagctggtgccccagcctggtgcctgctgaagccagtcctggagcccatacctcacccctgcctggtgaggatgtcttgttcctgagggaggccggtgtggaaagcctcgcacagtggtgcctccagctgttgaagggtagcgctggcccttggaggctggcactagctgacagcttttcctctctgcacctgcgctctggtgacttggggtggacgcctctgcct

SEQ ID NO: 195854 - DNA, 200 bp, Homo sapiens
  Payload ID: 18648
  Gene Name: tubulin folding cofactor D
  ENST ID: ENST00000634094
  CDS Start-End: 1-200
gatgcagcagtctcggccctggctgctctatgcagtgaatattacatgaaggagccgggggaggcagatcccgcaattcaggaggagctgatcacgcagtacctggctgagcttcggaaccccgaggagatgactcgctgtggcttctcgttggccttgggcgcccttccaggcttccttctgaaaggccggctccagca

SEQ ID NO: 195855 - DNA, 241 bp, Homo sapiens
  Payload ID: 18648
  Gene Name: tubulin folding cofactor D
  ENST ID: ENST00000632123
  CDS Start-End: 1-241
gatgcagcagtctcggccctggctgctctatgcagtgaatattacatgaaggagccgggggaggcagatcccgcaattcaggaggagctgatcacgcagtacctggctgagcttcggaaccccgaggagatgactcgctgtggcttctcgttggccttgggcgcccttccaggcttccttctgaaaggccggctccagcaggttctcacaggtttaagagcagttacccacacttcccccg

SEQ ID NO: 195856 - DNA, 1966 bp, Homo sapiens
  Payload ID: 18649
  Gene Name: tubulin folding cofactor E
  Uniprot ID: Q15813
  ENST ID: ENST00000366601
  CDS Start-End: 177-1760
attctcgtctatgctccagcagccgtacctcactccggtggaggcgggacttcctacagcacttccggccagagcctcaagcttcgctgctgggcagttggctggaggggctgctgctgggaacacctggagtctccgcgggcagatctcatattttggattctggatatattataatgagtgacactttgacagcggatgtcattggtcgaagagttgaagttaatggagaacatgcaacagtacgttttgctggtgttgtccctcccgtggcaggaccctggttaggagtagaatgggacaatcccgagagaggaaagcatgatgggagccacgaagggactgtgtattttaaatgcaggcacccgacaggaggatcctttattcgtccgaacaaggtaaattttggaacagactttcttactgcaattaagaaccgctatgtgttagaagatggaccagaggaagatagaaaagagcaaattgttacaattggaaataaacctgtggagactatcggttttgactctattatgaaacagcaaagtcagctgagcaagttgcaagaagtttctctgaggaactgtgcagtaagttgtgctggtgaaaaaggaggagttgctgaagcatgtcctaatatcagaaaggtagatttgtcaaaaaacctgttgtcatcatgggatgaagtgatacacattgctgatcagctcagacacctggaagtccttaatgtcagtgaaaataaactaaaatttccctccggttcagtattaactggaacgctttctgtactgaaggttttagtcctcaatcaaacaggaataacgtgggctgaggtgctgcggtgtgtcgcggggtgcccaggcctggaggaactctaccttgagtctaacaacattttcatttccgaaaggccaacagatgttctccagacagtcaagttattagatctttcctctaatcaattaattgatgaaaatcagctgtatctgatagcccacctgcccaggttagaacaattaatcctctctgacactggaatttcttctctacattttccggatgctggaattgggtgcaaaacgtccatgttcccatccttgaagtacctggtagtaaacgacaatcagatatcacaatggtcgtttttcaatgagctagagaagttaccaagtctacgggctttgtcctgcctaagaaaccccctgaccaaagaggacaaagaagcagagacggcgcgactactcattatcgccagcattggccagctgaagacgctgaacaaatgtgagattctccccgaggagaggcggagagctgagcttgactaccgaaaagcttttggaaatgagtggaaacaggctggtggacataaggatccggaaaaaaacagactcagcgaagaattcctcacagcccatcccagataccagttcctctgcctgaaatatggtgcacctgaagattgggaactcaaaacacagcaaccacttatgctgaaaaaccagctactaacactgaagataaaataccctcatcaacttgatcagaaagtcctggagaaacaactgccgggctccatgacaattcaaaaggtgaagggattgctgtcacgtcttctcaaagttcctgtgtcagaccttctgttgtcctatgaaagtcccaaaaagccgggcagagaaatcgagctggaaaatgacctaaagtcattacagttttattctgtggaaaatggagattgtctattagtgcgatggtgacaaccaactaataaaatttaaagaccacactgcttatcgtgtctggggttcaccggaaataaatgattcactggaacaattctactgtcaaaacaaagggggtttacaacttgtcctaagtataacaagggatgtattttttgttgggaagtgaccatttctaggcttatacataatagcaataataaaggctttgaacctactaa

SEQ ID NO: 195857 - DNA, 2012 bp, Homo sapiens
  Payload ID: 18649
  Gene Name: tubulin folding cofactor E
  Uniprot ID: Q15813
  ENST ID: ENST00000406207
  CDS Start-End: 225-1808
attctcgtctatgctccagcagccgtacctcactccggtggaggcgggacttcctacagcacttccggccagagcctcaagcttcgctgctgggcagttggctggaggggctgctgctgggaacacctggagtctccgcgggcaggtgagcttcagaggttcggggagctttcggaacgagcattcctggccgatctcatattttggattctggatatattataatgagtgacactttgacagcggatgtcattggtcgaagagttgaagttaatggagaacatgcaacagtacgttttgctggtgttgtccctcccgtggcaggaccctggttaggagtagaatgggacaatcccgagagaggaaagcatgatgggagccacgaagggactgtgtattttaaatgcaggcacccgacaggaggatcctttattcgtccgaacaaggtaaattttggaacagactttcttactgcaattaagaaccgctatgtgttagaagatggaccagaggaagatagaaaagagcaaattgttacaattggaaataaacctgtggagactatcggttttgactctattatgaaacagcaaagtcagctgagcaagttgcaagaagtttctctgaggaactgtgcagtaagttgtgctggtgaaaaaggaggagttgctgaagcatgtcctaatatcagaaaggtagatttgtcaaaaaacctgttgtcatcatgggatgaagtgatacacattgctgatcagctcagacacctggaagtccttaatgtcagtgaaaataaactaaaatttccctccggttcagtattaactggaacgctttctgtactgaaggttttagtcctcaatcaaacaggaataacgtgggctgaggtgctgcggtgtgtcgcggggtgcccaggcctggaggaactctaccttgagtctaacaacattttcatttccgaaaggccaacagatgttctccagacagtcaagttattagatctttcctctaatcaattaattgatgaaaatcagctgtatctgatagcccacctgcccaggttagaacaattaatcctctctgacactggaatttcttctctacattttccggatgctggaattgggtgcaaaacgtccatgttcccatccttgaagtacctggtagtaaacgacaatcagatatcacaatggtcgtttttcaatgagctagagaagttaccaagtctacgggctttgtcctgcctaagaaaccccctgaccaaagaggacaaagaagcagagacggcgcgactactcattatcgccagcattggccagctgaagacgctgaacaaatgtgagattctccccgaggagaggcggagagctgagcttgactaccgaaaagcttttggaaatgagtggaaacaggctggtggacataaggatccggaaaaaaacagactcagcgaagaattcctcacagcccatcccagataccagttcctctgcctgaaatatggtgcacctgaagattgggaactcaaaacacagcaaccacttatgctgaaaaaccagctactaacactgaagataaaataccctcatcaacttgatcagaaagtcctggagaaacaactgccgggctccatgacaattcaaaaggtgaagggattgctgtcacgtcttctcaaagttcctgtgtcagaccttctgttgtcctatgaaagtcccaaaaagccgggcagagaaatcgagctggaaaatgacctaaagtcattacagttttattctgtggaaaatggagattgtctattagtgcgatggtgacaaccaactaataaaatttaaagaccacactgcttatcgtgtctggggttcaccggaaataaatgattcactggaacaattctactgtcaaaacaaagggggtttacaacttgtcctaagtataacaagggatgtattttttgttgggaagtgaccatttctaggcttatacataatagcaataataaaggctttgaacctact

SEQ ID NO: 195858 - DNA, 2117 bp, Homo sapiens
  Payload ID: 18649
  Gene Name: tubulin folding cofactor E
  Uniprot ID: Q15813
  ENST ID: ENST00000543662
  CDS Start-End: 177-1913
attctcgtctatgctccagcagccgtacctcactccggtggaggcgggacttcctacagcacttccggccagagcctcaagcttcgctgctgggcagttggctggaggggctgctgctgggaacacctggagtctccgcgggcagatctcatattttggattctggatatattataatgagtgacactttgacagcggatgtcattggtcgaagagttgaagttaatggagaacatgcaacagtacgttttgctggtgttgtccctcccgtggcaggaccctggttaggagtagaatgggacaatcccgagagaggaaagcatgatgggagccacgaagggactgtgtattttaaatgcaggcacccgacaggaggatcctttattcgtccgaacaaggtaaattttggaacagactttcttactgcaattaagaaccgctatgtgttagaagatggaccagaggaagatagaaaagagcaaattgttacaattggaaataaacctgtggagactatcggttttgactctattatgaaacagcaaagtcagctgagcaagttgcaagaagtttctctgaggaactgtgcagtaagttgtgctggtgaaaaaggaggagttgctgaagcatgtcctaatatcagaaaggtagatttgtcaaaaaacctgttgtcatcatgggatgaagtgatacacattgctgatcagctcagacacctggaagtccttaatgtcagtgaaaataaactaaaatttccctccggttcagtattaactggaacgctttctgtactgaaggttttagtcctcaatcaaacaggaataacgtgggctgaggctcatgcgcagtgtggtggcagcaggcacggtctcgacatgcagaaagacgccagcaagttcgtggatctgtgcgtgctgcagaaatgctccaccagcaactgcatcatcagtgccaaggaccacacatccatgcggatgaacgtggccaaggtgctgcggtgtgtcgcggggtgcccaggcctggaggaactctaccttgagtctaacaacattttcatttccgaaaggccaacagatgttctccagacagtcaagttattagatctttcctctaatcaattaattgatgaaaatcagctgtatctgatagcccacctgcccaggttagaacaattaatcctctctgacactggaatttcttctctacattttccggatgctggaattgggtgcaaaacgtccatgttcccatccttgaagtacctggtagtaaacgacaatcagatatcacaatggtcgtttttcaatgagctagagaagttaccaagtctacgggctttgtcctgcctaagaaaccccctgaccaaagaggacaaagaagcagagacggcgcgactactcattatcgccagcattggccagctgaagacgctgaacaaatgtgagattctccccgaggagaggcggagagctgagcttgactaccgaaaagcttttggaaatgagtggaaacaggctggtggacataaggatccggaaaaaaacagactcagcgaagaattcctcacagcccatcccagataccagttcctctgcctgaaatatggtgcacctgaagattgggaactcaaaacacagcaaccacttatgctgaaaaaccagctactaacactgaagataaaataccctcatcaacttgatcagaaagtcctggagaaacaactgccgggctccatgacaattcaaaaggtgaagggattgctgtcacgtcttctcaaagttcctgtgtcagaccttctgttgtcctatgaaagtcccaaaaagccgggcagagaaatcgagctggaaaatgacctaaagtcattacagttttattctgtggaaaatggagattgtctattagtgcgatggtgacaaccaactaataaaatttaaagaccacactgcttatcgtgtctggggttcaccggaaataaatgattcactggaacaattctactgtcaaaacaaagggggtttacaacttgtcctaagtataacaagggatgtattttttgttgggaagtgaccatttctaggcttatacataatagcaataataaaggctttgaacctact

SEQ ID NO: 195859 - DNA, 1966 bp, Homo sapiens; identical to SEQ ID NO: 195856
  Payload ID: 18649
  Gene Name: Tubulin folding cofactor E
  ENST ID: ENST00000634780
  CDS Start-End: 177-1760

SEQ ID NO: 195860 - DNA, 2012 bp, Homo sapiens; identical to SEQ ID NO: 195857
  Payload ID: 18649
  Gene Name: Tubulin folding cofactor E
  ENST ID: ENST00000634751
  CDS Start-End: 225-1808

SEQ ID NO: 195861 - DNA, 2117 bp, Homo sapiens; identical to SEQ ID NO: 195858
  Payload ID: 18649
  Gene Name: Tubulin folding cofactor E
  ENST ID: ENST00000635692
  CDS Start-End: 177-1913

SEQ ID NO: 195862 - DNA, 3923 bp, Homo sapiens
  Payload ID: 18650
  Gene Name: tubulin folding cofactor E-like
  ENST ID: ENST00000284259
  CDS Start-End: 217-573
gggaaagctgcttccgggtcaatgcaggacactgggctccggcggccagagtgggggactaggtgaagcggcgccgggccggggctggccgggaccaggcccgaggctgagcggcggcgacagcggtggccgggaggggggaggagaggcgcagccagaggagccgccgcagtagctcccccgcctcccgggctgagggcattttaagaaagaaagatggatcaacctagtggaagaagtttcatgcaagtattatgtgaaaaatatagtcctgaaaattttccttatcgccgtggcccggggatgggagtccatgtcccagccacacctcagggctctcctatgaaagatcgcctcaacctcccaagtgtactagtgttgaacagctgtggaataacctgtgcaggagatgaaaaagaaattgctgctttctgcgctcatgtgtcggaactagatctttctgacaacaaactcgaagactggcatgagaaagaacatgtgctgggtccttctctggggttcgcaaacttgtcctcaacaacagcaaagcttcttgggagacggtccacatgatactacaggagttaccagatttggaggagctcttcctgtgccttaatgactatgaaacagtgtcttgtccttctatttgctgtcattctcttaagctactacatataacagacaataacctccaagactggactgaaatacgaaagttaggagttatgtttccttcactggataccctcgtcctggccaacaatcatttgaatgctattgaggagcctgatgattcattggccaggttgtttcctaatcttcgatccatcagcctccacaagtcaggtttgcagtcctgggaagacattgataaactaaattcatttcccaaactggaagaagtgagattgttaggaattcctcttctgcagccatataccaccgaggagcgaaggaaattggtaatagccagattgccatcagtttccaaacttaatggcagcgttgttactgatggtgaacgagaagattctgagagattttttattcgttactatgtggatgttccacaggaagaagtgccattcaggtatcatgaactgatcactaaatatgggaagttggagcctttggcagaagtggacctaagaccccagagcagtgcaaaagtagaagtccactttaacgatcaggtggaagaaatgagcattcgtctggaccaaacagtggcagaactaaagaaacagttaaaaactctagtacaattacccacaagcaacatgcttctctactattttgaccatgaagcaccctttggcccagaggaaatgaagtacagctctcgggcattgcattcctttggcattagggatggagataaaatttacgtggaatccaaaacaaaataacctctaccagccttgtgaaaaacatacacataaggacttgttgcagggcatttgtttttaatgtggttttctttaggagggagaggttgtttttgttttgttttgttctgtttaggtttgggaaggattttgtatatttttccccctggagtgagtaggggccatttttgggtgttttctaccacagattgatttggctcagccagcggaattggccacatttccagtgtatgtgccctctctaaggaaagatgacaaagaaatcaccgacttcttactgtgttcactgggatttgcctgccacttggttatcattactgttgggtgaacctgtgaagataacatgaacactgtagccccttagaagggtctcatagagaatttaaacagggtgacaaggaatcttcacaggaagggccagaacttctctctcccagttcttccttccgctaccctccctccttggcttttttggttcagttccatttttttttcattttgacatgtggtttacctaatagttttgttctgttcataattcttatttctcaacctgggtgatttttttgttctcatttctcccttttgaaataattgaaagtgttttaagcatttttaacctgattctaatctcaggtacgcagtaagaagctataactctgttagaacctcgaagagtagatgtagaatgaaaactccaggaaaacttgcagttattctggaagcaccggcagaacagtctgatctctttgtatgttactaactcacttttaatgtccctgtacattatgtcagccattactttcataacatgaaatatgtcagattccagagttcttttatttttgcttattgaatgtatttcctcatatctttctttttcattactttaaactattgggaattgaggcctgacttcataaataattcaatagagtcctggatacgtgcaccaggagagttgagaattagctcataaactatctgtggtgtgtgtggggaatgaagttgggggatgtgggggaagagcttatgactttcccacctgtgtcatccattggaagcccttgctcttgcactttgcattaaaagtgggaaacattaatcaaagggagattttattcccaggttttccctgggactttgtgatatcataattgaacagttcttttgttttacatttcaatttagttgcctcatagaagtataactgcccaatctatgagtaaagtgtaagtgtcaaaactttacaattgcctccaagtcatattttttgcagaagcacatttaaagcacttttctgtaaaagctagttccttacctgcttggaaatctttttgtttgttcttctattcctttgttaatcagatgtaatccctttctttaatgtgtatttttcttggtccaccatgtttacagatgggagacttgagagatacttagcataactggggcagaaagtgtgtaagtgaagtatttttcaaagaatgcagttattatctgattgcatttgaccttttgacctttgttacataattctacccctcctacaaatttaatttttttatgaaatttttaggtgacttgtaaattcttcatgtatgaggagttgtgtttattaatgctactttttaaattttcctgtgccatgtggcagatgtttattctcttaatgcacttcaggtttgctatctgtaaagcctttgacccaggcctactgagtcaaatctacattcagtgtaacattaaaggtggaaaccaaagggtttgagaaagacgaataaggcctattctccttctgctgcagactttatctttcaaaatcataaaaatgagcaatggagatccaggctgggtatagacaagaataattattttgcaaacacattttcctgacagatttttggaagtaggaaaaaagtatggcaacagtgtcatgaagattgaaactgtaggtgctttgtgtatgtatgcatgagtgcagatgagtttgagagagaaaaagtgtaattgagccctttgcttttgtcagcctgggaaacagatgcgttcttattttttgaagttgtgtgaccctggactgtcccacagcagaaggcagaacaaacacttatgttatgctttaatcataagtggaatggtcacaattaataagatattttatatatggcaaagttttatgaaatgcttttttactattagagacctgtttcttctgttattacagaacacagtgtttatcaactgcggacataattcttttattatacagttgcatgtaaagggagcttctcatttaattcagcggatgtgggtatttttagggcattgtaattgatggttttaataattgctgaataatttttgattaagagaaaaatgtaatacaattactggtctgagttacagaacagaagttaatgaaaaaggctatttgagcatgtgtacttatagattcatttgggtggctgagaaaagatgctgcttttgaaataaaattggtgctgtgta

SEQ ID NO: 195863 - DNA, 5142 bp, Homo sapiens
  Payload ID: 18650
  Gene Name: tubulin folding cofactor E-like
  Uniprot ID: Q5QJ74
  ENST ID: ENST00000422003
  CDS Start-End: 189-1463
acactgggctccggcggccagagtgggggactaggtgaagcggcgccgggccggggctggccgggaccaggcccgaggctgagcggcggcgacagcggtggccgggaggggggaggagaggcgcagccagaggagccgccgcagtagctcccccgcctcccgggctgagggcattttaagaaagaaagatggatcaacctagtggaagaagtttcatgcaagtattatgtgaaaaatatagtcctgaaaattttccttatcgccgtggcccggggatgggagtccatgtcccagccacacctcagggctctcctatgaaagatcgcctcaacctcccaagtgtactagtgttgaacagctgtggaataacctgtgcaggagatgaaaaagaaattgctgctttctgcgctcatgtgtcggaactagatctttctgacaacaaactcgaagactggcatgaggtcagtaaaattgtgtcaaatgttcctcagttggagtttctaaacctgagttccaaccctctgaatttgtcggttttagaaagaacatgtgctgggtccttctctggggttcgcaaacttgtcctcaacaacagcaaagcttcttgggagacggtccacatgatactacaggagttaccagatttggaggagctcttcctgtgccttaatgactatgaaacagtgtcttgtccttctatttgctgtcattctcttaagctactacatataacagacaataacctccaagactggactgaaatacgaaagttaggagttatgtttccttcactggataccctcgtcctggccaacaatcatttgaatgctattgaggagcctgatgattcattggccaggttgtttcctaatcttcgatccatcagcctccacaagtcaggtttgcagtcctgggaagacattgataaactaaattcatttcccaaactggaagaagtgagattgttaggaattcctcttctgcagccatataccaccgaggagcgaaggaaattggtaatagccagattgccatcagtttccaaacttaatggcagcgttgttactgatggtgaacgagaagattctgagagattttttattcgttactatgtggatgttccacaggaagaagtgccattcaggtatcatgaactgatcactaaatatgggaagttggagcctttggcagaagtggacctaagaccccagagcagtgcaaaagtagaagtccactttaacgatcaggtggaagaaatgagcattcgtctggaccaaacagtggcagaactaaagaaacagttaaaaactctagtacaattacccacaagcaacatgcttctctactattttgaccatgaagcaccctttggcccagaggaaatgaagtacagctctcgggcattgcattcctttggcattagggatggagataaaatttacgtggaatccaaaacaaaataacctctaccagccttgtgaaaaacatacacataaggacttgttgcagggcatttgtttttaatgtggttttctttaggagggagaggttgtttttgttttgttttgttctgtttaggtttgggaaggattttgtatatttttccccctggagtgagtaggggccatttttgggtgttttctaccacagattgatttggctcagccagcggaattggccacatttccagtgtatgtgccctctctaaggaaagatgacaaagaaatcaccgacttcttactgtgttcactgggatttgcctgccacttggttatcattactgttgggtgaacctgtgaagataacatgaacactgtagccccttagaagggtctcatagagaatttaaacagggtgacaaggaatcttcacaggaagggccagaacttctctctcccagttcttccttccgctaccctccctccttggcttttttggttcagttccatttttttttcattttgacatgtggtttacctaatagttttgttctgttcataattcttatttctcaacctgggtgatttttttgttctcatttctcccttttgaaataattgaaagtgttttaagcatttttaacctgattctaatctcaggtacgcagtaagaagctataactctgttagaacctcgaagagtagatgtagaatgaaaactccaggaaaacttgcagttattctggaagcaccggcagaacagtctgatctctttgtatgttactaactcacttttaatgtccctgtacattatgtcagccattactttcataacatgaaatatgtcagattccagagttcttttatttttgcttattgaatgtatttcctcatatctttctttttcattactttaaactattgggaattgaggcctgacttcataaataattcaatagagtcctggatacgtgcaccaggagagttgagaattagctcataaactatctgtggtgtgtgtggggaatgaagttgggggatgtgggggaagagcttatgactttcccacctgtgtcatccattggaagcccttgctcttgcactttgcattaaaagtgggaaacattaatcaaagggagattttattcccaggttttccctgggactttgtgatatcataattgaacagttcttttgttttacatttcaatttagttgcctcatagaagtataactgcccaatctatgagtaaagtgtaagtgtcaaaactttacaattgcctccaagtcatattttttgcagaagcacatttaaagcacttttctgtaaaagctagttccttacctgcttggaaatctttttgtttgttcttctattcctttgttaatcagatgtaatccctttctttaatgtgtatttttcttggtccaccatgtttacagatgggagacttgagagatacttagcataactggggcagaaagtgtgtaagtgaagtatttttcaaagaatgcagttattatctgattgcatttgaccttttgacctttgttacataattctacccctcctacaaatttaatttttttatgaaatttttaggtgacttgtaaattcttcatgtatgaggagttgtgtttattaatgctactttttaaattttcctgtgccatgtggcagatgtttattctcttaatgcacttcaggtttgctatctgtaaagcctttgacccaggcctactgagtcaaatctacattcagtgtaacattaaaggtggaaaccaaagggtttgagaaagacgaataaggcctattctccttctgctgcagactttatctttcaaaatcataaaaatgagcaatggagatccaggctgggtatagacaagaataattattttgcaaacacattttcctgacagatttttggaagtaggaaaaaagtatggcaacagtgtcatgaagattgaaactgtaggtgctttgtgtatgtatgcatgagtgcagatgagtttgagagagaaaaagtgtaattgagccctttgcttttgtcagcctgggaaacagatgcgttcttattttttgaagttgtgtgaccctggactgtcccacagcagaaggcagaacaaacacttatgttatgctttaatcataagtggaatggtcacaattaataagatattttatatatggcaaagttttatgaaatgcttttttactattagagacctgtttcttctgttattacagaacacagtgtttatcaactgcggacataattcttttattatacagttgcatgtaaagggagcttctcatttaattcagcggatgtgggtatttttagggcattgtaattgatggttttaataattgctgaataatttttgattaagagaaaaatgtaatacaattactggtctgagttacagaacagaagttaatgaaaaaggctatttgagcatgtgtacttatagattcatttgggtggctgagaaaagatgctgcttttgaaataaaattggtgctgtgtagacacttgtaaccaaaattatttttataacagaactaaaagaaggagagaagaggccatggacctttgagtttacatgttatacctaattgattgtctgcagcttatctgtattttaatattgactttgtccagattcagtgagaacatagtattgacattatgaggcaaaatgctgtcatagccagtattactgatatgttgctacagacacaatgtatagaacataccttttctaaaataggaattatttccagttatgaaaaaggaaaagagtaataaagaaaaccaaatcaaaaccaagggatcctttctacatgtgggtgaacggctgctaaagccacagtagaaaccaatttttgaatttgaattgttgaaatatcctagattgctttaatggaaaaaatccagagtcacatatcttttttattatcaagtttttgcagccttttgccagcattgccataaatacgtaagaaagcagcagatagtataagcccctagttattaagacttctcagttaatattaaggccaaaatataacttgagctaggtataacagggctgaatgctacagtgttgtttttaaagattttgcttatttttaaagacaggaaaattcagttctaaccagatgttccagctatgttactcaaccagcagtggtaggagcagagagcacttgcactaagagctgatcaccatttgagatacgcggcttaacgcacatgtgagtgtagcttgctacatgaaaatgctaggctctagggcatgtaaaacatgaatacagaatactagattgttctaagtaatgtcatttcggtttgtgaatttgatttttcccttcatttcatgtcatattgaaaatgcaaacaaactgctctcaagaacacccagaagctatctgtgttaccagatgtgttgtgaacactctactatttttcataggtgcttccttgaaatatatgtccattgtagtggtggagagggactggactctctcaggctctttacttgccagttgtctcccgcagttaatggaaatatatatacatatatatatatattttatttagaatataatttaaacatgaaggtctattctttgcactttttattaatatatatatagataatctttaaaaaaattaaaattcaagtccatttt

SEQ ID NO: 195864 - DNA, 947 bp, Homo sapiens
  Payload ID: 18650
  Gene Name: tubulin folding cofactor E-like
  ENST ID: ENST00000533712
  CDS Start-End: 166-522
tgggggactaggtgaagcggcgccgggccggggctggccgggaccaggcccgaggctgagcggcggcgacagcggtggccgggaggggggaggagaggcgcagccagaggagccgccgcagtagctcccccgcctcccgggctgagggcattttaagaaagaaagatggatcaacctagtggaagaagtttcatgcaagtattatgtgaaaaatatagtcctgaaaattttccttatcgccgtggcccggggatgggagtccatgtcccagccacacctcagggctctcctatgaaagatcgcctcaacctcccaagtgtactagtgttgaacagctgtggaataacctgtgcaggagatgaaaaagaaattgctgctttctgcgctcatgtgtcggaactagatctttctgacaacaaactcgaagactggcatgagaaagaacatgtgctgggtccttctctggggttcgcaaacttgtcctcaacaacagcaaagcttcttgggagacggtccacatgatactacaggagttaccagagtttgcagtcctgggaagacattgataaactaaattcatttcccaaactggaagaagtgagattgttaggaattcctcttctgcagccatataccaccgaggagcgaaggaaattggtaatagccagattgccatcagtttccaaacttaatggcagcgttgttactgatggtgaacgagaagattctgagagattttttattcgttactatgtggatgttccacaggaagaagtgccattcaggtatcatgaactgatcactaaatatgggaagttggagcctttggcagaagtggacctaagaccccagagcagtgcaaaagtagaagtccactttaacgatcaggtggaagaaatgagcattcgtctggaccaaacagtggcagaactaaagaaacagttaaa

SEQ ID NO: 195865 - DNA, 553 bp, Homo sapiens
  Payload ID: 18650
  Gene Name: tubulin folding cofactor E-like
  ENST ID: ENST00000528512
  CDS Start-End: 305-553
aatgcaggacactgggctccggcggccagagtgggggactaggtgaagcggcgccgggccggggctggccgggaccaggcccgaggctgagcggcggcgacagcggtggccgggaggggggaggagaggcgcagccagaggagccgccgcagtagctcccccgcctcccgggctgagggaatgtctaatttaatagggatatagacagttggtttaaaccaacatttttggacgaggagaggctatggaaatgaagaaagaagtgtttagaaatatcacacaaacagcattttaagaaagaaagatggatcaacctagtggaagaagtttcatgcaagtattatgtgaaaaatatagtcctgaaaattttccttatcgccgtggcccggggatgggagtccatgtcccagccacacctcagggctctcctatgaaagatcgcctcaacctcccaagtgtactagtgttgaacagctgtggaataacctgtgcaggagatgaaaaagaaattgctgctttctgcgctcatgtgtcggaactagatctttctgac

SEQ ID NO: 195866 - DNA, 1913 bp, Homo sapiens
  Payload ID: 18650
  Gene Name: tubulin folding cofactor E-like
  ENST ID: ENST00000524726
  CDS Start-End: 1200-1913
gtaaccctatgagctaggagttacaggctactaccccttcctgtgagtgaagaggggtagacttagagaacttaagtaacttgcccacagttacacagagtagtggaatcagtcaggatttacatacccagggcgtttagttttagaaccagtacttactaccattgggcagtattgccatagcactaaatgtaggaggagctagtgaaaaaaaaaacaaaaacaaacgtggatttttttttttttaatgacctgcagacttttgcaacctttatgcgtgattgatgtttcaacattctggcaatccctggttattagccagggtggtttgtaaactgctctggaaggctgtagagtgatgaactagtggtctgttcctaatgaggcttttccttaacatgatggcttctgtagctgctcaagagcacagataatgggggtaatctgttctgtaaacagctaagtaatgaccttaaacttgtgtgttcacagcggaaagaaaacatgcatatatgattttcttctgatgaaacctaatgtattcaagaaaaagaatcttgctttttggaaggatggaaaaattgggaataattttttcccctttgataattagaccactcagtactgttgcttagttttttggttcagttactttgatgtggttacaagaggaattttggctgtaatggatttcatacatttttgtaagttatgtttccatgtctcgtgtgtgatgttgtgtactgttgacatgaaatactccttttttggtaaagatggattggcttaacagattagagctacagaaagtatgacttagcacgctggtaaggccacaaaaacccaagcaagttcccccagtttcgtatcctgtaaatagagataagttagtttttctgtttcagagagtggttatggaaaactactaggctttaaaatgattgttaatctcagtgtggggacatttggtttggggacatcagttcaggagtaaatgtatctgatcctgctttgaataaatgcaacttgaaagccttggaattttaccagatcgaatctgggccaaatagaaagaatgtctaatttaatagggatatagacagttggtttaaaccaacatttttggacgaggagaggctatggaaatgaagaaagaagtgtttagaaatatcacacaaacagcattttaagaaagaaagatggatcaacctagtggaagaagtttcatgcaagtattatgtgaaaaatatagtcctgaaaattttccttatcgccgtggcccggggatgggagtccatgtcccagccacacctcagggctctcctatgaaagatcgcctcaacctcccaagtgtactagtgttgaacagctgtggaataacctgtgcaggagatgaaaaagaaattgctgctttctgcgctcatgtgtcggaactagatctttctgacaacaaactcgaagactggcatgaggtcagtaaaattgtgtcaaatgttcctcagttggagtttctaaacctgagttccaaccctctgaatttgtcggttttagaaagaacatgtgctgggtccttctctggggttcgcaaacttgtcctcaacaacagcaaagcttcttgggagacggtccacatgatactacaggagttaccagatttggaggagctcttcctgtgccttaatgactatgaaacagtgtcttgtccttctatttgctgtcattctcttaagctactacatataacagacaataacctccaagactggactgaaatacgaaagttaggagttatgtttccttcactggataccctcgtcctggccaacaatcatttgaatgctattgaggagcctgatgattcattggccaggttgtttcctaatcttcgatccatcagcctccacaagtcaggt

SEQ ID NO: 195867 - DNA, 2593 bp, Homo sapiens
  Payload ID: 18650
  Gene Name: tubulin folding cofactor E-like
  ENST ID: ENST00000531148
  CDS Start-End: 509-814
acactgggctccggcggccagagtgggggactaggtgaagcggcgccgggccggggctggccgggaccaggcccgaggctgagcggcggcgacagcggtggccgggaggggggaggagaggcgcagccagaggagccgccgcagtagctcccccgcctcccgggctgagggcggaaagaaaacatgcatatatgattttcttctgatgaaacctaatgtattcaagaaaaagaatcttgctttttggaaggatggaaaaattgggaataattttttcccctttgataattagaccactcagtactgttgcttagttttttggttcagttactttgatgtggttacaagaggaattttggctgtaatggatttcatacatttttaatgtctaatttaatagggatatagacagttggtttaaaccaacatttttggacgaggagaggctatggaaatgaagaaagaagtgtttagaaatatcacacaaacagcattttaagaaagaaagatggatcaacctagtggaagaagtttcatgcaagtattatgtgaaaaatatagtcctgaaaattttccttatcgccgtggcccggggatgggagtccatgtcccagccacacctcagggctctcctatgaaagatcgcctcaacctcccaagtgtactagtgttgaacagctgtggaataacctgtgcaggagatgaaaaagaaattgctgctttctgcgctcatgtgtcggaactagatctttctgacaacaaactcgaagactggcatgaggtttgcagtcctgggaagacattgataaactaaattcatttcccaaactggaagaagtgagattgttaggaattcctcttctgcagccatataccaccgaggagcgaaggaaattggtaatagccagattgccatcagtttccaaacttaatggcagcgttgttactgatggtgaacgagaagattctgagagattttttattcgttactatgtggatgttccacaggaagaagtgccattcaggtatcatgaactgatcactaaatatgggaagttggagcctttggcagaagtggacctaagaccccagagcagtgcaaaagtagaagtccactttaacgatcaggtggaagaaatgagcattcgtctggaccaaacagtggcagaactaaagaaacagttaaaaactctagtacaattacccacaagcaacatgcttctctactattttgaccatgaagcaccctttggcccagaggaaatgaagtacagctctcgggcattgcattcctttggcattagggatggagataaaatttacgtggaatccaaaacaaaataacctctaccagccttgtgaaaaacatacacataaggacttgttgcagggcatttgtttttaatgtggttttctttaggagggagaggttgtttttgttttgttttgttctgtttaggtttgggaaggattttgtatatttttccccctggagtgagtaggggccatttttgggtgttttctaccacagattgatttggctcagccagcggaattggccacatttccagtgtatgtgccctctctaaggaaagatgacaaagaaatcaccgacttcttactgtgttcactgggatttgcctgccacttggttatcattactgttgggtgaacctgtgaagataacatgaacactgtagccccttagaagggtctcatagagaatttaaacagggtgacaaggaatcttcacaggaagggccagaacttctctctcccagttcttccttccgctaccctccctccttggcttttttggttcagttccatttttttttcattttgacatgtggtttacctaatagttttgttctgttcataattcttatttctcaacctgggtgatttttttgttctcatttctcccttttgaaataattgaaagtgttttaagcatttttaacctgattctaatctcaggtacgcagtaagaagctataactctgttagaacctcgaagagtagatgtagaatgaaaactccaggaaaacttgcagttattctggaagcaccggcagaacagtctgatctctttgtatgttactaactcacttttaatgtccctgtacattatgtcagccattactttcataacatgaaatatgtcagattccagagttcttttatttttgcttattgaatgtatttcctcatatctttctttttcattactttaaactattgggaattgaggcctgacttcataaataattcaatagagtcctggatacgtgcaccaggagagttgagaattagctcataaactatctgtggtgtgtgtggggaatgaagttgggggatgtgggggaagagcttatgactttcccacctgtgtcatccattggaagcccttgctcttgcactttgcattaaaagtgggaaacattaatcaaagggagattttattcccaggttttccctgggactttgtgatatcataattgaacagttcttttgttttacatttcaatttagttgcctcatagaagtataactgcccaatctatgagtaaagtgtaagtgtcaaaacttt

SEQ ID NO: 195868 - DNA, 966 bp, Homo sapiens
  Payload ID: 18650
  Gene Name: tubulin folding cofactor E-like
  ENST ID: ENST00000533134
  CDS Start-End: 638-966
ggagtccatgtcccagccacacctcagggctctcctatgaaagatcgcctcaacctcccaagtgtactagtgttgaacagctgtggaataacctgtgcaggagatgaaaaagaaattgctgctttctgcgctcatgtgtcggaactagatctttctgacaacaaactcgaagactggcatgagaaagaacatgtgctgggtccttctctggggttcgcaaacttgtcctcaacaacagcaaagcttcttgggagacggtccacatgatactacaggagttaccagatttggaggagctcttcctgtgccttaatgactatgaaacagtgtcttgtccttctatttgctgtcattctcttaagctactacatataacagacaataacctccaagactggactgaaatacgaaagttaggagttatgtttccttcactggataccctcgtcctggccaacaatcatttgaatgctattgaggagcctgatgattcattggccaggttgtttcctaatcttcgatccatcagcctccacaagtcagatccatctctcctgtcaccaaattgataatacagtcaaccctccatattcatggacttcatccatgcattcaaccaactgcagattgaaaatacatggggaagaagggtttgcagtcctgggaagacattgataaactaaattcatttcccaaactggaagaagtgagattgttaggaattcctcttctgcagccatataccaccgaggagcgaaggaaattggtaatagccagattgccatcagtttccaaacttaatggcagcgttgttactgatggtgaacgagaagattctgagagattttttattcgttactatgtggatgttccacaggaagaagtgccattcaggtatcatgaactgatcactaaatatgggaagttggagcctttggcagaagtggacctaagaccccagagcag

SEQ ID NO: 195869 - DNA, 1375 bp, Homo sapiens
  Payload ID: 18650
  Gene Name: tubulin folding cofactor E-like
  Uniprot ID: Q5QJ74
  ENST ID: ENST00000529397
  CDS Start-End: 101-1375
gtcacgtgttgttgttgggccgggaaagctgcttccgggtcaatgcaggacactgggctccggcggccagagtgggggactagcattttaagaaagaaagatggatcaacctagtggaagaagtttcatgcaagtattatgtgaaaaatatagtcctgaaaattttccttatcgccgtggcccggggatgggagtccatgtcccagccacacctcagggctctcctatgaaagatcgcctcaacctcccaagtgtactagtgttgaacagctgtggaataacctgtgcaggagatgaaaaagaaattgctgctttctgcgctcatgtgtcggaactagatctttctgacaacaaactcgaagactggcatgaggtcagtaaaattgtgtcaaatgttcctcagttggagtttctaaacctgagttccaaccctctgaatttgtcggttttagaaagaacatgtgctgggtccttctctggggttcgcaaacttgtcctcaacaacagcaaagcttcttgggagacggtccacatgatactacaggagttaccagatttggaggagctcttcctgtgccttaatgactatgaaacagtgtcttgtccttctatttgctgtcattctcttaagctactacatataacagacaataacctccaagactggactgaaatacgaaagttaggagttatgtttccttcactggataccctcgtcctggccaacaatcatttgaatgctattgaggagcctgatgattcattggccaggttgtttcctaatcttcgatccatcagcctccacaagtcaggtttgcagtcctgggaagacattgataaactaaattcatttcccaaactggaagaagtgagattgttaggaattcctcttctgcagccatataccaccgaggagcgaaggaaattggtaatagccagattgccatcagtttccaaacttaatggcagcgttgttactgatggtgaacgagaagattctgagagattttttattcgttactatgtggatgttccacaggaagaagtgccattcaggtatcatgaactgatcactaaatatgggaagttggagcctttggcagaagtggacctaagaccccagagcagtgcaaaagtagaagtccactttaacgatcaggtggaagaaatgagcattcgtctggaccaaacagtggcagaactaaagaaacagttaaaaactctagtacaattacccacaagcaacatgcttctctactattttgaccatgaagcaccctttggcccagaggaaatgaagtacagctctcgggcattgcattcctttggcattagggatggagataaaatttacgtggaatccaaaacaaaataa

SEQ ID NO: 195870 - DNA, 1114 bp, Homo sapiens
  Payload ID: 18651
  Gene Name: tubulin polyglutamylase complex subunit 1
  Uniprot ID: Q6ZTW0
  ENST ID: ENST00000359315
  CDS Start-End: 11-883
ctcagcgaagatggcggcagtggagaagcggcggcaagcggtaccaccgccggccggtttcacggacagcggccgccagtcggtatcccgggcggcgggggcggccgagagcgaggaggacttcctgcggcaggtcggcgtgacggaaatgctacgtgcggccctgctgaaggtgctggaggcgcggcccgaggagccgatcgccttcctggctcactacttcgagaacatgggcctgcgctcgcctgtaaacggcggcgccggggagcccccgggccagctcctgctgcagcagcagcgcctgggccgcgcgctatggcaccttcgcctggcccaccactcccagagggccgccttcaacaacaacgtgagcgtggcctacgagtgcctgagcgccggcgggcgcaggaagaggccggggctggacgggcgcacctacagcgagctgctcaggcgcatctgccgggacggccaagcccccgaggaggtggtggcgccgctgctgcgcaaggtgcagtgccgtgaccacgaggcggtgccgctgagcgtcttccgcgcgggcacactcacctgcttcgtgctgctggagttcgtggcgcgcgccggcgcgctcttccagctgctggaggactcggccgccgccgtggccgaccgccgcgtgggccaggccgtgctggacaccctggagggcgcgctgcaggccagcgacgccgccgcgcccgcgcgcttcctggaggccggctcgcgcttggggcccgacagcctggcgctggcgctggaccgcgccgtcggggggcggcggcccagcgcgcccatgacccgcgaggagtttctggagagggccgccgcgctcttcatcgcgaaggtcaagccggtgggctgaggcccgtgggccgcgcggatccgggatctgcgctggggggtccccgcgtgcggggcgcgcggagccttcccttcgccctggtgaggccctgccataaccaggcgcccagccctgcggaggaggccggggctcccaggaagcggacgcccggtccccacacagcgccgcggccgcccctccacccccgcgggagcccctgccccacgctaataaaatgtgttgcgaggctga

SEQ ID NO: 195871 - DNA, 4030 bp, Homo sapiens
  Payload ID: 18652
  Gene Name: tubulin polyglutamylase complex subunit 2
  Uniprot ID: Q68CL5
  ENST ID: ENST00000334295
  CDS Start-End: 429-1331
gtcccggctccagaacgccgcggcactggggcgggaggggcccgccacgtccgccatcttgaaacaaccgccactcggggcgtcgcgcctgggccgccacgcctcggcctgcaggctcggtccccattggccgcaccacgcagaggcccgcccccgcctgcgcggccggcccctgcggggcgagagggtgggggcgaaggggaagctacgtcccggaggtgcggtgtggggcaccgggcggggccgcgggaaccggcgccccacggagctgctgctgtcagaccaaccccgggcccccatcatcactgcgccgcgctttcaggcgccgagaactaccgttcccggcatgccatgaaattggcctcggcgctgaggcggggtccggccctccacccgctcccgccgcgcgcgaatcgcggtcgcgagccatggaggaggaggcatcgtccccggggctgggctgcagcaagccgcacctggagaagctgaccctgggcatcacgcgcatcctagaatcttccccaggtgtgactgaggtgaccatcatagaaaagcctcctgctgaacgtcatatgatttcttcctgggaacaaaagaataactgtgtgatgcctgaagatgtgaagaacttttacctgatgaccaatggcttccacatgacatggagtgtgaagctggatgagcacatcattccactgggaagcatggcaattaacagcatctcaaaactgactcagctcacccagtcttccatgtattcacttcctaatgcacccactctggcagacctggaggacgatacacatgaagccagtgatgatcagccagagaagcctcactttgactctcgcagtgtgatatttgagctggattcatgcaatggcagtgggaaagtttgccttgtctacaaaagtgggaaaccagcattagcagaagacactgagatctggttcctggacagagcgttatactggcattttctcacagacacctttactgcctattaccgcctgctcatcacccacctgggcctgccccagtggcaatatgccttcaccagctatggcattagcccacaggccaagcaatggttcagcatgtataaacctatcacctacaacacaaacctgctcacagaagagaccgactcctttgtgaataagctagatcccagcaaagtgtttaagagcaagaacaagatcgtaatcccaaaaaagaaagggcctgtgcagcctgcaggtggccagaaagggccctcaggaccctccggtccctccacttcctccacttctaaatcctcctctggctctggaaaccccacccggaagtgagcacccctccctccaactccctaccagctccagagtggtggtttccatgcacagatggccctaggggtgacctccagttttgcgtgtggaccgtaggcctctttctagttgaatgaccaaaattgtaaggcttttagtcccaccgacattagccaggctcgtagtgaggcctccagagcaggttgtgctgtcccctgcctctggaagcaatggggaatttggaatcttgtgtaagtgcccaaataagtctgagtgctttcctcttcttcaacactcaaccctcaatcccttagcactgattgattagagaggtcccccaaagaaaccactggttttgacccatgaagcattagaactgcattgttcattcaggagccactagtcacatatgactatttaaatttaaagtaaattgtatgaaaaattcatttcttcaattgcattagccacattttgagtattcatgtggctggtagattctgtattagcacaaagatatggaacatttccatcaccacagaaagttctgttggacagcactgcattagaatattttcatactgctcttcctcaattaatttttgttgttaatgttgatgtcttcattggatgggtcataatgttccatgaaacctctcaagtacacaattgtatgttctttgtatcccttaccacaaatatctcgctctgctcatttcttttgcagcttcctataaagtttgtcttcctcatcagtttccagtgaagtttcttgcttccagttttgtgttatgatgtttgtacacgttccacaattatcttccttattaactttttaaagaaggtgtacttctgctatactttattcttaccatttaaaaacaaaaaattcccaaacattgttttgcacaactcttcataaagaaagagttttaatggtgccagacactgttaacagaagctttccacctgctctgcctgcctcttcacagctctgagttgtccagcctcactttgcctggtccctggccatccttaggacaagcagtctcctgcttagaacagggtgggcttccaagagttcctttggaagcaagttgcctgtaattcagaaatcattttcccattgacatatgggggaacctctagcccacatatgcttaatatttgacacaagataaatctgacatacctactacatttaatgaaatttttacagagaaggttgctcagattttcaattaggaatgcctatttatttcctccctctacagtcctggctgtgggcagaagcaaggccttcaccctgcttcccaacagggaaagtggggagtcacccacctagccccaagttctttgggtggctgcagtttttgtactgaagtcccagaggttagagaattaggagttttgaggaatgaggtgcaggggcctctaccatctgcacacttcagtcccagctggctcattctctttcctgacttctctctaccccggtgattggccagacttccttcctttgcactgtctacctgctaatcgacccagggtttccctcttccaaacccactggggaactaagagcagtccacaggattctccacatgcacttttgctctgaaacatgtttattttgattgttgacaatagtgatagatattcatgagaaagcgccttcgatatctcctccacctaccactttccatagcccctgaggaaaaccaaggtgaagagttagccttcaaggatcagggcaagctctaactggctgcttccccatatttgtaatagttcaaagtcttgaaatatcagcgcttaagagtctttgggagcataaactgagcttcgtattaacagcttcttcatttgctttaaaatagcgagacctcttaccttttcaatcccaaaactaaccacttataattcagtgtggtcatttaaacgtgtgtgtgtgtgtgtgtgtgtgtgtgtgtgtgtgtgtgtgtgtgtgtgttttaaccataacatgactgtcacatattctctaggagacattttggcccttttagttgtttaggttattatacttcaaggatttataaatgtgcaacaattcatggagtggcagaaaaggatatagagagaccaagttgttgaggacaatagctggagtttagtcttccagaagtatttttcttgccagaattgatcaaaggaagagccaacggcactggataggagattctagcatttggctgcttctccaagacaagcgaggttagaagggagttgagaagttatgtcatcttccactgcagcagataccccttttttagtacttggagatcccccgaatcacagcatttctaaatcagccctggattccacaagtgaagcagcggaggaaccaggaggtcagcggtgtcactcaaatctgtggcaatcaagtgggagttctcaaaaggctatcaaaggaagggggttatgataaggaaaggctcaagacctgcctcagaaggagtgagcagggaagagcaggactgactccactcagtgcaggatccagtacaaaatgaagatgtgaggcttttgtgcaaacagcaggaaaacattacctttacaggtactaaaatgtaatgtttttcctttcttccatagtgtctttctcaacttgttatggctgtgttttttatttgctacttaatgctgttctaactaaaaacttaaatgttaaattccta

SEQ ID NO: 195872 - DNA, 1726 bp, Homo sapiens
  Payload ID: 18652
  Gene Name: tubulin polyglutamylase complex subunit 2
  Uniprot ID: Q68CL5
  ENST ID: ENST00000383056
  CDS Start-End: 220-993
gtcccggaggtgcggtgtggggcaccgggcggggccgcgggaaccggcgccccacggagctgctgctgtcagaccaaccccgggcccccatcatcactgcgccgcgctttcaggcgccgagaactaccgttcccggcatgccatgaaattggcctcggcgctgaggcggggtccggccctccacccgctcccgccgcgcgcgaatcgcggtcgcgagccatggaggaggaggcatcgtccccggggctgggctgcagcaagccgcacctggagaagctgaccctgggcatcacgcgcatcctagaatcttccccaggtgtgactgaggtgaccatcatagaaaagcctcctgctgaacgtcatatgatttcttcctgggaacaaaagaataactgtgtgatgcctgaagatgtgaagaacttttacctgatgaccaatggcttccacatgacatggagtgtgaagctggatgccagtgatgatcagccagagaagcctcactttgactctcgcagtgtgatatttgagctggattcatgcaatggcagtgggaaagtttgccttgtctacaaaagtgggaaaccagcattagcagaagacactgagatctggttcctggacagagcgttatactggcattttctcacagacacctttactgcctattaccgcctgctcatcacccacctgggcctgccccagtggcaatatgccttcaccagctatggcattagcccacaggccaagcaatggttcagcatgtataaacctatcacctacaacacaaacctgctcacagaagagaccgactcctttgtgaataagctagatcccagcaaagtgtttaagagcaagaacaagatcgtaatcccaaaaaagaaagggcctgtgcagcctgcaggtggccagaaagggccctcaggaccctccggtccctccacttcctccacttctaaatcctcctctggctctggaaaccccacccggaagtgagcacccctccctccaactccctaccagctccagagtggtggtttccatgcacagatggccctaggggtgacctccagttttgcgtgtggaccgtaggcctctttctagttgaatgaccaaaattgtaaggcttttagtcccaccgacattagccaggctcgtagtgaggcctccagagcaggttgtgctgtcccctgcctctggaagcaatggggaatttggaatcttgtgtaagtgcccaaataagtctgagtgctttcctcttcttcaacactcaaccctcaatcccttagcactgattgattagagaggtcccccaaagaaaccactggttttgacccatgaagcattagaactgcattgttcattcaggagccactagtcacatatgactatttaaatttaaagtaaattgtatgaaaaattcatttcttcaattgcattagccacattttgagtattcatgtggctggtagattctgtattagcacaaagatatggaacatttccatcaccacagaaagttctgttggacagcactgcattagaatattttcatactgctcttcctcaattaatttttgttgttaatgttgatgtcttcattggatgggtcataatgttccatgaaacctctcaagtacacaattgtatgttctttgtatcccttaccacaaatatctcgctctgctcatttcttttgcagcttcctataaagtttgtcttcctcatc

SEQ ID NO: 195873 - DNA, 1239 bp, Homo sapiens
  Payload ID: 18652
  Gene Name: tubulin polyglutamylase complex subunit 2
  Uniprot ID: Q68CL5
  ENST ID: ENST00000590842
  CDS Start-End: 76-990
gaaattggcctcggcgctgaggcggggtccggccctccacccgctcccgccgcgcgcgaatcgcggtcgcgagccatggaggaggaggcatcgtccccggggctgggctgcagcaagccgcacctggagaagctgaccctgggcatcacgcgcatcctagaatcttccccaggtgtgactgaggtgaccatcatagaaaagcctcctgctgaacgtcatatgatttcttcctgggaacaaaagaataactgtgtgatgcctgaagatgtgaagaacttttacctgatgaccaatggcttccacatgacatggagtgtgaagctggatgagcacatcattccactgggaagcatggcaattaacagcatctcaaaactgactcagctcacccagtcttccatgtattcacttcctaatgcacccactctggcagacctggaggacgatacacatgaagccagtgatgatcagccagagaagcctcactttgactctcgcagtgtgatatttgagctggattcatgcaatggcagtgggaaagtttgccttgtctacaaaagtgggaaaccagcattagcagaagacactgagatctggttcctggacagagcgttatactggcattttctcacagacacctttactgcctattaccgcctgctcatcacccacctgggcctgccccagtggcaatatgccttcaccagctatggcattagcccacaggccaagataacttataatatcaaaatgaatagaagaaaatgtgttcactggaaactggctgttgagcccctccaatgggagctgaggagctgtgtctctgcaggcatggggactggccacaagcaaagagtcagcagcatgaagccccggagctgtagcgtgtgcagcaggcgccaatccaacagcatgggaacaacagtgtcgcaatcattcctcagttatggcaagaatgtgctatttttcactgttaggtgttgcttctgagaactacaaataaaactctccaaccaagtgaacagactctctgctggccaaggggactccagagaaccttagaaactgagtttctgaccataacaggatgggaggtcagacacacctcatcataccccctcccttttgtggttttagacacaacaactgatcagcattgatattaaaagagagatcataagactgacggaacaactttgtgacaataagataccaaataataaacaggatctaaagcca

SEQ ID NO: 195874 - DNA, 348 bp, Homo sapiens
  Payload ID: 18652
  Gene Name: tubulin polyglutamylase complex subunit 2
  ENST ID: ENST00000588909
  CDS Start-End: 220-348
gtcccggaggtgcggtgtggggcaccgggcggggccgcgggaaccggcgccccacggagctgctgctgtcagaccaaccccgggcccccatcatcactgcgccgcgctttcaggcgccgagaactaccgttcccggcatgccatgaaattggcctcggcgctgaggcggggtccggccctccacccgctcccgccgcgcgcgaatcgcggtcgcgagccatggaggaggaggcatcgtccccggggctgggctgcagcaagccgcacctggagaagctgaccctgggcatcacgcgcatcctagaaaagcctcctgctgaacgtcatatgatttcttcctgggaacaa

SEQ ID NO: 195875 - DNA, 687 bp, Homo sapiens
  Payload ID: 18652
  Gene Name: tubulin polyglutamylase complex subunit 2
  ENST ID: ENST00000587207
  CDS Start-End: 258-485
cctgcggggcgagagggtgggggcgaaggggaagctacgtcccggaggtgcggtgtggggcaccgggcggggccgcgggaaccggcgccccacggagctgctgctgtcagaccaaccccgggcccccatcatcactgcgccgcgctttcaggcgccgagaactaccgttcccggcatgccatgaaattggcctcggcgctgaggcggggtccggccctccacccgctcccgccgcgcgcgaatcgcggtcgcgagccatggaggaggaggcatcgtccccggggctgggctgcagcaagccgcacctggagaagctgaccctgggcatcacgcgcatcctagaatcttccccaggtgtgactgaggtgaccatcatagaaaagcctcctgctgaacgtcatatgatttcttcctgggaacaaatgaagaaacagaggctgaaagagtttaaagaatttggccggcacagtggctcatgcttgtaatctcagtgttttggaaggccagggcagaggattgcttgaggccaggagttcaagacaagcctggacaacatggcaatactccagctctacaaaacaataatgttaattagccagaagaataactgtgtgatgcctgaagatgtgaagaacttttacctgatgaccaatggcttccacatgacatggagtgtgaagctggatg

SEQ ID NO: 195876 - DNA, 841 bp, Homo sapiens
  Payload ID: 18652
  Gene Name: tubulin polyglutamylase complex subunit 2
  ENST ID: ENST00000587129
  CDS Start-End: 38-784
acccgctcccgccgcgcgcgaatcgcggtcgcgagccatggaggaggaggcatcgtccccggggctgggctgcagcaagccgcacctggagaagctgaccctgggcatcacgcgcatcctagaatcttccccaggtgtgactgaggtgaccatcatagaaaagcctcctgctgaacgtcatatgatttcttcctgggaacaaaagaataactgtgtgatgcctgaagatgtgaagaacttttacctgatgaccaatggcttccacatgacatggagtgtgaagctggatgagcacatcattccactgggaagcatggcaattaacagcatctcaaaactgactcagctcacccagtcttccatgtattcacttcctaatgcacccactctggcagacctggaggacgatacacatgaagccagtgatgatcagccagagaagcctcactttgactctcgcagtgtgatatttgagctggattcatgcaatggcagtgggaaagtttgccttgtctacaaaagtgggaaaccagcattagcagaagacactgagatctggttcctggacagagcgttatactggcattttctcacagacacctttactgcctattaccgcctgctcatcacccacctgggcctgccccagtggcaatatgccttcaccagctatggcattagcccacaggccaaggctcttttaggcctttttgatggatctagtcctccggtggatttaaataatccaagaggaagaacaggaatccggagcagaaggttctagagctcccgggactcactggcacaccccgactgctccttgacatttgtggacagggct

SEQ ID NO: 195877 - DNA, 1070 bp, Homo sapiens
  Payload ID: 18652
  Gene Name: tubulin polyglutamylase complex subunit 2
  ENST ID: ENST00000585635
  CDS Start-End: 270-419
gcgcggccggcccctgcggggcgagagggtgggggcgaaggggaagctacgtcccggaggtgcggtgtggggcaccgggcggggccgcgggaaccggcgccccacggagctgctgctgtcagaccaaccccgggcccccatcatcactgcgccgcgctttcaggcgccgagaactaccgttcccggcatgccatgaaattggcctcggcgctgaggcggggtccggccctccacccgctcccgccgcgcgcgaatcgcggtcgcgagccatggaggaggaggcatcgtccccggggctgggctgcagcaagccgcacctggagaagctgaccctgggcatcacgcgcatcctagggcaaggcactcacaggccaactccaaactcaagaagttggagaaatagactcacctctcaatgagaagtgctatgggcatgcagggaaggaaggaattgacagcacccacctttggagtaagctaccacagagagttttaatccacggcatatctaaagataatcttccccaggtgtgactgaggtgaccatcatagaaaagcctcctgctgaacgtcatatgatttcttcctgggaacaaaagaataactgtgtgatgcctgaagatgtgaagaacttttacctgatgaccaatggcttccacatgacatggagtgtgaagctggatgagcacatcattccactgggaagcatggcaattaacagcatctcaaaactgactcagctcacccagtcttccatgtattcacttcctaatgcacccactctggcagacctggaggacgatacacatgaagccagtgatgatcagccagagaagcctcactttgactctcgcagtgtgatatttgagctggattcatgcaatggcagtgggaaagtttgccttgtctacaaaagtgggaaaccagcattagcagaagacactgagatctggttcctggacagagcgttatactggcattttctcacagacacctttactgcctattaccgcctgctcatcacccacctgggcctgccccagtggcaatatgccttcaccagctatggc

SEQ ID NO: 195878 - DNA, 579 bp, Homo sapiens
  Payload ID: 18652
  Gene Name: tubulin polyglutamylase complex subunit 2
  ENST ID: ENST00000590337
  CDS Start-End: 222-579
acgtcccggaggtgcggtgtggggcaccgggcggggccgcgggaaccggcgccccacggagctgctgctgtcagaccaaccccgggcccccatcatcactgcgccgcgctttcaggcgccgagaactaccgttcccggcatgccatgaaattggcctcggcgctgaggcggggtccggccctccacccgctcccgccgcgcgcgaatcgcggtcgcgagccatggaggaggaggcatcgtccccggggctgggctgcagcaagccgcacctggagaagctgaccctgggcatcacgcgcatcctagaatcttccccaggtgtgactgaggtgaccatcatagaaaagcctcctgctgaacgtcatatgatttcttcctgggaacaaaagaataactgtgtgatgcctgaagatgtgaagaacttttacctgatgaccaatggcttccacatgacatggagtgtgaagctggatgttttttcagcaaataaagaaaacatggagcttcctagtctgtatttacaccctaatcacagaagactagaaccaagcaagaagactgccaaattctcatcactga

SEQ ID NO: 195879 - DNA, 1102 bp, Homo sapiens
  Payload ID: 18652
  Gene Name: tubulin polyglutamylase complex subunit 2
  Uniprot ID: Q68CL5
  ENST ID: ENST00000589049
  CDS Start-End: 15-698
cgcggtcgcgagccatggaggaggaggcatcgtccccggggctgggctgcagcaagccgcacctggagaagctgaccctgggcatcacgcgcatcctagaatcttccccaggtgtgactgaggtgaccatcatagaaaagcctcctgctgaacgtcatatgatttcttcctgggaacaaaagaataactgtgtgatgcctgaagatgtgaagaacttttacctgatgaccaatggcttccacatgacatggagtgtgaagctggatgagcacatcattccactgggaagcatggcaattaacagcatctcaaaactgactcagctcacccagtcttccatgtattcacttcctaatgcacccactctggcagacctggaggacgatacacatgaagccagtgatgatcagccagagaagcctcactttgactctcgcagtgtgatatttgagctggattcatgcaatggcagtgggaaagtttgccttgtctacaaaagtgggaaaccagcattagcagaagacactgagatctggttcctggacagagcgttatactggcattttctcacagacacctttactgcctattaccgcctgctcatcacccacctgggcctgccccagtggcaatatgccttcaccagctatggcattagcccacaggccaaggtaagggaggaacacctgccattgtaaactatggtatattccaaaatctactgaggaaatggttacattgcaggttcccaacttccctatctgattcaggagatctagggtggggcccaggaacctgcattttcaataagcaagacagatgattccaatggacagcctcactttactcatctagttaagtggttcccaaacttgactgattctcagaattaactggggagttttatttttaatgaaattctgttggatagtttatgtcccatgacttgttctgggttggcagtacatgcacccaggaagagtgaaaagtcagattctcactcccctgttctccaagtgtgcatccccagtggcagctgctattacgagtttcctgtacgcccttcccaagatactcattgcacataaagcatgcatgcaca

SEQ ID NO: 195880 - DNA, 803 bp, Homo sapiens
  Payload ID: 18652
  Gene Name: tubulin polyglutamylase complex subunit 2
  ENST ID: ENST00000591823
  CDS Start-End: 7-99
cgagccatggaggaggaggcatcgtccccggggctgggctgcagcaagccgcacctggagaagctgaccctgggcatcacgcgcatcctaggactgtgaagatgatgagataccacaccttgattatgttacattaaatggcaaaagcaagattatccagaatcttccccaggtgtgactgaggtgaccatcatagaaaagcctcctgctgaacgtcatatgatttcttcctgggaacaaaagaataactgtgtgatgcctgaagatgtgaagaacttttacctgatgaccaatggcttccacatgacatggagtgtgaagctggatgagcacatcattccactgggaagcatggcaattaacagcatctcaaaactgactcagctcacccagtcttccatgtattcacttcctaatgcacccactctggcagacctggaggacgatacacatgaagccagtgatgatcagccagagaagcctcactttgactctcgcagtgtgatatttgagctggattcatgcaatggcagtgggaaagtttgccttgtctacaaaagtgggaaaccagcattagcagaagacactgagatctggttcctggacagagcgttatactggcattttctcacagacacctttactgcctattaccgcctgctcatcacccacctgggcctgccccagtggcaatatgccttcaccagctatggcattagcccacaggccaaggtaagggaggaacacctgccattgtaaactatggtatattccaaaatctactgaggaaatggttacattgc

SEQ ID NO: 195881 - DNA, 2079 bp, Homo sapiens
  Payload ID: 18652
  Gene Name: tubulin polyglutamylase complex subunit 2
  ENST ID: ENST00000587382
  CDS Start-End: 1-626
gcaagccgcacctggagaagctgaccctgggcatcacgcgcatcctagaatcttccccaggtgtgactgaggtgaccatcatagaaaagcctcctgctgaacgtcatatgatttcttcctgggaacaaaagaataactgtgtgatgcctgaagatgtgaagaacttttacctgatgaccaatggcttccacatgacatggagtgtgaagctggatgagcacatcattccactgggaagcatggcaattaacagcatctcaaaactgactcagctcacccagtcttccatgtattcacttcctaatgcacccactctggcagacctggaggacgatacacatgaagccagtgatgatcagccagagaagcctcactttgactctcgcagtgtgatatttgagctggattcatgcaatggcagtgggaaagtttgccttgtctacaaaagtgggaaaccagcattagcagaagacactgagatctggttcctggacagagcgttatactggcattttctcacagacacctttactgcctattaccgcctgctcatcacccacctgggcctgccccagtggcaatatgccttcaccagctatggcattagcccacaggccaaggtctgatgtggactctgctgaggagagactgtatcttctaggtgggatatgtcaagagagaagagtgtatatttgacagtattgacttcacatagaattctcctttgtggacaagaattcccaagactcagagcacaatgtagacatagtgtattagtccattttcacgctgctgataaagacatacccaagactgggtaatttttttaagaaaaaggtttaatggacttacagtttcacgtggctggagaggcctcacaatcacggcagaaggcgaaaggcacatcttacatggtggcaggcaaagagagaatgagagccaggtgaaaggggaaacccccttataaaatcagcagatcttgtgagacttattaactaccatgagaacagtagggtggaaaccatccccatgattcagttatctcccactgggtccctcccacaacatacgggaattatgggagccacaattcaagatgagatttgggtagggacacagccaaaccatatcacatagtttcttagacattgtttgatcatcttgatggaggaaactgcagtccaaagcaattttatacaaaactaaatttaacataaaacttcctgtgtacaaaatgaataaacagcaacaaagtacatataaaggtatattctctcagacctgtgctaatacatagccataaactaaaataaaaatttaaaattcattcctcaatctccagccacatttcaagtattcagtaatcacatatgtctagtggctaccatattagttatatatagaacatttccatcatcacagaacgttccaccaggcagccttagttagagcaagcacggcttgttttatattataattttcagaataattctggtgaaaagccattttatactatgctatagtcaacaaagaataaggatatttacctaatcttaagacttttttttaacctaaaacacaacatccttttctactttacatattacttttgcagccatggctcataggaaaagccaaggatgagttagcctgctgctacccattttagctgcagagtgggctgtgcaggttctgagctttccccatgtgatagtcaaagaccccaaggcagccccagcctctctaggtctctgcacagtctccagtgtggaaagctgtgggaaaggaaggagcaggttctaggtcttcaggattttctgcatcttaaagcagctcatctcctttgccctcctagggagcaggggggcctagctttgggatcgtcctcctagcctcagaaataattgttcaagaaataacatttctcacacaaaggataaatgtttgaggggatggataccccatcttccatgatttgattattacacattgcatgcctgtatcaaaaatctcatatatacacctactatgtacccacaaaaatttaaaatttaaaattaaaaacaaaacaaaacaaaa

SEQ ID NO: 195882 - DNA, 1727 bp, Homo sapiens
  Payload ID: 18652
  Gene Name: tubulin polyglutamylase complex subunit 2
  Uniprot ID: Q68CL5
  ENST ID: ENST00000593035
  CDS Start-End: 197-994
accgggcggggccgcgggaaccggcgccccacggagctgctgctgtcagaccaaccccgggcccccatcatcactgcgccgcgctttcaggcgccgagaactaccgttcccggcatgccatgaaattggcctcggcgctgaggcggggtccggccctccacccgctcccgccgcgcgcgaatcgcggtcgcgagccatggaggaggaggcatcgtccccggggctgggctgcagcaagccgcacctggagaagctgaccctgggcatcacgcgcatcctagaatcttccccaggtgtgactgaggtgaccatcatagaaaagcctcctgctgaacgtcatatgatttcttcctgggaacaaaagaataactgtgtgatgcctgaagatgtgaagaacttttacctgatgaccaatggcttccacatgacatggagtgtgaagctggatgacctggaggacgatacacatgaagccagtgatgatcagccagagaagcctcactttgactctcgcagtgtgatatttgagctggattcatgcaatggcagtgggaaagtttgccttgtctacaaaagtgggaaaccagcattagcagaagacactgagatctggttcctggacagagcgttatactggcattttctcacagacacctttactgcctattaccgcctgctcatcacccacctgggcctgccccagtggcaatatgccttcaccagctatggcattagcccacaggccaagcaatggttcagcatgtataaacctatcacctacaacacaaacctgctcacagaagagaccgactcctttgtgaataagctagatcccagcaaagtgtttaagagcaagaacaagatcgtaatcccaaaaaagaaagggcctgtgcagcctgcaggtggccagaaagggccctcaggaccctccggtccctccacttcctccacttctaaatcctcctctggctctggaaaccccacccggaagtgagcacccctccctccaactccctaccagctccagagtggtggtttccatgcacagatggccctaggggtgacctccagttttgcgtgtggaccgtaggcctctttctagttgaatgaccaaaattgtaaggcttttagtcccaccgacattagccaggctcgtagtgaggcctccagagcaggttgtgctgtcccctgcctctggaagcaatggggaatttggaatcttgtgtaagtgcccaaataagtctgagtgctttcctcttcttcaacactcaaccctcaatcccttagcactgattgattagagaggtcccccaaagaaaccactggttttgacccatgaagcattagaactgcattgttcattcaggagccactagtcacatatgactatttaaatttaaagtaaattgtatgaaaaattcatttcttcaattgcattagccacattttgagtattcatgtggctggtagattctgtattagcacaaagatatggaacatttccatcaccacagaaagttctgttggacagcactgcattagaatattttcatactgctcttcctcaattaatttttgttgttaatgttgatgtcttcattggatgggtcataatgttccatgaaacctctcaagtacacaattgtatgttctttgtatcccttaccacaaatatctcgctctgctcatttcttttgcagcttcctataaagtttgtcttcctcatc

SEQ ID NO: 195883 - DNA, 572 bp, Homo sapiens
  Payload ID: 18652
  Gene Name: tubulin polyglutamylase complex subunit 2
  ENST ID: ENST00000590692
  CDS Start-End: 16-108
tcgcggtcgcgagccatggaggaggaggcatcgtccccggggctgggctgcagcaagccgcacctggagaagctgaccctgggcatcacgcgcatcctaggactgtgaagatgatgagataccacaccttgattatgttacattaaatggcaaaagcaagattatccagactcttttttctcttccagaatcttccccaggtgtgactgaggtgaccatcatagaaaagcctcctgctgaacgtcatatgatttcttcctgggaacaaaagaataactgtgtgatgcctgaagatgtgaagaacttttacctgatgaccaatggcttccacatgacatggagtgtgaagctggatgagcacatcattccactgggaagcatggcaattaacagcatctcaaaactgactcagctcacccagtcttccatgtattcacttcctaatgcacccactctggcagacctggaggacgatacacatgaagccagtgatgatcagccagagaagcctcactttgactctcgcagtgtgatatttgagctggattcatgcaatggcagtgggaaagttt

SEQ ID NO: 195884 - DNA, 936 bp, Homo sapiens
  Payload ID: 18652
  Gene Name: tubulin polyglutamylase complex subunit 2
  ENST ID: ENST00000591906
  CDS Start-End: 1-565
tgctgaacgtcatatgatttcttcctgggaacaaaagaataactgtgtgatgcctgaagatgtgaagaacttttacctgatgaccaatggcttccacatgacatggagtgtgaagctggatgagcacatcattccactgggaagcatggcaattaacagcatctcaaaactgactcagctcacccagtcttccatgtattcacttcctaatgcacccactctggcagacctggaggacgatacacatgaagccagtgatgatcagccagagaagcctcactttgactctcgcagtgtgatatttgagctggattcatgcaatggcagtgggaaagtttgccttgtctacaaaagtgggaaaccagcattagcagaagacactgagatctggttcctggacagagcgttatactggcattttctcacagacacctttactgcctattaccgcctgctcatcacccacctgggcctgccccagtggcaatatgccttcaccagctatggcattagcccacaggccaaggcatggggactggccacaagcaaagagtcagcagcatgaagccccggagctgtagcgtgtgcagcaggcgccaatccaacagcatgggaacaacagtgtcgcaatcattcctcagttatggcaagaatgtgctatttttcactgttaggtgttgcttctgagaactacaaataaaactctccaaccaagtgaacagactctctgctggccaaggggactccagagaaccttagaaactgagtttctgaccataacaggatgggaggtcagacacacctcatcataccccctcccttttgtggttttagacacaacaactgatcagcattgatattaaaagagagatcataagactgacggaacaactttgtgacaataagataccaaataataaacaggatctaaagcca

SEQ ID NO: 195885 - DNA, 1268 bp, Homo sapiens
  Payload ID: 18652
  Gene Name: tubulin polyglutamylase complex subunit 2
  ENST ID: ENST00000614939
  CDS Start-End: 450-1148
gtcaggcgggcaaaggatacagtcccggctccagaacgccgcggcactggggcgggaggggcccgccacgtccgccatcttgaaacaaccgccactcggggcgtcgcgcctgggccgccacgcctcggcctgcaggctcggtccccattggccgcaccacgcagaggcccgcccccgcctgcgcggccggcccctgcggggcgagagggtgggggcgaaggggaagctacgtcccggaggtgcggtgtggggcaccgggcggggccgcgggaaccggcgccccacggagctgctgctgtcagaccaaccccgggcccccatcatcactgcgccgcgctttcaggcgccgagaactaccgttcccggcatgccatgaaattggcctcggcgctgaggcggggtccggccctccacccgctcccgccgcgcgcgaatcgcggtcgcgagccatggaggaggaggcatcgtccccggggctgggctgcagcaagccgcacctggagaagctgaccctgggcatcacgcgcatcctagaatcttccccaggtgtgactgaggtgaccatcatagaaaagcctcctgctgaacgtcatatgatttcttcctgggaacaaaagaataactgtgtgatgcctgaagatgtgaagaacttttacctgatgaccaatggcttccacatgacatggagtgtgaagctggatgagcacatcattccactgggaagcatggcaattaacagcatctcaaaactgactcagctcacccagtcttccatgtattcacttcctaatgcacccactctggcagacctggaggacgatacacatgaagccagtgatgatcagccagagaagcctcactttgactctcgcagtgtgatatttgagctggattcatgcaatggcagtgggaaagtttgccttgtctacaaaagtgggaaaccagcattagcagaagacactgagatctggttcctggacagagcgttatactggcattttctcacagacacctttactgcctattaccgcctgctcatcacccacctgggcctgccccagtggcaatatgccttcaccagctatggcattagcccacaggccaagcccaaaggatctgaaggccgttccaagcgagggtgcttctgaggacactgagaagagttttgccattctgaagaggcgagcctgtggaactgtttaaggtcctgttcccagaagaataaaagtttctcattatggcattaaactctatttatttagtatttg

SEQ ID NO: 195886 - DNA, 515 bp, Homo sapiens
  Payload ID: 18652
  Gene Name: tubulin polyglutamylase complex subunit 2
  ENST ID: ENST00000590652
  CDS Start-End: 1-250
atttgagctggattcatgcaatggcagtgggaaagtttgccttgtctacaaaagtgggaaaccagcattagcagaagacactgagatctggttcctggacagagcgttatactggcattttctcacagacacctttactgcctattaccgcctgctcatcacccacctgggcctgccccagtggcaatatgccttcaccagctatggcattagcccacaggccaaggtgattaaacacaaccgtctataatgtacagacccaactctcgcaagttccaggctctcctggggtgttcacatccatcatgtactatttgacaaatgtctgcttcaacaagctccctgtctcccccaaaggatctgaaggccgttccaagcgagggtgcttctgaggacactgagaagagttttgccattctgaagaggcgagcctgtggaactgtttaaggtcctgttcccagaagaataaaagtttctcattatggcattaaactctatttatttagtatttgaaa

SEQ ID NO: 195887 - DNA, 488 bp, Homo sapiens
  Payload ID: 18652
  Gene Name: tubulin polyglutamylase complex subunit 2
  ENST ID: ENST00000590500
  CDS Start-End: 1-488
aagaataactgtgtgatgcctgaagatgtgaagaacttttacctgatgaccaatggcttccacatgacatggagtgtgaagctggatgccagtgatgatcagccagagaagcctcactttgactctcgcagtgtgatatttgagctggattcatgcaatggcagtgggaaagtttgccttgtctacaaaagtgggaaaccagcattagcagaagacactgagatctggttcctggacagagcgttatactggcattttctcacagacacctttactgcctattaccgcctgctcatcacccacctgggcctgccccagtggcaatatgccttcaccagctatggcattagcccacaggccaagcaatggttcagcatgtataaacctatcacctacaacacaaacctgctcacagaagagaccgactcctttgtgaataagctagatcccagcaaagtgtttaagagcaagaacaagatcgtaatccc

SEQ ID NO: 195888 - DNA, 2679 bp, Homo sapiens
  Payload ID: 18652
  Gene Name: tubulin polyglutamylase complex subunit 2
  ENST ID: ENST00000590258
  CDS Start-End: 1-179
ggttcctggacagagcgttatactggcattttctcacagacacctttactgcctattaccgcctgctcatcacccacctgggcctgccccagtggcaatatgccttcaccagctatggcattagcccacaggccaagcccaaaggatctgaaggccgttccaagcgagggtgcttctgaggacactgagaagagttttgccattctgaagaggcgagcctgtggaactgtttaaggtcctgttcccagaagaataaaagtttctcattatggcattaaactctatttatttagtatttgaaacatggtgtacatgtatgtatttgtataaacatttgttacatctaaaatccacaacaggtaaacaatctgtgctttcttttgtgtacaagtttggggtttacatctggatattttggtgttgtggagactcagtctgtgaagctaatcagattgcctcatattaccataataactgtgacagaagtgatttgctccttaaaggggctgttccttgcccagaaaaggtgtcacacttttgaactaataaaccgggtgtcacggaatcaagagaaacacagctgacacgatggagaaggtatgtgcaggggactcctggagatccaagtcaatgcgtagcaggcaacacaagccatggggtgacgctgggaattgagctctcccttttcaaactgttggatgtgaatatcaagtctccccaaccccacctggaggggtttcatccagcaagagcttgccttctgctcagcacactcctgggagtaacctatgagtgtcacagctgcaactccgaggtgccaaccaagcccagggctctggcttcttctggggtcaggccgctcttcagggttcttcgcactgcagtggtggtgcaggtcacacccaaagggatgagaagaaaaggaagtatgagcagcaaggcacagggcagtcaagactccagtccccccttctccccagggacttccagagaagccagagggttcacactctgtaccttcctgctcttgctgaagtgccctgcagtctgtctgccaggacaaaagtttggggctacacaggctggcctaacaatgccacaggtgctgatttggagggccgagaggagtgatgcgggcacttataaagaggagagaaaggaggagaggctcaccctcacgaggcttctgagaagggggtgaactgcagaagtgcagagggcaggagagacctcagcatctacccagtatgaggagtgtatcagagctgggaaggtgattccagagcaggggaaaatgcaagctccactaatacaaatgaggtgaggcaaccagtgcacagcgaggggttccacaagacccaacaacctcacaaatccaacagacgaccaacaatagctggggacatgctcaagacccacagagcaagtgcatgaagccagggcaaggggcagcagtgaggacaaatctctccatgagtactgtgggtcttagcctcaactcactaaaaggcctctagagacaataattaaaataaccagtggctcctcgaggaatggaggctaaggagcaaactgccaaacttattctggctggaattggtggctgttttctatggaacacacaagactcaagaatggccaatgaccactctcactggggggttgcagttggcaactggagggatgctcatatttaactgacttagaattggcttgtgtttagcttggcatgatggtattcccattgtttagtatttcaatttcaacatcaaaataaaggctggataagggtgaatgaggaggtagctgcctcacccaagacaagtcttcatttgaaagggtggctaattacattttccttaatttacaaattgtatttgacccactgtgtatttctttaaagttcgcacagagtttggggtattcattttcagaagagaaacgttatggatctgccttcaccctaaatccctaaatcagccagagttcctgagatgaccagggcaggctgttgatcaaagttcagagaaagtaagctcaccttaatgtctccccagttcctttgccaactcccctcatctactccccagaggccagggcccacctcatgcatctgcaggccacaccccatggtctatgccttcccatcatcccctaaatataagctcactcagcctgtggacaaaagatctgaaagacctatgtccatggcagaatcaatggggactaatacctattatgaaaataaagggctccttctcttccaggaatcagcacttggaacaggggtcaacataatatccatcaattggtcaaccaacaaatgatttattgagaacccattgtgtgctcagcatttaactcaaagaatcaaaacacagacatcaagtatgggtttttagagagacatgggatatgtggtgaggggttctctcaaatcgtgttactgcaactactgtatttccaagcctacctttgggccctgaagcaatctatctgtagctgttcttgcactagctcctctttcccccacccctgatcccttggcctccagactgaatgtttggctcaacaagacaaaatgtttggctcctaagtctcagctggagacagattacattcaactgagcaacagaatttgttctatggggcagcaataaaaatactagtttgtaataa

SEQ ID NO: 195889 - DNA, 1426 bp, Homo sapiens
  Payload ID: 18652
  Gene Name: tubulin polyglutamylase complex subunit 2
  ENST ID: ENST00000610723
  CDS Start-End: 450-842
gtcaggcgggcaaaggatacagtcccggctccagaacgccgcggcactggggcgggaggggcccgccacgtccgccatcttgaaacaaccgccactcggggcgtcgcgcctgggccgccacgcctcggcctgcaggctcggtccccattggccgcaccacgcagaggcccgcccccgcctgcgcggccggcccctgcggggcgagagggtgggggcgaaggggaagctacgtcccggaggtgcggtgtggggcaccgggcggggccgcgggaaccggcgccccacggagctgctgctgtcagaccaaccccgggcccccatcatcactgcgccgcgctttcaggcgccgagaactaccgttcccggcatgccatgaaattggcctcggcgctgaggcggggtccggccctccacccgctcccgccgcgcgcgaatcgcggtcgcgagccatggaggaggaggcatcgtccccggggctgggctgcagcaagccgcacctggagaagctgaccctgggcatcacgcgcatcctagaatcttccccaggtgtgactgaggtgaccatcatagaaaagcctcctgctgaacgtcatatgatttcttcctgggaacaaaagaataactgtgtgatgcctgaagatgtgaagaacttttacctgatgaccaatggcttccacatgacatggagtgtgaagctggatgagcacatcattccactgggaagcatggcaattaacagcatctcaaaactgactcagctcacccagtcttccatgtattcacttcctaatgcacccactctggcagacctggaggacgatacacatgaagataacttataatatcaaaatgaatagaagaaaatgtgttcactggaaactggctgttgagcccctccaatgggagctgaggagctgtgtctctgcaggcatggggactggccacaagcaaagagtcagcagcatgaagccccggagctgtagcgtgtgcagcaggcgccaatccaacagcatgggaacaacagtgtcgcaatcattcctcagttatggcaagaatgtgctatttttcactgttaggtgttgcttctgagaactacaaataaaactctccaaccaagtgaacagactctctgctggccaaggggactccagagaaccttagaaactgagtttctgaccataacaggatgggaggtcagacacacctcatcataccccctcccttttgtggttttagacacaacaactgatcagcattgatattaaaagagagatcataagactgacggaacaactttgtgacaataagataccaaataataaacaggatctaaagccatgtcagccaagggttaagtcatgcacccctccctacacttaaagaataaaacaattggccaggcgcagtggctcaggcctgtaatcgc

SEQ ID NO: 195890 - DNA, 6022 bp, Homo sapiens
  Payload ID: 18653
  Gene Name: tubulin polymerization promoting protein
  Uniprot ID: O94811
  ENST ID: ENST00000360578
  CDS Start-End: 123-782
gggcggtgctgggcgggacgggcgggcgcggggcggcggctggagagctccgctgagcaccgggtcgcgcgcggccgagtcgcggaggcgcctccgctgcagtcgctgcgtctccaagcaacatggctgacaaggccaagcctgccaaagctgccaacaggacgccccccaagtccccgggggacccctcgaaggaccgggcagccaagaggctgtcgctggaatcggagggtgctggtgagggggcagccgcatcccctgagctcagtgccctggaggaggccttccggcgctttgccgtgcacggggacgccagggccaccgggagggagatgcacggcaagaactggtcgaagctgtgcaaggactgccaggtgatcgacggcaggaacgtgaccgtcactgacgtggacatcgtcttcagcaagatcaaagggaagtcttgccggaccatcacctttgagcagttccaggaggcgctggaggagctcgccaagaagcgattcaaagacaagagcagcgaggaggccgttcgcgaggtgcacaggctcatcgagggcaaggcgcccatcatctcaggggtgacgaaagccatctcgtcgcccacagtgtcgaggctcacggacaccaccaagttcacgggctcccacaaggagcgcttcgacccctctggcaagggcaagggcaaggctggccgcgtggatctggtggacgagtcaggctatgtgtccggctacaagcacgcaggcacctacgaccagaaggtgcaagggggcaagtagcccccgctccatgcctcgcggcactgccggtgtccccagagcagggactctgtcacctcgcacttcattacattcctgtactaactggggcagaactcagacgggtgccccagagggggctggggggcggccaggcccaggcctccctcctgcccctcctcctaccggatgcccccagcactcccctctcaaaccaggtttgggccccagttcgctgaccctcctaatacacctgcctcgtcctcagccatttccaaagtgtctcgcggatcacaccacactgggcacgtggtttgcaggtcaaaggggcgttttaaagcagctggctgtcatggcaacaggaggctgtgctgacctcctgagcggcagacaccttccaggagccctgagggtggcaggagctaaccccaaccagcaggcaactaacacggaattggccccacaccggacgtgggaggtgtctgtggggcccgaggcctgtcctgtgtgcagcggacaccacggggccttcctgctttcctgggcagagggcagagtgaggccacctggcgggggtgctgggcgcctggcacatgtgtggggaagccggtcacatggacacacctgtgcacacatgcctacaggccagctctgtgccaagggcaacctaggtaaaacgaaagccgtcaggggcagtgggcggcttcccggctgaccacagtggcttggactgtgagggtagagtaggctcgctttgctttcctgagaagatgcggtggctgcctatgttctcagagcgggtctgggaagattcagaatgtccggtccctgtggtgttgccaggcaagagacacgaagtgccgagacactcctcgcctcaccgcgtgacagagcctctgcccggccctcccgttcgcccgtcctcactagctgcaccctgtttgctcgcagacctcccattgccacagcccaagcaccttcttcaactctcccaaaatggctcagcctaacctctcctggccaatcccccccgccggagagcaggacactagggaggacccccagtcctgcagtgtctgtgggggtttctctgccagcagggggctgagcagagcccatccaggacactccacactgccaggacacacccaggcggcccgcccttgcctgtctgcacctggggagaagccggcgctcctgctccctcctggggaggctgacgggtgtggccacccgctgtcacaatggcacactgccactgtcccttggcacgcacacagccacagccacacgtgtgacctgctgggccgtggttctggagtctacctgcggatgagcctgcggcagtcctggggaaacttttccagagcctgttagcccgtggctacggtcaggctctggccagggcagagggctgcccagggccaggctcacagtacaggagggtggcgaggcccctccctcactggcacgcatgagcaccacccgcctccccgactcccaagagtgcacctgctgcggccacagctccgtggaaggactccccctacctgagcagagcagaagccccagggcggagctcccagccagcatggtccgctgagggctggggggcggtctccgaggcccctcaacagagaagcctccacctgaggatggggaggacctggcaggcagcttccacggcagggctgggaagttcagtgcctggaaataaagagcaaggaaaaatggacctcaggcttcgtggctcctttaggatgtcacctcaccggcctggggaaggcggggggtgcccaagcccagccctgtgcccccgctgaacctggctggaccgcgtgtgaaaggcagaactaacgtgcggaaacatttgaaaacaactctgaatgtgcggttcggaatcacccgatcacagacgagcggtcaccggaatcgcccggtcacagacgagcagtcatcggactcacccgatcacagacgagcggtcaccggaatcgcccgatcacagacgagcggccaccggaatcgcccaatcacagacaagcagtcatcggaatcacccgatcacagacgagcagtcatcggactcacccgatcacagacgagcggtcaccagactcgcccgatcacagacgagcagtcatcggaatcacccgatcacagacgagcagtcatcggactcacccgatcacagacgagcggtcaccagaatcgcccgatcacagacgagcagtcatcggaatcacccgatcacagacgagtggccaccggaatcacccgataacagcccatcacaactccaaagcccttgtgttgaaaaggccgaggacgagtggtcaccaaacagggtggctccccaggtcccgaagcctgagacccggaaggccctggcacccttacaccctcggactcctgccctcctcggcctccctggccccagcgcggctccaccctgggctgcgtctcctggtcacaggctgcgtttctcctttctgtccgtgggcagcccagtccccacagtcacggccaagccacgcagaacgaacatgactccagaggacctcgccctggagctgagcctggcgccgggtcaggacggagggaagggcgggttggggtccgcgggtcctcacaccgcacggcaggcacagaggctcgccaggccctgatccggtctgtggggacgagggacactgaggagaggtgctgggcaccaggacgctgcctcctggtccctggttggcctcagacaagcacggcctcgagaaaagagccaagcgcatcgggagcacaccagaaaccggccctgagcacgagaagagcctccgcccggcccgggcaccacccgacctcgcagggagcaggccctgtcaccgacgggtcacctcgcccacacggccagcaccgactcaccacagcccttcccagacctggctggagtggccggagcggcggggctcatggctcccatcttggcccctggaggtgagctcattcacagaagtggtcccttcactctgagagagaaaatcgtggcgtgcatcccaaaccctaggccacgcctgtgggtttcgtgaatgagatcgaggctgctgtggcaccctgcccgtcctggcctggagcaccctgggatcctggagggagaggccccacgcccccactctccctccacacttccagggttggtgcccacgagttagaggcacgccctcccccagcggccctcaggcttttctcagacatgcgggagccaggagagcacccttctccactcagctccaaagcgaatctttgaaaacacccactcggctcccatctctgtcacctagccaggaggggtagcaaaaataaagtcacgaggacatagtggtcaccactgtcagttacaacttgtctgtggaatccgtaattgcatctgtgtgccgcctccgaacacagaacattgtttggacggcagccccactgcacataacagacccgtgcatcttcctcagtcagtttctgaatattgtgaattcaggcaggtgtgtgttctcttctgcatgtttttatgcactgccaattagcttctactaaccacggttcaacagaaaataaatgtgtatttgtgaataacaaactgcacaacctgcaaaccaggagagagggacaggttctgtcaggggtgacaccaggacacagggacaggttctgtcgggggtgacaccaggacacagggacaggttctgtcatgggtgacacgaggacacagggacaggttctatcatgggtgacaccaggagagagggacaggttctgttgggggtgacaagaggagacagggacaggttctgtcgggggtgacaccaggagagagggacaggttctgtcaggggtgacaccaggagagagggacaggttctgttgggggtgacaccaggacacaggaataggttctgtcgggaggacagtgctgatcgtgtctcagcatcaggaaaggagaaaggcagagggagagcgctgagaagactgttcacgccagagtgcttatttatttttaatttactgctataggataagcaaccaggtagtgttcctaacaattagcgttaccaaaattaaagttcaaattatatgtttaaaatattgtagaagatatatatttatactggactacttttacaccttctaatatcctgtccaagtttgggcgcagatggtggagttgggctggcatcatgtcctgtggccgccccacttgcctgttggtgccactccatcccgggccccagggatgccagctcagggctgaccacagcagccctgcgtgggcatcacctcctaccccagcccccatcctgggctgctgcggccgcctgcttttgtgaatggtgttttgttggcacagggcctgtcctgtgttttcacacaggcctgtggctcctgctgtacaagtggagtggggaggagttgagatggagatgccttggccctggacacttacctgtccctctactggcccagctcatctcctcctgtgggcaatcacgcgtgcactggccaccctcccaccccacagcacacaccacgaggggatggcacagggggaagatgaggctggaccgtgatgttatcaataggctagaacgtccttcaaacactgaacctgcatctttcctcctcttactactgaacactttgtgagctctggtggtccagggtgcagcgtttgtccctgggcatgtgatggggagtcctgggcacatcgagatgctttacttctttctttcgacctcttaaaaaactaaaccaagccaaaccacaaaggaaatctgcacaacttaagagaaacttgaaagggatcgtgtaactactagtttgtactaagtttttttcaagaaagggaaacaaatttatatatatatatatatatatatatgtgcaatatatttttacactgtgtgattaacattagggagtactgagtgcatcactttatcagtgtgacgggtgatgtccacgtcatggctgttctgactctgaaagccacttctgctgatgtctaaaccgcactcaccgcggacgtccgcggggtggggtggccctgctgttcctcctgcaggtgagaggtgtggtgttgcctgttggacttgctgttgagcctggcttgcaaacctgtagtgaaacagctcgtgtctgtgtgcacactgctcctgtgtctgctgtcgttaacattgtgtgtcaagttggtaaagtgacaaataaaggtgttaaaacatgga

SEQ ID NO: 195891 - DNA, 752 bp, Homo sapiens
  Payload ID: 18654
  Gene Name: tubulin polymerization-promoting protein family member 2
  Uniprot ID: P59282
  ENST ID: ENST00000321760
  CDS Start-End: 149-661
gccaaccggctcccacatatctgcacacacttaaatacaaaggccgggaagggtcagaccaccatccgggtactctaagtcctccctcccccttctccttcacccccaagtgtctcccacgactgccctccccgacctctagctgaccatggcatcagaggcagaaaaaacattccatcggtttgctgcgtttggagaatcatcaagcagtggcactgaaatgaacaacaagaacttctccaagctgtgcaaagactgtggcatcatggatggcaagacagtcacctccacggacgtggacatcgtgttcagcaaagtcaaggccaagaacgcccgaaccatcacgtttcaacagttcaaagaggcagtgaaggaactgggccagaagcgcttcaaagggaagagtccagatgaagtcctggagaacatttatggactcatggagggcaaagacccagccaccactggcgctactaaagcaacaacagtgggtgcagtggaccgtttgacagacaccagcaagtacaccggcacccacaaggagcgctttgatgagagtggcaagggcaagggcattgcgggacgggaagagatgactgacaacacaggctatgtgagtggttacaagggttctggcacctacgataagaagaccaagtagagaggagcttcatctcagcctgctagccccctgaccctgcatgtttaacaccagggagcttggaaaacaataaacatctgtgtgtgcagca

SEQ ID NO: 195892 - DNA, 457 bp, Homo sapiens
  Payload ID: 18654
  Gene Name: tubulin polymerization-promoting protein family member 2
  ENST ID: ENST00000481535
  CDS Start-End: 1-360
gaaaaaacattccatcggtttgctgcgtttggagaatcatcaagcagtggcactgaaatgaacaacaagaacttctccaagctgtgcaaagactgtggcatcatggatggcaagacagtcacctccacggacgtggacatcgtgttcagcaaagtcaaggccaagaacgcccgaaccatcacgtttcaacagttcaaagaggcagtgaaggaactgggccagaagcgcttcaaagggaagagtccagatgaagtcctggagaacatttatggactcatggagggcaaagacccagccaccactggcgctactctgcttccaagaacaggatggaagaatatatttggagtaaagagatgaaccagatgtggagtggatgctctcgtctcgcctggacagcacacacactccaactccagtaagactcaactcaaatatatctcttatacaacttcaa

SEQ ID NO: 195893 - DNA, 514 bp, Homo sapiens
  Payload ID: 18654
  Gene Name: tubulin polymerization-promoting protein family member 2
  ENST ID: ENST00000472458
  CDS Start-End: 104-514
gggaagggtcagaccaccatccgggtactctaagtcctccctcccccttctccttcacccccaagtgtctcccacgactgccctccccgacctctagctgaccatggcatcagaggcagaaaaaacattccatcggtttgctgcgtttggagaatcatcaagcagtggcactgaaatgaacaacaagaacttctccaagctgtgcaaagactgtggcatcatggatggcaagacagtcacctccacggacgtggacatcgtgttcagcaaagtcaaggccaagaacgcccgaaccatcacgtttcaacagttcaaagaggcagtgaaggaactgggccagaagcgcttcaaagggaagagtccagatgaagtcctggagaacatttatggactcatggagggcaaagacccagccaccactggcgctacttggatgctctcgtctcgcctggacagcacacacactccaactccagtaagactcaactcaaatatatctcttatacaacttcaa

SEQ ID NO: 195894 - DNA, 568 bp, Homo sapiens
  Payload ID: 18654
  Gene Name: tubulin polymerization-promoting protein family member 2
  ENST ID: ENST00000460647
  CDS Start-End: 125-538
acacacttaaatacaaaggccgggaagggtcagaccaccatccgggtactctaagtcctccctcccccttctccttcacccccaagtgtctcccacgactgccctccccgacctctagctgaccatggcatcagaggcagaaaaaacattccatcggtttgctgcgtttggagaatcatcaagcagtggcactgaaatgaacaacaagaacttctccaagctgtgcaaagactgtggcatcatggatggcaagacagtcacctccacggacgtggacatcgtgttcagcaaagtcaaggccaagaacgcccgaaccatcacgtttcaacagttcaaagaggcagtgaaggaactgggccagaagcgcttcaaagggaagagtccagatgaagtcctggagaacatttatggactcatggagggcaaagacccagccaccactggcgctactgtgagtgacagccttcatccccttgaccctacttccctaaatccccattgttccagtctaccctccctaaccctgccaactgtgtgactgtagagacagggccgaaacagactttag

SEQ ID NO: 195895 - DNA, 703 bp, Homo sapiens
  Payload ID: 18654
  Gene Name: tubulin polymerization-promoting protein family member 2
  Uniprot ID: P59282
  ENST ID: ENST00000530140
  CDS Start-End: 117-629
gggaagggtcagaccaccatccgggtactctaaggtacataaaagagtcctccctcccccttctccttcacccccaagtgtctcccacgactgccctccccgacctctagctgaccatggcatcagaggcagaaaaaacattccatcggtttgctgcgtttggagaatcatcaagcagtggcactgaaatgaacaacaagaacttctccaagctgtgcaaagactgtggcatcatggatggcaagacagtcacctccacggacgtggacatcgtgttcagcaaagtcaaggccaagaacgcccgaaccatcacgtttcaacagttcaaagaggcagtgaaggaactgggccagaagcgcttcaaagggaagagtccagatgaagtcctggagaacatttatggactcatggagggcaaagacccagccaccactggcgctactaaagcaacaacagtgggtgcagtggaccgtttgacagacaccagcaagtacaccggcacccacaaggagcgctttgatgagagtggcaagggcaagggcattgcgggacgggaagagatgactgacaacacaggctatgtgagtggttacaagggttctggcacctacgataagaagaccaagtagagaggagcttcatctcagcctgctagccccctgaccctgcatgtttaacaccagggagcttggaaaacaataaa

SEQ ID NO: 195896 - DNA, 687 bp, Homo sapiens
  Payload ID: 18654
  Gene Name: tubulin polymerization-promoting protein family member 2
  ENST ID: ENST00000495665
  CDS Start-End: 1-332
tccatcggtttgctgcgtttggagaatcatcaagcagtggcactgaaatgaacaacaagaacttctccaagctgtgcaaagactgtggcatcatggatggcaagacagtcacctccacggacgtggacatcgtgttcagcaaagtcaaggccaagaacgcccgaaccatcacgtttcaacagttcaaagaggcagtgaaggaactgggccagaagcgcttcaaagggaagagtccagatgaagtcctggagaacatttatggactcatggagggcaaagacccagccaccactggcgctacttttccctggttacctatgcaagaaacctgaaagtgatcctagacccctccacctccccaatcccagctacggggaggcggtcctgcatggtggttaagatcaaggcttttgagtgaaacagaccaggaattgaatcctgcctctgcagcttacaaactgcacaccatctatctgtttacgaaaccactgaaagcttccttgtttcatctgttcatgaggatagtattttttacctcacggcagtatgaggatccattaagatgtatatcaagagtttttagaccagtgcccggcacatgtggatgctctcgtctcgcctggacagcacacacactccaactccagtaagactcaactcaaatatatctcttatacaacttcaaga

SEQ ID NO: 195897 - DNA, 488 bp, Homo sapiens
  Payload ID: 18654
  Gene Name: tubulin polymerization-promoting protein family member 2
  ENST ID: ENST00000555751
  CDS Start-End: 1-191
cccgaaccatcacgtttcaacagttcaaagaggcagtgaaggaactgggccagaagcgcttcaaagggaagagtccagatgaagtcctggagaacatttatggactcatggagggcaaagacccagccaccactggcgctactctgcttccaagaacaggatggaagaatatatttggagtaaagagatgaaccagatgtggagtttccctggttacctatgcaagaaacctgaaagtgatcctagacccctccacctccccaatcccagctacggggaggcggtcctgcatggtggttaagatcaaggcttttgagtgaaacagaccaggaattgaatcctgcctctgcagcttacaaactgcacaccatctatctgtttacgaaaccactgaaagcttccttgtttcatctgttcatgaggatagtattttttacctcacggcagtatgaggatccattaagatgtatatcaagagtttttagacc

SEQ ID NO: 195898 - DNA, 1116 bp, Homo sapiens
  Payload ID: 18655
  Gene Name: tubulin polymerization-promoting protein family member 3
  Uniprot ID: Q9BW30
  ENST ID: ENST00000290942
  CDS Start-End: 237-767
ggcggagccgcctgggctgcagtcccacccgggagccggcagggagcggagctgcggagccgcctggtctcccgcgtccatcggtccattcctgcgtcgttctgtccttccgaacgcacacttcaggagcagccgcgaggagtgagcactgcacgcaggatccgcccagtgcttgggccaagcaccctgtggcatccaagctcccctggacgttacccttggtgaaccaaggtggcatggcagcgagcacagacatggctgggctggaggagagcttccgcaagtttgccatccatggtgaccccaaggccagtgggcaagagatgaatggcaagaactgggccaagctgtgcaaggactgcaaggtggctgacggaaagtccgtgacagggaccgatgtggacatcgtcttctccaaagtcaaggggaagtctgctcgggtcatcaactatgaggagttcaagaaggccctggaagagctggcgaccaagagattcaaggggaagagcaaggaggaggccttcgatgccatctgccagctggtggcaggcaaagagccagccaatgtgggcgtcactaaagcaaaaacagggggtgctgtagaccggctgacggacaccagcagatacacgggctcccacaaggagcgcttcgatgagagcggcaagggcaagggcattgcgggacggcaggacatcctggacgacagtggctacgtgagcgcctacaagaatgcaggcacctacgatgccaaggtgaagaagtgaggcttgggaagaccgccctgccaagtgcggctgcccctgccagaggctcaggcctgggtctaaggggcacgtggagcaagagatcctggtcccctccctgctggacctgccacccagagcttcctgcctagtcccactgggctggcccaccaggcctctgacccaggctgctctgcggccccttcctcctcctcttcctgctccaacttctgtccacctggggacagtctgtgcctgtagcctcatgaccccaacccagccccaggcatggctaacccctgactgcttgcctcatatttaagctgctgctctggccaagtgcctaattttaacccagacctcaataaag

SEQ ID NO: 195899 - DNA, 1058 bp, Homo sapiens
  Payload ID: 18655
  Gene Name: tubulin polymerization-promoting protein family member 3
  Uniprot ID: Q9BW30
  ENST ID: ENST00000393957
  CDS Start-End: 163-693
gaaacaggggataatacggcggagccgcctgggctgcagtcccacccgggagccggcagggagcggagctgcggagccgcctggtctcccgcgtccatcggtccattcctgcgtcgttctgtccttccgaacgcacacttcaggagcagccgcgagggtggcatggcagcgagcacagacatggctgggctggaggagagcttccgcaagtttgccatccatggtgaccccaaggccagtgggcaagagatgaatggcaagaactgggccaagctgtgcaaggactgcaaggtggctgacggaaagtccgtgacagggaccgatgtggacatcgtcttctccaaagtcaaggggaagtctgctcgggtcatcaactatgaggagttcaagaaggccctggaagagctggcgaccaagagattcaaggggaagagcaaggaggaggccttcgatgccatctgccagctggtggcaggcaaagagccagccaatgtgggcgtcactaaagcaaaaacagggggtgctgtagaccggctgacggacaccagcagatacacgggctcccacaaggagcgcttcgatgagagcggcaagggcaagggcattgcgggacggcaggacatcctggacgacagtggctacgtgagcgcctacaagaatgcaggcacctacgatgccaaggtgaagaagtgaggcttgggaagaccgccctgccaagtgcggctgcccctgccagaggctcaggcctgggtctaaggggcacgtggagcaagagatcctggtcccctccctgctggacctgccacccagagcttcctgcctagtcccactgggctggcccaccaggcctctgacccaggctgctctgcggccccttcctcctcctcttcctgctccaacttctgtccacctggggacagtctgtgcctgtagcctcatgaccccaacccagccccaggcatggctaacccctgactgcttgcctcatatttaagctgctgctctggccaagtgcctaattttaacccagacctcaataaagacaccttttgtaccaa

SEQ ID NO: 195900 - DNA, 1410 bp, Homo sapiens
  Payload ID: 18655
  Gene Name: tubulin polymerization-promoting protein family member 3
  Uniprot ID: Q9BW30
  ENST ID: ENST00000562206
  CDS Start-End: 552-1082
cccgggagccggcagggagcggagctgcggagccgcctggtctcccgcgtccatcggtccattcctgcgtcgttctgtccttccgaacgcacacttcaggagcagccgcgaggtagaagcccataggagacccagatgcccgccaccccaatcagtatcctgcacgatgagggttggggggagcagcctggaaagggtcccaacctccggcggtcccagccgaggagccagctgagcggccctgccctggccccaagcattccacctcgcagcccccacctcctggtccggctgattgatgactccagctgtcccagtgggagcgggacgggtggctccagttcacgggtgtggccactccatccatggcctgcagacccatggggctgcggcctgcaacccagcgccacctgaccgcgctgagatgaccaagaatccatctttccacggacaggagtgagcactgcacgcaggatccgcccagtgcttgggccaagcaccctgtggcatccaagctcccctggacgttacccttggtgaaccaaggtggcatggcagcgagcacagacatggctgggctggaggagagcttccgcaagtttgccatccatggtgaccccaaggccagtgggcaagagatgaatggcaagaactgggccaagctgtgcaaggactgcaaggtggctgacggaaagtccgtgacagggaccgatgtggacatcgtcttctccaaagtcaaggggaagtctgctcgggtcatcaactatgaggagttcaagaaggccctggaagagctggcgaccaagagattcaaggggaagagcaaggaggaggccttcgatgccatctgccagctggtggcaggcaaagagccagccaatgtgggcgtcactaaagcaaaaacagggggtgctgtagaccggctgacggacaccagcagatacacgggctcccacaaggagcgcttcgatgagagcggcaagggcaagggcattgcgggacggcaggacatcctggacgacagtggctacgtgagcgcctacaagaatgcaggcacctacgatgccaaggtgaagaagtgaggcttgggaagaccgccctgccaagtgcggctgcccctgccagaggctcaggcctgggtctaaggggcacgtggagcaagagatcctggtcccctccctgctggacctgccacccagagcttcctgcctagtcccactgggctggcccaccaggcctctgacccaggctgctctgcggccccttcctcctcctcttcctgctccaacttctgtccacctggggacagtctgtgcctgtagcctcatgaccccaacccagccccaggcatggctaacccctgactgcttgcctcatatttaagctgctgctctggccaagtgcctaatt

SEQ ID NO: 195901 - DNA, 1736 bp, Homo sapiens
  Payload ID: 18655
  Gene Name: tubulin polymerization-promoting protein family member 3
  Uniprot ID: Q9BW30
  ENST ID: ENST00000564104
  CDS Start-End: 843-1373
agtgggaggttacagcaccagtcggtggcaaggggccaggaagccacggttatgccctaggcgcagggagtgctggcgtgccccacccgtgggccccagcttcccagcccagcccagcccctcagcactgggagcttctccctgagctgccctgacaccatcctgcccttagcaacattctccaagcagcaccaccctcccttagcaaccgtctccaggcttcacaaactgtggccaggccagccccaagctcccctcatgtttttgtttaacagcaaatagtaacaaggccttgctggaccagctgcacccctgcccagggcatgcacccgtgcccagactggctcttgctgggtcctcatgacccttacagagatgctgtcctcactgaatgcctgcccgaccagcagcctggcctggccccaagccagcttggcatggagcttccagggagggggcctgctctgccaccctcacttccacccaagcaaggccttgtgccagggccagacaaagccagggccccagctgctgccctaacagtctttctggacagtgccactctgttccctgtgggcatcattatttcatctgctgaaccctgctgagagccagggctggcattagtgacaagaccgtgcctcccggggctcttccttggggctctgtggcccagggcgacagtgacgggcccctctccccaggcagctccagcaccaactctgtagcagaacctgcccaggtcttgcaggtttgaggtagaggctgggatgttctgggcttgggggaggggaagggcagattggctgggagatgacccaggtgggtctctatagggtggcatggcagcgagcacagacatggctgggctggaggagagcttccgcaagtttgccatccatggtgaccccaaggccagtgggcaagagatgaatggcaagaactgggccaagctgtgcaaggactgcaaggtggctgacggaaagtccgtgacagggaccgatgtggacatcgtcttctccaaagtcaaggggaagtctgctcgggtcatcaactatgaggagttcaagaaggccctggaagagctggcgaccaagagattcaaggggaagagcaaggaggaggccttcgatgccatctgccagctggtggcaggcaaagagccagccaatgtgggcgtcactaaagcaaaaacagggggtgctgtagaccggctgacggacaccagcagatacacgggctcccacaaggagcgcttcgatgagagcggcaagggcaagggcattgcgggacggcaggacatcctggacgacagtggctacgtgagcgcctacaagaatgcaggcacctacgatgccaaggtgaagaagtgaggcttgggaagaccgccctgccaagtgcggctgcccctgccagaggctcaggcctgggtctaaggggcacgtggagcaagagatcctggtcccctccctgctggacctgccacccagagcttcctgcctagtcccactgggctggcccaccaggcctctgacccaggctgctctgcggccccttcctcctcctcttcctgctccaacttctgtccacctggggacagtctgtgcctgtagcctcatgaccccaacccagccccaggcatggctaacccctgactgcttgcctcatatttaagctgctgctctggccaagtgcctaattttaacccagacctcaataaagacaccttttgtacc

SEQ ID NO: 195902 - DNA, 14269 bp, Homo sapiens
  Payload ID: 18656
  Gene Name: tubulin tyrosine ligase
  Uniprot ID: Q8NG68
  ENST ID: ENST00000233336
  CDS Start-End: 192-1325
gcgctttcctctccggcacccggcgggcgcccgggcgcggcgccgccggcacccgagaggcgcggtagccggcgcgggcggcgggggccgggccgcggcgggcgcccgggcggggtccgcgctgagccgccttctcggccgcctggtccctgcggcggctgcccggcggcccgggcgcgcggcgcttcgccatgtacaccttcgtggtacgcgatgagaacagcagcgtctacgccgaggtctcccggctgctcctcgccaccggccactggaagaggctgcggcgagacaaccccagattcaacctgatgctgggagagaggaatcggctgcccttcgggagactgggtcacgagcccgggctggtacagttggtgaattactacaggggtgctgacaaactgtgtcgcaaagcttctttagtgaagctaatcaagacaagccctgaactggctgagtcctgcacatggttccctgaatcttatgtgatttatccaaccaatctcaagactccagttgctccagcacagaatggaattcagccaccaatcagtaactcaaggacagatgaaagagaattctttctcgcctcttataacagaaagaaagaggatggagagggcaacgtttggattgcaaagtcatcagccggtgccaaaggtgaaggcattctcatctcctcagaggcttcagagcttctcgatttcatagacaaccagggccaagtgcacgtgatccagaaatatcttgagcaccctctgctgcttgagccaggtcatcgcaagtttgacatccgaagctgggtcttggtggatcatcagtataatatctacctctatagagagggtgtgcttcggactgcttcagaaccatatcatgttgataatttccaagacaaaacctgccatttgaccaatcactgcattcaaaaagagtattcaaagaactacgggaagtatgaagaaggaaatgaaatgttcttcaaggagttcaatcagtacctaacaagtgctttgaacattaccctagaaagtagtatcttactacaaatcaaacatataataaggaactgcctcctgagcgtggagcctgccattagcaccaagcacctcccttaccagagcttccagctcttcggctttgacttcatggtcgatgaggagctgaaggtgtggctcattgaggtcaacggtgcccctgcatgtgctcagaagctctatgcagaactgtgccaaggcatcgtggacatagccatttccagtgtcttcccacccccagatgtggagcaacctcagacccagccagctgccttcatcaagctgtgacagagggcactccctgctgccttggaaaaagcacggggtcctgctccagggaatggtgaaatgactggattgctctttatccagcccacagcaggggaaagaaaggcaactcgcaaagatgagatggaagaaggcacgtgagcagaggaggcagctcccaaagagagggctgctcagggggcttcccagatgtagctctcagcagtgctgttgagacttttgaaaacaactttggtacacaaaggcagctttgtgagcagagctccttcccctctccccgggaacggcagggcactgggacctctggtcggtgcctcccacccactgcagccctagtgccttagctccatgcccggctgcagccccactgctctggactatggattggacgtcagagcatattggaggttgcctgtgtgttccccacccatcccttcggtaacactctgccacactaagctctgtacaagcatgcaccaacagtccttagttttgtgctgtgcactggcctctcggcaaaggtggtttccctcatcaccttcctgatggtgtttggtcagtcacctgtcagggtttgtgcgggttgggccccaaaacagcatatgctgctctaagtctgctctctgcatgttttagaaacaaagtggcaagtctgccctgaacctgtaagcatcaaataagcatgagagagaaaaaaacatgatatattgctttacttaataggttgaatatggtaggtctttgaaaatatgatgattcaattttctcaattttctttgctttaaccaaaattctaaatgcagttttgcctagttccctttttttttctttttttacttttttttaaacgtttgtaaaaacctctttgaggatgaggagtcagtaaaattccactccccaagtggccctgccccagacaaaggttgctttccccctttttgttctttttatgcccccaagcactttctgcagtagctagagggacaggtttccttccaggaaggattcgagttcctgtgcctgtgggtattaggagagtatatatcctgcctgaatggggaagtcttctaaaatgggaaagaagtggtttcatctccacacagtgtcttgtaaatctcaacaaatgtgtactgttagaagtggcttccgcttactggattaactaatactttataggcttttcaggaggccacatcactagcagtagggagaacaagatgtcatttgtgttcagtgtaagctgagtaaacaggcccttcctagagtgtcctggaaatcacagcaacccattgaaaactgccctccccaccagaacgtgctacgttctttcttcatgcctatgtgtgctccattcctcatttctacttggctcaagaaaacatttctgcagtcaggtgagacttttacaaaagaggagaaaatcaatgcctccttgaacatgatgagatgtgagaacttacaatgaaaaaggcaataatgatagaaattatttcttaggtacagcaatagttgataggatgtgagggtgttaccttggggtgaagtggagaaggtcccaggtgaattggctctcatggaaatttggaattacaaaataaacgtcctgggggttacccagaatacagatttaaaagtttgcctgtagagcaaaataaaacagtcagttgtagtcattaatccttgaggcccaacgcagccgatgggttggtgtttgggaaattctgagatgggagtgagatctgatcggatcctgggaagatgtatacccagttagaacgtgtagggttctgggtccctggcaagtctaggtgggcgggtgacagggaaagcatgggcatttttgtattgctgtcacatgctaacagaggtttgtaattatcttttggacccaaattatagagacattcacgagttttctagccctcacagtaacagagctaagaattcagatgtcaggaagtctgtgaatcttgatggattttctgagaaacctgactcaatggcatatataagagggaagtaagacttttaagaaaagaaaaagttatgcctcattcctcatgtggcttccaataagtatcttaggaacttatttcctttttaaaaaatattttttaaatttttaaaatttgattttaaatttcaaataaatttaaataaattttaaataaattttaaataaaattttacagagacgtggtctcactgtgttgcccaggctggattgcagtggctattcgcagttgtaatcatagcacactgcagcctcgaatttctgggcttgagcagtcctcccgtctcagcctcctgagtagctgagactacaggtgcacaccaccaagcctggctttatgtatttatttctgttcatgcggaatgattggttcagaactgttcctttcccttccatgatgtccttgacacagaaggttatgcctggctcccagtcaggcttcatacttttggtccatgtaagtgctacccgttgctgggggaggagtcatggtttatttggaaatgtcagttgcaatcatggttctgtcatttgactgcacagtatcagaggagcctgttaacctctctgtgccttagtttcttagcccatgaaagagatcattgcctgacccagggactacctcaagggcttttgatgaggacaagtgacagtaggaagatgcaagagcctttagtaccaaggttctcaacactgactacatgctggaatgactgtgaagcttttaaaaaatgttagtgcccactcttcccctgtacccccggacagttaaatcagaacctcagacagcaatatgccttgagatgccttgaaccatgcttgagaaggaaggacaaacacattattatcttggaagaattgcataaggcttatgacttaaaaaaaaaaattctttttggaaacacaagcatttctttaaggatgaccggatgttgccgtatgtatttatggcacaagcaggtgttgtctaagcagtttctctgtttgcttgtcatagcagcatttggaaactcaaacatgctttcatttacataaatagtttatgaagctttgacaacaaatgtaaacagacacgaaattataaatctgctaaatatgtattaagggtattaattattgaaagtccctttccccaaaactcaactcctatggcaattatgaactccattttaccaagaacatttaagtgcctcagcatctgtatgatatagtggagcaggtgctgacataggtaccagctgacatgatgtgtcactagctctgtgggatgattgccacatacatggaacacctgggagtgctggaaatgtactgtgatcgaagtgacaaagtgtgttttcattcacagtggaggctacatcaagcaaggggaggtccagccctcttgcaagtgtggtgagaggctctactagcaaagacatgggcaccggagtaggtcccgtgtagcatgcgggtgctgtagagaaaattcagtgacgtacatggctctggttctggacacaaaatctgtactggagaggaaatgactgctgaaataaggcgattgtatgaatatttaaaatgcctggaacactaaagtaaagtaatgatatttcaagtgtttttgtgctctttggttcttgttgtaggtattgactgtcctgggatatcactggtcatttaaattcaccatataattagccgggcatggtggcatgtggtggtggctgaggtgggaggatcgcttgaggctgaggtgtgaggctgcagtgaaccatgttcacaccactgtactctagcttgagcaacagagcaagaccctgtctcaaaagtaaataaataataaagtaaatataaatccatgatgccgttactcaggggtagacagactttctgtaaaaggccagataataaatctgctaggctttgcaaaccatgtagggccttttttgcatactttttgtttttttctccaactcttagctcataggccgtataaaagcaggccagatgtgcagtaatttgctgaccccaggatgttacccaatacataagccaacagattgtccttcaaaactgatgagcttctcagtgaagcactgagactatttcagctgccaaagtcccagcccatcgtttcttacgtgtcttgtgtatcgagttcttgtaaagcatttcaccaaggccaggtttttaaatacctataaacctcacacacctgagatgcttagtcttgtggatagaaagagtttcattaatgcaaattgttattaacttgtaacttcttgtgcaataaggctgaatgctttggacatctttcctttgtatggctggcctgccttctgtggctgcttccacttcataaatatacctctggcacagaggaggtttccatgccagaagccctgtgtaggcactccactccaaacaggtttcacatacactatgacacattcccagtggactcagcagagattgcatgggcagggtgcagggtgcagggtgcaagcagacatggatccaggcaggcacctacttaggaccctgagagtggacaggcccaaagcctttggaagacttctcttaaagactggtcccacttcctgtcagtagctacacctccttcttaacctgaagttctcccataacccatattttagaagtgttttccccaaagcatccctccatatcttagtctattttgtattgccataacagaatgttacagagaagtgtatgtggctcacggttctggaggatgagaagtccaatatcaaggggctatatctggtgagggccttcttgctgcctcagcatggcagaaggcatcacatggcaagagaggaatggagtctaactcaccctttaactagcaacccattcctgtgataactaacccactcctggcataacatcattaatttattcatgagggtagagctctcgtgacctaacctcttacaggtcccacctctcaacactattgcagtagagattaagtttccaacacatttactttggggaacacattcaaaccatagcagtccctgaaggcaaaggaaaatgaacccctctccaatgcaatacatagtagcagaacttgaagattgttgcaagcataattcctttcaaaaattatgagaggacatcagtgggcataatagagtaacaacctctgaaaaccctctcttccataaaagcaatgagaacactagcaaaactgtctagacattaaccagaggcttgcagcaatccatttattcaagaaaaggcctgtaatcccagcacttcgggaggccaaggcgggcgatcacgaggtcaggagatggagaccatcctggctaacacagtgaaaccccatctctactaaaaatacaaaaaattagccgggcgcggtggcaggtgcctgtagtcccagctacttgggaggctgaggcaggagaatggcgtgaacctaggaggcagagcttgcagtgagccgagatcacgccactgcactccatccagcctgggtgacagtgcgagactctgtctcaaaaaaaaaaaaaaaaaaaaaaggaaagggttgcatctgggtaagaaaagcaagctttctgacattttaatgtaccctattcccactccccctttccccagctccacaacagcctcggccacacaatcatgctgacatccagcagcagagcagccaccgtagggctcagaaggggattggaactcctccaaagcttcattaccagagaattgccatttggcctttttggtagttccatgtaagtccctactcctaggtcttgtctttatttgatgtgactaagaggttacccagtgtgaacaaccttttccctgggtgcatttgtcaaaaaaaatcaacagcaattgttgaacatctcagcttcctaaggtggctgtaacagttggaacaaacaaactgaccaaaagacttagaaggaaaaactgggaatgagatttctataggacgttttgaaaagcttcaacctattcctaagaatgcagaaggccacacacatgtgtaggactgtgcacatgcccagaagagacctgagaattccccagctctttcgtctgaccttaagtgtctgcacaaacagagaggacagaggcagaaggagggaaagagggagggaggaaaggtaggaaggggagaaagagagaggaagaaagagaaaggaaagaaaggcaggcagaaagaaggagaaagggagggagggagggaaaggagggagggaagaaaagagaaagattgagaaagaaaaaagagaaagaagaaagaaaagaaaaaaggaaagaaagttagtttataaaatagaaccaagtagaaattttagagttgcaaagtacaaaaatgcaaatgaaagatttacttgagaagtttaaaaaatgtgtgaactggtaaaagaagtaatcagcaaattagaagtcatttgagattatccagtctgtggaacagaaaaaaaaaatcagcaaagaaaaatgatcagtgcttcagacacccgtcagacaccatcaaacataccaacatacacataataggagtcctagaatagataagtgagagagagggaaggggataaaacatatactggaagaaatagtggccaaaacctttcccactttgaggaaaaacattaaagtgaatccaagaagctcaacaaattctaagcaggaaagactcaaagagtccacctcaagacacaccagccactaagtaaataattttaaatatatagtaaaaaatgacaaggaaacagaaatgttacactagaaaatatataagaaaagagaaggaagtaatgaaaaatagaggagaaaaaaaaggcaagaggcctaaagaaaccaacagtaaaatggtagataaatcctgccttatcagtaatttcattaaatgcaaatgaattaaatactccaatcagaaggtagagattggcaaattgattttttttaaaaatcatgatccaactatatgctatctacaaaaaacacacttcattttatttttatttttattatttagagacagagtcttgctctgttgcctaggttggagtctagtggtgtaatgatagctcactgcagcctcaaacttctggtttcaagtaatcttcccaccttagccacccaagtagctggaactataggtgcctgccaccatacttggctaatttaaaacaatttttttagagataggacctggcttacttcaaaacttacctggctaatttcacttcacataacgatcttcagttccatccatgttgttggaagtgacaggatctcactctttatggctgaacagtactccattgtgtataagcaatatattttctttatccattcatctgctgatggacacttaggtcgcttccaaatcttggctattgcaaacaaggctgcagtaaacatgggagtgcagatatctctccaaaaaaaatttttttttttttagagatagggtcgtactgtgtttcccaagctggtcttgaactcccgtcctcaggcaatcctcctgcctcagtctcccctaagcagctgggattacaggcatcagccaatgcacctggcaaaacacactttagattcaaaaacacaaacaggttgaaagtaaaatgatggaaaaagatataccatgcaaacagtaactcaaagagaagtggagtagctatactaatgttagacaacataaactttaagaaaaaaattgtttctatagacaaagaaggacttttttttaatagttccaacttttattttaaattctggaggtacatacacaggtttgttacatgggtcctgaggttggggtacagatcccattacccaagtagtaagcatagtacctaatggttagctttccaatccttgcacccctccctcccttctccctcttgtcatctttagtgtctcttgttgccatttttgtgtccatgtgtatctaatgtttggctcccacttatgagactgtgcaatatttggttttctgttcctgtgttatttcacttaggataatggcctccagcagcatccatgttactgcaaaggacatgatttcattcttttttatggctgcatagtattccatggtatatatgtactatattttctttatccaatccactgttgatgggcacctaggttgattccatgtctttgctcttgtgaatagcactgtgataaacatataggtgcatgtgtctttctggtagaatgaattgttttcttttggatatatacccagtaatgggaggctatgttgaatggtagctctgtttttgtttgtttgtttgtttgtttggtggagtctctctctgtcacccaggctggagtgcagtggtgtgatctgtgctcactgcaacctccgcctcctgggtttaagcgattctcctgcctcagcctcccaagtagctgggactacaggcgtgtgccgccatgcccagctaatttctgtatttttagcagagacagggtttcaccatgttggctaggctggtcttgaactcctgacctcaggtgatcgacctgcctcagcctcccaaagtgctgggattacaggcatgagccaccatgcccagctgctctgttttaaattctttgagaaatctccaaacttctttccacagtggttcaaccaatttacattcctgccagcagtgtataagcattctctttttttccttagcctcttcagcatctgttattttttgactttttaatatagctattctgactggcgtgagatgatatcttattgtggttgtgatttccatttctctgttgattagtgatgatgaacattgtctcatatgtttcttggccacttgtatgccaaggacattttatattgataaaagggtcagtccattaggaaaatatgacaattataaacatatgtacctagcaatacagcctaaagatacatgacataaaaacttagagaattgaaggaagaaacagacaatttaactacaatagttggaaccctcaaaactccatttcaataatagctagagcaactaggcagaagatcaacaagaaaatagaaaacactataaaccaactagacttgacaaatatctacaaggcactccacccaacagcagcaaaatacacatccttctcaagtgcacatggaacattctctggggtagatcacatgctaggccataaaacaagtctcagtaaatttaaaagaattgaaattatactacatatgttctctgaccatgttggaataaaatcagaaatcagtaacaaattttgttaatttctgtattaatgaagaaatatacaagtaaagaggttggactaataataattcttttaaaacttcccacagggaaaagcccaggaccagattgtaagccagatggtaaggaattaacaccaatatttcatagagtctcctaaaaaatagaagagaagaaaatactcctcaattgagaagagtgtcctcaactttatgaggtcactcttaataccctgataccaaaaccagacaaagatgtcacaagaaaagcaaatagcagaccaataatctcttgggaatacaaacggaaaaaatcttcaacaaaatactagtaaaccaaatccagcaacatagaaaaaggattatacattatgactaagtgggacttatcctaagattacaaagtttggaataactcatgttctcttgtaagtggaagctaggctgagcacggtggctcactcctataatctcagcacttttaggaggccaaggtgggcagatcaaatgaggccaggagtttgagtccagcctgggcaacatgattaaatctggtctctataaaaaatacaagaattagccaggcatggtggtgcatgcctgtaatcccagctactctgatggctgaggcacaagaatcgcttgaacctgagaagaggaggttgcagtgagcagagatcgcacaactgctctctgtcctaggtgacagagcaagtcctgtctcaaaaaaattaaaaagtgggagctaaacattgggtacacatggacataaagttgggaagaggccagtcgcggtggctcacgcctgtcatcccagcactttgggaggccaaggcgggcggatcatgaggtccggagatcaagaccatcctggctaatatggtgaaaccccgtctccactaaaaatacaaaaaattagccgggcgtggtagcaggcgcctgtaatcccagctactcaggaggctgaagcaggggaatcacttgaacctggaaggcggaggttgcagtgagccgagattgcgccactgcactccagcctgggtgacagagactctgtctaaaaaaaaaaaaaaaaaaaaaaaagatgggaacagcagacactggggactactagagccaggagagaaggaggggagcaaagattgaaaactacctattggatactgtgctcgctacctgggtgacaggttcaaccataccccagacctcagcatcacccaatatacctttgtaacaaattcgcacatgtacccccctgattctaaaataaacgttgagaaggggaaaagaaagaatgcaaggtttttttaacatacaaaatttacttaatataatataccactttaatagaaaaaagaggacaaaaagcacatgatcatttcaatatacactgaaaaagcatttggcaatacacaacactctttcttggaaaaaacctttcaacaaactagaaataaattacttcctcaacatgataaagagcatctttggaaaaacccacagcctacatcatattaatggtgatgtgaaagctccagttgggagctttcttcccaatatcaggcacaaaacaagtatatttattcttgtcacttcaacattgtattaaatgttctagacagagcaattcgacaaaaggaaggaaagaagactgcgcattcagattggaaagggagaagtatgatgatctctctttgcagacgacaagataccatatagaaaaagtcctaagaaatccacttacgctgttagaactaataaagagtttagcaagattgccagacacaagatcaatatacaaaactcaatggtatttctacatattacaaacaatttgaagttaagaaaacaattccatttatatcaacaccaaaaagaatgaaatacttaggaataaatttaacaaaagttcatttctacaccaaatactacaaaacatctctgaaagaaattaaagaacacctaaataaatggaaagacatcccatgtttatggattgggagataattattgttaggatgaaaataggccccaaattgatctaccaattgaacacaatcctgatcaagaatctcagccttctttgcagaaattgacaagctgggccgggtgtggtggctcacacctgtaatcccagcactttgggcggccaaggcagatggattacttgaggtcaggaattcaagaccagcttggccaacatggtaaaaccctgtctctattaaaaatacaaaattagccaggcatggtggtgcatgcctgtaatctcagctatttgggaggctgaggcaggaggtagaggttgcagtgagccaagatcatgccactgcactccatcctcagcaacaagagcaaaactctgtctcaaaaaaacaaaaaacaaaaaaaaaaaaaaaagagaaagaaattgacaagctaagctgacgctaaaatccatattgaaatacaaaggatcaaataaatctggagaaagaagaacaaagttggaggatgtgcacttcctgatttcaaaatttattacaaagctgtattaatcaaatctgtgtagtttgtagacagatatacagataaatgtagatagacatacagatcaagagaatagaactgagagtcaaaaataaacccttgcatctatagtgaactgattttcgacaaggaggccaagacaatttgatgagggaaagaatagtctttttaacaaatggtgttaggacaactggatatccacatgcaaaggaataaagtgatatgcctttctcacaccatatacaaaaattagctcagaatgagtcaaagacttaaatgtaagagttgaaactacaaaactcttagtagaaaatataggtgaaaatccccatgattgaaaaatatctagtatttgatagcacaacagggtgactgcagtcagcaataatttgttgtaccttcaaaaataactgaggaagtacaattggaatgttcatgacagaaatgatgaatgcttgaggtgatggaaaccccatctaccctcctgtgatgattacatcgtatgcctatatgaaaacatctcatatacctcataaatatgctaattatgtacccataaatttttttttaaatcctcatgaccttggattacacaatgatgtcttagatatgatataaaaagacaggcaacaaaagaaaaaaactacacttcaaaattaaaacgttttgcttcaaaggacaccagcaagaaagtaaaaacccacagaatgggagaaaaatatttgcaaatcatggatctgacaaggactagtataggctatataaagaactacaactactcagttggccgggcgcgcgcggtggctcatgcctgtaatcccagcatttagggaggcaaggcgagaggatcactagaggccggaagttcaagaccagcctgtgcaacagactcccggctcgaattttttataaaaagtgatataggaatgaaaagtaccagctgaactaggaaaggggaagttgacagtaaggagggactatcaggggcaggaggatactgggtagtggtggtttaattcattgttttaattgtggtgatggctgcatggttgtatacataggtcaaaacttaacgcgtacactttaaatgtgtggtttattgtatgccagttataacgcaatatagctgttaaacacaaacacaataaagttgaaaaacca

SEQ ID NO: 195903 - DNA, 1645 bp, Homo sapiens
  Payload ID: 18657
  Gene Name: tubulin tyrosine ligase-like family member 1
  Uniprot ID: O95922
  ENST ID: ENST00000266254
  CDS Start-End: 242-1513
agtgcagcgcggggcggggcgggccggtgcgcctggcagtcggctgcgtactcctgcgagcgccggagaggggctggaggcggggcgagggcgcggctcgaggcatccctgcagggcgctcctccgagtccctcggcgctctgagcccacagggaagaaggaggggccggcgtcagtgacgtcagcgagaccgaggtgagcgtgggcgttgccagtggtgctctgtcagtgcctatggattatggcagggaaagtaaaatgggtcactgatatcgagaagtcagtgctgatcaataactttgaaaagagaggatgggtccaagtgacagaaaacgaggactggaatttttactggatgagtgtgcaaaccatccgaaatgtgttcagcgttgaagctggatatcggctctcagatgaccaaatagtcaaccattttccaaaccactatgaactgacccggaaggacctgatggtgaagaacatcaaaagatacaggaaggagctggagaaagaagggagtcctctggcagaaaaagatgaaaatggaaaatacctctatctggactttgttccagtcacctatatgctgcccgctgactacaacctgtttgtagaggagttccggaagagcccgtccagcacctggatcatgaagccttgtggcaaggcccagggaaagggcatcttccttatcaacaagctctcacagatcaaaaagtggtcccgggacagcaagacatcttcgtttgtgtctcaatctaataaggaagcctacgtgatctctctctatattaacaacccgttactaattggcgggaggaagttcgacctgcgcttgtacgttctggtgtccacgtaccgtccactgcgctgttacatgtacaagcttgggttttgccggttctgcacagtgaaatacaccccgagtaccagtgagctggacaacatgttcgttcatctcaccaacgtcgccatccagaaacacggggaggactacaaccacatccatgggggcaagtggacagtgagtaacctgcggctctacctggagagcacccgcggcaaggaggtgaccagcaagctgttcgacgagatccactggatcatcgtgcagtccctgaaggctgtggcgccggtgatgaacaatgacaagcactgctttgaatgctatggctacgacatcatcatcgacgacaagctgaagccctggctgatcgaggtgaatgcgtccccgtctctcacgtccagcactgccaatgaccgaatcctcaagtacaacctgattaatgacaccctcaacatcgccgtcccgaatggtgaaatcccagactgcaaatggaacaagtcgccacctaaggaagtcctcggcaattacgagattctgtatgatgaagaattggcccagggtgacggggctgaccgggagctgagaagccgtcagggtcagtctctggggcccagagcaggccgatcgagagactcggggagagcggtcctcaccacctggaagtgagtcccacctggaccttatcaaaactactcactccacctgggcccctgctgaagccctattttgaaatttcccttttgtagagcttttttcctttcctaagccctgtaaataaacgaaggcacttctttggaa

SEQ ID NO: 195904 - DNA, 1185 bp, Homo sapiens
  Payload ID: 18657
  Gene Name: tubulin tyrosine ligase-like family member 1
  Uniprot ID: O95922
  ENST ID: ENST00000331018
  CDS Start-End: 1-1185
atggcagggaaagtaaaatgggtcactgatatcgagaagtcagtgctgatcaataactttgaaaagagaggatgggtccaagtgacagaaaacgaggactggaatttttactggatgagtgtgcaaaccatccgaaatgtgttcagcgttgaagctggatatcggctctcagatgaccaaatagtcaaccattttccaaaccactatgaactgacccggaaggacctgatggtgaagaacatcaaaagatacaggaaggagctggagaaagaagggagtcctctggcagaaaaagatgaaaatggaaaatacctctatctggactttgttccagtcacctatatgctgcccgctgactacaacctgtttgtagaggagttccggaagagcccgtccagcacctggatcatgaagccttgtggcaaggcccagggaaagggcatcttccttatcaacaagctctcacagatcaaaaagtggtcccgggacagcaagacatcttcgtttgtgtctcaatctaataaggaagcctacgtgatctctctctatattaacaacccgttactaattggcgggaggaagttcgacctgcgcttgtacgttctggtgtccacgtaccgtccactgcgctgttacatgtacaagcttgggttttgccggttctgcacagtgaaatacaccccgagtaccagtgagctggacaacatgttcgttcatctcaccaacgtcgccatccagaaacacggggaggactacaaccacatccatgggggcaagtggacagtgagtaacctgcggctctacctggagagcacccgcggcaaggaggtgaccagcaagctgttcgacgagatccactggatcatcgtgcagtccctgaaggctgtggcggtgaatgcgtccccgtctctcacgtccagcactgccaatgaccgaatcctcaagtacaacctgattaatgacaccctcaacatcgccgtcccgaatggtgaaatcccagactgcaaatggaacaagtcgccacctaaggaagtcctcggcaattacgagattctgtatgatgaagaattggcccagggtgacggggctgaccgggagctgagaagccgtcagggtcagtctctggggcccagagcaggccgatcgagagactcggggagagcggtcctcaccacctggaagtga

SEQ ID NO: 195905 - DNA, 1659 bp, Homo sapiens
  Payload ID: 18657
  Gene Name: tubulin tyrosine ligase-like family member 1
  Uniprot ID: O95922
  ENST ID: ENST00000439248
  CDS Start-End: 152-331
gcgcggctcgaggcatccctgcagggcgctcctccgagtccctcggcgctctgagcccacagggaagaaggaggggccggcgtcagtgacgtcagcgagaccgaggtgagcgtgggcgttgccagtggtgctctgtcagtgcctatggattatggcagggaaagtaaaatgggtcactgatatcgagaagtcagtgctgatcaataactttgaaaagagaggatgggtccaagtgacagaaaacgaggactggaatttttactggctccttgaccttcctgaatttcggtacagatcctgtttaaatgagtttcctgacttcagagtctgaaaagggatgagtgtgcaaaccatccgaaatgtgttcagcgttgaagctggatatcggctctcagatgaccaaatagtcaaccattttccaaaccactatgaactgacccggaaggacctgatggtgaagaacatcaaaagatacaggaaggagctggagaaagaagggagtcctctggcagaaaaagatgaaaatggaaaatacctctatctgggtttgtgcgtcttccaccggctcatgttttcaactttgttccagtcacctatatgctgcccgctgactacaacctgtttgtagaggagttccggaagagcccgtccagcacctggatcatgaagccttgtggcaaggcccagggaaagggcatcttccttatcaacaagctctcacagatcaaaaagtggtcccgggacagcaagacatcttcgtttgtgtctcaatctaataaggaagcctacgtgatctctctctatattaacaacccgttactaattggcgggaggaagttcgacctgcgcttgtacgttctggtgtccacgtaccgtccactgcgctgttacatgtacaagcttgggttttgccggttctgcacagtgaaatacaccccgagtaccagtgagctggacaacatgttcgttcatctcaccaacgtcgccatccagaaacacggggaggactacaaccacatccatgggggcaagtggacagtgagtaacctgcggctctacctggagagcacccgcggcaaggaggtgaccagcaagctgttcgacgagatccactggatcatcgtgcagtccctgaaggctgtggcgccggtgatgaacaatgacaagcactgctttgaatgctatggctacgacatcatcatcgacgacaagctgaagccctggctgatcgaggtgaatgcgtccccgtctctcacgtccagcactgccaatgaccgaatcctcaagtacaacctgattaatgacaccctcaacatcgccgtcccgaatggtgaaatcccagactgcaaatggaacaagtcgccacctaaggaagtcctcggcaattacgagattctgtatgatgaagaattggcccagggtgacggggctgaccgggagctgagaagccgtcagggtcagtctctggggcccagagcaggccgatcgagagactcggggagagcggtcctcaccacctggaagtgagtcccacctggaccttatcaaaactactcactccacctgggcccctgctgaagccctattttgaaatttcccttttgtagagcttttttcctttcctaagccctgtaaataaacgaaggcacttctttggaa

SEQ ID NO: 195906 - DNA, 1683 bp, Homo sapiens
  Payload ID: 18657
  Gene Name: tubulin tyrosine ligase-like family member 1
  Uniprot ID: O95922
  ENST ID: ENST00000440761
  CDS Start-End: 233-412
cggggcggggcgggccggtgcgcctggcagtcggctgcgtactcctgcgagcgccggagaggggctggaggcggggcgagggcgcggctcgaggcatccctgcagggcgctcctccgagtccctcggcgctctgagcccacagggaagaaggaggggccggcgtcagtgacgtcagcgagaccgaggtgagcgtgggcgttgccagtggtgctctgtcagtgcctatggattatggcagggaaagtaaaatgggtcactgatatcgagaagtcagtgctgatcaataactttgaaaagagaggatgggtccaagtgacagaaaacgaggactggaatttttactggctccttgaccttcctgaatttcggtacagatcctgtttaaatgagtttcctgacttcagagtctgaaaagggatgagtgtgcaaaccatccgaaatgtgttcagcgttgaagctggatatcggctctcagatgaccaaatagtcaaccattttccaaaccactatgaactgacccggaaggacctgatggtgaagaacatcaaaagatacaggaaggagctggagaaagaagggagtcctctggcagaaaaagatgaaaatggaaaatacctctatctggactttgttccagtcacctatatgctgcccgctgactacaacctgtttgtagaggagttccggaagagcccgtccagcacctggatcatgaagccttgtggcaaggcccagggaaagggcatcttccttatcaacaagctctcacagatcaaaaagtggtcccgggacagcaagacatcttcgtttgtgtctcaatctaataaggaagcctacgtgatctctctctatattaacaacccgttactaattggcgggaggaagttcgacctgcgcttgtacgttctggtgtccacgtaccgtccactgcgctgttacatgtacaagcttgggttttgccggttctgcacagtgaaatacaccccgagtaccagtgagctggacaacatgttcgttcatctcaccaacgtcgccatccagaaacacggggaggactacaaccacatccatgggggcaagtggacagtgagtaacctgcggctctacctggagagcacccgcggcaaggaggtgaccagcaagctgttcgacgagatccactggatcatcgtgcagtccctgaaggctgtggcgccggtgatgaacaatgacaagcactgctttgaatgctatggctacgacatcatcatcgacgacaagctgaagccctggctgatcgaggtgaatgcgtccccgtctctcacgtccagcactgccaatgaccgaatcctcaagtacaacctgattaatgacaccctcaacatcgccgtcccgaatggtgaaatcccagactgcaaatggaacaagtcgccacctaaggaagtcctcggcaattacgagattctgtatgatgaagaattggcccagggtgacggggctgaccgggagctgagaagccgtcagggtcagtctctggggcccagagcaggccgatcgagagactcggggagagcggtcctcaccacctggaagtgagtcccacctggaccttatcaaaactactcactccacctgggcccctgctgaagccctattttgaaatttcccttttgtagagcttttttcctttcctaagccctgta

SEQ ID NO: 195907 - DNA, 2114 bp, Homo sapiens
  Payload ID: 18658
  Gene Name: tubulin tyrosine ligase-like family member 10
  Uniprot ID: Q6ZVT0
  ENST ID: ENST00000379288
  CDS Start-End: 178-1392
acagcccggcccctgccctgcaccaggccactgccctgttggtgaggagggtcggaggggcgacctccctgccccctgctccaagctccccacccccacctggaacctgccggcaggaagcctggccctggagggtggtcacggcccctccccagatgcccggcccacgagaggccaatggggagcagccaggaggagggactccggtgtcagccaagccagccagaccacgacgcagatggacactgtgggccggacctggagggggcagaaagagcctctgccacacccggaccccctgggctcctgaacagccaccggcctgcagactcggatgacactaacgccgccgggccctcagctgccctcctggaggggctcctgctggggggtgggaagccatcgccccacagcacccggccggggcccttcttctacattggaggcagcaacggggccacaatcatcagctcctactgcaaaagcaagggctggcagcgcatccatgacagccgccgggacgactacacgctgaagtggtgtgaggtcaagagccgagacagctacggcagcttccgggaaggagagcagctgctgtaccagcttcccaacaacaagctcctcaccaccaagatcgggctgctcagcacccttcggggacgggcacgggccatgagcaaggccagcaaggtgccggggggggtccaggccaggctggaaaaggacgcagcagcgcccgccctggaggacctcccgtggacaagcccaggatacctcaggccacagagggtcctgagaatggaagagtttttcccagagacctaccgcctggacctcaaacacgagagagaggcctttttcaccttgtttgatgaaacccagatatggatctgcaagcccacagcctccaaccagggcaaaggcatcttcctgctccggaaccaggaggaagttgccgccctgcaggccaagacccggagcatggaggacgaccccatccaccacaagacgccgttccgggggcctcaggcgcgggtggtgcagaggtacatccagaacccgctgctggtggacgggagaaagtttgacgtgcgctcctacctgctcattgcctgcaccacaccctacatgatcttctttggccacggctatgctcgcctcacccttagcctttacgacccccattccagcgacctcggcggccacttgaccaaccagttcatgcagaagaagagccctctgtacatgctgctgaaggagcacacggtgtggagcatggaacacctcaaccgctacatcagtgacacgttctggaaggcccggggcctcgccaaggactgggtcttcaccaccctcaaggtgcgtccactgtgccctccagtctgggagtgagatccctcggggcgggggtgtgtggtcaggctgggcaccaggcacacagatgtccgtggcgtgcgtgggcggctgcgctgaagtgtgacctgaccgtgtggaaccaaacccttccagcgtctctgctcacttagctggcagtgcctgtccccagcagccagcaaaggcccggacggaaagcccagtcgggggtctgtcggcacgagtcccgcgggcagcctcgccgtagggtcaggggacagctcggcttcagtgacagccaccatgtgaagagtctttgttcctttcagatcctccacttggcaggcagggccaacagcagcccccgggccaggtgtcctggagcagcagcagctgcccgtgcaggcccggactctccctagctaagggccatgtgcggtggagtgtcctaattttgcagggttcctttctgtgggggtacctgtggggtacttcaaacagccctagcagcaaaggcccttgagcagcgcggtgtgaaactgggataaaaacggggcttggccgaaggacttttatctgtcttggtcaccccggccaggccccggaagcagcagccagggatggtccttcctcacccacaggcgtgtgtcactgtggctgggacggcagcgctcagaggagcctccagttactttcctcacatctcccaaactctctcttaattgcgataattcacagaacataaaattcacgatcttaaa

SEQ ID NO: 195908 - DNA, 2259 bp, Homo sapiens
  Payload ID: 18658
  Gene Name: tubulin tyrosine ligase-like family member 10
  Uniprot ID: Q6ZVT0
  ENST ID: ENST00000379289
  CDS Start-End: 152-2173
aggaccttgtgggctgggcagcggcctccggccgggaggcaccagctcttcgaacaatgtttaaaagtctcttctgttcatcctaccggggtgccgtctcctgccggtcttttcatctcaccagggccctcgcccgggcaccccccggccaatggaccacagctgcacccggttcatccaccgccggggaccacccactcggacccgagccggcttcaagaggggcaagaggccaaggatccagcagaggcctcgggctcgagtctcagggaccatccctgcgtcacgtctgcacccagcaccggcctcacagcccggcccctgccctgcaccaggccactgccctgttggcccggcccacgagaggccaatggggagcagccaggaggagggactccggtgtcagccaagccagccagaccacgacgcagatggacactgtgggccggacctggagggggcagaaagagcctctgccacacccggaccccctgggctcctgaacagccaccggcctgcagactcggatgacactaacgccgccgggccctcagctgccctcctggaggggctcctgctggggggtgggaagccatcgccccacagcacccggccggggcccttcttctacattggaggcagcaacggggccacaatcatcagctcctactgcaaaagcaagggctggcagcgcatccatgacagccgccgggacgactacacgctgaagtggtgtgaggtcaagagccgagacagctacggcagcttccgggaaggagagcagctgctgtaccagcttcccaacaacaagctcctcaccaccaagatcgggctgctcagcacccttcggggacgggcacgggccatgagcaaggccagcaaggtgccggggggggtccaggccaggctggaaaaggacgcagcagcgcccgccctggaggacctcccgtggacaagcccaggatacctcaggccacagagggtcctgagaatggaagagtttttcccagagacctaccgcctggacctcaaacacgagagagaggcctttttcaccttgtttgatgaaacccagatatggatctgcaagcccacagcctccaaccagggcaaaggcatcttcctgctccggaaccaggaggaagttgccgccctgcaggccaagacccggagcatggaggacgaccccatccaccacaagacgccgttccgggggcctcaggcgcgggtggtgcagaggtacatccagaacccgctgctggtggacgggagaaagtttgacgtgcgctcctacctgctcattgcctgcaccacaccctacatgatcttctttggccacggctatgctcgcctcacccttagcctttacgacccccattccagcgacctcggcggccacttgaccaaccagttcatgcagaagaagagccctctgtacatgctgctgaaggagcacacggtgtggagcatggaacacctcaaccgctacatcagtgacacgttctggaaggcccggggcctcgccaaggactgggtcttcaccaccctcaagaagcggatgcagcagatcatggcccactgctttctggccgccaagcccaagctggactgcaagctgggttactttgacctcattggctgtgacttcctgattgatgacaacttcaaggtatggctgctggagatgaattctaacccagccctgcacaccaactgcgaggtcctgaaggaggtcatcccaggtgtggtcatcgagaccctggacctggtgctcgagaccttccggaagagcctgcgcggccagaagatgttgcctctgctgtcccagcgccgcttcgtgctcctgcacaacggtgaggccgacccgcggccgcacctggggggctcgtgcagcctccgccgctggccgcccctgcccacccgccaggccaagtcctccgggccacccatgccgcatgccccagaccagccgggcgcccgcaggcctgcgccacctcccttggtgccgcagcgtccccggccacccggccccgacctggacagcgcccacgatggggagccccaggccccgggcacggagcagtcgggcacaggcaacaggcacccggcgcaagagccttccccggggacagccaaggaggaacgcgaggagcctgagaacgcgaggccctaggggcagccacccgcgcccagcgccccgcgccccgcgccccagccgtgctgcctgccctcagggacctataaagcccactttgctac

SEQ ID NO: 195909 - DNA, 2283 bp, Homo sapiens
  Payload ID: 18658
  Gene Name: tubulin tyrosine ligase-like family member 10
  Uniprot ID: Q6ZVT0
  ENST ID: ENST00000379290
  CDS Start-End: 174-2195
cccaggaccttgtgggctgggcaggtcgtgcgtcctttgacagcggcctccggccgggaggcaccagctcttcgaacaatgtttaaaagtctcttctgttcatcctaccggggtgccgtctcctgccggtcttttcatctcaccagggccctcgcccgggcaccccccggccaatggaccacagctgcacccggttcatccaccgccggggaccacccactcggacccgagccggcttcaagaggggcaagaggccaaggatccagcagaggcctcgggctcgagtctcagggaccatccctgcgtcacgtctgcacccagcaccggcctcacagcccggcccctgccctgcaccaggccactgccctgttggcccggcccacgagaggccaatggggagcagccaggaggagggactccggtgtcagccaagccagccagaccacgacgcagatggacactgtgggccggacctggagggggcagaaagagcctctgccacacccggaccccctgggctcctgaacagccaccggcctgcagactcggatgacactaacgccgccgggccctcagctgccctcctggaggggctcctgctggggggtgggaagccatcgccccacagcacccggccggggcccttcttctacattggaggcagcaacggggccacaatcatcagctcctactgcaaaagcaagggctggcagcgcatccatgacagccgccgggacgactacacgctgaagtggtgtgaggtcaagagccgagacagctacggcagcttccgggaaggagagcagctgctgtaccagcttcccaacaacaagctcctcaccaccaagatcgggctgctcagcacccttcggggacgggcacgggccatgagcaaggccagcaaggtgccggggggggtccaggccaggctggaaaaggacgcagcagcgcccgccctggaggacctcccgtggacaagcccaggatacctcaggccacagagggtcctgagaatggaagagtttttcccagagacctaccgcctggacctcaaacacgagagagaggcctttttcaccttgtttgatgaaacccagatatggatctgcaagcccacagcctccaaccagggcaaaggcatcttcctgctccggaaccaggaggaagttgccgccctgcaggccaagacccggagcatggaggacgaccccatccaccacaagacgccgttccgggggcctcaggcgcgggtggtgcagaggtacatccagaacccgctgctggtggacgggagaaagtttgacgtgcgctcctacctgctcattgcctgcaccacaccctacatgatcttctttggccacggctatgctcgcctcacccttagcctttacgacccccattccagcgacctcggcggccacttgaccaaccagttcatgcagaagaagagccctctgtacatgctgctgaaggagcacacggtgtggagcatggaacacctcaaccgctacatcagtgacacgttctggaaggcccggggcctcgccaaggactgggtcttcaccaccctcaagaagcggatgcagcagatcatggcccactgctttctggccgccaagcccaagctggactgcaagctgggttactttgacctcattggctgtgacttcctgattgatgacaacttcaaggtatggctgctggagatgaattctaacccagccctgcacaccaactgcgaggtcctgaaggaggtcatcccaggtgtggtcatcgagaccctggacctggtgctcgagaccttccggaagagcctgcgcggccagaagatgttgcctctgctgtcccagcgccgcttcgtgctcctgcacaacggtgaggccgacccgcggccgcacctggggggctcgtgcagcctccgccgctggccgcccctgcccacccgccaggccaagtcctccgggccacccatgccgcatgccccagaccagccgggcgcccgcaggcctgcgccacctcccttggtgccgcagcgtccccggccacccggccccgacctggacagcgcccacgatggggagccccaggccccgggcacggagcagtcgggcacaggcaacaggcacccggcgcaagagccttccccggggacagccaaggaggaacgcgaggagcctgagaacgcgaggccctaggggcagccacccgcgcccagcgccccgcgccccgcgccccagccgtgctgcctgccctcagggacctataaagcccactttgctacaa

SEQ ID NO: 195910 - DNA, 426 bp, Homo sapiens
  Payload ID: 18658
  Gene Name: tubulin tyrosine ligase-like family member 10
  ENST ID: ENST00000486379
  CDS Start-End: 1-137
tcaaccgctacatcagtgacacgttctggaaggcccggggcctcgccaaggactgggtcttcaccaccctcaagtgcctgacacaggacaggagctgcacgagtttgttgagtgagtttctggctgtgaacctgtgaggctgagtgcacgaacgtgtgggcaggtgtggctgtacagaagcggatgcagcagatcatggcccactgctttctggccgccaagcccaagctggactgcaagctgggttactttgacctcattggctgtgacttcctgattgatgacaacttcaaggtatggctgctggagatgaattctaacccagccctgcacaccaactgcgaggtcctgaaggaggtcatcccaggtgtggtcatcgagaccctggacctggtgctcgagaccttccggaagagcctgcgcggc

SEQ ID NO: 195911 - DNA, 3250 bp, Homo sapiens
  Payload ID: 18659
  Gene Name: tubulin tyrosine ligase-like family member 11
  Uniprot ID: Q8NHH1
  ENST ID: ENST00000321582
  CDS Start-End: 189-2591
cgagtgttggcggggactgagcctcctgcttgaggtagttgtttttactcccagtccccaggctcacgagccccacgcgcgctcaatctgccctcccgcttctcctcgccactccgagttctgcgccctcgagatccagcgcatccgcggggtgggcgggtcctggcggctctttgccctcttccaacatggccgccgctgcctctgtgacaggcagggtcacgtgggcagcctcgcctatgaggtcgctggggctcggccggcgattgtcccttcccggaccccgtctcgatgcggtgactgccgctgtcaacccgagcctgagcgatcatggcaacgggctcgggcggggaacgcgtggcagcggctgcagcggcggcagtttggtggcggactggggcggcggagcggcggcggcggcggcggtggcactggcactggccccggccctgagcaccatgcggcggggcagctccgagagcgagctggcggcccggtgggaggcggaggcggtggctgcggccaaagcggcggccaaagctgaggccgaggccacagcggagacggtggcggaacaggtccgcgtggacgcgggcgcggccggggaaccggagtgcaaggcaggggaggagcagcccaaggtcctggccccggccccggcgcagcccagtgcggctgaggaggggaacacccaggtccttcagcggccgccgcccacgctgcccccgtccaagccgaagccggtgcagggcctctgcccgcacgggaagccccgggacaagggccgaagctgcaagcggagctcgggccacggttccggcgagaacggctcccagcggccggtcaccgtggacagctccaaggccaggacctccctggatgccctgaagatcagcatccgccagctcaagtggaaggagttcccatttggccggcgcttgccttgtgacatctactggcatggagtttcatttcacgacaatgacatattctccggtcaagtgaacaagtttccaggcatgacggagatggtgcgtaaaattactctgagcagagcagtgagaaccatgcagaatctctttcctgaggagtacaacttctaccctcgctcatggattctgcctgacgagttccagctctttgttgctcaggttcaaatggtgaaagacgatgacccctcctggaagcccacttttatcgtgaaacctgatggtggttgtcagggtgatggaatctacctcattaaagaccccagtgacatccgcctggcagggaccctccagagcaggccagcggtggtccaggagtacatctgcaaacctctccttatcgacaagctcaagtttgatattcgtctgtatgtcttactcaagtccttagaccccttagagatttatatagccaaagacggactctctaggttttgtaccgagccatatcaggagcccacccccaaaaacctgcaccgcatctttatgcacttaaccaactattcactgaacatccacagcggcaacttcatccactcggacagtgctagcactggcagcaaaaggactttttccagcatcctttgtagactgtcttccaaaggcgttgacatcaagaaggtctggtctgacatcatctccgtggtgattaagacggtcatcgcgctgactccagagctcaaagtcttctaccagtcagacatccccacggggaggccgggccccacgtgcttccagattttaggctttgacattcttctaatgaaaaatctgaagcctatactacttgaagtaaatgcaaatcccagtatgagaatcgaacatgagcacgaactttctccaggggtgtttgaaaatgtccccagcctcgttgatgaagaagtgaaagtggctgtgatcagagacactctgcgcctcatggacccacttaagaagaaaagagagaatcagtctcagcagcttgaaaaaccattcgctggaaaggaagatgctttggacggcgagctgaccagtgctccagactgcaacgccaaccccgaagcccacctgccttccatttgcctcaagcaggtgttccccaagtacgcaaaacagttcaactacctgcgcctggtggacaggatggcaaatttgtttatccggttcctgggcatcaaggggacaatgaagttggggccaacaggctttcgtaccttcataaggagctgcaaactcagcagcagcagcctgtccatggctgccgtggacatcctctacattgacatcacacggaggtggaactccatgaccctggaccagcgggactcagggatgtgtctgcaggccttcgtagaagctttctttttcctggctcagaggaagttcaagatgctgccacttcatgagcaggtggcctcactgattgacctttgcgagtaccacctgtccctgctggatgaaaaacgcctggtgtgtggccggggcgtcccgtcggggggccggcccccacaccgtggccctccccaggagccctccccctcggcccagccagcaggggacaaccccccaccccgcaccagctgtgccaataagctctcccatcccagacataccctgtcctgagggccactctgtcctcctggaaaacggaagacgagagcagctttcagggctggagcgccccaggcattctgcctgcagaggaatggcaggcaggctgccgaggggcccagctgaggtccccacgaactgtctctgtgtgcggctgagctgtgcttcaccaggctggctggttctcacctgccttcctcctcacacctcctggtgatacaccctgtttctgagtcatcagtcatcggacatatgacatctaaaacgtgacagatggcaccttctattctgggctcacaggaagcaccaactggggcaaatctgttgtatttggggcacaggacacaatcgatcccaaggcccggagctgtggagaggaagccgagtgttaggatctgctgccggggcctccacgcgcccaccgggaaaagcctgagaacatcgtgtttatttcctgccgcccgttccgagagaaggaagtggaaatatcaagtaggcatctgcgaatctcccatcccagtcatgtgctacatgggtgtagtgaacagattaacctcatttagttcattagcttgcctgttgctgcaatatttggtttgttattaattaagaaaaaattaattaagaagtaactaagactcctggagcctcagagctggcaggagcctcag

SEQ ID NO: 195912 - DNA, 2012 bp, Homo sapiens
  Payload ID: 18659
  Gene Name: tubulin tyrosine ligase-like family member 11
  Uniprot ID: Q8NHH1
  ENST ID: ENST00000373776
  CDS Start-End: 189-1805
cgagtgttggcggggactgagcctcctgcttgaggtagttgtttttactcccagtccccaggctcacgagccccacgcgcgctcaatctgccctcccgcttctcctcgccactccgagttctgcgccctcgagatccagcgcatccgcggggtgggcgggtcctggcggctctttgccctcttccaacatggccgccgctgcctctgtgacaggcagggtcacgtgggcagcctcgcctatgaggtcgctggggctcggccggcgattgtcccttcccggaccccgtctcgatgcggtgactgccgctgtcaacccgagcctgagcgatcatggcaacgggctcgggcggggaacgcgtggcagcggctgcagcggcggcagtttggtggcggactggggcggcggagcggcggcggcggcggcggtggcactggcactggccccggccctgagcaccatgcggcggggcagctccgagagcgagctggcggcccggtgggaggcggaggcggtggctgcggccaaagcggcggccaaagctgaggccgaggccacagcggagacggtggcggaacaggtccgcgtggacgcgggcgcggccggggaaccggagtgcaaggcaggggaggagcagcccaaggtcctggccccggccccggcgcagcccagtgcggctgaggaggggaacacccaggtccttcagcggccgccgcccacgctgcccccgtccaagccgaagccggtgcagggcctctgcccgcacgggaagccccgggacaagggccgaagctgcaagcggagctcgggccacggttccggcgagaacggctcccagcggccggtcaccgtggacagctccaaggccaggacctccctggatgccctgaagatcagcatccgccagctcaagtggaaggagttcccatttggccggcgcttgccttgtgacatctactggcatggagtttcatttcacgacaatgacatattctccggtcaagtgaacaagtttccaggcatgacggagatggtgcgtaaaattactctgagcagagcagtgagaaccatgcagaatctctttcctgaggagtacaacttctaccctcgctcatggattctgcctgacgagttccagctctttgttgctcaggttcaaatggtgaaagacgatgacccctcctggaagcccacttttatcgtgaaacctgatggtggttgtcagggtgatggaatctacctcattaaagaccccagtgacatccgcctggcagggaccctccagagcaggccagcggtggtccaggagtacatctgcaaacctctccttatcgacaagctcaagtttgatattcgtctgtatgtcttactcaagtccttagaccccttagagatttatatagccaaagacggactctctaggttttgtaccgagccatatcaggagcccacccccaaaaacctgcaccgcatctttatgcacttaaccaactattcactgaacatccacagcggcaacttcatccactcggacagtgctagcactggcagcaaaaggactttttccagcatcctttgtagactgtcttccaaaggcgttgacatcaagaaggtctggtctgacatcatctccgtggtgattaagacggtcatcgcgctgactccagagctcaaagtcttctaccagtcagacatccccacggggaggccgggccccacgtgcttccaggtaaccattgccagttcccagcctgcgtttccagccttgaccggcctcaagagggctctctggcttcgtgtaggatgagtgatcggggtgggatggccagaggaggggacagtgttggtggtgctgtgggcttgggtgttaaacctgggcccaacttccaagctttctgtttgctccctgtgtgatttggggcaagctacttcccctctgttacctgtaaaatgaaatgaagaatacctatcttaaaaggttcttgtaagaattaaatgagataacacatgtaaa

SEQ ID NO: 195913 - DNA, 2195 bp, Homo sapiens
  Payload ID: 18659
  Gene Name: tubulin tyrosine ligase-like family member 11
  ENST ID: ENST00000373778
  CDS Start-End: 1-368
ggagctcgggccacggttccggcgagaacggctcccagcggccggtcaccgtggacagctccaaggccaggacctccctggatgccctgaagatcagcatccgccagctcaagtggaaggagttcccatttggccggcgcttgccttgtgacatctactggcatggagtttcatttcacgacaatgacatattctccggtcaagtgaacaagtttccaggcatgacggagatggtgcgtaaaattactctgagcagagcagtgagaaccatgcagaatctctttcctgaggagagtacatctgcaaacctctccttatcgacaagctcaagtttgatattcgtctgtatgtcttactcaagtccttagaccccttagagatttatatagccaaagacggactctctaggttttgtaccgagccatatcaggagcccacccccaaaaacctgcaccgcatctttatgcacttaaccaactattcactgaacatccacagcggcaacttcatccactcggacagtgctagcactggcagcaaaaggactttttccagcatcctttgtagactgtcttccaaaggcgttgacatcaagaaggtctggtctgacatcatctccgtggtgattaagacggtcatcgcgctgactccagagctcaaagtcttctaccagtcagacatccccacggggaggccgggccccacgtgcttccagattttaggctttgacattcttctaatgaaaaatctgaagcctatactacttgaagtaaatgcaaatcccagtatgagaatcgaacatgagcacgaactttctccaggggtgtttgaaaatgtccccagcctcgttgatgaagaagtgaaagtggctgtgatcagagacactctgcgcctcatggacccacttaagaagaaaagagagaatcagtctcagcagcttgaaaaaccattcgctggaaaggaagatgctttggacggcgagctgaccagtgctccagactgcaacgccaaccccgaagcccacctgccttccatttgcctcaagcaggtgttccccaagtacgcaaaacagttcaactacctgcgcctggtggacaggatggcaaatttgtttatccggttcctgggcatcaaggggacaatgaagttggggccaacaggctttcgtaccttcataaggagctgcaaactcagcagcagcagcctgtccatggctgccgtggacatcctctacattgacatcacacggaggtggaactccatgaccctggaccagcgggactcagggatgtgtctgcaggccttcgtagaagctttctttttcctggctcagaggaagttcaagatgctgccacttcatgagcaggtggcctcactgattgacctttgcgagtaccacctgtccctgctggatgaaaaacgcctggtgtgtggccggggcgtcccgtcggggggccggcccccacaccgtggccctccccaggagccctccccctcggcccagccagcaggggacaaccccccaccccgcaccagctgtgccaataagctctcccatcccagacataccctgtcctgagggccactctgtcctcctggaaaacggaagacgagagcagctttcagggctggagcgccccaggcattctgcctgcagaggaatggcaggcaggctgccgaggggcccagctgaggtccccacgaactgtctctgtgtgcggctgagctgtgcttcaccaggctggctggttctcacctgccttcctcctcacacctcctggtgatacaccctgtttctgagtcatcagtcatcggacatatgacatctaaaacgtgacagatggcaccttctattctgggctcacaggaagcaccaactggggcaaatctgttgtatttggggcacaggacacaatcgatcccaaggcccggagctgtggagaggaagccgagtgttaggatctgctgccggggcctccacgcgcccaccgggaaaagcctgagaacatcgtgtttatttcctgccgcccgttccgagagaaggaagtggaaatatcaagtaggcatctgcgaatctcccatcccagtcatgtgctacatgggtgtagtgaacagattaacctcatttagttcattagcttgcctgttgctgcaatatttggtttgttattaattaagaaaaaattaattaagaa

SEQ ID NO: 195914 - DNA, 1038 bp, Homo sapiens
  Payload ID: 18659
  Gene Name: tubulin tyrosine ligase-like family member 11
  ENST ID: ENST00000487468
  CDS Start-End: 1-200
cggtcaccgtggacagctccaaggccaggacctccctggatgccctgaagatcagcatccgccagctcaagtggaaggagttcccatttggccggcgcttgccttgtgacatctactggcatggagtttcatttcacgacaatgacatattctccggtcaagtgaacaagtttccaggttcaaatggtgaaagacgatgacccctcctggaagcccacttttatcgtgaaacctgatggtggttgtcagggtgatggaatctacctcattaaagaccccagtgacatccgcctggcagggaccctccagagcaggccagcggtggtccaggagtacatctgcaaacctctccttatcgacaagctcaagtttgatattcgtctgtatgtcttactcaagtccttagaccccttagagatttatatagccaaagacggactctctaggttttgtaccgagccatatcaggagcccacccccaaaaacctgcaccgcatctttatgcacttaaccaactattcactgaacatccacagcggcaacttcatccactcggacagtgctagcactggcagcaaaaggactttttccagcatcctttgtagactgtcttccaaaggcgttgacatcaagaaggtctggtctgacatcatctccgtggtgattaagacggtcatcgcgctgactccagagctcaaagtcttctaccagtcagacatccccacggggaggccgggccccacgtgcttccaggtaaccattgccagttcccagcctgcgtttccagccttgaccggcctcaagagggctctctggcttcgtgtaggatgagtgatcggggtgggatggccagaggaggggacagtgttggtggtgctgtgggcttgggtgttaaacctgggcccaacttccaagctttctgtttgctccctgtgtgatttggggcaagctacttcccctctgttacctgtaaaatgaaatgaagaatacctatcttaaaaggttcttgtaagaattaaatgagataacacatgtaaa

SEQ ID NO: 195915 - DNA, 2699 bp, Homo sapiens
  Payload ID: 18659
  Gene Name: tubulin tyrosine ligase-like family member 11
  ENST ID: ENST00000474723
  CDS Start-End: 1-718
gagcgatcatggcaacgggctcgggcggggaacgcgtggcagcggctgcagcggcggcagtttggtggcggactggggcggcggagcggcggcggcggcggcggtggcactggcactggccccggccctgagcaccatgcggcggggcagctccgagagcgagctggcggcccggtgggaggcggaggcggtggctgcggccaaagcggcggccaaagctgaggccgaggccacagcggagacggtggcggaacaggtccgcgtggacgcgggcgcggccggggaaccggagtgcaaggcaggggaggagcagcccaaggtcctggccccggccccggcgcagcccagtgcggctgaggaggggaacacccaggtccttcagcggccgccgcccacgctgcccccgtccaagccgaagccggtgcagggcctctgcccgcacgggaagccccgggacaagggccgaagctgcaagcggagctcgggccacggttccggcgagaacggctcccagcggccggtcaccgtggacagctccaaggccaggacctccctggatgccctgaagatcagcatccgccagctcaagtggaaggagttcccatttggccggcgcttgccttgtgacatctactggcatggagtttcatttcacgacaatgacatattctccggtcaagtgaacaagtttccaggttcaaatggtgaaagacgatgacccctcctggaagcccacttttatcgtgaaacctgatggtggttgtcagggtgatggaatctacctcattaaagaccccagtgacatccgcctggcagggaccctccagagcaggccagcggtggtccaggagtacatctgcaaacctctccttatcgacaagctcaagtttgatattcgtctgtatgtcttactcaagtccttagaccccttagagatttatatagccaaagacggactctctaggttttgtaccgagccatatcaggagcccacccccaaaaacctgcaccgcatctttatgcacttaaccaactattcactgaacatccacagcggcaacttcatccactcggacagtgctagcactggcagcaaaaggactttttccagcatcctttgtagactgtcttccaaaggcgttgacatcaagaaggtctggtctgacatcatctccgtggtgattaagacggtcatcgcgctgactccagagctcaaagtcttctaccagtcagacatccccacggggaggccgggccccacgtgcttccagattttaggctttgacattcttctaatgaaaaatctgaagcctatactacttgaagtaaatgcaaatcccagtatgagaatcgaacatgagcacgaagggtgtttgaaaatgtccccagcctcgttgatgaagaagtgaaagtggctgtgatcagagacactctgcgcctcatggacccacttaagaagaaaagagagaatcagtctcagcagcttgaaaaaccattcgctggaaaggaagatgctttggacggcgagctgaccagtgctccagactgcaacgccaaccccgaagcccacctgccttccatttgcctcaagcaggtgttccccaagtacgcaaaacagttcaactacctgcgcctggtggacaggatggcaaatttgtttatccggttcctgggcatcaaggggacaatgaagttggggccaacaggctttcgtaccttcataaggagctgcaaactcagcagcagcagcctgtccatggctgccgtggacatcctctacattgacatcacacggaggtggaactccatgaccctggaccagcgggactcagggatgtgtctgcaggccttcgtagaagctttctttttcctggctcagaggaagttcaagatgctgccacttcatgagcaggtggcctcactgattgacctttgcgagtaccacctgtccctgctggatgaaaaacgcctggtgtgtggccggggcgtcccgtcggggggccggcccccacaccgtggccctccccaggagccctccccctcggcccagccagcaggggacaaccccccaccccgcaccagctgtgccaataagctctcccatcccagacataccctgtcctgagggccactctgtcctcctggaaaacggaagacgagagcagctttcagggctggagcgccccaggcattctgcctgcagaggaatggcaggcaggctgccgaggggcccagctgaggtccccacgaactgtctctgtgtgcggctgagctgtgcttcaccaggctggctggttctcacctgccttcctcctcacacctcctggtgatacaccctgtttctgagtcatcagtcatcggacatatgacatctaaaacgtgacagatggcaccttctattctgggctcacaggaagcaccaactggggcaaatctgttgtatttggggcacaggacacaatcgatcccaaggcccggagctgtggagaggaagccgagtgttaggatctgctgccggggcctccacgcgcccaccgggaaaagcctgagaacatcgtgtttatttcctgccgcccgttccgagagaaggaagtggaaatatcaagtaggcatctgcgaatctcccatcccagtcatgtgctacatgggtgtagtgaacagattaacctcatttagttcattagcttgcctgttgctgc

SEQ ID NO: 195916 - DNA, 3385 bp, Homo sapiens
  Payload ID: 18660
  Gene Name: tubulin tyrosine ligase-like family member 12
  Uniprot ID: Q14166
  ENST ID: ENST00000216129
  CDS Start-End: 65-1999
gggccgacggacggcgggcggcggcggcggtggcggcgctggagtcggcgcgggtgctggcgccatggaggccgagcggggtcccgagcgccggcctgcggagcgtagcagcccgggccagacgccggaggagggcgcgcaggccttggccgagttcgcggcgctgcacggcccggcgctgcgcgcttcgggggtccccgaacgttactggggccgcctcctgcacaagctggagcacgaggttttcgacgctggggaagtgtttgggatcatgcaagtggaggaggtagaagaggaggaggacgaggcagcccgggaggtgcggaagcagcagcccaacccggggaacgagctgtgctacaaggtcatcgtgaccagggagagcgggctccaggcagcccaccccaacagcatcttcctcatcgaccacgcctggacgtgccgtgtggagcacgcgcgccagcagctgcagcaggtgcccgggctgctgcaccgcatggccaacctgatgggcattgagttccacggtgagctgcccagtacagaggctgtggccctggtgctggaggagatgtggaagttcaaccagacctaccagctggcccatgggacagctgaggagaagatgccggtgtggtatatcatggacgagttcggttcgcggatccagcacgcggacgtgcccagcttcgccacggcacccttcttctacatgccgcagcaggtggcctacacgctgctgtggcccctgagggacctggacactggcgaggaggtgacccgagactttgcctacggagagacggaccccctgatccggaagtgcatgctgctgccctgggcccccaccgacatgctggacctcagctcttgcacacccgagccgcccgccgagcactaccaggccattctggaggaaaacaaggagaagctgccacttgacatcaaccccgtggtgcacccccacggccacatcttcaaggtctacacggacgtgcagcaggtggccagcagcctcacccacccgcgcttcaccctcacccagagtgaggcggacgccgacatcctcttcaacttctcacacttcaaggactacaggaaactcagccaggagaggccaggcgtgctgctgaaccagttcccctgcgagaacctgctgactgtcaaggactgcctggcctccatcgcgcgccgggcaggtggccccgagggcccaccctggctgccccgaaccttcaacctgcgcactgagctgccccagtttgtcagctacttccagcagcgggaaaggtggggcgaggacaaccactggatctgcaagccctggaacctggcgcgcagcctggacacccacgtcaccaagagcctgcacagcatcatccggcaccgagagagcacccccaaggttgtgtccaagtacatcgaaagtcccgtgttgttccttcgagaagacgtgggaaaggtcaagttcgacatccgctacatcgtgctgctgcggtcagtgaggcccctacggttgttcgtgtatgatgtgttctggctgcggttctccaaccgggcctttgcactcaacgacctggatgactacgagaagcacttcacggtcatgaactatgacccggatgtggtgctgaagcaggtgcactgtgaagagttcatccccgagtttgagaagcaatacccagaatttccctggacggacgtccaggctgagatcttccgggccttcacggagctgttccaggtggcctgtgccaagccaccacccctgggcctctgcgactacccctcatcccgggccatgtatgccgtcgacctcatgctgaagtgggacaacggcccagatggaaggcgggtgatgcagccgcagatcctggaggtgaacttcaaccccgactgtgagcgagcctgcaggtaccaccccaccttcttcaacgacgtcttcagcaccttgtttctggaccagcccggtggctgccacgttacctgccttgtctaggcactcgctgtccccaaaacctgtgcttggggcaggattccaacctcagttctctgagctgcttctgcaaaggcccccatgtccctccccacaccggccctgggcatagcctcagccccaggcctctgtcctgccgagccatcctcccggcgccacactccgggagcacagcatcctcctctcacctgtgggtcagagcaggacagtgatggtgtccccagggctgagcaccaccccacgccctgccctcacccctcaccaccatctgtgcactgatgagtctccagtttagccaagggctttgttcctggcatggagaatttgttcctggctgctgtgtttccagggggtgctgggggaagggttccgtggagcgagacaaggtgtcctcgggagcagggttccaccgggaagcgtttgggagccctgtatcacacggggcaggcgggtttctcttccggggtctctgctcttatgcatcaggacgaccccgggacggctgtggggccccacactgcacccacagggctctatgcgacaggggcccaggaacagcctgaggccaccacccagcaagcccgccttatcacccattccagctcacccagaaccttcaccagcaaacctcctgctgaggtcctggcaggaggccaccgtcttgttaccgtttccttttcgtttgctgagggtcacagaccccaacagggaaatcagtatctgtcttcccagtggttgccctgctcgccgggcactccacggggtcccgcccttgtgtgagatgggccaggatccttcggcaaggggcgcctggggctggggctgattgtgggcggtggagcgccagacagaaaaggattccaatgagaacttcaggttaaagtcagatgccacctaccagggtctacagtcaaaatgttggctttttcttattttttaatgtatgggagaaaaatgtaaaattccagttcttttctaattgtgtttctgaaattaggagtcagctgccagcgtttttgtgtggctgcagtgtgcctgggcccagctcacgggcagtgggtggacctaactgcccaggcaggcgagagctacttccagagccttccagtgcatgggagggcagggctaggtgtagcggtgtctcctctttgaaattaagaactatctttcttgtagcaaagctgcacctgatgatgctgcctctcctctctgtgttgtctgggcccttgtttacaagcacgcgttacccttcctgaggggagccatgctctagcccctggagggcctgttgcaggggcagggcgggcccgtcgcctttggcagctcctggagagctgtggacatgcagtccccctcagttcgtgctgcaataaaggccatcttctctta

SEQ ID NO: 195917 - DNA, 888 bp, Homo sapiens
  Payload ID: 18660
  Gene Name: tubulin tyrosine ligase-like family member 12
  ENST ID: ENST00000494035
  CDS Start-End: 286-483
acactgcctcctaggaggactggcacacaggccagtcccaggagccgcctcctgagttcctgctatggaaggcgattgttagcgctgccatcatgagccaggctgggttctgtgttgtctcaggtgcactgtgaagagttcatccccgagtttgagaagcaatacccagaatttccctggacggacgtccaggctgagatcttccgggccttcacggagctgttccaggtggcctgtgccaagccaccacccctgggcctctgcgactacccctcatcccgggccatgtatgccgtcgacctcatgctgaagtgggacaacggcccagatggaaggcgggtgatgcagccgcagatcctggaggtgaacttcaaccccgactgtgagcgagcctgcaggtaccaccccaccttcttcaacgacgtcttcagcaccttgtttctggaccagcccggtggctgccacgttacctgccttgtctaggcactcgctgtccccaaaacctgtgcttggggcaggattccaacctcagttctctgagctgcttctgcaaaggcccccatgtccctccccacaccggccctgggcatagcctcagccccaggcctctgtcctgccgagccatcctcccggcgccacactccgggagcacagcatcctcctctcacctgtgggtcagagcaggacagtgatggtgtccccagggctgagcaccaccccacgccctgccctcacccctcaccaccatctgtgcactgatgagtctccagtttagccaagggctttgttcctggcatggagaatttgttcctggctgctgtgtttccagggggtgctgggggaagggttccgtggagcgagacaaggtgtcctcgggagcagggttcc

SEQ ID NO: 195918 - DNA, 2075 bp, Homo sapiens
  Payload ID: 18661
  Gene Name: tubulin tyrosine ligase-like family member 2
  Uniprot ID: Q9BWV7
  ENST ID: ENST00000239587
  CDS Start-End: 89-1867
agtgctccctccagcctccgcgcatttcagctggcgctgcagctgctgcacagagacccacagaggccaccctcggaaccagcgcccaatgagagggcgggacctgtgttcctccacacaaagccaggcgctgggatctttgagaaccaccaccccagcctttacccttaacattccatccgaggcaaaccacactgagcagccgcctgcaggcctgggagcaaggctacaggaagcaggtgtttccatccctcccaggcgaggccgcccaacaccaacactggagaagaagaaaaaacctcatttgatggcggaagatgaaccttcaggggccctcttgaagccgctggtttttcgcgttgacgagaccaccccggctgtggtgcaaagcgtcctcctggagagggggtggaataagtttgataagcaggagcagaacgcggaggactggaacctgtactggaggacatcctctttccgaatgaccgaacacaacagtgttaaaccgtggcagcagctaaaccaccaccctggaaccaccaagcttaccaggaaagactgtttggccaaacacctgaagcacatgaggaggatgtatggcacttccctgtaccagttcatccccctgacgttcgtcatgcccaatgactataccaagttcgtggctgaatactttcaggagaggcagatgctgggcaccaagcatagctattggatttgcaagcctgctgagttatctcgtgggagggggatactaattttcagtgactttaaagacttcatctttgatgatatgtacatagtgcagaaatatatctccaatcctttacttattggcagatataaatgtgatctccgcatctatgtttgtgttactggctttaagcctttgaccatttatgtttatcaggaagggttggttcggtttgccacggaaaagtttgacctcagtaatttgcaaaacaattatgcccatttgaccaacagcagcatcaataaatccggggcctcttatgagaagatcaaagaagtgattggtcatggttgtaaatggacgctcagcagatttttttcctaccttcgtagctgggatgtggacgatctgcttttgtggaagaaaatccaccgcatggttattctcaccattctcgccattgcaccatctgtcccctttgctgccaattgctttgagctctttgggtttgatattttgattgatgacaacttgaaaccatggcttttagaggtcaactacagcccagccttgaccttggattgttcaacagatgtgttggtgaagagaaaacttgtccatgatattattgacctgatttacttaaatggtctaagaaatgaggggagagaagccagtaatgccacacatggaaattccaacatcgacgctgcaaaaagtgacagaggtgggcttgatgctcctgactgtcttccttatgattctctttcgttcacaagcagaatgtacaacgaggatgactctgtggtggagaaagctgtgagtgtgcgtcctgaagctgcacctgcctcccagctggaaggagagatgagtgggcaggattttcatctgtcaacaagggagatgccacaaagcaagcccaagttacggagcaggcacacgcctcacaagacactcatgccctacgcgtccctcttccagtcgcactcctgcaagaccaagacctccccgtgtgtcctgtcagaccgtggcaaagctccagatccccaagcaggcaactttgttcttgtttttcctttcaatgaagcaactctcggagcttccaggaatggattaaatgtcaaaagaataatccaagagctccagaaactaatgaataagcaacattcctaagtggtaaaaaatcaaatcaagaaaaagtgacatggatttttaaaaaccaaggatcctgtcctagagaaagcaatagttcaagtccctacctgtgccaccagcatgttaactatgacattgggactgaagatgtggccatatgtataaatataacagctctgacaaagcacaatatgttcaagtggtgattaaactacattacatccca

SEQ ID NO: 195919 - DNA, 537 bp, Homo sapiens
  Payload ID: 18661
  Gene Name: tubulin tyrosine ligase-like family member 2
  ENST ID: ENST00000512917
  CDS Start-End: 70-222
gcgcatttcagctggcgctgcagctgctgcacagagacccacagaggccaccctcggaaccagcgcccaatgagagggcgggacctgtgttcctccacacaaagccaggcgctgggttcgatgacacctgaaattcctggtgttgaatcacatggtttaacccttcagctggatcccggtcaaatggaaagttgctctggggctctgtcctgtaagcagtgaatgtgccaaaaagataaaatgtgaagaaaaagactcttagttatttttgcagagcctgtcttggatggaagaaagcaccaaaactaggagctgtcggctaaggaggctgccgtccctgggagccgctctctcctactgcatcctgttgtccctcagtcttctgggcaaatcagtgggccctcatctagagatcgggattcccgcagtgatggaatacattatttttggctgacttccttgccatggggccccatacacccaggaatatcatcaagatctttgagaaccaccaccccagcctttacccttaacatt

SEQ ID NO: 195920 - DNA, 2680 bp, Homo sapiens
  Payload ID: 18661
  Gene Name: tubulin tyrosine ligase-like family member 2
  Uniprot ID: Q9BWV7
  ENST ID: ENST00000515138
  CDS Start-End: 77-1855
agcctccgcgcatttcagctggcgctgcagctgctgcacagagacccacagaggccaccctcggaaccagcgcccaatgagagggcgggacctgtgttcctccacacaaagccaggcgctgggatctttgagaaccaccaccccagcctttacccttaacattccatccgaggcaaaccacactgagcagccgcctgcaggcctgggagcaaggctacaggaagcaggtgtttccatccctcccaggcgaggccgcccaacaccaacactggagaagaagaaaaaacctcatttgatggcggaagatgaaccttcaggggccctcttgaagccgctggtttttcgcgttgacgagaccaccccggctgtggtgcaaagcgtcctcctggagagggggtggaataagtttgataagcaggagcagaacgcggaggactggaacctgtactggaggacatcctctttccgaatgaccgaacacaacagtgttaaaccgtggcagcagctaaaccaccaccctggaaccaccaagcttaccaggaaagactgtttggccaaacacctgaagcacatgaggaggatgtatggcacttccctgtaccagttcatccccctgacgttcgtcatgcccaatgactataccaagttcgtggctgaatactttcaggagaggcagatgctgggcaccaagcatagctattggatttgcaagcctgctgagttatctcgtgggagggggatactaattttcagtgactttaaagacttcatctttgatgatatgtacatagtgcagaaatatatctccaatcctttacttattggcagatataaatgtgatctccgcatctatgtttgtgttactggctttaagcctttgaccatttatgtttatcaggaagggttggttcggtttgccacggaaaagtttgacctcagtaatttgcaaaacaattatgcccatttgaccaacagcagcatcaataaatccggggcctcttatgagaagatcaaagaagtgattggtcatggttgtaaatggacgctcagcagatttttttcctaccttcgtagctgggatgtggacgatctgcttttgtggaagaaaatccaccgcatggttattctcaccattctcgccattgcaccatctgtcccctttgctgccaattgctttgagctctttgggtttgatattttgattgatgacaacttgaaaccatggcttttagaggtcaactacagcccagccttgaccttggattgttcaacagatgtgttggtgaagagaaaacttgtccatgatattattgacctgatttacttaaatggtctaagaaatgaggggagagaagccagtaatgccacacatggaaattccaacatcgacgctgcaaaaagtgacagaggtgggcttgatgctcctgactgtcttccttatgattctctttcgttcacaagcagaatgtacaacgaggatgactctgtggtggagaaagctgtgagtgtgcgtcctgaagctgcacctgcctcccagctggaaggagagatgagtgggcaggattttcatctgtcaacaagggagatgccacaaagcaagcccaagttacggagcaggcacacgcctcacaagacactcatgccctacgcgtccctcttccagtcgcactcctgcaagaccaagacctccccgtgtgtcctgtcagaccgtggcaaagctccagatccccaagcaggcaactttgttcttgtttttcctttcaatgaagcaactctcggagcttccaggaatggattaaatgtcaaaagaataatccaagagctccagaaactaatgaataagcaacattcctaagtggtaaaaaatcaaatcaagaaaaagtgacatggatttttaaaaaccaaggatcctgtcctagagaaagcaatagttcaagtccctacctgtgccaccagcatgttaactatgacattgggactgaagatgtggccatatgtataaatataacagctctgacaaagcacaatatgttcaagtggtgattaaactacattacatcccatgtttatttgctcaggtgtcttgaaagaattctacaaataccacacagcctcccaccaagtcttgctctgtcgccaggctggagtgcagtggcgccatctcggctcactgcaacttccgcctcataggttcaagtcattctcctgcctcagcctcctgagtagctgggactacagcaaaaatctgcaattggcatttcccatgtgatgctgcgtgttgagggctcatctgcttctcgtccaggacgacatttccagcttcatctttgatcttaaccctcccggaggcatacttggtttcctgacagccgctgcaatacacagtcttgacggtgccatccgggtactccctcctcttgaaccgggctgtgtggatttctttctgcccgttgctgagcacaatggttttgtcgccgttcctgagaggagaaacacatggaaataaggtctcttcctgtccatccttgagatgttccaccgtcccgtcgggaaacacgatttctttggagccattggggtagaatttttctgcagaatgcagtttttcagtatatgttacattgaatctgtttagaaacatgttctatgcaaataatctataaaatattcatgagattta

SEQ ID NO: 195921 - DNA, 1561 bp, Homo sapiens
  Payload ID: 18662
  Gene Name: tubulin tyrosine ligase-like family member 3
  ENST ID: ENST00000310252
  CDS Start-End: 1-1561
cttcgatgatttactgaaatttgatgacctagatggaacacatgctctgatgtcccgcatggtccagaatgagatcccctacttcatctggaccactcggcgggatgtgctcgactgtcgcttcctctccaaggatcagatgataaaccactacgcccgggctggctcctttaccacaaaggtgggtctatgtctcaatctccggaatttgccgtggtttgatgaggttgatgccaactccttcttcccacgctgctactgcctgggggctgaggatgacaaaaaagccttcatagaggacttctggctgactgctgcccgcaacgttctcaagctggtggtgaagtctgagtggaagtcataccctattcaggcagtagaggaagaggcctcaggagacaagcagcccaagaaacaggagaaaaacccagtgttggtgtccccagagtttgtggatgaagctctgtgtgcgtgcgaggagtaccttagcaacttggcccacatggacatcgacaaggacctggaggccccgctgtacctcacccccgagggctggtccctcttcctccagcgctactaccaagtggtccacgaaggggcagaactcaggcacctcgacactcaggtccagcgctgtgaggacatcctgcagcagctgcaggccgtggtaccccagatagacatggaaggggatcgcaacatctggatcgtgaagccaggagccaagtcccgcggacgaggcatcatgtgcatggaccacctggaggagatgctgaagctggtgaacggcaaccccgtggtgatgaaggacggcaagtgggtggtgcagaagtatattgagcggcccctcctcatctttggcaccaagtttgacctcagacagtggttcctggtaactgactggaacccacttaccgtgtggttctaccgcgacagctatatccgcttttccacgcagcccttctccctgaagaacctggacaactcagtgcacctgtgcaacaactccatccagaagcacctggagaactcatgccatcggcatccactgcttccgccagacaacatgtggtctagccagaggttccaggcccacctgcaggagatgggtgccccaaatgcttggtccaccatcatcgtgcctggcatgaaggatgctgtgatccacgcacttcagacctcccaggacaccgtgcagtgtcggaaggccagctttgagctctatggcgctgacttcgtgttcggggaggacttccagccctggctgattgagatcaacgccagccccacgatggcaccctccacagcagtcactgcccggctctgtgctggcgtgcaagctgacaccctgcgcgtggtcattgaccggatgctggaccgcaactgtgacacaggagcctttgagctcatctataagcagcccgtcaccacttccccagcctccacaccaaggcccagctgccttctccccatgtactccgacaccagggccaggtcctcagacgacagcacagcaagctggtgggcactaaggccctgtcgaccacaggcaaggccttga

SEQ ID NO: 195922 - DNA, 4834 bp, Homo sapiens
  Payload ID: 18662
  Gene Name: tubulin tyrosine ligase-like family member 3
  Uniprot ID: Q9Y4R7
  ENST ID: ENST00000383827
  CDS Start-End: 2282-3340
ttcttttttttttttgagacggagtctcgctctgtcacccaggctggggtgcagtggcgcgatcttggctcactgcaagctccgcctcccaggttcccgccattctcctgcctcagcctcccgagtagctgggactacaggcgcccgccatcacgcctggctaattttttgtatttttagtagagacggggtttcactgtgttagccaggatggtctcgatctcctgacctcatgatccatccacctcagcctcccaaagtgctgggattacaggcgtcagccaccgtgaccagcctgaaacaggagcaagttctaaactcaggctctagagtcagaaaaggtagagtcaggttctggatccaaaatggggcaagtcatgatcaggttctggaaccagaacaggcctcaagcctaggggctgagcagggtatcccctggcctgggagcagaggacttctggctgactgctgcccgcaacgttctcaagctggtggtgaagtctgagtggaagtcataccctattcaggcagtagaggaagaggcctcaggtaagtactgtggttacctccactctcccacccatttatcctccacccatccgcccttccacctatctgcccttctacctatctattcatccacgcacctactggttcatccacacatctgtgtatgattcacatctacccatctatccatccatccaccagccatccatccactcatccacccacgtattcacccactctctgatctaccgattcacccacccacccttccactcatccttccatcctcccacctgtcacccattgttaatctcgtcattcatctacctgatgtcagctccatactccccatccatctatccactccctgcctacctatccttccacagatccacctacccatctatctacctgctattccattctcccatctactacctatctgttcttcaggccatccactcatccattcttctgtcccaggtacttagacacttgtcttcccatccgtttgttagttgatccactcctcattcagccctcccatgggcctggcatgtagccgagcaccctggagagggcagactaagaagacatggtccgtccctgcctgtgaggagttcaggtctctgaggaggaggaagcagtgaaactgggctttacacatggcctgagaacagcttaggcctgaacataaggaacagcttggagtggaggggacacagaggaaccctcactatcatgcatgccaacccaaccactgcctgccctttcccttctggatttagctcgtgtctccaggctcctagtcctgtaatccagggacccatcagcgagggattcagggaagcagaggcagctctccaggaaggaggaaaatccctgcctcttccagagagactcccccattgctgtctcttgtgtgtgtcatgcacaaggaaggcttggttgtgtgccaggataaggggcacaagggcctcgggtgtggccagagaccccatgcttaagcttttatggtataggtcaggctgcaggggtttgagggcctcagttgtatatcagaatcttcagagcactgcgatgttcaggggtgagtcaggtctgtagatgtgcacggggtcttctgaagggtcagtttctgtaatcactttcaggtgtgtcagggccttgtgcagtaacagtgcacacagaagttagtgtttctgtgggctaagggttgtagctctgtatcaggattctgggagtgggtctggatttctggtgtgtggacttaagaagctgtgtcagacttgggggaggggcgttcatgtataactgggttcacataggccaagactcccaggtgcattttaggcagagcctcaggtgtgttagaggtcccaggggcagagaggctataggtgctgtcagaggccttggggacatttagggcagagcctcgagtgacaggtcctgggacagtgggagccaagggcaagtgctagagttgcagtgaatttagagcaaagcctcagctaagtgacacatcccagggcagtaggggatctatctaggttcgtgctgggcctcaggtaagtgacaggccttaggacaatgggggctgtggcatgcgtcaggttacctgccttgatatgggatcgtgacaggcccctccctatgtgcaggagacaagcagcccaagaaacaggagaaaaacccagtgttggtgtccccagagtttgtggatgaagctctgtgtgcgtgcgaggagtaccttagcaacttggcccacatggacatcgacaaggacctggaggccccgctgtacctcacccccgagggctggtccctcttcctccagcgctactaccaagtggtccacgaaggggcagaactcaggcacctcgacactcaggtccagcgctgtgaggacatcctgcagcagctgcaggccgtggtaccccagatagacatggaaggggatcgcaacatctggatcgtgaagccaggagccaagtcccgcggacgaggcatcatgtgcatggaccacctggaggagatgctgaagctggtgaacggcaaccccgtggtgatgaaggacggcaagtgggtggtgcagaagtatattgagcggcccctcctcatctttggcaccaagtttgacctcagacagtggttcctggtaactgactggaacccacttaccgtgtggttctaccgcgacagctatatccgcttttccacgcagcccttctccctgaagaacctggacaactcagtgcacctgtgcaacaactccatccagaagcacctggagaactcatgccatcggcatccactgcttccgccagacaacatgtggtctagccagaggttccaggcccacctgcaggagatgggtgccccaaatgcttggtccaccatcatcgtgcctggcatgaaggatgctgtgatccacgcacttcagacctcccaggacaccgtgcagtgtcggaaggccagctttgagctctatggcgctgacttcgtgttcggggaggacttccagccctggctgattgagatcaacgccagccccacgatggcaccctccacagcagtcactgcccggctctgtgctggcgtgcaagctgacaccctgcgcgtggtcattgaccggatgctggaccgcaactgtgacacaggagcctttgagctcatctataagcagcccgtcaccacttccccagcctccacaccaaggcccagctgccttctccccatgtactccgacaccagggccaggtcctcagacgacagcacagcaagctggtgggcactaaggccctgtcgaccacaggcaaggccttgaggactctacccacggctaaggtcttcatttccctcccaccgaaccttgatttcaaggtggcacccagcatcctgaagccaagaaaggtgggcctcgacctgtgactcacacccagtggacagtgctgagcacggggtcagggctggagggcacaggcagagggcagctcccaggctggctggcaccccaagggaagagctggtctccctcagaagccccttcctccacagacttctgatcatctccctcttctcccctcctttcacaccgaggctcctgctctcctgtgcctccgaggcccccagctggaagtgccttgttgcctctgccctttgaagtcggaacaattcctagcacctgtcggaaggtcaaggccaaaggcaaattcaaggccagactgtgacaaacccagggctgaggcctgccccatgaagaggctgagccccctgaaacccctgccccttgttggtacattccagaggcgcaggggcctgggggatatgaagctagggaagcccctgcttcgattccccactgcccttgtcctggatccaacaccaaataaaaagaaacaagtgaagtatttggggcttgactccattgctgttggagggtcaagagtggatggggcgaggccgtgtaccccagggtccacagcaagagcctgaggccatcagcagctcctccgtgcagcgaggcccagaattcccacctaaggacagacatggggcttcctatttagggactcccccagcatctccgatccaggggtggggagcgtgagccttcactttacagatgaagaaactgagtctgaaagaggaggcatggcttacccaagatcacgtggcagtgagtcgacgcagggacatattgccagaactgccgagcactgggagccccccaaccccagagaacaagccaagctagcagaatgacacctaccgggcataggaacgttaatgccatgagacaggggaaggaattggccttgcctaaacctcagcccttctgcagagggcatgggtctatcccttcttcagcaaggggccaaggtcacctaaaaatgaaacatccaataagccacacccacctgaagaaaagtgtggcactgcttagttgtagtgggttgaactgtggtcccctgaaaagagatgtctacttggaccctgtgaatgtgaccttatgtgggaaaagagtctttgtagctgggtatggtggctcacacctgttatcccagcactttgagaggccaaggcaggagatcgcttgagcccgcaagttcaagaccagtctgggcaacatggtgaaaccgtttctacagaaaattagctgggtgtggtggcacacacctgtagtcctagctactcgggaggcctaggtgggaggattacctgagcctgggaagatcaaaactgtggtgagctgtgatcacgccactgcgctctgagcctgggagacagagtgaaaccctaaatcaaaaaaaaaaaaaaa

SEQ ID NO: 195923 - DNA, 756 bp, Homo sapiens
  Payload ID: 18662
  Gene Name: tubulin tyrosine ligase-like family member 3
  ENST ID: ENST00000426827
  CDS Start-End: 190-756
agatgccaggcgggcagccccgcccctgcgcgccgcctcagcggcgccttcaagacgctggtcccaggcacccacgcccagggcgcctcggatacccaccccctcggccccccgcacaccccggtcctcgacccctctccgcaggatggtttcccggtcctctggcgaggatcctccaaggcgtctcacatgaaccggctcagaaacgccaaaatctacgtggagagagctgtcaagcagaagaagatctttacaatccaaggctgctacccggtgatccggtgtctcttgcgccggaggggctgggtggagaagaagatggtccatcgctcaggccccaccctgctgccaccccagaaggatctggatagctcagcgatgggtgacagtgacaccactgaggatgaggatgaagatgaggacgaggagttccagccatcacagctgttcgacttcgatgatttactgaaatttgatgacctagatggaacacatgctctgatgtcccgcatggtccagaatgagatcccctacttcatctggaccactcggcgggatgtgctcgactgtcgcttcctctccaaggatcagatgataaaccactacgcccgggctggctcctttaccacaaaggtgggtctatgtctcaatctccggaatttgccgtggtttgatgaggttgatgccaactccttcttcccacgctgctactgcctgggggctgaggatgacaaaaaagccttcataggtaaggag

SEQ ID NO: 195924 - DNA, 2767 bp, Homo sapiens
  Payload ID: 18662
  Gene Name: tubulin tyrosine ligase-like family member 3
  ENST ID: ENST00000426895
  CDS Start-End: 20-2767
cgagcgcggcgaggggcgcatgcagggccccgacgcgccactgctcctgagcgcgagggagctggggcccgggcgccggggctcggcctcctggtaccgccaggagggcggcgcggtgtgcaactggctgcggaagccgcagccgctcgagccacgcaccagtttcccctcggcgcgccgctccgagttccgtccacccaggaggctgccatgggccggccctgcctccgcccagtccgaggagggtcacgcaggcggcagatgccaggcgggcagccccgcccctgcgcgccgcctcagcggcgccttcaagacgctggtcccaggcacccacgcccagggcgcctcggatacccaccccctcggccccccgcacaccccggtcctcgacccctctccgcaggatggtttcccggtcctctggcgaggatcctccaaggcgtctcacatgaaccggctcagaaacgccaaaatctacgtggagagagctgtcaagcagaagaagatctttacaatccaaggctgctacccggtgatccggtgtctcttgcgccggaggggctgggtggagaagaagatggtccatcgctcaggccccaccctgctgccaccccagaaggatctggatagctcagcgatgggtgacagtgacaccactgaggatgaggatgaagatgaggacgaggagttccagccatcacagctgttcgacttcgatgatttactgaaatttgatgacctagatggaacacatgctctgatggtgggtctatgtctcaatctccggaatttgccgtggtttgatgaggttgatgccaactccttcttcccacgctgctactgcctgggggctgaggatgacaaaaaagccttcatagaggacttctggctgactgctgcccgcaacgttctcaagctggtggtgaagtctgagtggaagtcataccctattcaggcagtagaggaagaggcctcaggagacaagcagcccaagaaacaggagaaaaacccagtgttggtgtccccagagtttgtggatgaagctctgtgtgcgtgcgaggagtaccttagcaacttggcccacatggacatcgacaaggacctggaggccccgctgtacctcacccccgagggctggtccctcttcctccagcgctactaccaagtggtccacgaaggggcagaactcaggcacctcgacactcaggtccagcgctgtgaggacatcctgcagcagctgcaggccgtggtaccccagatagacatggaaggggatcgcaacatctggatcgtgaagccaggagccaagtcccgcggacgaggcatcatgtgcatggaccacctggaggagatgctgaagctggtgaacggcaaccccgtggtgatgaaggacggcaagtgggtggtgcagaagtatattgagcggcccctcctcatctttggcaccaagtttgacctcagacagtggttcctggtaactgactggaacccacttaccgtgtggttctaccgcgacagctatatccgcttttccacgcagcccttctccctgaagaacctggacaactcagtgcacctgtgcaacaactccatccagaagcacctggagaactcatgccatcggcatccactgcttccgccagacaacatgtggtctagccagaggttccaggcccacctgcaggagatgggtgccccaaatgcttggtccaccatcatcgtgcctggcatgaaggatgctgtgatccacgcacttcagacctcccaggacaccgtgcagtgtcggaaggccagctttgagctctatggcgctgacttcgtgttcggggaggacttccagccctggctgattgagatcaacgccagccccacgatggcaccctccacagcagtcactgcccggctctgtgctggcgtgcaagctgacaccctgcgcgtggtcattgaccggatgctggaccgcaactgtgacacaggagcctttgagctcatctataagcagcctgctgtggaggtgcctcaatatgtgggcatccggctcctggtagagggcttcaccatcaagaagcccatggcgatgtgtcatcggcggatgggggtccgcccagcagtccctctgctgacccagcgaggctctggggaagcccgtcaccacttccccagcctccacaccaaggcccagctgccttctccccatgtactccgacaccagggccaggtcctcagacgacagcacagcaagctggtgggcactaaggccctgtcgaccacaggcaaggccttgaggactctacccacggctaaggtcttcatttccctcccaccgaaccttgatttcaaggtggcacccagcatcctgaagccaagaaaggctcctgctctcctgtgcctccgaggcccccagctggaagtgccttgttgcctctgccctttgaagtcggaacaattcctagcacctgtcggaaggtcaaggccaaaggcaaattcaaggccagactgtgacaaacccagggctgaggcctgccccatgaagaggctgagccccctgaaacccctgccccttgttggtacattccagaggcgcaggggcctgggggatatgaagctagggaagcccctgcttcgattccccactgcccttgtcctggatccaacaccaaataaaaagaaacaagtgaagtatttggggcttgactccattgctgttggagggtcaagagtggatggggcgaggccgtgtaccccagggtccacagcaagagcctga

SEQ ID NO: 195925 - DNA, 497 bp, Homo sapiens
  Payload ID: 18662
  Gene Name: tubulin tyrosine ligase-like family member 3
  ENST ID: ENST00000439814
  CDS Start-End: 151-497
agtgccctgctcatcaagggtctgggtgaggccccaggtcataaggaagccctcgctcgactgccccggggcccatcgcagcccccaaccagccccgagcggtctgatggtttcccggtcctctggcgaggatcctccaaggcgtctcacatgaaccggctcagaaacgccaaaatctacgtggagagagctgtcaagcagaagaagatctttacaatccaaggctgctacccggtgatccggtgtctcttgcgccggaggggctgggtggagaagaagatggtccatcgctcaggccccaccctgctgccaccccagaaggatctggatagctcagcgatgggtgacagtgacaccactgaggatgaggatgaagatgaggacgaggagttccagccatcacagctgttcgacttcgatgatttactgaaatttgatgacctagatggaacacatgctctgatgtcccgcatggtccagaatgagatcccctactt

SEQ ID NO: 195926 - DNA, 3233 bp, Homo sapiens
  Payload ID: 18662
  Gene Name: tubulin tyrosine ligase-like family member 3
  ENST ID: ENST00000427220
  CDS Start-End: 728-1339
cgggagaggaggcggcgacgcggaggggcgcgggatcaggggccctgggagggcgagcgcggcgaggggcgcatgcagggccccgacgcgccactgctcctgagcgcgagggagctggggcccgggcgccggggctcggcctcctggtaccgccaggagggcggcgcggtgtgcaactggctgcggaagccgcagccgctcgagccacgcaccagtttcccctcggcgcgccgctccgagttccgtccacccaggaggctgccatgggccggccctgcctccgcccagtccgaggagggtcacgcaggcggcagatgccaggcgggcagccccgcccctgcgcgccgcctcagcggcgccttcaagacgctggtcccaggcacccacgcccagggcgcctcggatacccaccccctcggccccccgcacaccccggtcctcgacccctctccgcaggatggtgaggcccgtgcggcccgctcgctctggcctacagcggctgcgaggacgacaagacgctggggtggagggactgggggtcgggagaagagcggctgagggtgggcatctggatgaaggcaggaggaagaaaagaggcgtggctatgggcggccagaaaagatcctaggccgagaccctaggcccagcctcagtgtaccccgcccctattccgcatctttctgcaggtttcccggtcctctggcgaggatcctccaaggcgtctcacatgaaccggctcagaaacgccaaaatctacgtggagagagctgtcaagcagaagaagatctttacaatccaaggctgctacccggtgatccggtgtctcttgcgccggaggggctgggtggagaagaagatggtccatcgctcaggccccaccctgctgccaccccagaaggatctggatagctcagcgatgggtgacagtgacaccactgaggatgaggatgaagatgaggacgaggagttccagccatcacagctgttcgacttcgatgatttactgaaatttgatgacctagatggaacacatgctctgatgtcccgcatggtccagaatgagatcccctacttcatctggaccactcggcgggatgtgctcgactgtcgcttcctctccaaggatcagatgataaaccactacgcccgggctggctcctttaccacaaaggtgggtctatgtctcaatctccggaatttgccgtggtttgatgaggttgatgccaactccttcttcccacgctgctactgcctgggggctgaggatgacaaaaaagccttcatagagacggggtttcactgtgttagccaggatggtctcgatctcctgacctcatgatccatccacctcagcctcccaaagtgctgggattacaggcgtcagccaccgtgaccagcctgaaacaggagcaagttctaaactcaggctctagagtcagaaaaggtagagtcaggttctggatccaaaatggggcaagtcatgatcaggttctggaaccagaacaggcctcaagcctaggggctgagcagggtatcccctggcctgggagcagaggacttctggctgactgctgcccgcaacgttctcaagctggtggtgaagtctgagtggaagtcataccctattcaggcagtagaggaagaggcctcaggagacaagcagcccaagaaacaggagaaaaacccagtgttggtgtccccagagtttgtggatgaagctctgtgtgcgtgcgaggagtaccttagcaacttggcccacatggacatcgacaaggacctggaggccccgctgtacctcacccccgagggctggtccctcttcctccagcgctactaccaagtggtccacgaaggggcagaactcaggcacctcgacactcaggtccagcgctgtgaggacatcctgcagcagctgcaggccgtggtaccccagatagacatggaaggggatcgcaacatctggatcgtgaagccaggagccaagtcccgcggacgaggcatcatgtgcatggaccacctggaggagatgctgaagctggtgaacggcaaccccgtggtgatgaaggacggcaactcagtgcacctgtgcaacaactccatccagaagcacctggagaactcatgccatcggcatccactgcttccgccagacaacatgtggtctagccagaggttccaggcccacctgcaggagatgggtgccccaaatgcttggtccaccatcatcgtgcctggcatgaaggatgctgtgatccacgcacttcagacctcccaggacaccgtgcagtgtcggaaggccagctttgagctctatggcgctgacttcgtgttcggggaggacttccagccctggctgattgagatcaacgccagccccacgatggcaccctccacagcagtcactgcccggctctgtgctggcgtgcaagctgacaccctgcgcgtggtcattgaccggatgctggaccgcaactgtgacacaggagcctttgagctcatctataagcagcccgtcaccacttccccagcctccacaccaaggcccagctgccttctccccatgtactccgacaccagggccaggtcctcagacgacagcacagcaagctggtgggcactaaggccctgtcgaccacaggcaaggccttgaggactctacccacggctaaggtcttcatttccctcccaccgaaccttgatttcaaggtggcacccagcatcctgaagccaagaaaggtgggcctcgacctgtgactcacacccagtggacagtgctgagcacggggtcagggctggagggcacaggcagagggcagctcccaggctggctggcaccccaagggaagagctggtctccctcagaagccccttcctccacagacttctgatcatctccctcttctcccctcctttcacaccgaggctcctgctctcctgtgcctccgaggcccccagctggaagtgccttgttgcctctgccctttgaagtcggaacaattcctagcacctgtcggaaggtcaaggccaaaggcaaattcaaggccagactgtgacaaacccagggctgaggcctgccccatgaagaggctgagccccctgaaacccctgccccttgttggtacattccagaggcgcaggggcctgggggatatgaagctagggaagcccctgcttcgattccccactgcccttgtcctggatccaacaccaaataaaaagaaacaagtgaagta

SEQ ID NO: 195927 - DNA, 1674 bp, Homo sapiens
  Payload ID: 18662
  Gene Name: tubulin tyrosine ligase-like family member 3
  ENST ID: ENST00000430390
  CDS Start-End: 1-355
gctcagaaacgccaaaatctacgtggagagagctgtcaagcagaagaagatctttacaatccaaggctgctacccggtgatccggtgtctcttgcgccggaggggctgggtggagaagaagatggtccatcgctcaggccccaccctgctgccaccccagaaggatctggatagctcagcgatgggtgacagtgacaccactgaggatgaggatgaagatgaggacgaggagttccagccatcacagctgttcgacttcgatgatttactgaaatttgatgacctagatggaacacatgctctgatgcgaaggggcagaactcaggcacctcgacactcaggtccagcgctgtgaggacatcctgcagcagctgcaggccgtggtaccccagatagacatggaaggggatcgcaacatctggatcgtgaagccaggagccaagtcccgcggacgaggcatcatgtgcatggaccacctggaggagatgctgaagctggtgaacggcaaccccgtggtgatgaaggacggcaagtgggtggtgcagaagtatattgagcggcccctcctcatctttggcaccaagtttgacctcagacagtggttcctggtaactgactggaacccacttaccgtgtggttctaccgcgacagctatatccgcttttccacgcagcccttctccctgaagaacctggacaactcagtgcacctgtgcaacaactccatccagaagcacctggagaactcatgccatcggcatccactgcttccgccagacaacatgtggtctagccagaggttccaggcccacctgcaggagatgggtgccccaaatgcttggtccaccatcatcgtgcctggcatgaaggatgctgtgatccacgcacttcagacctcccaggacaccgtgcagtgtcggaaggccagctttgagctctatggcgctgacttcgtgttcggggaggacttccagccctggctgattgagatcaacgccagccccacgatggcaccctccacagcagtcactgcccggctctgtgctggcgtgcaagctgacaccctgcgcgtggtcattgaccggatgctggaccgcaactgtgacacaggagcctttgagctcatctataagcagcccgtcaccacttccccagcctccacaccaaggcccagctgccttctccccatgtactccgacaccagggccaggtcctcagacgacagcacagcaagctggtgggcactaaggccctgtcgaccacaggcaaggccttgaggactctacccacggctaaggtcttcatttccctcccaccgaaccttgatttcaaggtggcacccagcatcctgaagccaagaaaggctcctgctctcctgtgcctccgaggcccccagctggaagtgccttgttgcctctgccctttgaagtcggaacaattcctagcacctgtcggaaggtcaaggccaaaggcaaattcaaggccagactgtgacaaacccagggctgaggcctgccccatgaagaggctgagccccctgaaacccctgccccttgttggtacattccagaggcgcaggggcctgggggatatgaagctagggaagcccctgcttcgattccccactgcccttgtcctggatccaacaccaaataaaaagaaacaagtgaagta

SEQ ID NO: 195928 - DNA, 2031 bp, Homo sapiens
  Payload ID: 18662
  Gene Name: tubulin tyrosine ligase-like family member 3
  ENST ID: ENST00000443148
  CDS Start-End: 1-1860
tcccgcatggtccagaatgagatcccctacttcatctggaccactcggcgggatgtgctcgactgtcgcttcctctccaaggatcagatgataaaccactacgcccgggctggctcctttaccacaaaggtgggtctatgtctcaatctccggaatttgccgtggtttgatgaggttgatgccaactccttcttcccacgctgctactgcctgggggctgaggatgacaaaaaagccttcatagaggacttctggctgactgctgcccgcaacgttctcaagctggtggtgaagtctgagtggaagtcataccctattcaggcagtagaggaagaggcctcaggagacaagcagcccaagaaacaggagaaaaacccagtgttggtgtccccagagtttgtggatgaagctctgtgtgcgtgcgaggagtaccttagcaacttggcccacatggacatcgacaaggacctggaggccccgctgtacctcacccccgagggctggtccctcttcctccagcgctactaccaagtggtccacgaaggggcagaactcaggcacctcgacactcaggtccagcgctgtgaggacatcctgcagcagctgcaggccgtggtaccccagatagacatggaaggggatcgcaacatctggatcgtgaagccaggagccaagtcccgcggacgaggcatcatgtgcatggaccacctggaggagatgctgaagctggtgaacggcaaccccgtggtgatgaaggacggcaagtgggtggtgcagaagtatattgagcggcccctcctcatctttggcaccaagtttgacctcagacagtggttcctggtaactgactggaacccacttaccgtgtggttctaccgcgacagctatatccgcttttccacgcagcccttctccctgaagaacctggacaactcagtgcacctgtgcaacaactccatccagaagcacctggagaactcatgccatcggcatccactgcttccgccagacaacatgtggtctagccagaggttccaggcccacctgcaggagatgggtgccccaaatgcttggtccaccatcatcgtgcctggcatgaaggatgctgtgatccacgcacttcagacctcccaggacaccgtgcagtgtcggaaggccagctttgagctctatggcgctgacttcgtgttcggggaggacttccagccctggctgattgagatcaacgccagccccacgatggcaccctccacagcagtcactgcccggctctgtgctggcgtgcaagctgacaccctgcgcgtggtcattgaccggatgctggaccgcaactgtgacacaggagcctttgagctcatctataagcagcctgctgtggaggtgcctcaatatgtgggcatccggctcctggtagagggcttcaccatcaagaagcccatggcgatgtgtcatcggcggatgggggtccgcccagcagtccctctgctgacccagcgaggctctggggaaggcaaggactcggggacccctacccacagccgaggtatcaggaagtttaaggaagttgcccaaggttgcacagctcagaaggggcacagctgggatgcagacccagcccgtcaccacttccccagcctccacaccaaggcccagctgccttctccccatgtactccgacaccagggccaggtcctcagacgacagcacagcaagctggtgggcactaaggccctgtcgaccacaggcaaggccttgaggactctacccacggctaaggtcttcatttccctcccaccgaaccttgatttcaaggtggcacccagcatcctgaagccaagaaaggtgggcctcgacctgtgactcacacccagtggacagtgctgagcacggggtcagggctggagggcacaggcagagggcagctcccaggctggctggcaccccaagggaagagctggtctccctcagaagccccttcctccacagacttctgatcatctccctcttctcccctcctttcacaccgaggct

SEQ ID NO: 195929 - DNA, 1041 bp, Homo sapiens
  Payload ID: 18662
  Gene Name: tubulin tyrosine ligase-like family member 3
  ENST ID: ENST00000431204
  CDS Start-End: 190-540
agatgccaggcgggcagccccgcccctgcgcgccgcctcagcggcgccttcaagacgctggtcccaggcacccacgcccagggcgcctcggatacccaccccctcggccccccgcacaccccggtcctcgacccctctccgcaggatggtttcccggtcctctggcgaggatcctccaaggcgtctcacatgaaccggctcagaaacgccaaaatctacgtggagagagctgtcaagcagaagaagatctttacaatccaaggctgctacccggtgatccggtgtctcttgcgccggaggggctgggtggagaagaagatggtccatcgctcaggccccaccctgctgccaccccagaaggatctggatagctcagcgatgggtgacagtgacaccactgaggatgaggatgaagatgaggacgaggagttccagccatcacagctgttcgacttcgatgatttactgaaatttgatgacctagatggaacacatgctctgatggcatcatgtgcatggaccacctggaggagatgctgaagctggtgaacggcaaccccgtggtgatgaaggacggcaagtgggtggtgcagaagtatattgagcggcccctcctcatctttggcaccaagtttgacctcagacagtggttcctggtaactgactggaacccacttaccgtgtggttctaccgcgacagctatatccgcttttccacgcagcccttctccctgaagaacctggacaactcagtgcacctgtgcaacaactccatccagaagcacctggagaactcatgccatcggcatccactgcttccgccagacaacatgtggtctagccagaggttccaggcccacctgcaggagatgggtgccccaaatgcttggtccaccatcatcgtgcctggcatgaaggatgctgtgatccacgcacttcagacctcccaggacaccgtgcagtgtcggaaggccagctttgagctctatggcgctgacttcgtgttcggggaggacttccagccctggctgattgagatca

SEQ ID NO: 195930 - DNA, 579 bp, Homo sapiens
  Payload ID: 18662
  Gene Name: tubulin tyrosine ligase-like family member 3
  ENST ID: ENST00000452823
  CDS Start-End: 1-579
gaaatttgatgacctagatggaacacatgctctgatgtcccgcatggtccagaatgagatcccctacttcatctggaccactcggcgggatgtgctcgactgtcgcttcctctccaaggatcagatgataaaccactacgcccgggctggctcctttaccacaaaggtgggtctatgtctcaatctccggaatttgccgtggtttgatgaggttgatgccaactccttcttcccacgctgctactgcctgggggctgaggatgacaaaaaagccttcataggagacaagcagcccaagaaacaggagaaaaacccagtgttggtgtccccagagtttgtggatgaagctctgtgtgcgtgcgaggagtaccttagcaacttggcccacatggacatcgacaaggacctggaggccccgctgtacctcacccccgagggctggtccctcttcctccagcgctactaccaagtggtccacgaaggggcagaactcaggcacctcgacactcaggtccagcgctgtgaggacatcctgcagcagctgcaggccgtggtaccccagatagacatggaagggga

SEQ ID NO: 195931 - DNA, 603 bp, Homo sapiens
  Payload ID: 18662
  Gene Name: tubulin tyrosine ligase-like family member 3
  ENST ID: ENST00000452597
  CDS Start-End: 183-603
aattaggtgttccctcctccagggcacatggctatgttctagctttgcagtgaatgttaaaggtgctcacagtgaaactgggtgactaataggatatagcagctggtcactcaacaaccctcacaggacagcattgcctgggtttcccggtcctctggcgaggatcctccaaggcgtctcacatgaaccggctcagaaacgccaaaatctacgtggagagagctgtcaagcagaagaagatctttacaatccaaggctgctacccggtgatccggtgtctcttgcgccggaggggctgggtggagaagaagatggtccatcgctcaggccccaccctgctgccaccccagaaggatctggatagctcagcgatgggtgacagtgacaccactgaggatgaggatgaagatgaggacgaggagttccagccatcacagctgttcgacttcgatgatttactgaaatttgatgacctagatggaacacatgctctgatgtcccgcatggtccagaatgagatcccctacttcatctggaccactcggcgggatgtgctcgactgtcgcttcctctccaaggatcagatgataaaccactacgccc

SEQ ID NO: 195932 - DNA, 549 bp, Homo sapiens
  Payload ID: 18662
  Gene Name: tubulin tyrosine ligase-like family member 3
  ENST ID: ENST00000414814
  CDS Start-End: 214-549
aaaagggattcctccagatggccagaggggtttcttctgatggggtggacaagggcacatggctatgttctagctttgcagtgaatgttaaaggtgctcacagtgaaactgggtgactaataggatatagcagctggtcactcaacaaccctcacaggacagcattgcctgggtttcccggtcctctggcgaggatcctccaaggcgtctcacatgaaccggctcagaaacgccaaaatctacgtggagagagctgtcaagcagaagaagatctttacaatccaaggctgctacccggtgatccggtgtctcttgcgccggaggggctgggtggagaagaagatggtccatcgctcaggccccaccctgctgccaccccagaaggatctggatagctcagcgatgggtgacagtgacaccactgaggatgaggatgaagatgaggacgaggagttccagccatcacagctgttcgacttcgatgatttactgaaatttgatgacctagatggaacacatgctctgatgtcccgcatggtccagaatgag

SEQ ID NO: 195933 - DNA, 540 bp, Homo sapiens
  Payload ID: 18662
  Gene Name: tubulin tyrosine ligase-like family member 3
  ENST ID: ENST00000418745
  CDS Start-End: 174-540
agtgccctgctcatcaagggtctgggtgaggccccaggtcataaggaagccctcgctcgactgccccggggcccatcgcagcccccaaccagccccgagcggtctgatggtgcccagggaatggtttccaaggtttcccggtcctctggcgaggatcctccaaggcgtctcacatgaaccggctcagaaacgccaaaatctacgtggagagagctgtcaagcagaagaagatctttacaatccaaggctgctacccggtgatccggtgtctcttgcgccggaggggctgggtggagaagaagatggtccatcgctcaggccccaccctgctgccaccccagaaggatctggatagctcagcgatgggtgacagtgacaccactgaggatgaggatgaagatgaggacgaggagttccagccatcacagctgttcgacttcgatgatttactgaaatttgatgacctagatggaacacatgctctgatgtcccgcatggtccagaatgagatcccctacttcatctggaccactcggcggg

SEQ ID NO: 195934 - DNA, 591 bp, Homo sapiens
  Payload ID: 18662
  Gene Name: tubulin tyrosine ligase-like family member 3
  ENST ID: ENST00000419081
  CDS Start-End: 265-591
aacactaactaactggggctcagtgctctcttccgccttcagtgccctgctcatcaagggtctgggtgaggccccaggtcataaggaagccctcgctcgactgccccggggcccatcgcagcccccaaccagccccgagcggtctgatggtgcccagggaatggtttccaaggcaatagcaaacggggcggggcttggaacggaggacaaggctcgagcctaggtttcccggtcctctggcgaggatcctccaaggcgtctcacatgaaccggctcagaaacgccaaaatctacgtggagagagctgtcaagcagaagaagatctttacaatccaaggctgctacccggtgatccggtgtctcttgcgccggaggggctgggtggagaagaagatggtccatcgctcaggccccaccctgctgccaccccagaaggatctggatagctcagcgatgggtgacagtgacaccactgaggatgaggatgaagatgaggacgaggagttccagccatcacagctgttcgacttcgatgatttactgaaatttgatgacctagatggaacacatgctctgatggtgggtctatgt

SEQ ID NO: 195935 - DNA, 536 bp, Homo sapiens
  Payload ID: 18662
  Gene Name: tubulin tyrosine ligase-like family member 3
  ENST ID: ENST00000430718
  CDS Start-End: 91-536
aatagcaaacggggcggggcttggaacggaggacaaggctcgagcctaggtttcccggtcctctggcgaggatcctccaaggcgtctcacatgaaccggctcagaaacgccaaaatctacgtggagagagctgtcaagcagaagaagatctttacaatccaaggctgctacccggtgatccggtgtctcttgcgccggaggggctgggtggagaagaagatggtccatcgctcaggccccaccctgctgccaccccagaaggatctggatagctcagcgatgggtgacagtgacaccactgaggatgaggatgaagatgaggacgaggagttccagccatcacagctgttcgacttcgatgatttactgaaatttgatgacctagatggaacacatgctctgatgtcccgcatggtccagaatgagatcccctacttcatctggaccactcggcgggatgtgctcgactgtcgcttcctctccaaggatcagatgataaaccactacgcccgggctggctcctttaccacaaaggt

SEQ ID NO: 195936 - DNA, 2097 bp, Homo sapiens
  Payload ID: 18662
  Gene Name: tubulin tyrosine ligase-like family member 3
  Uniprot ID: Q9Y4R7
  ENST ID: ENST00000430793
  CDS Start-End: 360-1664
gccttggggacatttagggcagagcctcgagtgacaggtcctgggacagtgggagccaagggcaagtgctagagttgcagtgaatttagagcaaagcctcagctaagtgacacatcccagggcagtaggggatctatctaggttcgtgctgggcctcaggtaagtgacaggccttaggacaatgggggctgtggcatgcgtcaggttacctgccttgatatgggatcgtgacaggcccctccctatgtgcaggagacaagcagcccaagaaacaggagaaaaacccagtgttggtgtccccagagtttgtggatgaagctctgtgtgcgtgcgaggagtaccttagcaacttggcccacatggacatcgacaaggacctggaggccccgctgtacctcacccccgagggctggtccctcttcctccagcgctactaccaagtggtccacgaaggggcagaactcaggcacctcgacactcaggtccagcgctgtgaggacatcctgcagcagctgcaggccgtggtaccccagatagacatggaaggggatcgcaacatctggatcgtgaagccaggagccaagtcccgcggacgaggcatcatgtgcatggaccacctggaggagatgctgaagctggtgaacggcaaccccgtggtgatgaaggacggcaagtgggtggtgcagaagtatattgagcggcccctcctcatctttggcaccaagtttgacctcagacagtggttcctggtaactgactggaacccacttaccgtgtggttctaccgcgacagctatatccgcttttccacgcagcccttctccctgaagaacctggacaactcagtgcacctgtgcaacaactccatccagaagcacctggagaactcatgccatcggcatccactgcttccgccagacaacatgtggtctagccagaggttccaggcccacctgcaggagatgggtgccccaaatgcttggtccaccatcatcgtgcctggcatgaaggatgctgtgatccacgcacttcagacctcccaggacaccgtgcagtgtcggaaggccagctttgagctctatggcgctgacttcgtgttcggggaggacttccagccctggctgattgagatcaacgccagccccacgatggcaccctccacagcagtcactgcccggctctgtgctggcgtgcaagctgacaccctgcgcgtggtcattgaccggatgctggaccgcaactgtgacacaggagcctttgagctcatctataagcagcctgctgtggaggtgcctcaatatgtgggcatccggctcctggtagagggcttcaccatcaagaagcccatggcgatgtgtcatcggcggatgggggtccgcccagcagtccctctgctgacccagcgaggctctggggaagcccgtcaccacttccccagcctccacaccaaggcccagctgccttctccccatgtactccgacaccagggccaggtcctcagacgacagcacagcaagctggtgggcactaaggccctgtcgaccacaggcaaggccttgaggactctacccacggctaaggtcttcatttccctcccaccgaaccttgatttcaaggtggcacccagcatcctgaagccaagaaaggtgggcctcgacctgtgactcacacccagtggacagtgctgagcacggggtcagggctggagggcacaggcagagggcagctcccaggctggctggcaccccaagggaagagctggtctccctcagaagccccttcctccacagacttctgatcatctccctcttctcccctcctttcacaccgaggctcctgctctcctgtgcctccgaggcccccagctggaagtgccttgttgcctctgccctttgaagtcggaacaattcctagcacctgtcggaaggtcaaggccaaaggcaaattcaaggccagactgtgacaaacccagggctgaggcctgccccatgaagaggctgagccccctgaaacccctgccccttgttggtacattccagaggcgcaggggcctgggggatatgaagctagggaagcccctgcttcgattccccactg

SEQ ID NO: 195937 - DNA, 565 bp, Homo sapiens
  Payload ID: 18662
  Gene Name: tubulin tyrosine ligase-like family member 3
  ENST ID: ENST00000417065
  CDS Start-End: 86-565
agtgctctcttccgccttcagtgccctgctcatcaagggtctgggtttcccggtcctctggcgaggatcctccaaggcgtctcacatgaaccggctcagaaacgccaaaatctacgtggagagagctgtcaagcagaagaagatctttacaatccaaggctgctacccggtgatccggtgtctcttgcgccggaggggctgggtggagaagaagatggtccatcgctcaggccccaccctgctgccaccccagaaggatctggatagctcagcgatgggtgacagtgacaccactgaggatgaggatgaagatgaggacgaggagttccagccatcacagctgttcgacttcgatgatttactgaaatttgatgacctagatggaacacatgctctgatggtgggtctatgtctcaatctccggaatttgccgtggtttgatgaggttgatgccaactccttcttcccacgctgctactgcctgggggctgaggatgacaaaaaagccttcatagaggacttctggctgactgctgcccgcaacgttctcaagctggtggtgaag

SEQ ID NO: 195938 - DNA, 1743 bp, Homo sapiens
  Payload ID: 18662
  Gene Name: tubulin tyrosine ligase-like family member 3
  Uniprot ID: Q9Y4R7
  ENST ID: ENST00000438141
  CDS Start-End: 360-1418
gccttggggacatttagggcagagcctcgagtgacaggtcctgggacagtgggagccaagggcaagtgctagagttgcagtgaatttagagcaaagcctcagctaagtgacacatcccagggcagtaggggatctatctaggttcgtgctgggcctcaggtaagtgacaggccttaggacaatgggggctgtggcatgcgtcaggttacctgccttgatatgggatcgtgacaggcccctccctatgtgcaggagacaagcagcccaagaaacaggagaaaaacccagtgttggtgtccccagagtttgtggatgaagctctgtgtgcgtgcgaggagtaccttagcaacttggcccacatggacatcgacaaggacctggaggccccgctgtacctcacccccgagggctggtccctcttcctccagcgctactaccaagtggtccacgaaggggcagaactcaggcacctcgacactcaggtccagcgctgtgaggacatcctgcagcagctgcaggccgtggtaccccagatagacatggaaggggatcgcaacatctggatcgtgaagccaggagccaagtcccgcggacgaggcatcatgtgcatggaccacctggaggagatgctgaagctggtgaacggcaaccccgtggtgatgaaggacggcaagtgggtggtgcagaagtatattgagcggcccctcctcatctttggcaccaagtttgacctcagacagtggttcctggtaactgactggaacccacttaccgtgtggttctaccgcgacagctatatccgcttttccacgcagcccttctccctgaagaacctggacaactcagtgcacctgtgcaacaactccatccagaagcacctggagaactcatgccatcggcatccactgcttccgccagacaacatgtggtctagccagaggttccaggcccacctgcaggagatgggtgccccaaatgcttggtccaccatcatcgtgcctggcatgaaggatgctgtgatccacgcacttcagacctcccaggacaccgtgcagtgtcggaaggccagctttgagctctatggcgctgacttcgtgttcggggaggacttccagccctggctgattgagatcaacgccagccccacgatggcaccctccacagcagtcactgcccggctctgtgctggcgtgcaagctgacaccctgcgcgtggtcattgaccggatgctggaccgcaactgtgacacaggagcctttgagctcatctataagcagcccgtcaccacttccccagcctccacaccaaggcccagctgccttctccccatgtactccgacaccagggccaggtcctcagacgacagcacagcaagctggtgggcactaaggccctgtcgaccacaggcaaggccttgaggactctacccacggctaaggtcttcatttccctcccaccgaaccttgatttcaaggtggcacccagcatcctgaagccaagaaaggctcctgctctcctgtgcctccgaggcccccagctggaagtgccttgttgcctctgccctttgaagtcggaacaattcctagcacctgtcggaaggtcaaggccaaaggcaaattcaaggccagactgtgacaaacccagggctgaggcctgccccatgaagaggctgagccccctgaaacccctgccccttgttggtacattccagaggcgcaggggcctgggggatatgaagctagg

SEQ ID NO: 195939 - DNA, 2848 bp, Homo sapiens
  Payload ID: 18662
  Gene Name: tubulin tyrosine ligase-like family member 3
  ENST ID: ENST00000455274
  CDS Start-End: 1351-2331
attctcccatctactacctatctgttcttcaggccatccactcatccattcttctgtcccaggtacttagacacttgtcttcccatccgtttgttagttgatccactcctcattcagccctcccatgggcctggcatgtagccgagcaccctggagagggcagactaagaagacatggtccgtccctgcctgtgaggagttcaggtctctgaggaggaggaagcagtgaaactgggctttacacatggcctgagaacagcttaggcctgaacataaggaacagcttggagtggaggggacacagaggaaccctcactatcatgcatgccaacccaaccactgcctgccctttcccttctggatttagctcgtgtctccaggctcctagtcctgtaatccagggacccatcagcgagggattcagggaagcagaggcagctctccaggaaggaggaaaatccctgcctcttccagagagactcccccattgctgtctcttgtgtgtgtcatgcacaaggaaggcttggttgtgtgccaggataaggggcacaagggcctcgggtgtggccagagaccccatgcttaagcttttatggtataggtcaggctgcaggggtttgagggcctcagttgtatatcagaatcttcagagcactgcgatgttcaggggtgagtcaggtctgtagatgtgcacggggtcttctgaagggtcagtttctgtaatcactttcaggtgtgtcagggccttgtgcagtaacagtgcacacagaagttagtgtttctgtgggctaagggttgtagctctgtatcaggattctgggagtgggtctggatttctggtgtgtggacttaagaagctgtgtcagacttgggggaggggcgttcatgtataactgggttcacataggccaagactcccaggtgcattttaggcagagcctcaggtgtgttagaggtcccaggggcagagaggctataggtgctgtcagaggccttggggacatttagggcagagcctcgagtgacaggtcctgggacagtgggagccaagggcaagtgctagagttgcagtgaatttagagcaaagcctcagctaagtgacacatcccagggcagtaggggatctatctaggttcgtgctgggcctcaggtaagtgacaggccttaggacaatgggggctgtggcatgcgtcaggttacctgccttgatatgggatcgtgacaggcccctccctatgtgcaggagacaagcagcccaagaaacaggagaaaaacccagtgttggtgtccccagagtttgtggatgaagctctgtgtgcgtgcgaggagtaccttagcaacttggcccacatggacatcgacaaggacctggaggccccgctgtacctcacccccgagggctggtccctcttcctccagcgctactaccaagtggtccacgaaggggcagaactcaggcacctcgacactcaggtccagcgctgtgaggacatcctgcagcagctgcaggccgtggtaccccagatagacatggaaggggatcgcaacatctggatcgtgaagccaggagccaagtcccgcggacgaggcatcatgtgcatggaccacctggaggagatgctgaagctggtgaacggcaaccccgtggtgatgaaggacggcaagtgggtggtgcagaagtatattgagcggcccctcctcatctttggcaccaagtttgacctcagacagtggttcctggtaactgactggaacccacttaccgtgtggttctaccgcgacagctatatccgcttttccacgcagcccttctccctgaagaacctggacaactcagtgcacctgtgcaacaactccatccagaagcacctggagaactcatgccatcggcatccactgcttccgccagacaacatgtggtctagccagaggttccaggcccacctgcaggagatgggtgccccaaatgcttggtccaccatcatcgtgcctggcatgaaggatgctgtgatccacgcacttcagacctcccaggacaccgtgcagtgtcggaaggccagctttgagctctatggcgctgacttcgtgttcggggaggacttccagccctggctgattgagatcaacgccagccccacgatggcaccctccacagcagtcactgcccggctctgtgctggcgtgcaagctgacaccctgcgcgtggtcattgaccggatgctggaccgcaactgtgacacaggagcctttgagctcatctataagcagggcccagctcctaacatgcaggtgtcaccagagagaaatgcaccactgtgcccagcaccatagctctggctcagagagtttgcctgagaaagcagcagacagaaaacaaaaggtgcgagttgctcccgaaggaactgacttcatgtgcaacagagctcggagaagtccaaggctaagcacactctccagaacagtggaggttgtgctgaaaggcaactgggaggcgacggagagcctgggaggtgcgggctacactggaggccagcaagtctgccagagagaaacagaaaaaaagacaggtgggaagagctctcctggggtcagaacaaagcttaatatcttctttgacaaagaacgtaacatcaaaatagccaactatgggtttagttcaacatttgcaaagagagacaacactgaaaagggaacgtttgatgggactctcccttatgcaggcccagaactcttcttgggccatgggtaccaatgccctgccatcaacgtttggagccttggcatcatcgtatgcaaaatggtggctggggccctgccattttatgagcagaactgtaaggatatactg

SEQ ID NO: 195940 - DNA, 545 bp, Homo sapiens
  Payload ID: 18662
  Gene Name: tubulin tyrosine ligase-like family member 3
  ENST ID: ENST00000422738
  CDS Start-End: 61-545
attccgcatctttctgcaggtttcccggtcctctggcgaggatcctccaaggcgtctcacatgaaccggctcagaaacgccaaaatctacgtggagagagctgtcaagcagaagaagatctttacaatccaaggctgctacccggtgatccggtgtctcttgcgccggaggggctgggtggagaagaagatggtccatcgctcaggccccaccctgctgccaccccagaaggatctggatagctcagcgatgggtgacagtgacaccactgaggatgaggatgaagatgaggacgaggagttccagccatcacagctgttcgacttcgatgatttactgaaatttgatgacctagatggaacacatgctctgatggttgatgccaactccttcttcccacgctgctactgcctgggggctgaggatgacaaaaaagccttcatagaggacttctggctgactgctgcccgcaacgttctcaagctggtggtgaagtctgagtggaagtcataccctattcaggcagtagaggaagaggcctcagg

SEQ ID NO: 195941 - DNA, 540 bp, Homo sapiens
  Payload ID: 18662
  Gene Name: tubulin tyrosine ligase-like family member 3
  ENST ID: ENST00000438596
  CDS Start-End: 86-540
agtgctctcttccgccttcagtgccctgctcatcaagggtctgggtttcccggtcctctggcgaggatcctccaaggcgtctcacatgaaccggctcagaaacgccaaaatctacgtggagagagctgtcaagaagaagatctttacaatccaaggctgctacccggtgatccggtgtctcttgcgccggaggggctgggtggagaagaagatggtccatcgctcaggccccaccctgctgccaccccagaaggatctggatagctcagcgatgggtgacagtgacaccactgaggatgaggatgaagatgaggacgaggagttccagccatcacagctgttcgacttcgatgatttactgaaatttgatgacctagatggaacacatgctctgatgtcccgcatggtccagaatgagatcccctacttcatctggaccactcggcgggatgtgctcgactgtcgcttcctctccaaggatcagatgataaaccactacgcccgggctggctcctttaccacaaaggtgggtctatgtct

SEQ ID NO: 195942 - DNA, 3811 bp, Homo sapiens
  Payload ID: 18662
  Gene Name: tubulin tyrosine ligase-like family member 3
  ENST ID: ENST00000473661
  CDS Start-End: 2093-2419
ggtttcactgtgttagccaggatggtctcgatctcctgacctcatgatccatccacctcagcctcccaaagtgctgggattacaggcgtcagccaccgtgaccagcctgaaacaggagcaagttctaaactcaggctctagagtcagaaaaggtagagtcaggttctggatccaaaatggggcaagtcatgatcaggttctggaaccagaacaggcctcaagcctaggggctgagcagggtatcccctggcctgggagcagaggacttctggctgactgctgcccgcaacgttctcaagctggtggtgaagtctgagtggaagtcataccctattcaggcagtagaggaagaggcctcaggtaagtactgtggttacctccactctcccacccatttatcctccacccatccgcccttccacctatctgcccttctacctatctattcatccacgcacctactggttcatccacacatctgtgtatgattcacatctacccatctatccatccatccaccagccatccatccactcatccacccacgtattcacccactctctgatctaccgattcacccacccacccttccactcatccttccatcctcccacctgtcacccattgttaatctcgtcattcatctacctgatgtcagctccatactccccatccatctatccactccctgcctacctatccttccacagatccacctacccatctatctacctgctattccattctcccatctactacctatctgttcttcaggccatccactcatccattcttctgtcccaggtacttagacacttgtcttcccatccgtttgttagttgatccactcctcattcagccctcccatgggcctggcatgtagccgagcaccctggagagggcagactaagaagacatggtccgtccctgcctgtgaggagttcaggtctctgaggaggaggaagcagtgaaactgggctttacacatggcctgagaacagcttaggcctgaacataaggaacagcttggagtggaggggacacagaggaaccctcactatcatgcatgccaacccaaccactgcctgccctttcccttctggatttagctcgtgtctccaggctcctagtcctgtaatccagggacccatcagcgagggattcagggaagcagaggcagctctccaggaaggaggaaaatccctgcctcttccagagagactcccccattgctgtctcttgtgtgtgtcatgcacaaggaaggcttggttgtgtgccaggataaggggcacaagggcctcgggtgtggccagagaccccatgcttaagcttttatggtataggtcaggctgcaggggtttgagggcctcagttgtatatcagaatcttcagagcactgcgatgttcaggggtgagtcaggtctgtagatgtgcacggggtcttctgaagggtcagtttctgtaatcactttcaggtgtgtcagggccttgtgcagtaacagtgcacacagaagttagtgtttctgtgggctaagggttgtagctctgtatcaggattctgggagtgggtctggatttctggtgtgtggacttaagaagctgtgtcagacttgggggaggggcgttcatgtataactgggttcacataggccaagactcccaggtgcattttaggcagagcctcaggtgtgttagaggtcccaggggcagagaggctataggtgctgtcagaggccttggggacatttagggcagagcctcgagtgacaggtcctgggacagtgggagccaagggcaagtgctagagttgcagtgaatttagagcaaagcctcagctaagtgacacatcccagggcagtaggggatctatctaggttcgtgctgggcctcaggtaagtgacaggccttaggacaatgggggctgtggcatgcgtcaggttacctgccttgatatgggatcgtgacaggcccctccctatgtgcaggagacaagcagcccaagaaacaggagaaaaacccagtgttggtgtccccagagtttgtggatgaagctctgtgtgcgtgcgaggagtaccttagcaacttggcccacatggacatcgacaaggacctggaggccccgctgtacctcacccccgagggctggtccctcttcctccagcgctactaccaagtggtccacgaaggggcagaactcaggcacctcgacactcaggtccagcgctgtgaggacatcctgcagcagctgcaggccgtggtaccccagatagacatggaaggggatcgcaacatctggatcgtgaagccaggagccaagtcccgcggacgaggcatcatgtgcatggaccacctggaggagatgctgaagctggtgaacggcaaccccgtggtgatgaaggacggcaacccttctccctgaagaacctggacaactcagtgcacctgtgcaacaactccatccagaagcacctggagaactcatgccatcggcatccactgcttccgccagacaacatgtggtctagccagaggttccaggcccacctgcaggagatgggtgccccaaatgcttggtccaccatcatcgtgcctggcatgaaggatgctgtgatccacgcacttcagacctcccaggacaccgtgcagtgtcggaaggccagctttgagctctatggcgctgacttcgtgttcggggaggacttccagccctggctgattgagatcaacgccagccccacgatggcaccctccacagcagtcactgcccggctctgtgctggcgtgcaagctgacaccctgcgcgtggtcattgaccggatgctggaccgcaactgtgacacaggagcctttgagctcatctataagcagcctgctgtggaggtgcctcaatatgtgggcatccggctcctggtagagggcttcaccatcaagaagcccatggcgatgtgtcatcggcggatgggggtccgcccagcagtccctctgctgacccagcgaggctctggggaagccgaggtatcaggaagtttaaggaagttgcccaaggttgcacagctcagaaggggcacagctgggatgcagacccagcccgtcaccacttccccagcctccacaccaaggcccagctgccttctccccatgtactccgacaccagggccaggtcctcagacgacagcacagcaagctggtgggcactaaggccctgtcgaccacaggcaaggccttgaggactctacccacggctaaggtcttcatttccctcccaccgaaccttgatttcaaggtggcacccagcatcctgaagccaagaaaggtgggcctcgacctgtgactcacacccagtggacagtgctgagcacggggtcagggctggagggcacaggcagagggcagctcccaggctggctggcaccccaagggaagagctggtctccctcagaagccccttcctccacagacttctgatcatctccctcttctcccctcctttcacaccgaggctcctgctctcctgtgcctccgaggcccccagctggaagtgccttgttgcctctgccctttgaagtcggaacaattcctagcacctgtcggaaggtcaaggccaaaggcaaattcaaggccagactgtgacaaacccagggctgaggcctgccccatgaagaggctgagccccctgaaacccctgccccttgttggtacattccagaggcgcaggggcctgggggatatgaagctagggaagcccctgcttcgattccccactgcccttgtcctggatccaacaccaaataaaaagaaacaagtgaagta

SEQ ID NO: 195943 - DNA, 543 bp, Homo sapiens
  Payload ID: 18662
  Gene Name: tubulin tyrosine ligase-like family member 3
  ENST ID: ENST00000471058
  CDS Start-End: 1-543
acaccgtgcagtgtcggaaggccagctttgagctctatggcgctgacttcgtgttcggggaggacttccagccctggctgattgagatcaacgccagccccacgatggcaccctccacagcagtcactgcccggctctgtgctggcgtgcaagctgacaccctgcgcgtggtcattgaccggatgctggaccgcaactgtgacacaggagcctttgagctcatctataagcaggctcctgctctcctgtgcctccgaggcccccagctggaagtgccttgttgcctctgccctttgaagtcggaacaattcctagcacctgtcggaaggtcaaggccaaaggcaaattcaaggccagactgtgacaaacccagggctgaggcctgccccatgaagaggctgagccccctgaaacccctgccccttgttggtacattccagaggcgcaggggcctgggggatatgaagctagggaagcccctgcttcgattccccactgcccttgtcctggatccaacaccaaataaaaagaaacaagtgaagt

SEQ ID NO: 195944 - DNA, 603 bp, Homo sapiens
  Payload ID: 18662
  Gene Name: tubulin tyrosine ligase-like family member 3
  ENST ID: ENST00000474948
  CDS Start-End: 1-211
gaaatttgatgacctagatggaacacatgctctgatgtcccgcatggtccagaatgagatcccctacttcatctggaccactcggcgggatgtgctcgactgtcgcttcctctccaaggatcagatgataaaccactacgcccgggctggctcctttaccacaaagagacggggtttcactgtgttagccaggatggtctcgatctcctgacctcatgatccatccacctcagcctcccaaagtgctgggattacaggcgtcagccaccgtgaccagcctgaaacaggagcaagttctaaactcaggctctagagtcagaaaaggtagagtcaggttctggatccaaaatggggcaagtcatgatcaggttctggaaccagaacaggcctcaagcctaggggctgagcagggtatcccctggcctgggagcagaggacttctggctgactgctgcccgcaacgttctcaagctggtggtgaagtctgagtggaagtcataccctattcaggcagtagaggaagaggcctcaggagacaagcagcccaagaaacaggagaaaaacccagtgttggtgtccccagagtttgtggatgaagctctg

SEQ ID NO: 195945 - DNA, 507 bp, Homo sapiens
  Payload ID: 18662
  Gene Name: tubulin tyrosine ligase-like family member 3
  ENST ID: ENST00000496246
  CDS Start-End: 1-84
ctgaaatttgatgacctagatggaacacatgctctgatgagacggggtttcactgtgttagccaggatggtctcgatctcctgacctcatgatccatccacctcagcctcccaaagtgctgggattacaggcgtcagccaccgtgaccagcctgaaacaggagcaagttctaaactcaggctctagagtcagaaaaggtagagtcaggttctggatccaaaatggggcaagtcatgatcaggttctggaaccagaacaggcctcaagcctaggggctgagcagggtatcccctggcctgggagcagaggacttctggctgactgctgcccgcaacgttctcaagctggtggtgaagtctgagtggaagtcataccctattcaggcagtagaggaagaggcctcaggagacaagcagcccaagaaacaggagaaaaacccagtgttggtgtccccagagtttgtggatgaagctctgtgtgcgtgcgaggagtaccttagcaacttgg

SEQ ID NO: 195946 - DNA, 4730 bp, Homo sapiens
  Payload ID: 18663
  Gene Name: tubulin tyrosine ligase-like family member 4
  Uniprot ID: Q14679
  ENST ID: ENST00000258398
  CDS Start-End: 104-3703
ttcagactgacagacttcaaggatgcagctgctactaccggaggtgtgtggcaccttacctcagcaaggccatgagaccgtgtggccatgatgtgggcccctcatggcctcagcaggaacacagcactatagtattggcctccgccagaaaaacagcttcaagcagagtggtccctcaggcacagtacctgccacgccacctgagaaaccctcggagggcagagtctggcctcaggcccatcagcaagtgaagccaatctggaagctggaaaagaagcaagtggagacactgtcagcagggttgggcccaggcctcttgggcgtcccaccccagccagcatatttcttttgccccagcactttatgtagctctgggaccacggctgtcattgcaggccacagcagttcctgttacctacactctctcccggacttgttcaacagcaccctgctataccgccgctccagctataggcaaaaaccgtaccagcaactggagtctttctgcttgcgttcgagcccgtcagaaaaaagccctttttctctccctcaaaagagcctccctgtcagtctcactgccaacaaggccacttcttccatggtcttctccatggcccagcccatggcctcctcatccacagaaccatacctctgcttggcagcggctggggaaaacccttcagggaagagcctggcctctgccatctcagggaagatcccatctccactctcttcctcctataagcccatgctgaataataattccttcatgtggccaaatagcacgccagtgcctttattgcagaccacacagggcctgaagccagtatcgccacccaagatccagcctgtctcctggcatcattcagggggtactggagactgtgcaccgcagcctgttgaccataaggtgcccaaaagcattggcactgtcccagctgatgccagtgcccatatcgccttgtctaccgctagctcccacgacacatccaccaccagtgttgcctcttcctggtataaccggaataacttagccatgagggcagagccactttcctgtgctctggatgacagctctgattcccaggatccaactaaggagattcggttcactgaggccgtgaggaaattgaccgcaagaggctttgagaagatgccgaggcaaggctgccagcttgaacagtctagtttcctgaaccccagcttccagtggaatgtcctcaacaggagcaggcggtggaaacctcctgcggtaaatcagcagtttcctcaggaggatgctggatcggtcaggcgggtcctccctggtgcctcagataccttggggttggacaatacagtcttctgtaccaagcgtatcagcattcacctccttgcctcacatgccagtgggctcaatcacaaccctgcctgtgaatctgtaattgactcctcagcatttggagaaggcaaagctccaggtcccccttttcctcaaactcttggcatagccaacgtggccacccgcctctcttccatccagctgggccagtctgagaaggagagacctgaggaggccagggagctggactcatctgatagggatattagttcagctactgacctccagccagatcaggctgagactgaagatacagaagaagaactagtagatggtttggaagactgttgtagccgtgatgagaatgaagaggaggagggagactcagagtgctcctcattaagtgctgtctcccccagcgaatcggtggccatgatctctagaagctgtatggaaattctgaccaaacccctttccaatcatgagaaagttgtccgaccagccctcatctacagtctctttcccaacgttccccctaccatctattttggcactcgggatgagagagtggagaaacttccctgggaacagaggaagttgctccgatggaagatgagcacagtgacccccaacattgtcaagcagaccattggacggtcccacttcaaaatcagcaaaagaaacgatgactggctgggctgctggggtcaccacatgaagtctcctagtttccgatccattcgagagcatcagaagctaaaccatttcccaggctcattccagattgggaggaaggaccggctatggcggaacctgtcacgtatgcagagccgctttggcaagaaggagttcagtttcttcccccagtcctttatcctgccccaggacgccaagctcctgcgcaaagcgtgggagagcagcagccgccaaaagtggattgtgaagccaccagcatcagctcgaggcattggcatccaggttattcacaagtggagtcagctccccaagcgaaggcccctcctggtacagaggtatctacacaaaccctacctcatcagcggcagcaagtttgacctgcggatctatgtttatgtcacttcctacgatcctctgcggatttacctcttttcagatggactggtccgctttgccagttgcaagtattcgccttccatgaagagccttggcaataagttcatgcacctgaccaactacagtgtcaataaaaagaatgccgagtaccaggccaatgcagatgaaatggcttgccagggccacaaatgggcactgaaggctttgtggaactacctgagccagaagggagtcaatagcgacgccatctgggagaagataaaggatgttgttgtcaaaactatcatctcgtcagagccctatgtgaccagcctgctcaagatgtatgtgcgacggccctatagctgccatgaactctttggttttgacatcatgctagacgaaaacctcaagccctgggtcctggaagtcaacatttccccaagcctccactccagctctccactggatatcagcatcaaaggccagatgattcgtgaccttctgaatctggcaggttttgtcctgcccaatgcagaggatatcatttccagccccagcagctgcagcagctccaccaccagcctgcccacctcccctggggacaaatgtcgaatggctccagagcatgtcactgcacagaagatgaagaaagcctattatctgacccagaaaattcctgatcaggacttctatgcatctgtgctggatgtcctgacaccagatgatgttcggattctggttgagatggaagatgagttttctcgccgtggtcagtttgaacgaatttttccttctcatatctcctctcgctatctccgcttttttgagcagccacgatatttcaacattctcaccacccaatgggaacagaaataccatggcaacaagcttaaaggagtagatctgctccggagttggtgctacaaagggttccacatgggagttgtctctgattctgctccagtgtggtctctcccgacatcacttctgactatctcaaaggatgacgtgatactcaatgccttcagcaaatcagagactagcaagctgggaaaacaaagctcctgtgaggttagcctactactctctgaagacgggaccacgcccaaatccaagaagactcaagctggcctttccccttatccccagaaacccagttcctcaaaggacagtgaggacaccagcaaagagcccagcctttctacccagacgttacctgtgatcaagtgctctgggcagacttcaagactttctgcttcctccactttccagtcaatcagtgactccctcctggctgtgagcccataactggcctctctccaaaagcctctgcccaggagcatgggcatcagctacctcacgggaaccagcctgctgttcagaccagtctgaccccctacccctttcaccctgtccctcctcagagtattttttgaagtggttgcattatagagatgggtatttgtagggccggagggatggtagtgatggggagaaggtgaggaagggtcaccctctgtcacctgtctgcctggctggcacctcatatctcagcagagaagccagtggtggccacgcagccttataaagcaggttttggtttctaccttaagtgagccatgtgtggtttgtctgggggccctggtgtggttgctgagttgtagctcaagaggagaaaacatacagaacatatttggaccggaaatcctttgttctgaatttgagggggtcttctgaggtccttacttccttaggtctttcctcacccctctcccaccgctgtcctgaggagaaacccttgaacttcctcagtagacaggcggagaggccacaacatgccgaacccatttcctgtcatcctagtcttgggtcttcaccgcctccttccaaatacccaccctgccagcagccctaggtcttcctgttctgaccccccatcactgctcgttcagccttctagatgtctctctcgtggacatctgttctttagctgttggctttctctgaggtgtgagagggtctatgaactttgtgaatttcccatggccccagtgaaggagcccagataatcccagtagctgttacctgtctccatgtatcaaaggacacagtccagggggagggtggaaggagatgtggtttctctatagtgcaacaaacatggtttctcaatgttctgctgtgcagcaagcagggtctggcggcttggtaggtgggtttcaggagcagtcactattgtaggatgggcttccaatcaaacctcagactaaactcttgtactgaactgattctacctccctcctctagactcagtaaacagtgactattcaataaa

SEQ ID NO: 195947 - DNA, 4967 bp, Homo sapiens
  Payload ID: 18663
  Gene Name: tubulin tyrosine ligase-like family member 4
  Uniprot ID: Q14679
  ENST ID: ENST00000392102
  CDS Start-End: 341-3940
gcggtgtgtggcaggcggcagcggcgctggcggccgagtgcgcttgtcacgcgtggcggtgcgtggttgctaggggcgcctgaggctgccgggtagcccagcaggccgagggaggaagtagcgtggagccggtgccgagccggggcgaagctggatcccctagatagactgtcttcaagctcactgatattttcctctgcttgatccattgtgctgttgagagcctctagtaaatttttcagactgacagacttcaaggatgcagctgctactaccggaggtgtgtggcaccttacctcagcaaggccatgagaccgtgtggccatgatgtgggcccctcatggcctcagcaggaacacagcactatagtattggcctccgccagaaaaacagcttcaagcagagtggtccctcaggcacagtacctgccacgccacctgagaaaccctcggagggcagagtctggcctcaggcccatcagcaagtgaagccaatctggaagctggaaaagaagcaagtggagacactgtcagcagggttgggcccaggcctcttgggcgtcccaccccagccagcatatttcttttgccccagcactttatgtagctctgggaccacggctgtcattgcaggccacagcagttcctgttacctacactctctcccggacttgttcaacagcaccctgctataccgccgctccagctataggcaaaaaccgtaccagcaactggagtctttctgcttgcgttcgagcccgtcagaaaaaagccctttttctctccctcaaaagagcctccctgtcagtctcactgccaacaaggccacttcttccatggtcttctccatggcccagcccatggcctcctcatccacagaaccatacctctgcttggcagcggctggggaaaacccttcagggaagagcctggcctctgccatctcagggaagatcccatctccactctcttcctcctataagcccatgctgaataataattccttcatgtggccaaatagcacgccagtgcctttattgcagaccacacagggcctgaagccagtatcgccacccaagatccagcctgtctcctggcatcattcagggggtactggagactgtgcaccgcagcctgttgaccataaggtgcccaaaagcattggcactgtcccagctgatgccagtgcccatatcgccttgtctaccgctagctcccacgacacatccaccaccagtgttgcctcttcctggtataaccggaataacttagccatgagggcagagccactttcctgtgctctggatgacagctctgattcccaggatccaactaaggagattcggttcactgaggccgtgaggaaattgaccgcaagaggctttgagaagatgccgaggcaaggctgccagcttgaacagtctagtttcctgaaccccagcttccagtggaatgtcctcaacaggagcaggcggtggaaacctcctgcggtaaatcagcagtttcctcaggaggatgctggatcggtcaggcgggtcctccctggtgcctcagataccttggggttggacaatacagtcttctgtaccaagcgtatcagcattcacctccttgcctcacatgccagtgggctcaatcacaaccctgcctgtgaatctgtaattgactcctcagcatttggagaaggcaaagctccaggtcccccttttcctcaaactcttggcatagccaacgtggccacccgcctctcttccatccagctgggccagtctgagaaggagagacctgaggaggccagggagctggactcatctgatagggatattagttcagctactgacctccagccagatcaggctgagactgaagatacagaagaagaactagtagatggtttggaagactgttgtagccgtgatgagaatgaagaggaggagggagactcagagtgctcctcattaagtgctgtctcccccagcgaatcggtggccatgatctctagaagctgtatggaaattctgaccaaacccctttccaatcatgagaaagttgtccgaccagccctcatctacagtctctttcccaacgttccccctaccatctattttggcactcgggatgagagagtggagaaacttccctgggaacagaggaagttgctccgatggaagatgagcacagtgacccccaacattgtcaagcagaccattggacggtcccacttcaaaatcagcaaaagaaacgatgactggctgggctgctggggtcaccacatgaagtctcctagtttccgatccattcgagagcatcagaagctaaaccatttcccaggctcattccagattgggaggaaggaccggctatggcggaacctgtcacgtatgcagagccgctttggcaagaaggagttcagtttcttcccccagtcctttatcctgccccaggacgccaagctcctgcgcaaagcgtgggagagcagcagccgccaaaagtggattgtgaagccaccagcatcagctcgaggcattggcatccaggttattcacaagtggagtcagctccccaagcgaaggcccctcctggtacagaggtatctacacaaaccctacctcatcagcggcagcaagtttgacctgcggatctatgtttatgtcacttcctacgatcctctgcggatttacctcttttcagatggactggtccgctttgccagttgcaagtattcgccttccatgaagagccttggcaataagttcatgcacctgaccaactacagtgtcaataaaaagaatgccgagtaccaggccaatgcagatgaaatggcttgccagggccacaaatgggcactgaaggctttgtggaactacctgagccagaagggagtcaatagcgacgccatctgggagaagataaaggatgttgttgtcaaaactatcatctcgtcagagccctatgtgaccagcctgctcaagatgtatgtgcgacggccctatagctgccatgaactctttggttttgacatcatgctagacgaaaacctcaagccctgggtcctggaagtcaacatttccccaagcctccactccagctctccactggatatcagcatcaaaggccagatgattcgtgaccttctgaatctggcaggttttgtcctgcccaatgcagaggatatcatttccagccccagcagctgcagcagctccaccaccagcctgcccacctcccctggggacaaatgtcgaatggctccagagcatgtcactgcacagaagatgaagaaagcctattatctgacccagaaaattcctgatcaggacttctatgcatctgtgctggatgtcctgacaccagatgatgttcggattctggttgagatggaagatgagttttctcgccgtggtcagtttgaacgaatttttccttctcatatctcctctcgctatctccgcttttttgagcagccacgatatttcaacattctcaccacccaatgggaacagaaataccatggcaacaagcttaaaggagtagatctgctccggagttggtgctacaaagggttccacatgggagttgtctctgattctgctccagtgtggtctctcccgacatcacttctgactatctcaaaggatgacgtgatactcaatgccttcagcaaatcagagactagcaagctgggaaaacaaagctcctgtgaggttagcctactactctctgaagacgggaccacgcccaaatccaagaagactcaagctggcctttccccttatccccagaaacccagttcctcaaaggacagtgaggacaccagcaaagagcccagcctttctacccagacgttacctgtgatcaagtgctctgggcagacttcaagactttctgcttcctccactttccagtcaatcagtgactccctcctggctgtgagcccataactggcctctctccaaaagcctctgcccaggagcatgggcatcagctacctcacgggaaccagcctgctgttcagaccagtctgaccccctacccctttcaccctgtccctcctcagagtattttttgaagtggttgcattatagagatgggtatttgtagggccggagggatggtagtgatggggagaaggtgaggaagggtcaccctctgtcacctgtctgcctggctggcacctcatatctcagcagagaagccagtggtggccacgcagccttataaagcaggttttggtttctaccttaagtgagccatgtgtggtttgtctgggggccctggtgtggttgctgagttgtagctcaagaggagaaaacatacagaacatatttggaccggaaatcctttgttctgaatttgagggggtcttctgaggtccttacttccttaggtctttcctcacccctctcccaccgctgtcctgaggagaaacccttgaacttcctcagtagacaggcggagaggccacaacatgccgaacccatttcctgtcatcctagtcttgggtcttcaccgcctccttccaaatacccaccctgccagcagccctaggtcttcctgttctgaccccccatcactgctcgttcagccttctagatgtctctctcgtggacatctgttctttagctgttggctttctctgaggtgtgagagggtctatgaactttgtgaatttcccatggccccagtgaaggagcccagataatcccagtagctgttacctgtctccatgtatcaaaggacacagtccagggggagggtggaaggagatgtggtttctctatagtgcaacaaacatggtttctcaatgttctgctgtgcagcaagcagggtctggcggcttggtaggtgggtttcaggagcagtcactattgtaggatgggcttccaatcaaacctcagactaaactcttgtactgaactgattctacctccctcctctagactcagtaaacagtgactattcaataaa

SEQ ID NO: 195948 - DNA, 747 bp, Homo sapiens
  Payload ID: 18663
  Gene Name: tubulin tyrosine ligase-like family member 4
  ENST ID: ENST00000437755
  CDS Start-End: 225-747
gtgcgcttgtcacgcgtggcggtgcgtggttgctaggggcgcctgaggctgccgggtagcccagcaggccgagggaggaagtagcgtggagccggtgccgagccggggcgaagctggatcccctagactgacagacttcaaggatgcagctgctactaccggaggtgtgtggcaccttacctcagcaaggccatgagaccgtgtggccatgatgtgggcccctcatggcctcagcaggaacacagcactatagtattggcctccgccagaaaaacagcttcaagcagagtggtccctcaggcacagtacctgccacgccacctgagaaaccctcggagggcagagtctggcctcaggcccatcagcaagtgaagccaatctggaagctggaaaagaagcaagtggagacactgtcagcagggttgggcccaggcctcttgggcgtcccaccccagccagcatatttcttttgccccagcactttatgtagctctgggaccacggctgtcattgcaggccacagcagttcctgttacctacactctctcccggacttgttcaacagcaccctgctataccgccgctccagctataggcaaaaaccgtaccagcaactggagtctttctgcttgcgttcgagcccgtcagaaaaaagccctttttctctccctcaaaagagcctccctgtcagtctcactgccaacaaggccacttcttccatggtcttctccatggcccagcccatgg
